United States Patent Application Publication US 2009/0311680 A1 - sequence listing, part 10

SEQ ID NO: 141444 - DNA, 25 bp, Saccharomyces pastorianus
ggttaccaagtatgtggccacgtag

SEQ ID NO: 141445 - DNA, 25 bp, Saccharomyces pastorianus
caggcgtgtttgaccgtatctttaa

SEQ ID NO: 141446 - DNA, 25 bp, Saccharomyces pastorianus
cgatgcgttgaaccaagattccaat

SEQ ID NO: 141447 - DNA, 25 bp, Saccharomyces pastorianus
ggatacaggtgatgatttccccatt

SEQ ID NO: 141448 - DNA, 25 bp, Saccharomyces pastorianus
aggagtttgcttctacttcgaacgg

SEQ ID NO: 141449 - DNA, 25 bp, Saccharomyces pastorianus
tattcccaagatcggcagtgtcatt

SEQ ID NO: 141450 - DNA, 25 bp, Saccharomyces pastorianus
atttccccattttctcgaattgcag

SEQ ID NO: 141451 - DNA, 25 bp, Saccharomyces pastorianus
aagtcgctaattggctcacggtcta

SEQ ID NO: 141452 - DNA, 25 bp, Saccharomyces pastorianus
gattccaatttgtcaggttaccaag

SEQ ID NO: 141453 - DNA, 25 bp, Saccharomyces pastorianus
atgtcagtaaaaacgggagcttcaa

SEQ ID NO: 141454 - DNA, 25 bp, Saccharomyces pastorianus
gggttctactactaatgacttaaag

SEQ ID NO: 141455 - DNA, 25 bp, Saccharomyces pastorianus
gagcttcaaaggtctcgatgatgca

SEQ ID NO: 141456 - DNA, 25 bp, Saccharomyces pastorianus
aacaactcagagtttaatgtcagta

SEQ ID NO: 141457 - DNA, 25 bp, Saccharomyces pastorianus
acggattcgttaatgacgtttgacg

SEQ ID NO: 141458 - DNA, 25 bp, Saccharomyces pastorianus
ttacagagactaatcatggagaatt

SEQ ID NO: 141459 - DNA, 25 bp, Saccharomyces pastorianus
gaatttgaagggttctactactaat

SEQ ID NO: 141460 - DNA, 25 bp, Saccharomyces pastorianus
gcaaacttcaaacaactcagagttt

SEQ ID NO: 141461 - DNA, 25 bp, Saccharomyces pastorianus
tgacgtttgacgattatataagcaa

SEQ ID NO: 141462 - DNA, 25 bp, Saccharomyces pastorianus
gagctacctgaacatttacagagac

SEQ ID NO: 141463 - DNA, 25 bp, Saccharomyces pastorianus
gtgagaatgaatccaccgaaacgga

SEQ ID NO: 141464 - DNA, 25 bp, Saccharomyces pastorianus
gctgtaccttttagcctaagcgcca

SEQ ID NO: 141465 - DNA, 25 bp, Saccharomyces pastorianus
gccaattctcctaaaatcgatcaag

SEQ ID NO: 141466 - DNA, 25 bp, Saccharomyces pastorianus
gtaccttttagcctaagcgccaatt

SEQ ID NO: 141467 - DNA, 25 bp, Saccharomyces pastorianus
tctcctaaaatcgatcaagatatgg

SEQ ID NO: 141468 - DNA, 25 bp, Saccharomyces pastorianus
gtagaatacccgctgtaccttttag

SEQ ID NO: 141469 - DNA, 25 bp, Saccharomyces pastorianus
agcgccaattctcctaaaatcgatc

SEQ ID NO: 141470 - DNA, 25 bp, Saccharomyces pastorianus
tacccgctgtaccttttagcctaag

SEQ ID NO: 141471 - DNA, 25 bp, Saccharomyces pastorianus
accttttagcctaagcgccaattct

SEQ ID NO: 141472 - DNA, 25 bp, Saccharomyces pastorianus
tagcctaagcgccaattctcctaaa

SEQ ID NO: 141473 - DNA, 25 bp, Saccharomyces pastorianus
ctaagcgccaattctcctaaaatcg

SEQ ID NO: 141474 - DNA, 25 bp, Saccharomyces pastorianus
tttggtagaatacccgctgtacctt

SEQ ID NO: 141475 - DNA, 25 bp, Saccharomyces pastorianus
gggcaaattcggcacgacaaataaa

SEQ ID NO: 141476 - DNA, 25 bp, Saccharomyces pastorianus
cggagaatcttctgcgtgataaatt

SEQ ID NO: 141477 - DNA, 25 bp, Saccharomyces pastorianus
atcttctgcgtgataaattcgtacc

SEQ ID NO: 141478 - DNA, 25 bp, Saccharomyces pastorianus
attcggcacgacaaataaatcaacg

SEQ ID NO: 141479 - DNA, 25 bp, Saccharomyces pastorianus
taaattcgtacccgagacatctcca

SEQ ID NO: 141480 - DNA, 25 bp, Saccharomyces pastorianus
caacggagaatcttctgcgtgataa

SEQ ID NO: 141481 - DNA, 25 bp, Saccharomyces pastorianus
gtgataaattcgtacccgagacatc

SEQ ID NO: 141482 - DNA, 25 bp, Saccharomyces pastorianus
ctgcgtgataaattcgtacccgaga

SEQ ID NO: 141483 - DNA, 25 bp, Saccharomyces pastorianus
taaatcaacggagaatcttctgcgt

SEQ ID NO: 141484 - DNA, 25 bp, Saccharomyces pastorianus
ttctgcgtgataaattcgtacccga

SEQ ID NO: 141485 - DNA, 25 bp, Saccharomyces pastorianus
atcaacggagaatcttctgcgtgat

SEQ ID NO: 141486 - DNA, 25 bp, Saccharomyces pastorianus
gggcactttatgagctggagaataa

SEQ ID NO: 141487 - DNA, 25 bp, Saccharomyces pastorianus
acctcgtgaagcgtatttttcattc

SEQ ID NO: 141488 - DNA, 25 bp, Saccharomyces pastorianus
ggcacaagagcattggaaacactta

SEQ ID NO: 141489 - DNA, 25 bp, Saccharomyces pastorianus
ggttagcagatcaggcctttttgaa

SEQ ID NO: 141490 - DNA, 25 bp, Saccharomyces pastorianus
cgctcgttccaacaatggataactt

SEQ ID NO: 141491 - DNA, 25 bp, Saccharomyces pastorianus
gattcgaagaccatctgcatttgta

SEQ ID NO: 141492 - DNA, 25 bp, Saccharomyces pastorianus
gcgtttttgagaagatgtggctgaa

SEQ ID NO: 141493 - DNA, 25 bp, Saccharomyces pastorianus
aaaccggtcatttcaacatagtcaa

SEQ ID NO: 141494 - DNA, 25 bp, Saccharomyces pastorianus
atcagacacttttgaggtgcgtttt

SEQ ID NO: 141495 - DNA, 25 bp, Saccharomyces pastorianus
gaggctaacctcgtgaagcgtattt

SEQ ID NO: 141496 - DNA, 25 bp, Saccharomyces pastorianus
aactcttaaggagcagtcaaggtta

SEQ ID NO: 141497 - DNA, 25 bp, Saccharomyces pastorianus
gttcgcgaagaatttgtgttagtca

SEQ ID NO: 141498 - DNA, 25 bp, Saccharomyces pastorianus
gaatgtaacattcaggctatttcaa

SEQ ID NO: 141499 - DNA, 25 bp, Saccharomyces pastorianus
ctcaaccataccaggctcagaaaga

SEQ ID NO: 141500 - DNA, 25 bp, Saccharomyces pastorianus
cttctagtgttcttgattctacagc

SEQ ID NO: 141501 - DNA, 25 bp, Saccharomyces pastorianus
agatcagactctcaaaacgcctcaa

SEQ ID NO: 141502 - DNA, 25 bp, Saccharomyces pastorianus
gagacagtcgaggtttttcgtcatc

SEQ ID NO: 141503 - DNA, 25 bp, Saccharomyces pastorianus
tttcgtcatcggtgggacagggcca

SEQ ID NO: 141504 - DNA, 25 bp, Saccharomyces pastorianus
ggaaggacttcaatcttaaacatga

SEQ ID NO: 141505 - DNA, 25 bp, Saccharomyces pastorianus
accaagtccggtgaaatcttctagt

SEQ ID NO: 141506 - DNA, 25 bp, Saccharomyces pastorianus
gaagtcgcattatagcagggcaaga

SEQ ID NO: 141507 - DNA, 25 bp, Saccharomyces pastorianus
aagaattagcagacgaagttcgcga

SEQ ID NO: 141508 - DNA, 25 bp, Saccharomyces pastorianus
caaatatcagatttttcactgggcg

SEQ ID NO: 141509 - DNA, 25 bp, Saccharomyces pastorianus
atgatgatggtatcgacgcagaatc

SEQ ID NO: 141510 - DNA, 25 bp, Saccharomyces pastorianus
gattggtaaccaaactctacaaaga

SEQ ID NO: 141511 - DNA, 25 bp, Saccharomyces pastorianus
aagggtcaacctgtgttcgatgcat

SEQ ID NO: 141512 - DNA, 25 bp, Saccharomyces pastorianus
aagaaaagatccattgccggtgatg

SEQ ID NO: 141513 - DNA, 25 bp, Saccharomyces pastorianus
acctgtgttcgatgcatcagacaag

SEQ ID NO: 141514 - DNA, 25 bp, Saccharomyces pastorianus
aggcagttatgtgtttactcgtcaa

SEQ ID NO: 141515 - DNA, 25 bp, Saccharomyces pastorianus
atggtacttcatctatatcttcgaa

SEQ ID NO: 141516 - DNA, 25 bp, Saccharomyces pastorianus
gatgaccttgaaaacgctgaacctc

SEQ ID NO: 141517 - DNA, 25 bp, Saccharomyces pastorianus
ttcactgggcgatatagatgacctt

SEQ ID NO: 141518 - DNA, 25 bp, Saccharomyces pastorianus
gaggatcaaactttagctcaagata

SEQ ID NO: 141519 - DNA, 25 bp, Saccharomyces pastorianus
ccattttagctgttgttgggtcaca

SEQ ID NO: 141520 - DNA, 25 bp, Saccharomyces pastorianus
ctcgatttgcccattttagctgttg

SEQ ID NO: 141521 - DNA, 25 bp, Saccharomyces pastorianus
tgttgggtcacaatcctccgggaaa

SEQ ID NO: 141522 - DNA, 25 bp, Saccharomyces pastorianus
ataacatatctccaaattctcctct

SEQ ID NO: 141523 - DNA, 25 bp, Saccharomyces pastorianus
gataactcagttaatccacatgatg

SEQ ID NO: 141524 - DNA, 25 bp, Saccharomyces pastorianus
atcctccgggaaatcctcgatattg

SEQ ID NO: 141525 - DNA, 25 bp, Saccharomyces pastorianus
agctggtacgaagcccttggagtat

SEQ ID NO: 141526 - DNA, 25 bp, Saccharomyces pastorianus
ttgtcacaagaagaccgttagttct

SEQ ID NO: 141527 - DNA, 25 bp, Saccharomyces pastorianus
gggagttcctgcatataccaggaaa

SEQ ID NO: 141528 - DNA, 25 bp, Saccharomyces pastorianus
atatcaggattcgaagctggtacga

SEQ ID NO: 141529 - DNA, 25 bp, Saccharomyces pastorianus
ttattcctactgtcaacaagctgca

SEQ ID NO: 141530 - DNA, 25 bp, Saccharomyces pastorianus
gtcctctgccaagtcttgaaaacct

SEQ ID NO: 141531 - DNA, 25 bp, Saccharomyces pastorianus
atcattcgagaatgcagccgtcctc

SEQ ID NO: 141532 - DNA, 25 bp, Saccharomyces pastorianus
tgacttgcttttccaaggtaaggaa

SEQ ID NO: 141533 - DNA, 25 bp, Saccharomyces pastorianus
agaatgcagccgtcctctgccaagt

SEQ ID NO: 141534 - DNA, 25 bp, Saccharomyces pastorianus
tgccaagtcttgaaaacctttttga

SEQ ID NO: 141535 - DNA, 25 bp, Saccharomyces pastorianus
aaagttagatatcattcttgatgca

SEQ ID NO: 141536 - DNA, 25 bp, Saccharomyces pastorianus
gaagctactgacttgcttttccaag

SEQ ID NO: 141537 - DNA, 25 bp, Saccharomyces pastorianus
aaaattatagaagctactgacttgc

SEQ ID NO: 141538 - DNA, 25 bp, Saccharomyces pastorianus
gctactgacttgcttttccaaggta

SEQ ID NO: 141539 - DNA, 25 bp, Saccharomyces pastorianus
attcgagaatgcagccgtcctctgc

SEQ ID NO: 141540 - DNA, 25 bp, Saccharomyces pastorianus
gccgtcctctgccaagtcttgaaaa

SEQ ID NO: 141541 - DNA, 25 bp, Saccharomyces pastorianus
gaacatgaagtaatttttgacgcca

SEQ ID NO: 141542 - DNA, 25 bp, Saccharomyces pastorianus
gcacttccagcaagttcaccagaaa

SEQ ID NO: 141543 - DNA, 25 bp, Saccharomyces pastorianus
gaaagccagtatatcgtctcacaac

SEQ ID NO: 141544 - DNA, 25 bp, Saccharomyces pastorianus
gtctcacaacgaaaagcacttccag

SEQ ID NO: 141545 - DNA, 25 bp, Saccharomyces pastorianus
gatggactcgcctatgattttgatg

SEQ ID NO: 141546 - DNA, 25 bp, Saccharomyces pastorianus
cgcctatgattttgatgccgaacat

SEQ ID NO: 141547 - DNA, 25 bp, Saccharomyces pastorianus
atgatttagatgatggactcgccta

SEQ ID NO: 141548 - DNA, 25 bp, Saccharomyces pastorianus
gaagatgattcgaatagacctattt

SEQ ID NO: 141549 - DNA, 25 bp, Saccharomyces pastorianus
gaggtctatagaacaagatgacgtt

SEQ ID NO: 141550 - DNA, 25 bp, Saccharomyces pastorianus
tttgacgccaaggatggtagtcccc

SEQ ID NO: 141551 - DNA, 25 bp, Saccharomyces pastorianus
tattgagtacctaacaactttgata

SEQ ID NO: 141552 - DNA, 25 bp, Saccharomyces pastorianus
atcactggtacttttggtttcgaca

SEQ ID NO: 141553 - DNA, 25 bp, Saccharomyces pastorianus
tataggttgtatcgttcttatcagt

SEQ ID NO: 141554 - DNA, 25 bp, Saccharomyces pastorianus
ggtgccattggtacattttcagtga

SEQ ID NO: 141555 - DNA, 25 bp, Saccharomyces pastorianus
tatcagtttacccttatcccataag

SEQ ID NO: 141556 - DNA, 25 bp, Saccharomyces pastorianus
acttattttctctgtacttgcttta

SEQ ID NO: 141557 - DNA, 25 bp, Saccharomyces pastorianus
gatgtttagggcatactcagctcca

SEQ ID NO: 141558 - DNA, 25 bp, Saccharomyces pastorianus
aatgtctcctgtattattgctccac

SEQ ID NO: 141559 - DNA, 25 bp, Saccharomyces pastorianus
acaactcaaatgttgtcccgctggg

SEQ ID NO: 141560 - DNA, 25 bp, Saccharomyces pastorianus
gttctcaaatttctactggtgccat

SEQ ID NO: 141561 - DNA, 25 bp, Saccharomyces pastorianus
gggtcatatcacactcataaccaca

SEQ ID NO: 141562 - DNA, 25 bp, Saccharomyces pastorianus
tcagtgtgtttgtgttcccctacaa

SEQ ID NO: 141563 - DNA, 25 bp, Saccharomyces pastorianus
gtcacaacgatccatggacgtggag

SEQ ID NO: 141564 - DNA, 25 bp, Saccharomyces pastorianus
aacgatccatggacgtggagaagaa

SEQ ID NO: 141565 - DNA, 25 bp, Saccharomyces pastorianus
tgtcacaacgatccatggacgtgga

SEQ ID NO: 141566 - DNA, 25 bp, Saccharomyces pastorianus
gagaagaaggcagctaacgctgata

SEQ ID NO: 141567 - DNA, 25 bp, Saccharomyces pastorianus
acaacgatccatggacgtggagaag

SEQ ID NO: 141568 - DNA, 25 bp, Saccharomyces pastorianus
atgtcacaacgatccatggacgtgg

SEQ ID NO: 141569 - DNA, 25 bp, Saccharomyces pastorianus
aacatgtcacaacgatccatggacg

SEQ ID NO: 141570 - DNA, 25 bp, Saccharomyces pastorianus
acatgtcacaacgatccatggacgt

SEQ ID NO: 141571 - DNA, 25 bp, Saccharomyces pastorianus
cgtggagaagaaggcagctaacgct

SEQ ID NO: 141572 - DNA, 25 bp, Saccharomyces pastorianus
gaagaaggcagctaacgctgatagt

SEQ ID NO: 141573 - DNA, 25 bp, Saccharomyces pastorianus
tcacaacgatccatggacgtggaga

SEQ ID NO: 141574 - DNA, 25 bp, Saccharomyces pastorianus
aaccctcactcattcaaacaagcga

SEQ ID NO: 141575 - DNA, 25 bp, Saccharomyces pastorianus
aggcgcccgtgattattgtagcatt

SEQ ID NO: 141576 - DNA, 25 bp, Saccharomyces pastorianus
tctcaataactcacactccaatctt

SEQ ID NO: 141577 - DNA, 25 bp, Saccharomyces pastorianus
aaacaagcgacatctatgaccccta

SEQ ID NO: 141578 - DNA, 25 bp, Saccharomyces pastorianus
aaagccggatgaccgacagtgtttt

SEQ ID NO: 141579 - DNA, 25 bp, Saccharomyces pastorianus
ttgtagcattgaccgcatctaactc

SEQ ID NO: 141580 - DNA, 25 bp, Saccharomyces pastorianus
aaagagattctctcaggcgcccgtg

SEQ ID NO: 141581 - DNA, 25 bp, Saccharomyces pastorianus
agctgcctgtcttgtcttttataga

SEQ ID NO: 141582 - DNA, 25 bp, Saccharomyces pastorianus
atctccacagaaacctattgcacct

SEQ ID NO: 141583 - DNA, 25 bp, Saccharomyces pastorianus
gtaacgactacctgactaaaccagt

SEQ ID NO: 141584 - DNA, 25 bp, Saccharomyces pastorianus
aaagcacttctttctggttgtaacg

SEQ ID NO: 141585 - DNA, 25 bp, Saccharomyces pastorianus
atgaagactgtctattacaaagaaa

SEQ ID NO: 141586 - DNA, 25 bp, Saccharomyces pastorianus
aagaagttgcttggttcgatcgcgt

SEQ ID NO: 141587 - DNA, 25 bp, Saccharomyces pastorianus
aaagaattgcatttgatcgtcaagg

SEQ ID NO: 141588 - DNA, 25 bp, Saccharomyces pastorianus
tacaaagaaatcacctaccagcagt

SEQ ID NO: 141589 - DNA, 25 bp, Saccharomyces pastorianus
gatcgcgttacaacatggtcatata

SEQ ID NO: 141590 - DNA, 25 bp, Saccharomyces pastorianus
aatcacctaccagcagtatcttcaa

SEQ ID NO: 141591 - DNA, 25 bp, Saccharomyces pastorianus
gaatgcttatattccgagctacaga

SEQ ID NO: 141592 - DNA, 25 bp, Saccharomyces pastorianus
gtatcttcaactgcaacctgaacaa

SEQ ID NO: 141593 - DNA, 25 bp, Saccharomyces pastorianus
gcttggttcgatcgcgttacaacat

SEQ ID NO: 141594 - DNA, 25 bp, Saccharomyces pastorianus
ggaaaaatacctggctttatgtcaa

SEQ ID NO: 141595 - DNA, 25 bp, Saccharomyces pastorianus
tgtgcctggtattgctaggaaattt

SEQ ID NO: 141596 - DNA, 25 bp, Saccharomyces pastorianus
tcaggcaaaccgcatgtcaagttat

SEQ ID NO: 141597 - DNA, 25 bp, Saccharomyces pastorianus
ttgtcaggtctggtaacggaaacga

SEQ ID NO: 141598 - DNA, 25 bp, Saccharomyces pastorianus
aagcaccttttgatatacctctaga

SEQ ID NO: 141599 - DNA, 25 bp, Saccharomyces pastorianus
aggcgagtcttcttacgatatcagt

SEQ ID NO: 141600 - DNA, 25 bp, Saccharomyces pastorianus
ggttacttcgggatctgtatgggat

SEQ ID NO: 141601 - DNA, 25 bp, Saccharomyces pastorianus
gtgcttctacaaatacgtcttctgc

SEQ ID NO: 141602 - DNA, 25 bp, Saccharomyces pastorianus
ttgcgaatctgcgaaaacctgttac

SEQ ID NO: 141603 - DNA, 25 bp, Saccharomyces pastorianus
tttgacgacggtacttttgataaca

SEQ ID NO: 141604 - DNA, 25 bp, Saccharomyces pastorianus
gcattgaattgccagtcgtatacca

SEQ ID NO: 141605 - DNA, 25 bp, Saccharomyces pastorianus
acacagcaatgtttcccagtttaat

SEQ ID NO: 141606 - DNA, 25 bp, Saccharomyces pastorianus
gatatccttttccaggttacttcgg

SEQ ID NO: 141607 - DNA, 25 bp, Saccharomyces pastorianus
gacaggcataaatagcgcgttcgaa

SEQ ID NO: 141608 - DNA, 25 bp, Saccharomyces pastorianus
tgatccattggaactaccacctcga

SEQ ID NO: 141609 - DNA, 25 bp, Saccharomyces pastorianus
aaaaagtcaacatgcgtccgatagt

SEQ ID NO: 141610 - DNA, 25 bp, Saccharomyces pastorianus
agattgacgtatgctcttccgagga

SEQ ID NO: 141611 - DNA, 25 bp, Saccharomyces pastorianus
gattcatcgggtatttcctttgcga

SEQ ID NO: 141612 - DNA, 25 bp, Saccharomyces pastorianus
tgcgaaattagtcttcacggcaact

SEQ ID NO: 141613 - DNA, 25 bp, Saccharomyces pastorianus
ggtccctggaatcccaatattgcat

SEQ ID NO: 141614 - DNA, 25 bp, Saccharomyces pastorianus
ttaccagtgcttttagtgcgcatac

SEQ ID NO: 141615 - DNA, 25 bp, Saccharomyces pastorianus
gaacctatttatggtccctggaatc

SEQ ID NO: 141616 - DNA, 25 bp, Saccharomyces pastorianus
gatactaattcccagttacctttgc

SEQ ID NO: 141617 - DNA, 25 bp, Saccharomyces pastorianus
acaggcagccctatgacttcagatg

SEQ ID NO: 141618 - DNA, 25 bp, Saccharomyces pastorianus
gcaacatgctgttccgatatcttct

SEQ ID NO: 141619 - DNA, 25 bp, Saccharomyces pastorianus
atcatcttagataattcgccggcct

SEQ ID NO: 141620 - DNA, 25 bp, Saccharomyces pastorianus
tgacgcatttgcaaccagaccagta

SEQ ID NO: 141621 - DNA, 25 bp, Saccharomyces pastorianus
atcccacttttggaggacctttcat

SEQ ID NO: 141622 - DNA, 25 bp, Saccharomyces pastorianus
gccaggcgtcgatgagttcttgaac

SEQ ID NO: 141623 - DNA, 25 bp, Saccharomyces pastorianus
gcattcagctgatttcgttttgccc

SEQ ID NO: 141624 - DNA, 25 bp, Saccharomyces pastorianus
gttggaccctaatggaaccatccat

SEQ ID NO: 141625 - DNA, 25 bp, Saccharomyces pastorianus
atacgaagttgttgtgttcacggca

SEQ ID NO: 141626 - DNA, 25 bp, Saccharomyces pastorianus
ttacatctttcatccgcaacatgct

SEQ ID NO: 141627 - DNA, 25 bp, Saccharomyces pastorianus
tcttcttggttctctgatactcatg

SEQ ID NO: 141628 - DNA, 25 bp, Saccharomyces pastorianus
acggaggaggacttctctgacctga

SEQ ID NO: 141629 - DNA, 25 bp, Saccharomyces pastorianus
gatcgtttatacctcttatgatgac

SEQ ID NO: 141630 - DNA, 25 bp, Saccharomyces pastorianus
caaaaggtattgattctccgtggta

SEQ ID NO: 141631 - DNA, 25 bp, Saccharomyces pastorianus
aagacatggtttcctattgccaaga

SEQ ID NO: 141632 - DNA, 25 bp, Saccharomyces pastorianus
aaatttcttattttcaccagtccat

SEQ ID NO: 141633 - DNA, 25 bp, Saccharomyces pastorianus
aatgcaatggtggttgtcacctctt

SEQ ID NO: 141634 - DNA, 25 bp, Saccharomyces pastorianus
tgattctccgtggtactttggtaga

SEQ ID NO: 141635 - DNA, 25 bp, Saccharomyces pastorianus
tacctatttgattggaacgatgtct

SEQ ID NO: 141636 - DNA, 25 bp, Saccharomyces pastorianus
ttcgttcctctcatacatcatgttt

SEQ ID NO: 141637 - DNA, 25 bp, Saccharomyces pastorianus
aagattttttcgttcctctcataca

SEQ ID NO: 141638 - DNA, 25 bp, Saccharomyces pastorianus
gttgtcacctcttcctaataagcta

SEQ ID NO: 141639 - DNA, 25 bp, Saccharomyces pastorianus
accagtccatatttccgtcaaacta

SEQ ID NO: 141640 - DNA, 25 bp, Saccharomyces pastorianus
tcactacctagtgttccaagtaata

SEQ ID NO: 141641 - DNA, 25 bp, Saccharomyces pastorianus
atgcggcgcctatctcagagaacaa

SEQ ID NO: 141642 - DNA, 25 bp, Saccharomyces pastorianus
atgaagatgagctggacgaggaatt

SEQ ID NO: 141643 - DNA, 25 bp, Saccharomyces pastorianus
taataatgttaatgcggcgcctatc

SEQ ID NO: 141644 - DNA, 25 bp, Saccharomyces pastorianus
ctatgcaggaaggtgctaaggcaat

SEQ ID NO: 141645 - DNA, 25 bp, Saccharomyces pastorianus
gacgctatatccaggcctttaatta

SEQ ID NO: 141646 - DNA, 25 bp, Saccharomyces pastorianus
cgaggaattggacatgctggctcaa

SEQ ID NO: 141647 - DNA, 25 bp, Saccharomyces pastorianus
ataagcgacgctatatccaggcctt

SEQ ID NO: 141648 - DNA, 25 bp, Saccharomyces pastorianus
gaaaactattcacagtggccttgac

SEQ ID NO: 141649 - DNA, 25 bp, Saccharomyces pastorianus
gagaacaaagtctcactacctagtg

SEQ ID NO: 141650 - DNA, 25 bp, Saccharomyces pastorianus
ttcacagtggccttgacatagataa

SEQ ID NO: 141651 - DNA, 25 bp, Saccharomyces pastorianus
aaagcaatcgcatttacgtactcaa

SEQ ID NO: 141652 - DNA, 25 bp, Saccharomyces pastorianus
catagtgcggttgagggagcatatc

SEQ ID NO: 141653 - DNA, 25 bp, Saccharomyces pastorianus
aagagtcaccaacaaaggccatagt

SEQ ID NO: 141654 - DNA, 25 bp, Saccharomyces pastorianus
gcaatcgcatttacgtactcaaatt

SEQ ID NO: 141655 - DNA, 25 bp, Saccharomyces pastorianus
aacaaaggccatagtgcggttgagg

SEQ ID NO: 141656 - DNA, 25 bp, Saccharomyces pastorianus
gggcaataaagtaatggcgaagaat

SEQ ID NO: 141657 - DNA, 25 bp, Saccharomyces pastorianus
gcatttacgtactcaaattacaaat

SEQ ID NO: 141658 - DNA, 25 bp, Saccharomyces pastorianus
ttctatccaaaaagcaatcgcattt

SEQ ID NO: 141659 - DNA, 25 bp, Saccharomyces pastorianus
gtcaccaacaaaggccatagtgcgg

SEQ ID NO: 141660 - DNA, 25 bp, Saccharomyces pastorianus
gtaatgccaagaataaagagtcacc

SEQ ID NO: 141661 - DNA, 25 bp, Saccharomyces pastorianus
gtaatggcgaagaatgcacttaaaa

SEQ ID NO: 141662 - DNA, 25 bp, Saccharomyces pastorianus
ggacaaagttgtcttccaagcggcg

SEQ ID NO: 141663 - DNA, 25 bp, Saccharomyces pastorianus
acaaagttgtcttccaagcggcgga

SEQ ID NO: 141664 - DNA, 25 bp, Saccharomyces pastorianus
agcggcggattcatttgatatcgtc

SEQ ID NO: 141665 - DNA, 25 bp, Saccharomyces pastorianus
caaagttgtcttccaagcggcggat

SEQ ID NO: 141666 - DNA, 25 bp, Saccharomyces pastorianus
aaagttgtcttccaagcggcggatt

SEQ ID NO: 141667 - DNA, 25 bp, Saccharomyces pastorianus
gcggcggattcatttgatatcgtct

SEQ ID NO: 141668 - DNA, 25 bp, Saccharomyces pastorianus
ggcggattcatttgatatcgtctac

SEQ ID NO: 141669 - DNA, 25 bp, Saccharomyces pastorianus
aagttgtcttccaagcggcggattc

SEQ ID NO: 141670 - DNA, 25 bp, Saccharomyces pastorianus
agttgtcttccaagcggcggattca

SEQ ID NO: 141671 - DNA, 25 bp, Saccharomyces pastorianus
cggcggattcatttgatatcgtcta

SEQ ID NO: 141672 - DNA, 25 bp, Saccharomyces pastorianus
gacaaagttgtcttccaagcggcgg

SEQ ID NO: 141673 - DNA, 25 bp, Saccharomyces pastorianus
gttcaagcacgtttctccagcaggt

SEQ ID NO: 141674 - DNA, 25 bp, Saccharomyces pastorianus
aagtgctctgcggtacaccaggata

SEQ ID NO: 141675 - DNA, 25 bp, Saccharomyces pastorianus
atgcgcatacgctagggcccgtggt

SEQ ID NO: 141676 - DNA, 25 bp, Saccharomyces pastorianus
gtcatcctttggtgatttcattgca

SEQ ID NO: 141677 - DNA, 25 bp, Saccharomyces pastorianus
gtgggacttccattatccgatgtgg

SEQ ID NO: 141678 - DNA, 25 bp, Saccharomyces pastorianus
tatgatgcggccatttctgactttt

SEQ ID NO: 141679 - DNA, 25 bp, Saccharomyces pastorianus
gggaaagcccaattaccgctaagat

SEQ ID NO: 141680 - DNA, 25 bp, Saccharomyces pastorianus
gaggagttgcccttcaaagtgctct

SEQ ID NO: 141681 - DNA, 25 bp, Saccharomyces pastorianus
gatatggttgtaatccccaccaaag

SEQ ID NO: 141682 - DNA, 25 bp, Saccharomyces pastorianus
agcaggtgctgctgtgggacttcca

SEQ ID NO: 141683 - DNA, 25 bp, Saccharomyces pastorianus
taaggcgtttgaacatacggccgat

SEQ ID NO: 141684 - DNA, 25 bp, Saccharomyces pastorianus
ttccaattaatacgcttactcaagg

SEQ ID NO: 141685 - DNA, 25 bp, Saccharomyces pastorianus
atgtgtttccaattaatacgcttac

SEQ ID NO: 141686 - DNA, 25 bp, Saccharomyces pastorianus
attagacagagaaaacaacacacaa

SEQ ID NO: 141687 - DNA, 25 bp, Saccharomyces pastorianus
tgtgtttccaattaatacgcttact

SEQ ID NO: 141688 - DNA, 25 bp, Saccharomyces pastorianus
caattaatacgcttactcaaggaat

SEQ ID NO: 141689 - DNA, 25 bp, Saccharomyces pastorianus
acgcttactcaaggaattagacaga

SEQ ID NO: 141690 - DNA, 25 bp, Saccharomyces pastorianus
gtttccaattaatacgcttactcaa

SEQ ID NO: 141691 - DNA, 25 bp, Saccharomyces pastorianus
gtgtttccaattaatacgcttactc

SEQ ID NO: 141692 - DNA, 25 bp, Saccharomyces pastorianus
ttaatacgcttactcaaggaattag

SEQ ID NO: 141693 - DNA, 25 bp, Saccharomyces pastorianus
gaattagacagagaaaacaacacac

SEQ ID NO: 141694 - DNA, 25 bp, Saccharomyces pastorianus
atacgcttactcaaggaattagaca

SEQ ID NO: 141695 - DNA, 25 bp, Saccharomyces pastorianus
attacgtcgtatactctttggaaga

SEQ ID NO: 141696 - DNA, 25 bp, Saccharomyces pastorianus
aaaagccactagtttccattccaat

SEQ ID NO: 141697 - DNA, 25 bp, Saccharomyces pastorianus
tgacaacaccgatcctgagcataat

SEQ ID NO: 141698 - DNA, 25 bp, Saccharomyces pastorianus
tagttcaaggccataattacgtcgt

SEQ ID NO: 141699 - DNA, 25 bp, Saccharomyces pastorianus
tactgcgaagcgactctttggatga

SEQ ID NO: 141700 - DNA, 25 bp, Saccharomyces pastorianus
gggctggcaaaccttaactttgttg

SEQ ID NO: 141701 - DNA, 25 bp, Saccharomyces pastorianus
atttgtatccaatatcaaccacccc

SEQ ID NO: 141702 - DNA, 25 bp, Saccharomyces pastorianus
tcactgcatttttaacgcgcgattt

SEQ ID NO: 141703 - DNA, 25 bp, Saccharomyces pastorianus
aacgcgcgattttccaaattggtgg

SEQ ID NO: 141704 - DNA, 25 bp, Saccharomyces pastorianus
aaacaccaaatatacctcgaccaat

SEQ ID NO: 141705 - DNA, 25 bp, Saccharomyces pastorianus
aacagctacaacacatacacttcac

SEQ ID NO: 141706 - DNA, 25 bp, Saccharomyces pastorianus
gggagatgatctacattttaagaaa

SEQ ID NO: 141707 - DNA, 25 bp, Saccharomyces pastorianus
gctaaaatgcttggcgtacttctgt

SEQ ID NO: 141708 - DNA, 25 bp, Saccharomyces pastorianus
ctgttagtgtttttaaattacgatg

SEQ ID NO: 141709 - DNA, 25 bp, Saccharomyces pastorianus
ttagcactctgtatcgaagaaaatg

SEQ ID NO: 141710 - DNA, 25 bp, Saccharomyces pastorianus
gaaagatttgggagatgatctacat

SEQ ID NO: 141711 - DNA, 25 bp, Saccharomyces pastorianus
gagatttattagcactctgtatcga

SEQ ID NO: 141712 - DNA, 25 bp, Saccharomyces pastorianus
ctgtatcgaagaaaatgaggctaaa

SEQ ID NO: 141713 - DNA, 25 bp, Saccharomyces pastorianus
ttattagcactctgtatcgaagaaa

SEQ ID NO: 141714 - DNA, 25 bp, Saccharomyces pastorianus
tgaggctaaaatgcttggcgtactt

SEQ ID NO: 141715 - DNA, 25 bp, Saccharomyces pastorianus
gatttattagcactctgtatcgaag

SEQ ID NO: 141716 - DNA, 25 bp, Saccharomyces pastorianus
aggctaaaatgcttggcgtacttct

SEQ ID NO: 141717 - DNA, 25 bp, Saccharomyces pastorianus
gcaccgcgtaaactctcttaacata

SEQ ID NO: 141718 - DNA, 25 bp, Saccharomyces pastorianus
aaagttataaacgtgccgctgcagt

SEQ ID NO: 141719 - DNA, 25 bp, Saccharomyces pastorianus
ggaagcgcagtctaaattgaacgaa

SEQ ID NO: 141720 - DNA, 25 bp, Saccharomyces pastorianus
agctgtctgatagagtactgtcact

SEQ ID NO: 141721 - DNA, 25 bp, Saccharomyces pastorianus
tcttccaccgtgtcaagcaactatg

SEQ ID NO: 141722 - DNA, 25 bp, Saccharomyces pastorianus
tacgatttcatcatactccatacct

SEQ ID NO: 141723 - DNA, 25 bp, Saccharomyces pastorianus
gctgcagtgacatctaccctaaagg

SEQ ID NO: 141724 - DNA, 25 bp, Saccharomyces pastorianus
agcagtgtctccgacgatttggata

SEQ ID NO: 141725 - DNA, 25 bp, Saccharomyces pastorianus
cttccgctttgccatttaaggagga

SEQ ID NO: 141726 - DNA, 25 bp, Saccharomyces pastorianus
taaaatctttatcttccgctttgcc

SEQ ID NO: 141727 - DNA, 25 bp, Saccharomyces pastorianus
aagatcaagcgagtccatcggcgac

SEQ ID NO: 141728 - DNA, 25 bp, Saccharomyces pastorianus
tcattgctcaatcggtgcttctatt

SEQ ID NO: 141729 - DNA, 25 bp, Saccharomyces pastorianus
ctcgatttcgactttcattgctcaa

SEQ ID NO: 141730 - DNA, 25 bp, Saccharomyces pastorianus
tggacacattttcctttcgttttag

SEQ ID NO: 141731 - DNA, 25 bp, Saccharomyces pastorianus
tgcccgcggtttgatgtggacacat

SEQ ID NO: 141732 - DNA, 25 bp, Saccharomyces pastorianus
acatgattgggcgtgtcctacaggc

SEQ ID NO: 141733 - DNA, 25 bp, Saccharomyces pastorianus
gtacagtttctttcgtagtggcaga

SEQ ID NO: 141734 - DNA, 25 bp, Saccharomyces pastorianus
atactgggcgtatcctaattattgt

SEQ ID NO: 141735 - DNA, 25 bp, Saccharomyces pastorianus
ggcacgtctaattcttatggaggca

SEQ ID NO: 141736 - DNA, 25 bp, Saccharomyces pastorianus
atagtctttatcaatagcccctcga

SEQ ID NO: 141737 - DNA, 25 bp, Saccharomyces pastorianus
attgatagcaccttcactttacgcc

SEQ ID NO: 141738 - DNA, 25 bp, Saccharomyces pastorianus
aggtgggttgttatcctcatggaac

SEQ ID NO: 141739 - DNA, 25 bp, Saccharomyces pastorianus
atccttgtttagaggcggcgcctaa

SEQ ID NO: 141740 - DNA, 25 bp, Saccharomyces pastorianus
gatggaaatccccaacctacggagc

SEQ ID NO: 141741 - DNA, 25 bp, Saccharomyces pastorianus
ggatcgagcgttttcagacaaccaa

SEQ ID NO: 141742 - DNA, 25 bp, Saccharomyces pastorianus
aagatcaggattcccgcaggtgtta

SEQ ID NO: 141743 - DNA, 25 bp, Saccharomyces pastorianus
taaagtgttctttggcaggcctaca

SEQ ID NO: 141744 - DNA, 25 bp, Saccharomyces pastorianus
acaagtatgggttctcgctgcaggc

SEQ ID NO: 141745 - DNA, 25 bp, Saccharomyces pastorianus
ggagcccaatgagaacacagccctt

SEQ ID NO: 141746 - DNA, 25 bp, Saccharomyces pastorianus
tcaggagtatttcttcgagcggccg

SEQ ID NO: 141747 - DNA, 25 bp, Saccharomyces pastorianus
ggaactctaactacacattcttcgt

SEQ ID NO: 141748 - DNA, 25 bp, Saccharomyces pastorianus
aaagatcattgagccacctgcccaa

SEQ ID NO: 141749 - DNA, 25 bp, Saccharomyces pastorianus
tcgagcggccgagtttcagaactgg

SEQ ID NO: 141750 - DNA, 25 bp, Saccharomyces pastorianus
gtatcacaaacagtcactacaacta

SEQ ID NO: 141751 - DNA, 25 bp, Saccharomyces pastorianus
ttcaacagaagatcatgggttcaca

SEQ ID NO: 141752 - DNA, 25 bp, Saccharomyces pastorianus
gtatgtatcacaaacagtcactaca

SEQ ID NO: 141753 - DNA, 25 bp, Saccharomyces pastorianus
tcacaaacagtcactacaactatgt

SEQ ID NO: 141754 - DNA, 25 bp, Saccharomyces pastorianus
acacgtatgtatcacaaacagtcac

SEQ ID NO: 141755 - DNA, 25 bp, Saccharomyces pastorianus
aaacagtcactacaactatgtttaa

SEQ ID NO: 141756 - DNA, 25 bp, Saccharomyces pastorianus
gatcatgggttcacaaaacacgtat

SEQ ID NO: 141757 - DNA, 25 bp, Saccharomyces pastorianus
catgggttcacaaaacacgtatgta

SEQ ID NO: 141758 - DNA, 25 bp, Saccharomyces pastorianus
gaagatcatgggttcacaaaacacg

SEQ ID NO: 141759 - DNA, 25 bp, Saccharomyces pastorianus
gggttcacaaaacacgtatgtatca

SEQ ID NO: 141760 - DNA, 25 bp, Saccharomyces pastorianus
acagaagatcatgggttcacaaaac

SEQ ID NO: 141761 - DNA, 25 bp, Saccharomyces pastorianus
gcattttagaactttaagagtccgc

SEQ ID NO: 141762 - DNA, 25 bp, Saccharomyces pastorianus
gagtccgcaaatattctcagatatg

SEQ ID NO: 141763 - DNA, 25 bp, Saccharomyces pastorianus
atatgtgttattatacccttaatga

SEQ ID NO: 141764 - DNA, 25 bp, Saccharomyces pastorianus
gcaaatattctcagatatgtctttt

SEQ ID NO: 141765 - DNA, 25 bp, Saccharomyces pastorianus
gtccgcaaatattctcagatatgtc

SEQ ID NO: 141766 - DNA, 25 bp, Saccharomyces pastorianus
aagcatcatgtttcaacagaagatc

SEQ ID NO: 141767 - DNA, 25 bp, Saccharomyces pastorianus
gctaactgacaaattcttcaaaata

SEQ ID NO: 141768 - DNA, 25 bp, Saccharomyces pastorianus
tacccttaatgaattatttgttgct

SEQ ID NO: 141769 - DNA, 25 bp, Saccharomyces pastorianus
tgttgctaactgacaaattcttcaa

SEQ ID NO: 141770 - DNA, 25 bp, Saccharomyces pastorianus
gaactttaagagtccgcaaatattc

SEQ ID NO: 141771 - DNA, 25 bp, Saccharomyces pastorianus
gtcaccatttaaagcatcatgtttc

SEQ ID NO: 141772 - DNA, 25 bp, Saccharomyces pastorianus
gcgtaaatacaacgaatttcaggag

SEQ ID NO: 141773 - DNA, 25 bp, Saccharomyces pastorianus
gggtgatgaagcttctaataagtat

SEQ ID NO: 141774 - DNA, 25 bp, Saccharomyces pastorianus
atttcaggagaaatctacgagcggt

SEQ ID NO: 141775 - DNA, 25 bp, Saccharomyces pastorianus
cagagaggtttcaatggtccatatt

SEQ ID NO: 141776 - DNA, 25 bp, Saccharomyces pastorianus
atggtccatattgaagcaggatgat

SEQ ID NO: 141777 - DNA, 25 bp, Saccharomyces pastorianus
gactattttggaaacactcatgggt

SEQ ID NO: 141778 - DNA, 25 bp, Saccharomyces pastorianus
gaaagtcgactattttggaaacact

SEQ ID NO: 141779 - DNA, 25 bp, Saccharomyces pastorianus
tacgagcggtaggaaggcacattac

SEQ ID NO: 141780 - DNA, 25 bp, Saccharomyces pastorianus
gaagcaggatgattttatatatcgt

SEQ ID NO: 141781 - DNA, 25 bp, Saccharomyces pastorianus
ttatatatcgtaatgacaggaagga

SEQ ID NO: 141782 - DNA, 25 bp, Saccharomyces pastorianus
cactcatgggtgatgaagcttctaa

SEQ ID NO: 141783 - DNA, 25 bp, Saccharomyces pastorianus
gataacatgcgtcgtgaagttcaac

SEQ ID NO: 141784 - DNA, 25 bp, Saccharomyces pastorianus
gaagaacgtcttgcctagtgtggag

SEQ ID NO: 141785 - DNA, 25 bp, Saccharomyces pastorianus
ggtttaccttaccaaagccagatga

SEQ ID NO: 141786 - DNA, 25 bp, Saccharomyces pastorianus
gaagttcaacgagatttattgctga

SEQ ID NO: 141787 - DNA, 25 bp, Saccharomyces pastorianus
gatcgaaactaaccttaagaagctt

SEQ ID NO: 141788 - DNA, 25 bp, Saccharomyces pastorianus
aggaacaagtttctcttcaacaaga

SEQ ID NO: 141789 - DNA, 25 bp, Saccharomyces pastorianus
catagagctgctcttgatccaaaga

SEQ ID NO: 141790 - DNA, 25 bp, Saccharomyces pastorianus
aagagatgctagtgccagtctagaa

SEQ ID NO: 141791 - DNA, 25 bp, Saccharomyces pastorianus
gtggaagacttatttggagcactaa

SEQ ID NO: 141792 - DNA, 25 bp, Saccharomyces pastorianus
agaaaccggatttgatgctttagca

SEQ ID NO: 141793 - DNA, 25 bp, Saccharomyces pastorianus
gataatgactggtttaccttaccaa

SEQ ID NO: 141794 - DNA, 25 bp, Saccharomyces pastorianus
ggtttttgcaatccatctcgtacca

SEQ ID NO: 141795 - DNA, 25 bp, Saccharomyces pastorianus
aatacctatcaaacaatcctgccgt

SEQ ID NO: 141796 - DNA, 25 bp, Saccharomyces pastorianus
tccatcctgtagacgggtttttgca

SEQ ID NO: 141797 - DNA, 25 bp, Saccharomyces pastorianus
acggtcaattcaccactctgtggga

SEQ ID NO: 141798 - DNA, 25 bp, Saccharomyces pastorianus
gattctgttcacttttgttaacttt

SEQ ID NO: 141799 - DNA, 25 bp, Saccharomyces pastorianus
atctcattctttccatcctgtagac

SEQ ID NO: 141800 - DNA, 25 bp, Saccharomyces pastorianus
ctttttcactgattgcggtgtgtat

SEQ ID NO: 141801 - DNA, 25 bp, Saccharomyces pastorianus
tgctaaggagacctgggacgctcaa

SEQ ID NO: 141802 - DNA, 25 bp, Saccharomyces pastorianus
aaccacggtgtaaggaagctcatta

SEQ ID NO: 141803 - DNA, 25 bp, Saccharomyces pastorianus
agcgcacagatggttgcattggcca

SEQ ID NO: 141804 - DNA, 25 bp, Saccharomyces pastorianus
ggactgttatgattcatgacggtca

SEQ ID NO: 141805 - DNA, 25 bp, Saccharomyces pastorianus
gcccgcttcgttggcagctaatatt

SEQ ID NO: 141806 - DNA, 25 bp, Saccharomyces pastorianus
gacgacgtcttttgcatcgctattg

SEQ ID NO: 141807 - DNA, 25 bp, Saccharomyces pastorianus
gtgggttcagcaattctacgatttt

SEQ ID NO: 141808 - DNA, 25 bp, Saccharomyces pastorianus
ggcagtcagtgctatcccatggatg

SEQ ID NO: 141809 - DNA, 25 bp, Saccharomyces pastorianus
gcctcgttccagcatcttgagagaa

SEQ ID NO: 141810 - DNA, 25 bp, Saccharomyces pastorianus
acttattcacggctagtctcagcta

SEQ ID NO: 141811 - DNA, 25 bp, Saccharomyces pastorianus
gaactccaagaatgccgtcaaagaa

SEQ ID NO: 141812 - DNA, 25 bp, Saccharomyces pastorianus
agtctcagctacgtgtttgtgtttg

SEQ ID NO: 141813 - DNA, 25 bp, Saccharomyces pastorianus
agaattcctctcactatgggttatt

SEQ ID NO: 141814 - DNA, 25 bp, Saccharomyces pastorianus
ttgtacgctaaagttctgcccgctt

SEQ ID NO: 141815 - DNA, 25 bp, Saccharomyces pastorianus
aggtgccattcctgtttgatatgtc

SEQ ID NO: 141816 - DNA, 25 bp, Saccharomyces pastorianus
attgatgtgaacgatctaagatcca

SEQ ID NO: 141817 - DNA, 25 bp, Saccharomyces pastorianus
ctaagatccaagtattctatctggg

SEQ ID NO: 141818 - DNA, 25 bp, Saccharomyces pastorianus
gatttggttttcaagttacactgga

SEQ ID NO: 141819 - DNA, 25 bp, Saccharomyces pastorianus
ttcgaaggcaaggatttggttttca

SEQ ID NO: 141820 - DNA, 25 bp, Saccharomyces pastorianus
aaggatgatgctgtgattgatgtga

SEQ ID NO: 141821 - DNA, 25 bp, Saccharomyces pastorianus
acaagtgaggtaacattttgggata

SEQ ID NO: 141822 - DNA, 25 bp, Saccharomyces pastorianus
acactggaatgttcaaccatgggta

SEQ ID NO: 141823 - DNA, 25 bp, Saccharomyces pastorianus
aactgctgagtataacagtactgaa

SEQ ID NO: 141824 - DNA, 25 bp, Saccharomyces pastorianus
caaccatgggtaggtttgctaactt

SEQ ID NO: 141825 - DNA, 25 bp, Saccharomyces pastorianus
acttacggtgaaactgtaggcaact

SEQ ID NO: 141826 - DNA, 25 bp, Saccharomyces pastorianus
gcaagtttttgtctatctaactgct

SEQ ID NO: 141827 - DNA, 25 bp, Saccharomyces pastorianus
atcgaaccaggccttttcaatggga

SEQ ID NO: 141828 - DNA, 25 bp, Saccharomyces pastorianus
tcatggcatcctcatactatcaatt

SEQ ID NO: 141829 - DNA, 25 bp, Saccharomyces pastorianus
gtaatggttgtattcatcatggcat

SEQ ID NO: 141830 - DNA, 25 bp, Saccharomyces pastorianus
caggccttttcaatgggaattgtaa

SEQ ID NO: 141831 - DNA, 25 bp, Saccharomyces pastorianus
aatgtatcgaaccaggccttttcaa

SEQ ID NO: 141832 - DNA, 25 bp, Saccharomyces pastorianus
aagattccagaatgtatcgaaccag

SEQ ID NO: 141833 - DNA, 25 bp, Saccharomyces pastorianus
tccagaatgtatcgaaccaggcctt

SEQ ID NO: 141834 - DNA, 25 bp, Saccharomyces pastorianus
ttcatcatggcatcctcatactatc

SEQ ID NO: 141835 - DNA, 25 bp, Saccharomyces pastorianus
gaaccaggccttttcaatgggaatt

SEQ ID NO: 141836 - DNA, 25 bp, Saccharomyces pastorianus
ggcatcctcatactatcaattaatc

SEQ ID NO: 141837 - DNA, 25 bp, Saccharomyces pastorianus
tcaattaatcaataataacgcgttc

SEQ ID NO: 141838 - DNA, 25 bp, Saccharomyces pastorianus
gctgtttccgatactgtcaaggtga

SEQ ID NO: 141839 - DNA, 25 bp, Saccharomyces pastorianus
aaggtgattatagtgactccatcga

SEQ ID NO: 141840 - DNA, 25 bp, Saccharomyces pastorianus
cccatctcgatcattccaacaaaag

SEQ ID NO: 141841 - DNA, 25 bp, Saccharomyces pastorianus
gaaaactctcgcttaaaccattgat

SEQ ID NO: 141842 - DNA, 25 bp, Saccharomyces pastorianus
gctagtctctagcagaaaactctcg

SEQ ID NO: 141843 - DNA, 25 bp, Saccharomyces pastorianus
aaggatgctgtcgaggcattcgaag

SEQ ID NO: 141844 - DNA, 25 bp, Saccharomyces pastorianus
gattacacatcgctatagctttaag

SEQ ID NO: 141845 - DNA, 25 bp, Saccharomyces pastorianus
aactgacattccaaggctgtttccg

SEQ ID NO: 141846 - DNA, 25 bp, Saccharomyces pastorianus
aatacaatttcccatctcgatcatt

SEQ ID NO: 141847 - DNA, 25 bp, Saccharomyces pastorianus
ttcgaagaaacaagccaccacccgt

SEQ ID NO: 141848 - DNA, 25 bp, Saccharomyces pastorianus
agtgactccatcgagctagtctcta

SEQ ID NO: 141849 - DNA, 25 bp, Saccharomyces pastorianus
tggtgaagtcaaggacgacggtgct

SEQ ID NO: 141850 - DNA, 25 bp, Saccharomyces pastorianus
gagcagatacaagtcccggtcaacg

SEQ ID NO: 141851 - DNA, 25 bp, Saccharomyces pastorianus
cgaagattatttgtctagaagtggg

SEQ ID NO: 141852 - DNA, 25 bp, Saccharomyces pastorianus
ggtcaacgaagattatttgtctaga

SEQ ID NO: 141853 - DNA, 25 bp, Saccharomyces pastorianus
gcagatacaagtcccggtcaacgaa

SEQ ID NO: 141854 - DNA, 25 bp, Saccharomyces pastorianus
aagagcagatacaagtcccggtcaa

SEQ ID NO: 141855 - DNA, 25 bp, Saccharomyces pastorianus
caagtcccggtcaacgaagattatt

SEQ ID NO: 141856 - DNA, 25 bp, Saccharomyces pastorianus
atacaagtcccggtcaacgaagatt

SEQ ID NO: 141857 - DNA, 25 bp, Saccharomyces pastorianus
gtcccggtcaacgaagattatttgt

SEQ ID NO: 141858 - DNA, 25 bp, Saccharomyces pastorianus
agaagctggtgaagtcaaggacgac

SEQ ID NO: 141859 - DNA, 25 bp, Saccharomyces pastorianus
cccggtcaacgaagattatttgtct

SEQ ID NO: 141860 - DNA, 25 bp, Saccharomyces pastorianus
tggtgaagtcaaggacgacggtgct

SEQ ID NO: 141861 - DNA, 25 bp, Saccharomyces pastorianus
gagcagatacaagtcccggtcaacg

SEQ ID NO: 141862 - DNA, 25 bp, Saccharomyces pastorianus
cgaagattatttgtctagaagtggg

SEQ ID NO: 141863 - DNA, 25 bp, Saccharomyces pastorianus
ccggtcaacgaagattatttgtcta

SEQ ID NO: 141864 - DNA, 25 bp, Saccharomyces pastorianus
gcagatacaagtcccggtcaacgaa

SEQ ID NO: 141865 - DNA, 25 bp, Saccharomyces pastorianus
aagagcagatacaagtcccggtcaa

SEQ ID NO: 141866 - DNA, 25 bp, Saccharomyces pastorianus
caagtcccggtcaacgaagattatt

SEQ ID NO: 141867 - DNA, 25 bp, Saccharomyces pastorianus
atacaagtcccggtcaacgaagatt

SEQ ID NO: 141868 - DNA, 25 bp, Saccharomyces pastorianus
gtcccggtcaacgaagattatttgt

SEQ ID NO: 141869 - DNA, 25 bp, Saccharomyces pastorianus
agaagctggtgaagtcaaggacgac

SEQ ID NO: 141870 - DNA, 25 bp, Saccharomyces pastorianus
ggtgctttcgttaagttcttgtcca

SEQ ID NO: 141871 - DNA, 25 bp, Saccharomyces pastorianus
cctctatcaataaacgggtgttcaa

SEQ ID NO: 141872 - DNA, 25 bp, Saccharomyces pastorianus
cggaacaaactatcacctctatcaa

SEQ ID NO: 141873 - DNA, 25 bp, Saccharomyces pastorianus
atggcctaagaacattgggtgtttc

SEQ ID NO: 141874 - DNA, 25 bp, Saccharomyces pastorianus
acactagtcttttggatcgcgttaa

SEQ ID NO: 141875 - DNA, 25 bp, Saccharomyces pastorianus
tccgataacccctttagtacatcag

SEQ ID NO: 141876 - DNA, 25 bp, Saccharomyces pastorianus
gattacattctagaaatgggccaac

SEQ ID NO: 141877 - DNA, 25 bp, Saccharomyces pastorianus
gggctacaaaaggaacagtctgttt

SEQ ID NO: 141878 - DNA, 25 bp, Saccharomyces pastorianus
gggtaacgctcaattagattacatt

SEQ ID NO: 141879 - DNA, 25 bp, Saccharomyces pastorianus
tgggccaacaatcattcgaaaatat

SEQ ID NO: 141880 - DNA, 25 bp, Saccharomyces pastorianus
tagtacatcagagaccatcatgaat

SEQ ID NO: 141881 - DNA, 25 bp, Saccharomyces pastorianus
tcgcgttaattctcttgatcatagg

SEQ ID NO: 141882 - DNA, 25 bp, Saccharomyces pastorianus
tggttggcactgctgattttcatta

SEQ ID NO: 141883 - DNA, 25 bp, Saccharomyces pastorianus
agtttccaagattttctttcgatga

SEQ ID NO: 141884 - DNA, 25 bp, Saccharomyces pastorianus
aattcgacaagatgccaagctgtat

SEQ ID NO: 141885 - DNA, 25 bp, Saccharomyces pastorianus
atgatatcgatccattactccgcaa

SEQ ID NO: 141886 - DNA, 25 bp, Saccharomyces pastorianus
actgattcaacgtttaagaccactg

SEQ ID NO: 141887 - DNA, 25 bp, Saccharomyces pastorianus
gatcacattggcgtactacatgttt

SEQ ID NO: 141888 - DNA, 25 bp, Saccharomyces pastorianus
gtataacgagtaacgagcttttcga

SEQ ID NO: 141889 - DNA, 25 bp, Saccharomyces pastorianus
gtatggcaagcagaccaaaggtcat

SEQ ID NO: 141890 - DNA, 25 bp, Saccharomyces pastorianus
aagaccactgttagatctgaagaaa

SEQ ID NO: 141891 - DNA, 25 bp, Saccharomyces pastorianus
gatgaacgcaaacctggacagattg

SEQ ID NO: 141892 - DNA, 25 bp, Saccharomyces pastorianus
cagccataagtgacgatagtttcca

SEQ ID NO: 141893 - DNA, 25 bp, Saccharomyces pastorianus
aacagagtgtgtttccagacgagga

SEQ ID NO: 141894 - DNA, 25 bp, Saccharomyces pastorianus
aagtgctatcaacgatgcatccaaa

SEQ ID NO: 141895 - DNA, 25 bp, Saccharomyces pastorianus
gggtcttgcattttggctgaagcaa

SEQ ID NO: 141896 - DNA, 25 bp, Saccharomyces pastorianus
gaactttcacaatggactttgggtg

SEQ ID NO: 141897 - DNA, 25 bp, Saccharomyces pastorianus
atcttgacattggatcctcaccgta

SEQ ID NO: 141898 - DNA, 25 bp, Saccharomyces pastorianus
atcctcaccgtattttgcgtcatgt

SEQ ID NO: 141899 - DNA, 25 bp, Saccharomyces pastorianus
gagcgtgacagcgtatttgaatgac

SEQ ID NO: 141900 - DNA, 25 bp, Saccharomyces pastorianus
aagtttcgggttcagaggcagcaca

SEQ ID NO: 141901 - DNA, 25 bp, Saccharomyces pastorianus
ttgcgtcatgtctgttccaatacca

SEQ ID NO: 141902 - DNA, 25 bp, Saccharomyces pastorianus
ggcagcagcccatttaggattggaa

SEQ ID NO: 141903 - DNA, 25 bp, Saccharomyces pastorianus
aagttaaatttatgggcagcagccc

SEQ ID NO: 141904 - DNA, 25 bp, Saccharomyces pastorianus
aaaagctccgagacgttgaattgaa

SEQ ID NO: 141905 - DNA, 25 bp, Saccharomyces pastorianus
ggttcgagcggaagaggactctacc

SEQ ID NO: 141906 - DNA, 25 bp, Saccharomyces pastorianus
gttcaatatagccactgtcaaatta

SEQ ID NO: 141907 - DNA, 25 bp, Saccharomyces pastorianus
ccggcagtgatagtttggttcgagc

SEQ ID NO: 141908 - DNA, 25 bp, Saccharomyces pastorianus
tttcgagaggaaaacaccggcagtg

SEQ ID NO: 141909 - DNA, 25 bp, Saccharomyces pastorianus
gacgggcgtctttccattggtaaag

SEQ ID NO: 141910 - DNA, 25 bp, Saccharomyces pastorianus
ggactctaccgctgtcactaatgaa

SEQ ID NO: 141911 - DNA, 25 bp, Saccharomyces pastorianus
ttagagataacctcgtcgcttgggt

SEQ ID NO: 141912 - DNA, 25 bp, Saccharomyces pastorianus
tggtaaagacaaaccctttcgagag

SEQ ID NO: 141913 - DNA, 25 bp, Saccharomyces pastorianus
ggaaccaaatcctgactttagacct

SEQ ID NO: 141914 - DNA, 25 bp, Saccharomyces pastorianus
tcgtcgcttgggtcactcaaggaaa

SEQ ID NO: 141915 - DNA, 25 bp, Saccharomyces pastorianus
gatagtctagatcctttttctgaag

SEQ ID NO: 141916 - DNA, 25 bp, Saccharomyces pastorianus
aatagatgccgctctggatttcaga

SEQ ID NO: 141917 - DNA, 25 bp, Saccharomyces pastorianus
atgcacagtttattgttatttcgct

SEQ ID NO: 141918 - DNA, 25 bp, Saccharomyces pastorianus
gaaatgtctcaatcgtagctaacta

SEQ ID NO: 141919 - DNA, 25 bp, Saccharomyces pastorianus
ataacaaacctttcaggtggtgaga

SEQ ID NO: 141920 - DNA, 25 bp, Saccharomyces pastorianus
ggtggtgagaaaacactaagctcct

SEQ ID NO: 141921 - DNA, 25 bp, Saccharomyces pastorianus
gctggctctcatatcatatcaatga

SEQ ID NO: 141922 - DNA, 25 bp, Saccharomyces pastorianus
acactaagctccttggctttggttt

SEQ ID NO: 141923 - DNA, 25 bp, Saccharomyces pastorianus
catgttcgaattagcgcaacagtta

SEQ ID NO: 141924 - DNA, 25 bp, Saccharomyces pastorianus
aacccccctttatgtcatggatgaa

SEQ ID NO: 141925 - DNA, 25 bp, Saccharomyces pastorianus
gttacgtttagtgttatgcctccta

SEQ ID NO: 141926 - DNA, 25 bp, Saccharomyces pastorianus
aataccggtcctgtgaaactcaaga

SEQ ID NO: 141927 - DNA, 25 bp, Saccharomyces pastorianus
cacaccctgggaatgttagacgata

SEQ ID NO: 141928 - DNA, 25 bp, Saccharomyces pastorianus
caagaacttgatcaggaataccggt

SEQ ID NO: 141929 - DNA, 25 bp, Saccharomyces pastorianus
gagacttcagatgaggtatccagag

SEQ ID NO: 141930 - DNA, 25 bp, Saccharomyces pastorianus
attagggatgtaacccacaccctgg

SEQ ID NO: 141931 - DNA, 25 bp, Saccharomyces pastorianus
ttgaactcactgttgacgtacatca

SEQ ID NO: 141932 - DNA, 25 bp, Saccharomyces pastorianus
ggacgatgagacttcttgtgacaat

SEQ ID NO: 141933 - DNA, 25 bp, Saccharomyces pastorianus
gtgacaattatcatcctatgaacgt

SEQ ID NO: 141934 - DNA, 25 bp, Saccharomyces pastorianus
gtttcaaaaactgctccaaaattct

SEQ ID NO: 141935 - DNA, 25 bp, Saccharomyces pastorianus
ggataccaagactttctgaggacga

SEQ ID NO: 141936 - DNA, 25 bp, Saccharomyces pastorianus
aacatacaaaactggctttggcaga

SEQ ID NO: 141937 - DNA, 25 bp, Saccharomyces pastorianus
gttgtttcacaagcgtttcttctaa

SEQ ID NO: 141938 - DNA, 25 bp, Saccharomyces pastorianus
ataggttggcttccatgttggctat

SEQ ID NO: 141939 - DNA, 25 bp, Saccharomyces pastorianus
cagtttggtttcaacatctttgcta

SEQ ID NO: 141940 - DNA, 25 bp, Saccharomyces pastorianus
tcacatctcagaaccactatcatac

SEQ ID NO: 141941 - DNA, 25 bp, Saccharomyces pastorianus
gcattgcatcttgttttttaccttt

SEQ ID NO: 141942 - DNA, 25 bp, Saccharomyces pastorianus
gtttcttctaataccttcatcggga

SEQ ID NO: 141943 - DNA, 25 bp, Saccharomyces pastorianus
gatcggtacattggcatttcctatg

SEQ ID NO: 141944 - DNA, 25 bp, Saccharomyces pastorianus
actcgatcctctatcccaataaaaa

SEQ ID NO: 141945 - DNA, 25 bp, Saccharomyces pastorianus
gagctcgtcgagaatcacatggata

SEQ ID NO: 141946 - DNA, 25 bp, Saccharomyces pastorianus
actggtttcagcatggttggatttg

SEQ ID NO: 141947 - DNA, 25 bp, Saccharomyces pastorianus
gaacatgaggtgacaactcgatcct

SEQ ID NO: 141948 - DNA, 25 bp, Saccharomyces pastorianus
catgctatgcgctctatttggttta

SEQ ID NO: 141949 - DNA, 25 bp, Saccharomyces pastorianus
gctatgcgctctatttggtttattt

SEQ ID NO: 141950 - DNA, 25 bp, Saccharomyces pastorianus
ggcttgtcccgcgtataatcgcctt

SEQ ID NO: 141951 - DNA, 25 bp, Saccharomyces pastorianus
tgtcccgcgtataatcgccttatta

SEQ ID NO: 141952 - DNA, 25 bp, Saccharomyces pastorianus
aagttgcatcgaaggattgttgata

SEQ ID NO: 141953 - DNA, 25 bp, Saccharomyces pastorianus
gcgtataatcgccttattaccagtt

SEQ ID NO: 141954 - DNA, 25 bp, Saccharomyces pastorianus
agttatttccatgctatgcgctcta

SEQ ID NO: 141955 - DNA, 25 bp, Saccharomyces pastorianus
atcgccttattaccagttatttcca

SEQ ID NO: 141956 - DNA, 25 bp, Saccharomyces pastorianus
atggccttattggagaagttgcatc

SEQ ID NO: 141957 - DNA, 25 bp, Saccharomyces pastorianus
atttccatgctatgcgctctatttg

SEQ ID NO: 141958 - DNA, 25 bp, Saccharomyces pastorianus
attggagaagttgcatcgaaggatt

SEQ ID NO: 141959 - DNA, 25 bp, Saccharomyces pastorianus
caagaagctcgccacttagagttaa

SEQ ID NO: 141960 - DNA, 25 bp, Saccharomyces pastorianus
tggccaagaacctggtacttaccat

SEQ ID NO: 141961 - DNA, 25 bp, Saccharomyces pastorianus
gccacttagagttaactccggatga

SEQ ID NO: 141962 - DNA, 25 bp, Saccharomyces pastorianus
actggcatttgcactgttcccggtt

SEQ ID NO: 141963 - DNA, 25 bp, Saccharomyces pastorianus
gttaactccggatgaattttattgt

SEQ ID NO: 141964 - DNA, 25 bp, Saccharomyces pastorianus
tctgggtttggccaagaacctggta

SEQ ID NO: 141965 - DNA, 25 bp, Saccharomyces pastorianus
gcactgttcccggttctgggtttgg

SEQ ID NO: 141966 - DNA, 25 bp, Saccharomyces pastorianus
gaatctactggcatttgcactgttc

SEQ ID NO: 141967 - DNA, 25 bp, Saccharomyces pastorianus
tggcacctggtctggaatggattaa

SEQ ID NO: 141968 - DNA, 25 bp, Saccharomyces pastorianus
agctcgccacttagagttaactccg

SEQ ID NO: 141969 - DNA, 25 bp, Saccharomyces pastorianus
gttagaatctactggcatttgcact

SEQ ID NO: 141970 - DNA, 25 bp, Saccharomyces pastorianus
aacgggtgtcttgattccaattcct

SEQ ID NO: 141971 - DNA, 25 bp, Saccharomyces pastorianus
ggtgttcctggtgcatgtggtcaaa

SEQ ID NO: 141972 - DNA, 25 bp, Saccharomyces pastorianus
catccgcagctgtcaattacttgtt

SEQ ID NO: 141973 - DNA, 25 bp, Saccharomyces pastorianus
gcattcgacttctaagggtgttcct

SEQ ID NO: 141974 - DNA, 25 bp, Saccharomyces pastorianus
tggaactcactggattcagccatga

SEQ ID NO: 141975 - DNA, 25 bp, Saccharomyces pastorianus
gttcagctagcttctttgcattcga

SEQ ID NO: 141976 - DNA, 25 bp, Saccharomyces pastorianus
ggatattttcctaactgctggtgca

SEQ ID NO: 141977 - DNA, 25 bp, Saccharomyces pastorianus
agctgtcctatcacctgagtctata

SEQ ID NO: 141978 - DNA, 25 bp, Saccharomyces pastorianus
gaagtcgcagccaagtacggtacag

SEQ ID NO: 141979 - DNA, 25 bp, Saccharomyces pastorianus
agaaaatatcttcccgggcactaag

SEQ ID NO: 141980 - DNA, 25 bp, Saccharomyces pastorianus
atccattatataccgctactctagc

SEQ ID NO: 141981 - DNA, 25 bp, Saccharomyces pastorianus
ctttttctacctcagccagtagtac

SEQ ID NO: 141982 - DNA, 25 bp, Saccharomyces pastorianus
gttgctcaaaatcatagacgttcat

SEQ ID NO: 141983 - DNA, 25 bp, Saccharomyces pastorianus
ttccacaccacacgttgaaacttcg

SEQ ID NO: 141984 - DNA, 25 bp, Saccharomyces pastorianus
ataaggactctcacttcaagcgcag

SEQ ID NO: 141985 - DNA, 25 bp, Saccharomyces pastorianus
gcgtcatttgaatcgctttccacac

SEQ ID NO: 141986 - DNA, 25 bp, Saccharomyces pastorianus
gctcttcctggattgttgctcaaaa

SEQ ID NO: 141987 - DNA, 25 bp, Saccharomyces pastorianus
aaaatgccacatatcactactcctt

SEQ ID NO: 141988 - DNA, 25 bp, Saccharomyces pastorianus
ttcgctaaacgacctgcgtcatttg

SEQ ID NO: 141989 - DNA, 25 bp, Saccharomyces pastorianus
gttagacccgtcctacagagacata

SEQ ID NO: 141990 - DNA, 25 bp, Saccharomyces pastorianus
gagacatagctcttcctggattgtt

SEQ ID NO: 141991 - DNA, 25 bp, Saccharomyces pastorianus
gttcattatctggtcaatcttcgct

SEQ ID NO: 141992 - DNA, 25 bp, Saccharomyces pastorianus
gcgtttataccgcttcaggaacaaa

SEQ ID NO: 141993 - DNA, 25 bp, Saccharomyces pastorianus
cccagcacctcagtcgatgttgaaa

SEQ ID NO: 141994 - DNA, 25 bp, Saccharomyces pastorianus
gcaagttgaattccactttgtgggt

SEQ ID NO: 141995 - DNA, 25 bp, Saccharomyces pastorianus
agtggcacagacagacgctacggct

SEQ ID NO: 141996 - DNA, 25 bp, Saccharomyces pastorianus
ggaacaaatctacctttcttccata

SEQ ID NO: 141997 - DNA, 25 bp, Saccharomyces pastorianus
atactatgcttagacttctcacaag

SEQ ID NO: 141998 - DNA, 25 bp, Saccharomyces pastorianus
gtacctcaaggcgaagaaaatcctg

SEQ ID NO: 141999 - DNA, 25 bp, Saccharomyces pastorianus
atcacgtagccagagtacctcaagg

SEQ ID NO: 142000 - DNA, 25 bp, Saccharomyces pastorianus
aaagagatgacaggccattgctgaa

SEQ ID NO: 142001 - DNA, 25 bp, Saccharomyces pastorianus
tttgtgggtatcatttcaccatggg

SEQ ID NO: 142002 - DNA, 25 bp, Saccharomyces pastorianus
gctacggctcttcaatcattggttg

SEQ ID NO: 142003 - DNA, 25 bp, Saccharomyces pastorianus
cagcgactggttccttttcaaggtc

SEQ ID NO: 142004 - DNA, 25 bp, Saccharomyces pastorianus
ctgtatctgatcttttggcctctta

SEQ ID NO: 142005 - DNA, 25 bp, Saccharomyces pastorianus
aatgtaatgtccgtacgccgttatc

SEQ ID NO: 142006 - DNA, 25 bp, Saccharomyces pastorianus
gacttcatctgtttcattgtcaccg

SEQ ID NO: 142007 - DNA, 25 bp, Saccharomyces pastorianus
ttcgggttcatgtgttcttttagca

SEQ ID NO: 142008 - DNA, 25 bp, Saccharomyces pastorianus
tggcctcttattcaactacctggaa

SEQ ID NO: 142009 - DNA, 25 bp, Saccharomyces pastorianus
gattgctattggtgtctcgaacctt

SEQ ID NO: 142010 - DNA, 25 bp, Saccharomyces pastorianus
aatttgcctgcatccattattgtgt

SEQ ID NO: 142011 - DNA, 25 bp, Saccharomyces pastorianus
aaggctaccttatctgcagttatca

SEQ ID NO: 142012 - DNA, 25 bp, Saccharomyces pastorianus
gcattatattgtttgaccggcgcat

SEQ ID NO: 142013 - DNA, 25 bp, Saccharomyces pastorianus
gtcgtccccgaccaagaattgattg

SEQ ID NO: 142014 - DNA, 25 bp, Saccharomyces pastorianus
aacttcccaactaaatagcagcagt

SEQ ID NO: 142015 - DNA, 25 bp, Saccharomyces pastorianus
ataaaacttcccaactaaatagcag

SEQ ID NO: 142016 - DNA, 25 bp, Saccharomyces pastorianus
gcagaaggtccaaaatattacgtta

SEQ ID NO: 142017 - DNA, 25 bp, Saccharomyces pastorianus
ataatgtggtggcagaaggtccaaa

SEQ ID NO: 142018 - DNA, 25 bp, Saccharomyces pastorianus
taactttcactattatactatttgt

SEQ ID NO: 142019 - DNA, 25 bp, Saccharomyces pastorianus
gtggtggcagaaggtccaaaatatt

SEQ ID NO: 142020 - DNA, 25 bp, Saccharomyces pastorianus
ggcgcaaagcggtcaatataaaaga

SEQ ID NO: 142021 - DNA, 25 bp, Saccharomyces pastorianus
tattggtggataaaacttcccaact

SEQ ID NO: 142022 - DNA, 25 bp, Saccharomyces pastorianus
aatttaggcgcaaagcggtcaatat

SEQ ID NO: 142023 - DNA, 25 bp, Saccharomyces pastorianus
gacaagttcttggagagacaagaaa

SEQ ID NO: 142024 - DNA, 25 bp, Saccharomyces pastorianus
gtaataaatttaggcgcaaagcggt

SEQ ID NO: 142025 - DNA, 25 bp, Saccharomyces pastorianus
cggcctagcaggtgtacatttcaaa

SEQ ID NO: 142026 - DNA, 25 bp, Saccharomyces pastorianus
gacagtcaattatcatccagttacc

SEQ ID NO: 142027 - DNA, 25 bp, Saccharomyces pastorianus
cactactggcgtgggtttggattcc

SEQ ID NO: 142028 - DNA, 25 bp, Saccharomyces pastorianus
taaaggttcgtatcgtcggcctagc

SEQ ID NO: 142029 - DNA, 25 bp, Saccharomyces pastorianus
agttaccatagtacagcgtcctcag

SEQ ID NO: 142030 - DNA, 25 bp, Saccharomyces pastorianus
agctgtccctgttataaccactact

SEQ ID NO: 142031 - DNA, 25 bp, Saccharomyces pastorianus
gaaaggcgggttcatatgtgtccaa

SEQ ID NO: 142032 - DNA, 25 bp, Saccharomyces pastorianus
tacagcgtcctcagcatcaagaaat

SEQ ID NO: 142033 - DNA, 25 bp, Saccharomyces pastorianus
ggccatctattgagactgcagctgt

SEQ ID NO: 142034 - DNA, 25 bp, Saccharomyces pastorianus
aacacctttagcgaccaatacacat

SEQ ID NO: 142035 - DNA, 25 bp, Saccharomyces pastorianus
agattcatctatcccaatgtctcca

SEQ ID NO: 142036 - DNA, 25 bp, Saccharomyces pastorianus
aatcctggtatctttcaagtgccgg

SEQ ID NO: 142037 - DNA, 25 bp, Saccharomyces pastorianus
gaaggcaagcattggccctgcaagc

SEQ ID NO: 142038 - DNA, 25 bp, Saccharomyces pastorianus
taataacctcaacaaacctccactg

SEQ ID NO: 142039 - DNA, 25 bp, Saccharomyces pastorianus
gcacttggcactaaggtcgccttaa

SEQ ID NO: 142040 - DNA, 25 bp, Saccharomyces pastorianus
gcaagcgcaggctcagcaaaggcaa

SEQ ID NO: 142041 - DNA, 25 bp, Saccharomyces pastorianus
tcgggaacctcaaacaacactaata

SEQ ID NO: 142042 - DNA, 25 bp, Saccharomyces pastorianus
taactccccggatattatgaccaaa

SEQ ID NO: 142043 - DNA, 25 bp, Saccharomyces pastorianus
gaagatcctactttagcatatcatc

SEQ ID NO: 142044 - DNA, 25 bp, Saccharomyces pastorianus
gaatacatccaactttcccaagaat

SEQ ID NO: 142045 - DNA, 25 bp, Saccharomyces pastorianus
acctccactgcatgtaatggttcct

SEQ ID NO: 142046 - DNA, 25 bp, Saccharomyces pastorianus
gggacaaattatccaacgccaaggg

SEQ ID NO: 142047 - DNA, 25 bp, Saccharomyces pastorianus
tgtgccatttaaaactttcgcgaag

SEQ ID NO: 142048 - DNA, 25 bp, Saccharomyces pastorianus
gtcatatgtgttattggagcctcgg

SEQ ID NO: 142049 - DNA, 25 bp, Saccharomyces pastorianus
caatggatcttaacggaatcaccga

SEQ ID NO: 142050 - DNA, 25 bp, Saccharomyces pastorianus
gtaagatacggttccaatgcagaaa

SEQ ID NO: 142051 - DNA, 25 bp, Saccharomyces pastorianus
tacagatgaacctagcgctgtcgtg

SEQ ID NO: 142052 - DNA, 25 bp, Saccharomyces pastorianus
gggaatgcatctaactgttcgttga

SEQ ID NO: 142053 - DNA, 25 bp, Saccharomyces pastorianus
gctgtcgtgaagcacttctccaaag

SEQ ID NO: 142054 - DNA, 25 bp, Saccharomyces pastorianus
gttcgttatctcttttaaagccagt

SEQ ID NO: 142055 - DNA, 25 bp, Saccharomyces pastorianus
ggagcctcggatttgattatgattt

SEQ ID NO: 142056 - DNA, 25 bp, Saccharomyces pastorianus
gcttccacgattctgtgccatttaa

SEQ ID NO: 142057 - DNA, 25 bp, Saccharomyces pastorianus
acggccaatgtttgagattactttc

SEQ ID NO: 142058 - DNA, 25 bp, Saccharomyces pastorianus
ggcgtttccaccaataactgcagaa

SEQ ID NO: 142059 - DNA, 25 bp, Saccharomyces pastorianus
ccaccaataactgcagaaacggatg

SEQ ID NO: 142060 - DNA, 25 bp, Saccharomyces pastorianus
gcgtttccaccaataactgcagaaa

SEQ ID NO: 142061 - DNA, 25 bp, Saccharomyces pastorianus
atggcgtttccaccaataactgcag

SEQ ID NO: 142062 - DNA, 25 bp, Saccharomyces pastorianus
ggaaggtccataattgaaatacgtc

SEQ ID NO: 142063 - DNA, 25 bp, Saccharomyces pastorianus
ggtccataattgaaatacgtcgtga

SEQ ID NO: 142064 - DNA, 25 bp, Saccharomyces pastorianus
ataactgcagaaacggatgctaaag

SEQ ID NO: 142065 - DNA, 25 bp, Saccharomyces pastorianus
acgtcgtgaagatctttcaccattc

SEQ ID NO: 142066 - DNA, 25 bp, Saccharomyces pastorianus
cagaaacggatgctaaagtgagaat

SEQ ID NO: 142067 - DNA, 25 bp, Saccharomyces pastorianus
atacgtcgtgaagatctttcaccat

SEQ ID NO: 142068 - DNA, 25 bp, Saccharomyces pastorianus
gaatagataattttggaaggtccat

SEQ ID NO: 142069 - DNA, 25 bp, Saccharomyces pastorianus
gttgctgtaaaagccgaaaccttct

SEQ ID NO: 142070 - DNA, 25 bp, Saccharomyces pastorianus
gaatcattctcgttgctgtaaaagc

SEQ ID NO: 142071 - DNA, 25 bp, Saccharomyces pastorianus
cattctcgttgctgtaaaagccgaa

SEQ ID NO: 142072 - DNA, 25 bp, Saccharomyces pastorianus
agccgaaaccttctctgggacgaag

SEQ ID NO: 142073 - DNA, 25 bp, Saccharomyces pastorianus
ggaagaatcattctcgttgctgtaa

SEQ ID NO: 142074 - DNA, 25 bp, Saccharomyces pastorianus
tgtaaaagccgaaaccttctctggg

SEQ ID NO: 142075 - DNA, 25 bp, Saccharomyces pastorianus
aagaatcattctcgttgctgtaaaa

SEQ ID NO: 142076 - DNA, 25 bp, Saccharomyces pastorianus
atcattctcgttgctgtaaaagccg

SEQ ID NO: 142077 - DNA, 25 bp, Saccharomyces pastorianus
aatggaagaatcattctcgttgctg

SEQ ID NO: 142078 - DNA, 25 bp, Saccharomyces pastorianus
ttctcgttgctgtaaaagccgaaac

SEQ ID NO: 142079 - DNA, 25 bp, Saccharomyces pastorianus
gctgtaaaagccgaaaccttctctg

SEQ ID NO: 142080 - DNA, 25 bp, Saccharomyces pastorianus
gacctatccagagaggctgcaatgt

SEQ ID NO: 142081 - DNA, 25 bp, Saccharomyces pastorianus
tcataccggaaaccaatctttagcg

SEQ ID NO: 142082 - DNA, 25 bp, Saccharomyces pastorianus
tagcggtaagcagttgtctcaatgg

SEQ ID NO: 142083 - DNA, 25 bp, Saccharomyces pastorianus
agtttcgcacgatcttattttccaa

SEQ ID NO: 142084 - DNA, 25 bp, Saccharomyces pastorianus
gtgtctccatttgtgacttgacggt

SEQ ID NO: 142085 - DNA, 25 bp, Saccharomyces pastorianus
taattattcctgcatgtgtctccat

SEQ ID NO: 142086 - DNA, 25 bp, Saccharomyces pastorianus
accgctactggatttcataaaaccg

SEQ ID NO: 142087 - DNA, 25 bp, Saccharomyces pastorianus
aaggttaacatcacttcataccgga

SEQ ID NO: 142088 - DNA, 25 bp, Saccharomyces pastorianus
atgacgaatctgaacctccaacaaa

SEQ ID NO: 142089 - DNA, 25 bp, Saccharomyces pastorianus
agagagggtcttggattgcaccaat

SEQ ID NO: 142090 - DNA, 25 bp, Saccharomyces pastorianus
accaaaggccttatatcgatacagt

SEQ ID NO: 142091 - DNA, 25 bp, Saccharomyces pastorianus
atacagttgccactgtcgttggcag

SEQ ID NO: 142092 - DNA, 25 bp, Saccharomyces pastorianus
ggtctgcatctattatatggccatc

SEQ ID NO: 142093 - DNA, 25 bp, Saccharomyces pastorianus
gaaatgctccgtagtaatcctaaat

SEQ ID NO: 142094 - DNA, 25 bp, Saccharomyces pastorianus
actattatcgatggtacgccttccg

SEQ ID NO: 142095 - DNA, 25 bp, Saccharomyces pastorianus
gagagcctaccgcaagtgaacaatc

SEQ ID NO: 142096 - DNA, 25 bp, Saccharomyces pastorianus
acgccttccgaactttttgatactg

SEQ ID NO: 142097 - DNA, 25 bp, Saccharomyces pastorianus
gactccaacctcgataaccttttga

SEQ ID NO: 142098 - DNA, 25 bp, Saccharomyces pastorianus
tacacggttcatctaggagccataa

SEQ ID NO: 142099 - DNA, 25 bp, Saccharomyces pastorianus
aagaccctggatatctccattgact

SEQ ID NO: 142100 - DNA, 25 bp, Saccharomyces pastorianus
gtagcagtccgcaaaatcaatgatg

SEQ ID NO: 142101 - DNA, 25 bp, Saccharomyces pastorianus
aaacaggtgcgttgtcaatcggtga

SEQ ID NO: 142102 - DNA, 25 bp, Saccharomyces pastorianus
aaatcaatgctcgagtgctgtcccc

SEQ ID NO: 142103 - DNA, 25 bp, Saccharomyces pastorianus
gcatctgcaggtgttataggtccat

SEQ ID NO: 142104 - DNA, 25 bp, Saccharomyces pastorianus
gtacttattctgtcttacgcgagag

SEQ ID NO: 142105 - DNA, 25 bp, Saccharomyces pastorianus
tttggacaggtttggctcctctcaa

SEQ ID NO: 142106 - DNA, 25 bp, Saccharomyces pastorianus
gcaaatttctggacctgttcacaca

SEQ ID NO: 142107 - DNA, 25 bp, Saccharomyces pastorianus
tgttcctttgaagtactcgcaattg

SEQ ID NO: 142108 - DNA, 25 bp, Saccharomyces pastorianus
aatgctgcttctatattggacgcca

SEQ ID NO: 142109 - DNA, 25 bp, Saccharomyces pastorianus
aatgcgcacacacaagtacctgtac

SEQ ID NO: 142110 - DNA, 25 bp, Saccharomyces pastorianus
ttggacgccactggtaagcccttat

SEQ ID NO: 142111 - DNA, 25 bp, Saccharomyces pastorianus
gatggattgactttgctggcgtaca

SEQ ID NO: 142112 - DNA, 25 bp, Saccharomyces pastorianus
tatcaactttgatgaggccctctgc

SEQ ID NO: 142113 - DNA, 25 bp, Saccharomyces pastorianus
attacaaagccctccagagtcggaa

SEQ ID NO: 142114 - DNA, 25 bp, Saccharomyces pastorianus
gcgtcacatatttcgaggcaagctc

SEQ ID NO: 142115 - DNA, 25 bp, Saccharomyces pastorianus
gcaatactcatccaattcaagcacc

SEQ ID NO: 142116 - DNA, 25 bp, Saccharomyces pastorianus
gcaagctcaaaacgtgacgcctaca

SEQ ID NO: 142117 - DNA, 25 bp, Saccharomyces pastorianus
gtatgactacggtacaatcctcaat

SEQ ID NO: 142118 - DNA, 25 bp, Saccharomyces pastorianus
tcccggcctaacatcaagtagcttt

SEQ ID NO: 142119 - DNA, 25 bp, Saccharomyces pastorianus
tggcctaagcggtcctccagggttt

SEQ ID NO: 142120 - DNA, 25 bp, Saccharomyces pastorianus
atgacaataattcggcggaaccttc

SEQ ID NO: 142121 - DNA, 25 bp, Saccharomyces pastorianus
agtagctttagttccggagttccag

SEQ ID NO: 142122 - DNA, 25 bp, Saccharomyces pastorianus
aaatttccggcttcttcacgttatg

SEQ ID NO: 142123 - DNA, 25 bp, Saccharomyces pastorianus
gccacggtaaataattctgcgccaa

SEQ ID NO: 142124 - DNA, 25 bp, Saccharomyces pastorianus
gaattcgtggattacgtttttcctg

SEQ ID NO: 142125 - DNA, 25 bp, Saccharomyces pastorianus
gaactcgatcaagaaaccgtcaaga

SEQ ID NO: 142126 - DNA, 25 bp, Saccharomyces pastorianus
gatgataaacaagggagactgtcta

SEQ ID NO: 142127 - DNA, 25 bp, Saccharomyces pastorianus
acaggacggtgtggaagaagaattc

SEQ ID NO: 142128 - DNA, 25 bp, Saccharomyces pastorianus
gagactgtctattttggaagcgcta

SEQ ID NO: 142129 - DNA, 25 bp, Saccharomyces pastorianus
acgtttttcctgatgatatcgatga

SEQ ID NO: 142130 - DNA, 25 bp, Saccharomyces pastorianus
gatatcgatgatgacaagccaaaac

SEQ ID NO: 142131 - DNA, 25 bp, Saccharomyces pastorianus
gacaagccaaaaccatcaaagttct

SEQ ID NO: 142132 - DNA, 25 bp, Saccharomyces pastorianus
gactatgaagaaacttacggtactg

SEQ ID NO: 142133 - DNA, 25 bp, Saccharomyces pastorianus
gaaacttacggtactgaactcgatc

SEQ ID NO: 142134 - DNA, 25 bp, Saccharomyces pastorianus
tttggaagcgctaaaagactatgaa

SEQ ID NO: 142135 - DNA, 25 bp, Saccharomyces pastorianus
tttgctcattgggaagctgcgcagc

SEQ ID NO: 142136 - DNA, 25 bp, Saccharomyces pastorianus
aaaatacgtcatggctcacccgcaa

SEQ ID NO: 142137 - DNA, 25 bp, Saccharomyces pastorianus
attgctatagaaaaatggccctcca

SEQ ID NO: 142138 - DNA, 25 bp, Saccharomyces pastorianus
atggccctccaatcaattgcttaag

SEQ ID NO: 142139 - DNA, 25 bp, Saccharomyces pastorianus
gacacagtagctaacctccaaaatt

SEQ ID NO: 142140 - DNA, 25 bp, Saccharomyces pastorianus
gtggctgtacttggatctcatttca

SEQ ID NO: 142141 - DNA, 25 bp, Saccharomyces pastorianus
aaagctgttgtggacagccgaccaa

SEQ ID NO: 142142 - DNA, 25 bp, Saccharomyces pastorianus
taacgcctatgattatgacacctgg

SEQ ID NO: 142143 - DNA, 25 bp, Saccharomyces pastorianus
gatctagtgctctttatcaaattgc

SEQ ID NO: 142144 - DNA, 25 bp, Saccharomyces pastorianus
tcacccgcaaatgcagacgtggcta

SEQ ID NO: 142145 - DNA, 25 bp, Saccharomyces pastorianus
atgacacctggtggctgtacttgga

SEQ ID NO: 142146 - DNA, 25 bp, Saccharomyces pastorianus
aaggtccattgactcagccgatgac

SEQ ID NO: 142147 - DNA, 25 bp, Saccharomyces pastorianus
ggtccaagccttattagaaaactgt

SEQ ID NO: 142148 - DNA, 25 bp, Saccharomyces pastorianus
tatacgtcacaaaattcaatccctt

SEQ ID NO: 142149 - DNA, 25 bp, Saccharomyces pastorianus
cagccgatgacctggatcagttcat

SEQ ID NO: 142150 - DNA, 25 bp, Saccharomyces pastorianus
gatgtggtaccatctccgggtttac

SEQ ID NO: 142151 - DNA, 25 bp, Saccharomyces pastorianus
agcaaaaatattcccttacctgaag

SEQ ID NO: 142152 - DNA, 25 bp, Saccharomyces pastorianus
ggacatacgaacacaatatcacttg

SEQ ID NO: 142153 - DNA, 25 bp, Saccharomyces pastorianus
ttcaaacccacagacaccaattaga

SEQ ID NO: 142154 - DNA, 25 bp, Saccharomyces pastorianus
ggcaagattaccattccgaattttc

SEQ ID NO: 142155 - DNA, 25 bp, Saccharomyces pastorianus
tcaatcccttaacggactttgctgg

SEQ ID NO: 142156 - DNA, 25 bp, Saccharomyces pastorianus
gttcacagctagaaactaccacaag

SEQ ID NO: 142157 - DNA, 25 bp, Saccharomyces pastorianus
ctggacggtccatgaaaaattatat

SEQ ID NO: 142158 - DNA, 25 bp, Saccharomyces pastorianus
atacagtcttcattctatggccgca

SEQ ID NO: 142159 - DNA, 25 bp, Saccharomyces pastorianus
ttgtggcattctctggacggtccat

SEQ ID NO: 142160 - DNA, 25 bp, Saccharomyces pastorianus
gctctttcatacagtcttcattcta

SEQ ID NO: 142161 - DNA, 25 bp, Saccharomyces pastorianus
acttttgtggcattctctggacggt

SEQ ID NO: 142162 - DNA, 25 bp, Saccharomyces pastorianus
ggcattctctggacggtccatgaaa

SEQ ID NO: 142163 - DNA, 25 bp, Saccharomyces pastorianus
agtcttcattctatggccgcacttt

SEQ ID NO: 142164 - DNA, 25 bp, Saccharomyces pastorianus
attctatggccgcacttttgtggca

SEQ ID NO: 142165 - DNA, 25 bp, Saccharomyces pastorianus
atggccgcacttttgtggcattctc

SEQ ID NO: 142166 - DNA, 25 bp, Saccharomyces pastorianus
gcgctctttcatacagtcttcattc

SEQ ID NO: 142167 - DNA, 25 bp, Saccharomyces pastorianus
gcacttttgtggcattctctggacg

SEQ ID NO: 142168 - DNA, 25 bp, Saccharomyces pastorianus
gtagtcaaatctcgaaattgccttg

SEQ ID NO: 142169 - DNA, 25 bp, Saccharomyces pastorianus
aaagcggctcctaaacagaaattct

SEQ ID NO: 142170 - DNA, 25 bp, Saccharomyces pastorianus
gcggctcctaaacagaaattcttca

SEQ ID NO: 142171 - DNA, 25 bp, Saccharomyces pastorianus
gcaaaagcggctcctaaacagaaat

SEQ ID NO: 142172 - DNA, 25 bp, Saccharomyces pastorianus
ggctcctaaacagaaattcttcagt

SEQ ID NO: 142173 - DNA, 25 bp, Saccharomyces pastorianus
gaaattcttcagtagtcaaatctcg

SEQ ID NO: 142174 - DNA, 25 bp, Saccharomyces pastorianus
atgcaaaagcggctcctaaacagaa

SEQ ID NO: 142175 - DNA, 25 bp, Saccharomyces pastorianus
agtcaaatctcgaaattgccttgct

SEQ ID NO: 142176 - DNA, 25 bp, Saccharomyces pastorianus
agcggctcctaaacagaaattcttc

SEQ ID NO: 142177 - DNA, 25 bp, Saccharomyces pastorianus
aattcttcagtagtcaaatctcgaa

SEQ ID NO: 142178 - DNA, 25 bp, Saccharomyces pastorianus
ttcttcagtagtcaaatctcgaaat

SEQ ID NO: 142179 - DNA, 25 bp, Saccharomyces pastorianus
tttacgctcattacaaccaccgaga

SEQ ID NO: 142180 - DNA, 25 bp, Saccharomyces pastorianus
aaaaagctcagcgatttacgctcat

SEQ ID NO: 142181 - DNA, 25 bp, Saccharomyces pastorianus
aaccaccgagattcactaggaaacg

SEQ ID NO: 142182 - DNA, 25 bp, Saccharomyces pastorianus
tcattacaaccaccgagattcacta

SEQ ID NO: 142183 - DNA, 25 bp, Saccharomyces pastorianus
tacgctcattacaaccaccgagatt

SEQ ID NO: 142184 - DNA, 25 bp, Saccharomyces pastorianus
actaggaaacggagctgtccctcgg

SEQ ID NO: 142185 - DNA, 25 bp, Saccharomyces pastorianus
agctcagcgatttacgctcattaca

SEQ ID NO: 142186 - DNA, 25 bp, Saccharomyces pastorianus
gatttacgctcattacaaccaccga

SEQ ID NO: 142187 - DNA, 25 bp, Saccharomyces pastorianus
aggaaacggagctgtccctcggaat

SEQ ID NO: 142188 - DNA, 25 bp, Saccharomyces pastorianus
ttcactaggaaacggagctgtccct

SEQ ID NO: 142189 - DNA, 25 bp, Saccharomyces pastorianus
ttacaaccaccgagattcactagga

SEQ ID NO: 142190 - DNA, 25 bp, Saccharomyces pastorianus
cttgtgcttggtattgcttcgtgga

SEQ ID NO: 142191 - DNA, 25 bp, Saccharomyces pastorianus
ctcatatcaggacggaattttacaa

SEQ ID NO: 142192 - DNA, 25 bp, Saccharomyces pastorianus
atatatattctcatatcaggacgga

SEQ ID NO: 142193 - DNA, 25 bp, Saccharomyces pastorianus
atgatgcagcgtgttatcacatctt

SEQ ID NO: 142194 - DNA, 25 bp, Saccharomyces pastorianus
catcttgcgttaccgggccttgcaa

SEQ ID NO: 142195 - DNA, 25 bp, Saccharomyces pastorianus
cagcgtgttatcacatcttgcgtta

SEQ ID NO: 142196 - DNA, 25 bp, Saccharomyces pastorianus
tattgcttcgtggagatatatattc

SEQ ID NO: 142197 - DNA, 25 bp, Saccharomyces pastorianus
ggccttgcaaaaattgctatgtttt

SEQ ID NO: 142198 - DNA, 25 bp, Saccharomyces pastorianus
gctatgtttttcttgtgcttggtat

SEQ ID NO: 142199 - DNA, 25 bp, Saccharomyces pastorianus
tgttatcacatcttgcgttaccggg

SEQ ID NO: 142200 - DNA, 25 bp, Saccharomyces pastorianus
gcttggtattgcttcgtggagatat

SEQ ID NO: 142201 - DNA, 25 bp, Saccharomyces pastorianus
gatatttaaacactctggccgatga

SEQ ID NO: 142202 - DNA, 25 bp, Saccharomyces pastorianus
gaatgctgactaatttaggcgcaat

SEQ ID NO: 142203 - DNA, 25 bp, Saccharomyces pastorianus
gaaacttcataagatccattctttt

SEQ ID NO: 142204 - DNA, 25 bp, Saccharomyces pastorianus
gaaaattaccgtgccaaaagattgg

SEQ ID NO: 142205 - DNA, 25 bp, Saccharomyces pastorianus
gggatataaccgaattactcttcaa

SEQ ID NO: 142206 - DNA, 25 bp, Saccharomyces pastorianus
acactctggccgatgagggtaggct

SEQ ID NO: 142207 - DNA, 25 bp, Saccharomyces pastorianus
aggctgaagtacattgccaatggtt

SEQ ID NO: 142208 - DNA, 25 bp, Saccharomyces pastorianus
gcgagatggattttgatcaagcaca

SEQ ID NO: 142209 - DNA, 25 bp, Saccharomyces pastorianus
aagaccgccccaatggagattgaga

SEQ ID NO: 142210 - DNA, 25 bp, Saccharomyces pastorianus
agaagtctgccattcatcgaaggaa

SEQ ID NO: 142211 - DNA, 25 bp, Saccharomyces pastorianus
atgaactacataacgattctgagat

SEQ ID NO: 142212 - DNA, 25 bp, Saccharomyces pastorianus
tgaaggcactgctctcacttgtaga

SEQ ID NO: 142213 - DNA, 25 bp, Saccharomyces pastorianus
gcagcagatgcagaccagtcgaatt

SEQ ID NO: 142214 - DNA, 25 bp, Saccharomyces pastorianus
gacacgccatgctatacgaacatat

SEQ ID NO: 142215 - DNA, 25 bp, Saccharomyces pastorianus
caaacggtatattaggactcccaga

SEQ ID NO: 142216 - DNA, 25 bp, Saccharomyces pastorianus
ggacctaccaataagacacgccatg

SEQ ID NO: 142217 - DNA, 25 bp, Saccharomyces pastorianus
tatagcttgggtaccagagcctaat

SEQ ID NO: 142218 - DNA, 25 bp, Saccharomyces pastorianus
atgtagcgaggagctctgccgtaaa

SEQ ID NO: 142219 - DNA, 25 bp, Saccharomyces pastorianus
gagcctaatgacatgattcccggta

SEQ ID NO: 142220 - DNA, 25 bp, Saccharomyces pastorianus
gtagacactttgcacgattctgata

SEQ ID NO: 142221 - DNA, 25 bp, Saccharomyces pastorianus
aagcccctttctatggaacctcaag

SEQ ID NO: 142222 - DNA, 25 bp, Saccharomyces pastorianus
gaggtgcttttggatctatttgaat

SEQ ID NO: 142223 - DNA, 25 bp, Saccharomyces pastorianus
aaggctgttccaccatttcagacat

SEQ ID NO: 142224 - DNA, 25 bp, Saccharomyces pastorianus
tgctgctcctctttttcaaacgata

SEQ ID NO: 142225 - DNA, 25 bp, Saccharomyces pastorianus
acgataccccaccattcagaaaata

SEQ ID NO: 142226 - DNA, 25 bp, Saccharomyces pastorianus
cgattacgacgaaactgcagcctgg

SEQ ID NO: 142227 - DNA, 25 bp, Saccharomyces pastorianus
gtaaagacacctggcgtatgctgct

SEQ ID NO: 142228 - DNA, 25 bp, Saccharomyces pastorianus
atttttccaaccagagtacccagtg

SEQ ID NO: 142229 - DNA, 25 bp, Saccharomyces pastorianus
gctttcaatttgattctggacccaa

SEQ ID NO: 142230 - DNA, 25 bp, Saccharomyces pastorianus
gaaactgcagcctggccatttatta

SEQ ID NO: 142231 - DNA, 25 bp, Saccharomyces pastorianus
atggttccgtttccttcgcgatgag

SEQ ID NO: 142232 - DNA, 25 bp, Saccharomyces pastorianus
gatttgcttgagacatggttccgtt

SEQ ID NO: 142233 - DNA, 25 bp, Saccharomyces pastorianus
gtacccagtgcgtatggaaccagat

SEQ ID NO: 142234 - DNA, 25 bp, Saccharomyces pastorianus
catattacgtctcctttaccagatg

SEQ ID NO: 142235 - DNA, 25 bp, Saccharomyces pastorianus
aactattcgagtgcttataccctaa

SEQ ID NO: 142236 - DNA, 25 bp, Saccharomyces pastorianus
taatacctaggactacgccaatgaa

SEQ ID NO: 142237 - DNA, 25 bp, Saccharomyces pastorianus
gaccagtacgtcaaggaactacccg

SEQ ID NO: 142238 - DNA, 25 bp, Saccharomyces pastorianus
atagaccgtattcatgcgactttcc

SEQ ID NO: 142239 - DNA, 25 bp, Saccharomyces pastorianus
gtcggatgatttgcaccggcggtaa

SEQ ID NO: 142240 - DNA, 25 bp, Saccharomyces pastorianus
aaaaagcctgcttgacagcccgcat

SEQ ID NO: 142241 - DNA, 25 bp, Saccharomyces pastorianus
agaaatacatctgcccatgcggaaa

SEQ ID NO: 142242 - DNA, 25 bp, Saccharomyces pastorianus
gacacatttgcaagatagaccgtat

SEQ ID NO: 142243 - DNA, 25 bp, Saccharomyces pastorianus
tcccggttgcaccaaggcgtttgtt

SEQ ID NO: 142244 - DNA, 25 bp, Saccharomyces pastorianus
ggcgtttgttcgcaatcatgattta

SEQ ID NO: 142245 - DNA, 25 bp, Saccharomyces pastorianus
aagagaggtctaagtggcacagcga

SEQ ID NO: 142246 - DNA, 25 bp, Saccharomyces pastorianus
acgggcgatggctcttctgataaaa

SEQ ID NO: 142247 - DNA, 25 bp, Saccharomyces pastorianus
gcgatatttggatttctcggccata

SEQ ID NO: 142248 - DNA, 25 bp, Saccharomyces pastorianus
aaaaatcaatgtcctcgcacaagag

SEQ ID NO: 142249 - DNA, 25 bp, Saccharomyces pastorianus
gataatgtcaatcctaccatacccc

SEQ ID NO: 142250 - DNA, 25 bp, Saccharomyces pastorianus
acaacaaagtctcccactatagcaa

SEQ ID NO: 142251 - DNA, 25 bp, Saccharomyces pastorianus
gatgatggcctcgataatttgttag

SEQ ID NO: 142252 - DNA, 25 bp, Saccharomyces pastorianus
atgtctaaagatccgcaacccatgg

SEQ ID NO: 142253 - DNA, 25 bp, Saccharomyces pastorianus
agtgccttctcctaagacgggcgat

SEQ ID NO: 142254 - DNA, 25 bp, Saccharomyces pastorianus
tctggatattcctttagtgccttct

SEQ ID NO: 142255 - DNA, 25 bp, Saccharomyces pastorianus
agctatttgagccaagtttcgttga

SEQ ID NO: 142256 - DNA, 25 bp, Saccharomyces pastorianus
tgtacaactattttggtcgctctgg

SEQ ID NO: 142257 - DNA, 25 bp, Saccharomyces pastorianus
attacaacaatgctaaggccccaca

SEQ ID NO: 142258 - DNA, 25 bp, Saccharomyces pastorianus
aaaaaagaagcctccactgccatca

SEQ ID NO: 142259 - DNA, 25 bp, Saccharomyces pastorianus
ctgaacccgaatcccctgaagaaga

SEQ ID NO: 142260 - DNA, 25 bp, Saccharomyces pastorianus
ggtgaccttattggcttaggcataa

SEQ ID NO: 142261 - DNA, 25 bp, Saccharomyces pastorianus
tagcgaatcatctttccgagtggat

SEQ ID NO: 142262 - DNA, 25 bp, Saccharomyces pastorianus
gtgccacgctgatagatatcccgat

SEQ ID NO: 142263 - DNA, 25 bp, Saccharomyces pastorianus
agctggcgtcagcattgacacgttc

SEQ ID NO: 142264 - DNA, 25 bp, Saccharomyces pastorianus
aatggagacccactgtacaactatt

SEQ ID NO: 142265 - DNA, 25 bp, Saccharomyces pastorianus
aatcccgccgcatatgatttagcga

SEQ ID NO: 142266 - DNA, 25 bp, Saccharomyces pastorianus
tgaatatgcaggtgccaatcccgcc

SEQ ID NO: 142267 - DNA, 25 bp, Saccharomyces pastorianus
aacttagtcaagatctctggtgcga

SEQ ID NO: 142268 - DNA, 25 bp, Saccharomyces pastorianus
atataggtccttccctttacggctg

SEQ ID NO: 142269 - DNA, 25 bp, Saccharomyces pastorianus
agattttggctaggctttcattgaa

SEQ ID NO: 142270 - DNA, 25 bp, Saccharomyces pastorianus
taaccagtggttgcgcacgattgaa

SEQ ID NO: 142271 - DNA, 25 bp, Saccharomyces pastorianus
aaatccaaccggtagcacaagatat

SEQ ID NO: 142272 - DNA, 25 bp, Saccharomyces pastorianus
ggtgttcctctcttgagttcagaaa

SEQ ID NO: 142273 - DNA, 25 bp, Saccharomyces pastorianus
acgggtcggcttgttggcaaaagat

SEQ ID NO: 142274 - DNA, 25 bp, Saccharomyces pastorianus
ataccctaagttaccatcgttgcta

SEQ ID NO: 142275 - DNA, 25 bp, Saccharomyces pastorianus
gagttacatgtaggtgttcctctct

SEQ ID NO: 142276 - DNA, 25 bp, Saccharomyces pastorianus
gcaagtttaccttcggattatctga

SEQ ID NO: 142277 - DNA, 25 bp, Saccharomyces pastorianus
agatagtttgggttcgacttcgtcg

SEQ ID NO: 142278 - DNA, 25 bp, Saccharomyces pastorianus
gtgattcttggtaacttcgtcgaca

SEQ ID NO: 142279 - DNA, 25 bp, Saccharomyces pastorianus
agttggcgacgctgatatcaccgca

SEQ ID NO: 142280 - DNA, 25 bp, Saccharomyces pastorianus
caatttgcaattccatgtcctcgtg

SEQ ID NO: 142281 - DNA, 25 bp, Saccharomyces pastorianus
gagtacctgatagatccgtttctga

SEQ ID NO: 142282 - DNA, 25 bp, Saccharomyces pastorianus
taagattggaacttcccaccgtcga

SEQ ID NO: 142283 - DNA, 25 bp, Saccharomyces pastorianus
gaaacatgttcttccgtgtacgtta

SEQ ID NO: 142284 - DNA, 25 bp, Saccharomyces pastorianus
atcaggtattttgcccgtgattctt

SEQ ID NO: 142285 - DNA, 25 bp, Saccharomyces pastorianus
gttgcatttggaagtagccgctcta

SEQ ID NO: 142286 - DNA, 25 bp, Saccharomyces pastorianus
gtcacttccatctaagtctacgttg

SEQ ID NO: 142287 - DNA, 25 bp, Saccharomyces pastorianus
gacgctcaagcaactcaaacactgg

SEQ ID NO: 142288 - DNA, 25 bp, Saccharomyces pastorianus
agaaagcggtgcatttcccgatcac

SEQ ID NO: 142289 - DNA, 25 bp, Saccharomyces pastorianus
atggcattcaagttatggctactgg

SEQ ID NO: 142290 - DNA, 25 bp, Saccharomyces pastorianus
cacacaattggagggccagtccggg

SEQ ID NO: 142291 - DNA, 25 bp, Saccharomyces pastorianus
aactggcgcaggatttgggtattca

SEQ ID NO: 142292 - DNA, 25 bp, Saccharomyces pastorianus
gagcacgtgttcgaacggtacacac

SEQ ID NO: 142293 - DNA, 25 bp, Saccharomyces pastorianus
gttcgaacggtacacacaattggag

SEQ ID NO: 142294 - DNA, 25 bp, Saccharomyces pastorianus
atggctactggatgaggaaacaata

SEQ ID NO: 142295 - DNA, 25 bp, Saccharomyces pastorianus
cggtacacacaattggagggccagt

SEQ ID NO: 142296 - DNA, 25 bp, Saccharomyces pastorianus
agtccgggaaactggcgcaggattt

SEQ ID NO: 142297 - DNA, 25 bp, Saccharomyces pastorianus
gaggaaacaatatacgagcacgtgt

SEQ ID NO: 142298 - DNA, 25 bp, Saccharomyces pastorianus
gcacgtgttcgaacggtacacacaa

SEQ ID NO: 142299 - DNA, 25 bp, Saccharomyces pastorianus
gcattcaagttatggctactggatg

SEQ ID NO: 142300 - DNA, 25 bp, Saccharomyces pastorianus
atacgtcaatgaagagggtgagttc

SEQ ID NO: 142301 - DNA, 25 bp, Saccharomyces pastorianus
ataatactggccaactttggtcaag

SEQ ID NO: 142302 - DNA, 25 bp, Saccharomyces pastorianus
ggccaactttggtcaagaaaatacg

SEQ ID NO: 142303 - DNA, 25 bp, Saccharomyces pastorianus
tactggccaactttggtcaagaaaa

SEQ ID NO: 142304 - DNA, 25 bp, Saccharomyces pastorianus
cacaataatactggccaactttggt

SEQ ID NO: 142305 - DNA, 25 bp, Saccharomyces pastorianus
gagggtgagttcactttgcccataa

SEQ ID NO: 142306 - DNA, 25 bp, Saccharomyces pastorianus
aatactggccaactttggtcaagaa

SEQ ID NO: 142307 - DNA, 25 bp, Saccharomyces pastorianus
gggtgagttcactttgcccataaaa

SEQ ID NO: 142308 - DNA, 25 bp, Saccharomyces pastorianus
aagagggtgagttcactttgcccat

SEQ ID NO: 142309 - DNA, 25 bp, Saccharomyces pastorianus
gaacacaataatactggccaacttt

SEQ ID NO: 142310 - DNA, 25 bp, Saccharomyces pastorianus
actttggtcaagaaaatacgtcaat

SEQ ID NO: 142311 - DNA, 25 bp, Saccharomyces pastorianus
aacagtcaacttctagctctcagga

SEQ ID NO: 142312 - DNA, 25 bp, Saccharomyces pastorianus
aattgtcttgataactaccaagggt

SEQ ID NO: 142313 - DNA, 25 bp, Saccharomyces pastorianus
ttcctgtgatcatggtgttgttgct

SEQ ID NO: 142314 - DNA, 25 bp, Saccharomyces pastorianus
caaattggataaatacggccgtgtt

SEQ ID NO: 142315 - DNA, 25 bp, Saccharomyces pastorianus
aatgaaggcagacggcaaattggat

SEQ ID NO: 142316 - DNA, 25 bp, Saccharomyces pastorianus
tgccatcgcacaaatgtcaaccgtt

SEQ ID NO: 142317 - DNA, 25 bp, Saccharomyces pastorianus
aagaatatgttccattagacaatgc

SEQ ID NO: 142318 - DNA, 25 bp, Saccharomyces pastorianus
aagccattgctgttgccatcgcaca

SEQ ID NO: 142319 - DNA, 25 bp, Saccharomyces pastorianus
atcatggtgttgttgctagtgtgaa

SEQ ID NO: 142320 - DNA, 25 bp, Saccharomyces pastorianus
gacaatgctgaacagtcaacttcta

SEQ ID NO: 142321 - DNA, 25 bp, Saccharomyces pastorianus
acttctagctctcaggaaactaagg

SEQ ID NO: 142322 - DNA, 25 bp, Saccharomyces pastorianus
aatgacaacatggtcactttacatg

SEQ ID NO: 142323 - DNA, 25 bp, Saccharomyces pastorianus
ccggtgctctgtctgaaaatgacaa

SEQ ID NO: 142324 - DNA, 25 bp, Saccharomyces pastorianus
tagatccggtgctctgtctgaaaat

SEQ ID NO: 142325 - DNA, 25 bp, Saccharomyces pastorianus
agatccggtgctctgtctgaaaatg

SEQ ID NO: 142326 - DNA, 25 bp, Saccharomyces pastorianus
gaaaatgacaacatggtcactttac

SEQ ID NO: 142327 - DNA, 25 bp, Saccharomyces pastorianus
gatccggtgctctgtctgaaaatga

SEQ ID NO: 142328 - DNA, 25 bp, Saccharomyces pastorianus
aaatgacaacatggtcactttacat

SEQ ID NO: 142329 - DNA, 25 bp, Saccharomyces pastorianus
atgacaacatggtcactttacatga

SEQ ID NO: 142330 - DNA, 25 bp, Saccharomyces pastorianus
cggtgctctgtctgaaaatgacaac

SEQ ID NO: 142331 - DNA, 25 bp, Saccharomyces pastorianus
tccggtgctctgtctgaaaatgaca

SEQ ID NO: 142332 - DNA, 25 bp, Saccharomyces pastorianus
atccggtgctctgtctgaaaatgac

SEQ ID NO: 142333 - DNA, 25 bp, Saccharomyces pastorianus
ggtggtcacatgcaagaattgcgtc

SEQ ID NO: 142334 - DNA, 25 bp, Saccharomyces pastorianus
gagatgaatcttacttgagatccat

SEQ ID NO: 142335 - DNA, 25 bp, Saccharomyces pastorianus
gttcatttaggtatgctattaggtg

SEQ ID NO: 142336 - DNA, 25 bp, Saccharomyces pastorianus
gatgttatggatgcccaatgggttt

SEQ ID NO: 142337 - DNA, 25 bp, Saccharomyces pastorianus
tgaatcttacttgagatccattatt

SEQ ID NO: 142338 - DNA, 25 bp, Saccharomyces pastorianus
aattgcgtcgtgttagatccggtgc

SEQ ID NO: 142339 - DNA, 25 bp, Saccharomyces pastorianus
gcaagaattgcgtcgtgttagatcc

SEQ ID NO: 142340 - DNA, 25 bp, Saccharomyces pastorianus
ctttacatgatgttatggatgccca

SEQ ID NO: 142341 - DNA, 25 bp, Saccharomyces pastorianus
ttatggatgcccaatgggtttacga

SEQ ID NO: 142342 - DNA, 25 bp, Saccharomyces pastorianus
tgcgtcgtgttagatccggtgctct

SEQ ID NO: 142343 - DNA, 25 bp, Saccharomyces pastorianus
ttgtgtgttcatttaggtatgctat

SEQ ID NO: 142344 - DNA, 25 bp, Saccharomyces pastorianus
agaattgcgtcgtgttagatccggt

SEQ ID NO: 142345 - DNA, 25 bp, Saccharomyces pastorianus
tagatccggtgctctgtctgaaaat

SEQ ID NO: 142346 - DNA, 25 bp, Saccharomyces pastorianus
agatccggtgctctgtctgaaaatg

SEQ ID NO: 142347 - DNA, 25 bp, Saccharomyces pastorianus
gcgtactttgtgtgttcatttaggt

SEQ ID NO: 142348 - DNA, 25 bp, Saccharomyces pastorianus
gtatgctattaggtgttggtggtca

SEQ ID NO: 142349 - DNA, 25 bp, Saccharomyces pastorianus
gatccggtgctctgtctgaaaatga

SEQ ID NO: 142350 - DNA, 25 bp, Saccharomyces pastorianus
atgcccaatgggtttacgacaatac

SEQ ID NO: 142351 - DNA, 25 bp, Saccharomyces pastorianus
atgacaacatggtcactttacatga

SEQ ID NO: 142352 - DNA, 25 bp, Saccharomyces pastorianus
cggtgctctgtctgaaaatgacaac

SEQ ID NO: 142353 - DNA, 25 bp, Saccharomyces pastorianus
gttggtggtcacatgcaagaattgc

SEQ ID NO: 142354 - DNA, 25 bp, Saccharomyces pastorianus
atccggtgctctgtctgaaaatgac

SEQ ID NO: 142355 - DNA, 25 bp, Saccharomyces pastorianus
gggcgcaactaaagtccgagatcat

SEQ ID NO: 142356 - DNA, 25 bp, Saccharomyces pastorianus
gctgacgaaatcacgaccgaggact

SEQ ID NO: 142357 - DNA, 25 bp, Saccharomyces pastorianus
gaccgaggacttaagggcgcaacta

SEQ ID NO: 142358 - DNA, 25 bp, Saccharomyces pastorianus
atgccatcggtattgcagaaccatt

SEQ ID NO: 142359 - DNA, 25 bp, Saccharomyces pastorianus
gtcgaatacaaggatgaccacggta

SEQ ID NO: 142360 - DNA, 25 bp, Saccharomyces pastorianus
taaggttgatcgttctgccgcttat

SEQ ID NO: 142361 - DNA, 25 bp, Saccharomyces pastorianus
tcaaggagttggacttagctagacc

SEQ ID NO: 142362 - DNA, 25 bp, Saccharomyces pastorianus
accgcttcttatggccatttcacaa

SEQ ID NO: 142363 - DNA, 25 bp, Saccharomyces pastorianus
gaccacggtagatgggttccgcaaa

SEQ ID NO: 142364 - DNA, 25 bp, Saccharomyces pastorianus
ggtaaggactactctaaggttgatc

SEQ ID NO: 142365 - DNA, 25 bp, Saccharomyces pastorianus
gtctccgctcaacatgctgacgaaa

SEQ ID NO: 142366 - DNA, 25 bp, Saccharomyces pastorianus
ggccggtacatttttattcacttct

SEQ ID NO: 142367 - DNA, 25 bp, Saccharomyces pastorianus
tggccggtacatttttattcacttc

SEQ ID NO: 142368 - DNA, 25 bp, Saccharomyces pastorianus
agtttccgacgccatcttggacgct

SEQ ID NO: 142369 - DNA, 25 bp, Saccharomyces pastorianus
gtgaaggtcacccagataagatctg

SEQ ID NO: 142370 - DNA, 25 bp, Saccharomyces pastorianus
gataagatctgtgaccaagtttccg

SEQ ID NO: 142371 - DNA, 25 bp, Saccharomyces pastorianus
tattcacttctgaatccgttggtga

SEQ ID NO: 142372 - DNA, 25 bp, Saccharomyces pastorianus
gtgaccaagtttccgacgccatctt

SEQ ID NO: 142373 - DNA, 25 bp, Saccharomyces pastorianus
agatctgtgaccaagtttccgacgc

SEQ ID NO: 142374 - DNA, 25 bp, Saccharomyces pastorianus
tcacttctgaatccgttggtgaagg

SEQ ID NO: 142375 - DNA, 25 bp, Saccharomyces pastorianus
gaatccgttggtgaaggtcacccag

SEQ ID NO: 142376 - DNA, 25 bp, Saccharomyces pastorianus
tctgtgaccaagtttccgacgccat

SEQ ID NO: 142377 - DNA, 25 bp, Saccharomyces pastorianus
attatgaagacctgcccaccgccaa

SEQ ID NO: 142378 - DNA, 25 bp, Saccharomyces pastorianus
ttgaattatgaagacctgcccaccg

SEQ ID NO: 142379 - DNA, 25 bp, Saccharomyces pastorianus
tgaattatgaagacctgcccaccgc

SEQ ID NO: 142380 - DNA, 25 bp, Saccharomyces pastorianus
gcccaccgccaaagatgagttaact

SEQ ID NO: 142381 - DNA, 25 bp, Saccharomyces pastorianus
ctgcccaccgccaaagatgagttaa

SEQ ID NO: 142382 - DNA, 25 bp, Saccharomyces pastorianus
gagcaaattcaaaaacttgccaaat

SEQ ID NO: 142383 - DNA, 25 bp, Saccharomyces pastorianus
aaacttgccaaatacgccataagcg

SEQ ID NO: 142384 - DNA, 25 bp, Saccharomyces pastorianus
caaatacgccataagcgcattgaat

SEQ ID NO: 142385 - DNA, 25 bp, Saccharomyces pastorianus
cagggccagtaaaatagagcaaatt

SEQ ID NO: 142386 - DNA, 25 bp, Saccharomyces pastorianus
tgccaaatacgccataagcgcattg

SEQ ID NO: 142387 - DNA, 25 bp, Saccharomyces pastorianus
gacagggccagtaaaatagagcaaa

SEQ ID NO: 142388 - DNA, 25 bp, Saccharomyces pastorianus
aagaagatcggtcgcaagagatgac

SEQ ID NO: 142389 - DNA, 25 bp, Saccharomyces pastorianus
aagagatgaccgcactagcgacaga

SEQ ID NO: 142390 - DNA, 25 bp, Saccharomyces pastorianus
gagagtgaagcagaagacagtgaca

SEQ ID NO: 142391 - DNA, 25 bp, Saccharomyces pastorianus
taagaaggagattggcggcgagagt

SEQ ID NO: 142392 - DNA, 25 bp, Saccharomyces pastorianus
accgcactagcgacagaacttcttg

SEQ ID NO: 142393 - DNA, 25 bp, Saccharomyces pastorianus
tactgagtgaagaagatcggtcgca

SEQ ID NO: 142394 - DNA, 25 bp, Saccharomyces pastorianus
gatactattgaagcgtttaagaagg

SEQ ID NO: 142395 - DNA, 25 bp, Saccharomyces pastorianus
cgacagaacttcttgatactattga

SEQ ID NO: 142396 - DNA, 25 bp, Saccharomyces pastorianus
atatgcggtgggattgatactgagt

SEQ ID NO: 142397 - DNA, 25 bp, Saccharomyces pastorianus
aagcttacacgttatgaagactcta

SEQ ID NO: 142398 - DNA, 25 bp, Saccharomyces pastorianus
gacagtgacaaaagcttacacgtta

SEQ ID NO: 142399 - DNA, 25 bp, Saccharomyces pastorianus
atgagatacttgaaacacgtttcaa

SEQ ID NO: 142400 - DNA, 25 bp, Saccharomyces pastorianus
aaacacgtttcaagaagattcaaga

SEQ ID NO: 142401 - DNA, 25 bp, Saccharomyces pastorianus
gtttcaagaagattcaagaacggtt

SEQ ID NO: 142402 - DNA, 25 bp, Saccharomyces pastorianus
ttcaagaagattcaagaacggtttc

SEQ ID NO: 142403 - DNA, 25 bp, Saccharomyces pastorianus
tgagatacttgaaacacgtttcaag

SEQ ID NO: 142404 - DNA, 25 bp, Saccharomyces pastorianus
gaaacacgtttcaagaagattcaag

SEQ ID NO: 142405 - DNA, 25 bp, Saccharomyces pastorianus
cacgtttcaagaagattcaagaacg

SEQ ID NO: 142406 - DNA, 25 bp, Saccharomyces pastorianus
tttcaagaagattcaagaacggttt

SEQ ID NO: 142407 - DNA, 25 bp, Saccharomyces pastorianus
gagatacttgaaacacgtttcaaga

SEQ ID NO: 142408 - DNA, 25 bp, Saccharomyces pastorianus
acacgtttcaagaagattcaagaac

SEQ ID NO: 142409 - DNA, 25 bp, Saccharomyces pastorianus
aacacgtttcaagaagattcaagaa

SEQ ID NO: 142410 - DNA, 25 bp, Saccharomyces pastorianus
atgtattctttccaatcttcgcaac

SEQ ID NO: 142411 - DNA, 25 bp, Saccharomyces pastorianus
tttcattcgtcgcaacagcgccaaa

SEQ ID NO: 142412 - DNA, 25 bp, Saccharomyces pastorianus
taaataccactaaccgcacaaatcc

SEQ ID NO: 142413 - DNA, 25 bp, Saccharomyces pastorianus
agtggattttctcaatttatgcctc

SEQ ID NO: 142414 - DNA, 25 bp, Saccharomyces pastorianus
caaaaccaatcactttccttcagaa

SEQ ID NO: 142415 - DNA, 25 bp, Saccharomyces pastorianus
ggtggaaactcatcaatgtattctt

SEQ ID NO: 142416 - DNA, 25 bp, Saccharomyces pastorianus
gatagatctccaataccgcaaacac

SEQ ID NO: 142417 - DNA, 25 bp, Saccharomyces pastorianus
atcttcgcaacatcggtttcattcg

SEQ ID NO: 142418 - DNA, 25 bp, Saccharomyces pastorianus
gcaaacacagcaccatgtaccagat

SEQ ID NO: 142419 - DNA, 25 bp, Saccharomyces pastorianus
cacaaatccgcttactgcacaaagt

SEQ ID NO: 142420 - DNA, 25 bp, Saccharomyces pastorianus
atcaaaatacattccatccatcgcc

SEQ ID NO: 142421 - DNA, 25 bp, Saccharomyces pastorianus
tgggcaaaccaaccgaacagtaact

SEQ ID NO: 142422 - DNA, 25 bp, Saccharomyces pastorianus
tgaaaccctttctgccagtgacaga

SEQ ID NO: 142423 - DNA, 25 bp, Saccharomyces pastorianus
gagatacgtaggtacatccactgaa

SEQ ID NO: 142424 - DNA, 25 bp, Saccharomyces pastorianus
ataacagttcatcggtcaacctcaa

SEQ ID NO: 142425 - DNA, 25 bp, Saccharomyces pastorianus
gaagaacaacgtgtgccggattttg

SEQ ID NO: 142426 - DNA, 25 bp, Saccharomyces pastorianus
ctttcttcgcctttgagggtagaag

SEQ ID NO: 142427 - DNA, 25 bp, Saccharomyces pastorianus
tacgataaatacttccctttcttcg

SEQ ID NO: 142428 - DNA, 25 bp, Saccharomyces pastorianus
tcttttgttacggacctgaacttga

SEQ ID NO: 142429 - DNA, 25 bp, Saccharomyces pastorianus
actacggatgagtttgacttttcag

SEQ ID NO: 142430 - DNA, 25 bp, Saccharomyces pastorianus
aaatgaggacctgggatctttgaaa

SEQ ID NO: 142431 - DNA, 25 bp, Saccharomyces pastorianus
gatcccacattcttctttatttaca

SEQ ID NO: 142432 - DNA, 25 bp, Saccharomyces pastorianus
aatcgccattcctaatagtgaacta

SEQ ID NO: 142433 - DNA, 25 bp, Saccharomyces pastorianus
tagtgaactaaacgcgctgcttgcc

SEQ ID NO: 142434 - DNA, 25 bp, Saccharomyces pastorianus
aaaacatggctcagtggttgaaact

SEQ ID NO: 142435 - DNA, 25 bp, Saccharomyces pastorianus
attgcacataggctttcgacgatca

SEQ ID NO: 142436 - DNA, 25 bp, Saccharomyces pastorianus
gcttgccgaacagcaggacgaggaa

SEQ ID NO: 142437 - DNA, 25 bp, Saccharomyces pastorianus
gggttcactactatatcaattgcac

SEQ ID NO: 142438 - DNA, 25 bp, Saccharomyces pastorianus
ggctttcgacgatcaaacacagtac

SEQ ID NO: 142439 - DNA, 25 bp, Saccharomyces pastorianus
tcctgccgtccttattctagatgaa

SEQ ID NO: 142440 - DNA, 25 bp, Saccharomyces pastorianus
ttccgagatctaatcgccattccta

SEQ ID NO: 142441 - DNA, 25 bp, Saccharomyces pastorianus
aaactggttcattccgagatctaat

SEQ ID NO: 142442 - DNA, 25 bp, Saccharomyces pastorianus
agatgaagcaaccagtgcccgtgac

SEQ ID NO: 142443 - DNA, 25 bp, Saccharomyces pastorianus
tggtttatcgagcttctattcagaa

SEQ ID NO: 142444 - DNA, 25 bp, Saccharomyces pastorianus
attcttcggaagtactgggctagtt

SEQ ID NO: 142445 - DNA, 25 bp, Saccharomyces pastorianus
gaaaggaccctgtatcattagccca

SEQ ID NO: 142446 - DNA, 25 bp, Saccharomyces pastorianus
gcggctgccagggtttttgaattaa

SEQ ID NO: 142447 - DNA, 25 bp, Saccharomyces pastorianus
aagcctggtgaacacgtttgcgctg

SEQ ID NO: 142448 - DNA, 25 bp, Saccharomyces pastorianus
tcggcccaaacaccagattttcaag

SEQ ID NO: 142449 - DNA, 25 bp, Saccharomyces pastorianus
aaacgtgtcattcacttatcccact

SEQ ID NO: 142450 - DNA, 25 bp, Saccharomyces pastorianus
aattgcgtctttgttgctcaggtac

SEQ ID NO: 142451 - DNA, 25 bp, Saccharomyces pastorianus
gtaagccattgattcgtccgactat

SEQ ID NO: 142452 - DNA, 25 bp, Saccharomyces pastorianus
gttggcaacactgcaatgctgtcgt

SEQ ID NO: 142453 - DNA, 25 bp, Saccharomyces pastorianus
aaaaacgaggttcgccgctatgcaa

SEQ ID NO: 142454 - DNA, 25 bp, Saccharomyces pastorianus
attggttgttcccacaagtcgatgc

SEQ ID NO: 142455 - DNA, 25 bp, Saccharomyces pastorianus
ctggagcttcattacgtgctggttt

SEQ ID NO: 142456 - DNA, 25 bp, Saccharomyces pastorianus
gtagatgcaaccaaactgacacctg

SEQ ID NO: 142457 - DNA, 25 bp, Saccharomyces pastorianus
gtggttctggaactactggagcttc

SEQ ID NO: 142458 - DNA, 25 bp, Saccharomyces pastorianus
gggtttggttcgattgtagtctcta

SEQ ID NO: 142459 - DNA, 25 bp, Saccharomyces pastorianus
atcaagagtgaaaaccccgcgcaag

SEQ ID NO: 142460 - DNA, 25 bp, Saccharomyces pastorianus
gtgctggtttacctactgttataaa

SEQ ID NO: 142461 - DNA, 25 bp, Saccharomyces pastorianus
gaaacgttccccatgattggttgtt

SEQ ID NO: 142462 - DNA, 25 bp, Saccharomyces pastorianus
ggtgatcagttcttttatgcaggta

SEQ ID NO: 142463 - DNA, 25 bp, Saccharomyces pastorianus
acggaagctctcgtcgaagcagtta

SEQ ID NO: 142464 - DNA, 25 bp, Saccharomyces pastorianus
gatgctgccgttcaccatggtggtt

SEQ ID NO: 142465 - DNA, 25 bp, Saccharomyces pastorianus
ggcatcatcgcctttcaaggtcact

SEQ ID NO: 142466 - DNA, 25 bp, Saccharomyces pastorianus
tcaagcgctggagaggaagatcaaa

SEQ ID NO: 142467 - DNA, 25 bp, Saccharomyces pastorianus
gcaggacagtccaaatgaagcccgt

SEQ ID NO: 142468 - DNA, 25 bp, Saccharomyces pastorianus
ggtacctgataagccatctgagcca

SEQ ID NO: 142469 - DNA, 25 bp, Saccharomyces pastorianus
atctgagccagaaacttcccctagg

SEQ ID NO: 142470 - DNA, 25 bp, Saccharomyces pastorianus
aatgcagatgacttggcgaaatcca

SEQ ID NO: 142471 - DNA, 25 bp, Saccharomyces pastorianus
aaatgaagcccgtagtgatgatgac

SEQ ID NO: 142472 - DNA, 25 bp, Saccharomyces pastorianus
agaaacttcccctaggcatcatcgc

SEQ ID NO: 142473 - DNA, 25 bp, Saccharomyces pastorianus
ggtcactttcgaagttcaagcgctg

SEQ ID NO: 142474 - DNA, 25 bp, Saccharomyces pastorianus
caagcatttcgttggtacctgataa

SEQ ID NO: 142475 - DNA, 25 bp, Saccharomyces pastorianus
gggccaaaaccaagcatttcgttgg

SEQ ID NO: 142476 - DNA, 25 bp, Saccharomyces pastorianus
attctgactggtggaaagtgaggac

SEQ ID NO: 142477 - DNA, 25 bp, Saccharomyces pastorianus
ggcaatattggctacattccgtata

SEQ ID NO: 142478 - DNA, 25 bp, Saccharomyces pastorianus
cctcttgggagggattctgactggt

SEQ ID NO: 142479 - DNA, 25 bp, Saccharomyces pastorianus
gggcgacttgatgcaattttgagta

SEQ ID NO: 142480 - DNA, 25 bp, Saccharomyces pastorianus
ttgagtaagaaagaccctcttggga

SEQ ID NO: 142481 - DNA, 25 bp, Saccharomyces pastorianus
aagtgaggacaaagaacggcaatat

SEQ ID NO: 142482 - DNA, 25 bp, Saccharomyces pastorianus
ggctacattccgtataactatattg

SEQ ID NO: 142483 - DNA, 25 bp, Saccharomyces pastorianus
ccgtataactatattgagatcataa

SEQ ID NO: 142484 - DNA, 25 bp, Saccharomyces pastorianus
aaaaagggcgacttgatgcaatttt

SEQ ID NO: 142485 - DNA, 25 bp, Saccharomyces pastorianus
tattggctacattccgtataactat

SEQ ID NO: 142486 - DNA, 25 bp, Saccharomyces pastorianus
gaacggcaatattggctacattccg

SEQ ID NO: 142487 - DNA, 25 bp, Saccharomyces pastorianus
cgattaagagaacgctgggacagct

SEQ ID NO: 142488 - DNA, 25 bp, Saccharomyces pastorianus
gcttattggctctgttattttaaac

SEQ ID NO: 142489 - DNA, 25 bp, Saccharomyces pastorianus
taaacaacaaatctccgataaatgg

SEQ ID NO: 142490 - DNA, 25 bp, Saccharomyces pastorianus
aacgatccacttcttatgtcaattt

SEQ ID NO: 142491 - DNA, 25 bp, Saccharomyces pastorianus
agtcccataaacgatccacttctta

SEQ ID NO: 142492 - DNA, 25 bp, Saccharomyces pastorianus
atgtcaattttaaaccgcttacaat

SEQ ID NO: 142493 - DNA, 25 bp, Saccharomyces pastorianus
ataacccagcatatcaggacacttt

SEQ ID NO: 142494 - DNA, 25 bp, Saccharomyces pastorianus
gctgggacagcttagtagaaagtgc

SEQ ID NO: 142495 - DNA, 25 bp, Saccharomyces pastorianus
caatatgcttattggctctgttatt

SEQ ID NO: 142496 - DNA, 25 bp, Saccharomyces pastorianus
aatgctaggaattgggataacccag

SEQ ID NO: 142497 - DNA, 25 bp, Saccharomyces pastorianus
gacactttaagtcccataaacgatc

SEQ ID NO: 142498 - DNA, 25 bp, Saccharomyces pastorianus
taggcgctgacacttgggccactta

SEQ ID NO: 142499 - DNA, 25 bp, Saccharomyces pastorianus
aaaatagctcgcacagtcctgaaga

SEQ ID NO: 142500 - DNA, 25 bp, Saccharomyces pastorianus
gagactagaaatcgctgtttggcca

SEQ ID NO: 142501 - DNA, 25 bp, Saccharomyces pastorianus
gacggcccaatcaaactactattct

SEQ ID NO: 142502 - DNA, 25 bp, Saccharomyces pastorianus
aatataggtacccacaaacgccgat

SEQ ID NO: 142503 - DNA, 25 bp, Saccharomyces pastorianus
agggccaatttacggcgcatgttga

SEQ ID NO: 142504 - DNA, 25 bp, Saccharomyces pastorianus
gaagaaggatacctgggaccccatt

SEQ ID NO: 142505 - DNA, 25 bp, Saccharomyces pastorianus
aaactgggcaggtggcctcatagat

SEQ ID NO: 142506 - DNA, 25 bp, Saccharomyces pastorianus
gtgtggtgactgcatttgacttaac

SEQ ID NO: 142507 - DNA, 25 bp, Saccharomyces pastorianus
ttgaacaaatcaccgtaacgccgta

SEQ ID NO: 142508 - DNA, 25 bp, Saccharomyces pastorianus
aatgcaaagatttcccgtaggcgct

SEQ ID NO: 142509 - DNA, 25 bp, Saccharomyces pastorianus
atcaatattacagctggtgccggtt

SEQ ID NO: 142510 - DNA, 25 bp, Saccharomyces pastorianus
cgatatgtgtcggtggctgcaacgt

SEQ ID NO: 142511 - DNA, 25 bp, Saccharomyces pastorianus
aatgtggcgctggaccgatatgtgt

SEQ ID NO: 142512 - DNA, 25 bp, Saccharomyces pastorianus
gtgccggttgttggctacatcggat

SEQ ID NO: 142513 - DNA, 25 bp, Saccharomyces pastorianus
aaataacccttgtcccgcagaatgg

SEQ ID NO: 142514 - DNA, 25 bp, Saccharomyces pastorianus
tcttgttctccaaataacccttgtc

SEQ ID NO: 142515 - DNA, 25 bp, Saccharomyces pastorianus
gctacatcggatttgcactgggaga

SEQ ID NO: 142516 - DNA, 25 bp, Saccharomyces pastorianus
agaatggccgtgctgctcgccgtat

SEQ ID NO: 142517 - DNA, 25 bp, Saccharomyces pastorianus
gctgcaacgtgaggtcatctttcga

SEQ ID NO: 142518 - DNA, 25 bp, Saccharomyces pastorianus
gtgctgctcgccgtataatgaatgt

SEQ ID NO: 142519 - DNA, 25 bp, Saccharomyces pastorianus
aaactccatttcttgttctccaaat

SEQ ID NO: 142520 - DNA, 25 bp, Saccharomyces pastorianus
gaatattgccatctgtgctcttaaa

SEQ ID NO: 142521 - DNA, 25 bp, Saccharomyces pastorianus
gacgccgccattttgaaagctattc

SEQ ID NO: 142522 - DNA, 25 bp, Saccharomyces pastorianus
tagaaatggccactactttccagcc

SEQ ID NO: 142523 - DNA, 25 bp, Saccharomyces pastorianus
aggccaaagctttgtaccgtcgtgg

SEQ ID NO: 142524 - DNA, 25 bp, Saccharomyces pastorianus
gatatggctctcaatgacctagaaa

SEQ ID NO: 142525 - DNA, 25 bp, Saccharomyces pastorianus
atgactgtggcgtgttacctgacga

SEQ ID NO: 142526 - DNA, 25 bp, Saccharomyces pastorianus
aatgccgaagctacaccaacagatg

SEQ ID NO: 142527 - DNA, 25 bp, Saccharomyces pastorianus
gtggcctggcctattaccatgttaa

SEQ ID NO: 142528 - DNA, 25 bp, Saccharomyces pastorianus
gaagaatttcgacaccgtcttgaaa

SEQ ID NO: 142529 - DNA, 25 bp, Saccharomyces pastorianus
gaaacagaactattccgtggcttta

SEQ ID NO: 142530 - DNA, 25 bp, Saccharomyces pastorianus
gcaagtattagtagcctcatcggag

SEQ ID NO: 142531 - DNA, 25 bp, Saccharomyces pastorianus
gtttacctccaatagaaatatcaaa

SEQ ID NO: 142532 - DNA, 25 bp, Saccharomyces pastorianus
tttcagccgttttaggcactatgtc

SEQ ID NO: 142533 - DNA, 25 bp, Saccharomyces pastorianus
tcagccgttttaggcactatgtcat

SEQ ID NO: 142534 - DNA, 25 bp, Saccharomyces pastorianus
ccgttttaggcactatgtcattgta

SEQ ID NO: 142535 - DNA, 25 bp, Saccharomyces pastorianus
ttcagccgttttaggcactatgtca

SEQ ID NO: 142536 - DNA, 25 bp, Saccharomyces pastorianus
gccgttttaggcactatgtcattgt

SEQ ID NO: 142537 - DNA, 25 bp, Saccharomyces pastorianus
aattttcagccgttttaggcactat

SEQ ID NO: 142538 - DNA, 25 bp, Saccharomyces pastorianus
gggtttacctccaatagaaatatca

SEQ ID NO: 142539 - DNA, 25 bp, Saccharomyces pastorianus
ttttcagccgttttaggcactatgt

SEQ ID NO: 142540 - DNA, 25 bp, Saccharomyces pastorianus
gttttaggcactatgtcattgtaca

SEQ ID NO: 142541 - DNA, 25 bp, Saccharomyces pastorianus
caactcaaaaactatacggccttgg

SEQ ID NO: 142542 - DNA, 25 bp, Saccharomyces pastorianus
agcaatgactttagatcacccaatg

SEQ ID NO: 142543 - DNA, 25 bp, Saccharomyces pastorianus
aattgagtgagatacccggaatggt

SEQ ID NO: 142544 - DNA, 25 bp, Saccharomyces pastorianus
cacgcaaaggcatttcacaagggtt

SEQ ID NO: 142545 - DNA, 25 bp, Saccharomyces pastorianus
gcagatggtgttttccagttttgga

SEQ ID NO: 142546 - DNA, 25 bp, Saccharomyces pastorianus
agagctttgggcgaatcaaggtcta

SEQ ID NO: 142547 - DNA, 25 bp, Saccharomyces pastorianus
aaacacataccatagcgcaaagaac

SEQ ID NO: 142548 - DNA, 25 bp, Saccharomyces pastorianus
agaattggaccaagccatctctatc

SEQ ID NO: 142549 - DNA, 25 bp, Saccharomyces pastorianus
ataattccatacacgcaaaggcatt

SEQ ID NO: 142550 - DNA, 25 bp, Saccharomyces pastorianus
gtctgaagactttggatggtcataa

SEQ ID NO: 142551 - DNA, 25 bp, Saccharomyces pastorianus
accaagccatctctatcctaaatga

SEQ ID NO: 142552 - DNA, 25 bp, Saccharomyces pastorianus
atatgatcgtaagtgctgatgcaga

SEQ ID NO: 142553 - DNA, 25 bp, Saccharomyces pastorianus
aacgcttctcgcagttggcgggaca

SEQ ID NO: 142554 - DNA, 25 bp, Saccharomyces pastorianus
ggcggtgatgctatctttcagttaa

SEQ ID NO: 142555 - DNA, 25 bp, Saccharomyces pastorianus
ggtcatggtggtacaatttccagtt

SEQ ID NO: 142556 - DNA, 25 bp, Saccharomyces pastorianus
ggttacattactcattcgttcaaag

SEQ ID NO: 142557 - DNA, 25 bp, Saccharomyces pastorianus
ggttattagcatccggtgacaccaa

SEQ ID NO: 142558 - DNA, 25 bp, Saccharomyces pastorianus
gactctgaatctggtagcgtgctta

SEQ ID NO: 142559 - DNA, 25 bp, Saccharomyces pastorianus
gcataatttatacagccggcggtga

SEQ ID NO: 142560 - DNA, 25 bp, Saccharomyces pastorianus
tttactttccggtggtagagacgat

SEQ ID NO: 142561 - DNA, 25 bp, Saccharomyces pastorianus
gacgatatcatcaatctctgggatt

SEQ ID NO: 142562 - DNA, 25 bp, Saccharomyces pastorianus
gtacattctcgacgcagattccact

SEQ ID NO: 142563 - DNA, 25 bp, Saccharomyces pastorianus
acaggtagagtcatgcggattccta

SEQ ID NO: 142564 - DNA, 25 bp, Saccharomyces pastorianus
cagatatcgaaggaattatgggcaa

SEQ ID NO: 142565 - DNA, 25 bp, Saccharomyces pastorianus
gtgcattggcagatatcgaaggaat

SEQ ID NO: 142566 - DNA, 25 bp, Saccharomyces pastorianus
agcagcggctgaaaatcttcgtttc

SEQ ID NO: 142567 - DNA, 25 bp, Saccharomyces pastorianus
gaaaatcttcgtttcactaaaaatg

SEQ ID NO: 142568 - DNA, 25 bp, Saccharomyces pastorianus
ggctgaaaatcttcgtttcactaaa

SEQ ID NO: 142569 - DNA, 25 bp, Saccharomyces pastorianus
gcggctgaaaatcttcgtttcacta

SEQ ID NO: 142570 - DNA, 25 bp, Saccharomyces pastorianus
tatttagtgagagtgcattggcaga

SEQ ID NO: 142571 - DNA, 25 bp, Saccharomyces pastorianus
gtgagagtgcattggcagatatcga

SEQ ID NO: 142572 - DNA, 25 bp, Saccharomyces pastorianus
ggaattatgggcaatgatgttaacc

SEQ ID NO: 142573 - DNA, 25 bp, Saccharomyces pastorianus
gcaaagtatggtggaagcagcggct

SEQ ID NO: 142574 - DNA, 25 bp, Saccharomyces pastorianus
aagaaggcaaagtatggtggaagca

SEQ ID NO: 142575 - DNA, 25 bp, Saccharomyces pastorianus
gttcctaaggttccattatctgcat

SEQ ID NO: 142576 - DNA, 25 bp, Saccharomyces pastorianus
gaagatgcgtcattaatacctcata

SEQ ID NO: 142577 - DNA, 25 bp, Saccharomyces pastorianus
atcggtaacaataacagccatagcg

SEQ ID NO: 142578 - DNA, 25 bp, Saccharomyces pastorianus
ggaggatgattcaccatcccacaca

SEQ ID NO: 142579 - DNA, 25 bp, Saccharomyces pastorianus
gcgacataaataccggtaccgattt

SEQ ID NO: 142580 - DNA, 25 bp, Saccharomyces pastorianus
cataattctgatcttgccgtggaca

SEQ ID NO: 142581 - DNA, 25 bp, Saccharomyces pastorianus
gctgcagattggtatgaagttccta

SEQ ID NO: 142582 - DNA, 25 bp, Saccharomyces pastorianus
atacccctatgaatgaacttccctc

SEQ ID NO: 142583 - DNA, 25 bp, Saccharomyces pastorianus
aaagttcccattggctatattggta

SEQ ID NO: 142584 - DNA, 25 bp, Saccharomyces pastorianus
aatggccatgagatcatcggtaaca

SEQ ID NO: 142585 - DNA, 25 bp, Saccharomyces pastorianus
gcacaaatggccatgctgcagattg

SEQ ID NO: 142586 - DNA, 25 bp, Saccharomyces pastorianus
ttgaaggcactggaacgacacatct

SEQ ID NO: 142587 - DNA, 25 bp, Saccharomyces pastorianus
tgtacctttacaagcctatccgata

SEQ ID NO: 142588 - DNA, 25 bp, Saccharomyces pastorianus
gattattgggcacggtgtaccttta

SEQ ID NO: 142589 - DNA, 25 bp, Saccharomyces pastorianus
tcttcccctggaactgaaagctatc

SEQ ID NO: 142590 - DNA, 25 bp, Saccharomyces pastorianus
gatatcgaagccgtggttactcttt

SEQ ID NO: 142591 - DNA, 25 bp, Saccharomyces pastorianus
gagtttggcctgcttacaatctgaa

SEQ ID NO: 142592 - DNA, 25 bp, Saccharomyces pastorianus
gaagtttcgtctacaagcatccggt

SEQ ID NO: 142593 - DNA, 25 bp, Saccharomyces pastorianus
accttcccaggctatacgatgagca

SEQ ID NO: 142594 - DNA, 25 bp, Saccharomyces pastorianus
tgttctttttcataccagtttgcat

SEQ ID NO: 142595 - DNA, 25 bp, Saccharomyces pastorianus
atactgtgttaacctaggccacctt

SEQ ID NO: 142596 - DNA, 25 bp, Saccharomyces pastorianus
gaggaaggacgagcctacaccggta

SEQ ID NO: 142597 - DNA, 25 bp, Saccharomyces pastorianus
tctggaaggcttattactttcatca

SEQ ID NO: 142598 - DNA, 25 bp, Saccharomyces pastorianus
agaaactgcgctttgactcacctaa

SEQ ID NO: 142599 - DNA, 25 bp, Saccharomyces pastorianus
gggaacttgccggacattttgtcac

SEQ ID NO: 142600 - DNA, 25 bp, Saccharomyces pastorianus
gactgttcagaatctctggacgatt

SEQ ID NO: 142601 - DNA, 25 bp, Saccharomyces pastorianus
tgaagtaactgactaccaactccct

SEQ ID NO: 142602 - DNA, 25 bp, Saccharomyces pastorianus
gaccctcagattatatgctgcttga

SEQ ID NO: 142603 - DNA, 25 bp, Saccharomyces pastorianus
tggacgattatcatccccgaactta

SEQ ID NO: 142604 - DNA, 25 bp, Saccharomyces pastorianus
gaacttaccaattcagacatcccag

SEQ ID NO: 142605 - DNA, 25 bp, Saccharomyces pastorianus
actccctaaggtactgttgactgct

SEQ ID NO: 142606 - DNA, 25 bp, Saccharomyces pastorianus
tattgatgcttgtgacaatcctgat

SEQ ID NO: 142607 - DNA, 25 bp, Saccharomyces pastorianus
acacattcgaagcatcatctgaaat

SEQ ID NO: 142608 - DNA, 25 bp, Saccharomyces pastorianus
attttctctcatatccagacgaagc

SEQ ID NO: 142609 - DNA, 25 bp, Saccharomyces pastorianus
agaaaaactatcactggcccactat

SEQ ID NO: 142610 - DNA, 25 bp, Saccharomyces pastorianus
attgtctccgctcccagaaaaagat

SEQ ID NO: 142611 - DNA, 25 bp, Saccharomyces pastorianus
aaacatgctgcttcacgagggagaa

SEQ ID NO: 142612 - DNA, 25 bp, Saccharomyces pastorianus
attgactaaggtgctttctccaaaa

SEQ ID NO: 142613 - DNA, 25 bp, Saccharomyces pastorianus
aatgacaccggcatcatatggaatg

SEQ ID NO: 142614 - DNA, 25 bp, Saccharomyces pastorianus
aattggatgccctacattgactaag

SEQ ID NO: 142615 - DNA, 25 bp, Saccharomyces pastorianus
gatggcgtttcttctgagttggtaa

SEQ ID NO: 142616 - DNA, 25 bp, Saccharomyces pastorianus
cagggaattttcttgcattaacttt

SEQ ID NO: 142617 - DNA, 25 bp, Saccharomyces pastorianus
gacgattatgtgtatgattctcccg

SEQ ID NO: 142618 - DNA, 25 bp, Saccharomyces pastorianus
atgattctcccgacatgattaataa

SEQ ID NO: 142619 - DNA, 25 bp, Saccharomyces pastorianus
gagtaatccactgacgttttccatt

SEQ ID NO: 142620 - DNA, 25 bp, Saccharomyces pastorianus
ggagatacttattttcaacgagcga

SEQ ID NO: 142621 - DNA, 25 bp, Saccharomyces pastorianus
ggtcactgggaaattctcactgtat

SEQ ID NO: 142622 - DNA, 25 bp, Saccharomyces pastorianus
ggtacttgaatattgcctcactcta

SEQ ID NO: 142623 - DNA, 25 bp, Saccharomyces pastorianus
gtgattaatctaggttccacacatt

SEQ ID NO: 142624 - DNA, 25 bp, Saccharomyces pastorianus
ttcaaatgctctcttcgcgaagttg

SEQ ID NO: 142625 - DNA, 25 bp, Saccharomyces pastorianus
gacgttttccattgtaatctcacta

SEQ ID NO: 142626 - DNA, 25 bp, Saccharomyces pastorianus
atgacatcatcgaacacctatgcgc

SEQ ID NO: 142627 - DNA, 25 bp, Saccharomyces pastorianus
acagatggactttcaactcatgaga

SEQ ID NO: 142628 - DNA, 25 bp, Saccharomyces pastorianus
aaggattccgtccaaatgtgcgtta

SEQ ID NO: 142629 - DNA, 25 bp, Saccharomyces pastorianus
aacacactttggttccacagtcatg

SEQ ID NO: 142630 - DNA, 25 bp, Saccharomyces pastorianus
aaatctgcgaaggtcatgcctccaa

SEQ ID NO: 142631 - DNA, 25 bp, Saccharomyces pastorianus
acgaccctgggtgtctcactagtgc

SEQ ID NO: 142632 - DNA, 25 bp, Saccharomyces pastorianus
atacaaacggcattggcacagacgc

SEQ ID NO: 142633 - DNA, 25 bp, Saccharomyces pastorianus
tgtctcactagtgcacggcttcgag

SEQ ID NO: 142634 - DNA, 25 bp, Saccharomyces pastorianus
agagtgaactcattctcctcatgga

SEQ ID NO: 142635 - DNA, 25 bp, Saccharomyces pastorianus
gagcacatagacaagatccaagtac

SEQ ID NO: 142636 - DNA, 25 bp, Saccharomyces pastorianus
cgaatgcctgcaagaatactctctt

SEQ ID NO: 142637 - DNA, 25 bp, Saccharomyces pastorianus
gtcatgcctccaagactgatgttgt

SEQ ID NO: 142638 - DNA, 25 bp, Saccharomyces pastorianus
tgaatgccctcgtagacatcgcgaa

SEQ ID NO: 142639 - DNA, 25 bp, Saccharomyces pastorianus
gccgcccaagccgatgactgagagt

SEQ ID NO: 142640 - DNA, 25 bp, Saccharomyces pastorianus
agacgccaccattgcggagcacata

SEQ ID NO: 142641 - DNA, 25 bp, Saccharomyces pastorianus
aattggaccaactcgctgcaggcgg

SEQ ID NO: 142642 - DNA, 25 bp, Saccharomyces pastorianus
gagacatgcatcgaaaccgccggca

SEQ ID NO: 142643 - DNA, 25 bp, Saccharomyces pastorianus
aacagagactgatactttcccacac

SEQ ID NO: 142644 - DNA, 25 bp, Saccharomyces pastorianus
aaccgccggcaatgttgctcaagta

SEQ ID NO: 142645 - DNA, 25 bp, Saccharomyces pastorianus
ttttgttcccgaagagttctggtat

SEQ ID NO: 142646 - DNA, 25 bp, Saccharomyces pastorianus
gcgtctgaacgccaaacaatcacta

SEQ ID NO: 142647 - DNA, 25 bp, Saccharomyces pastorianus
ctttacctctgaccacagtggagct

SEQ ID NO: 142648 - DNA, 25 bp, Saccharomyces pastorianus
tccaacgctcggctttgtagtagac

SEQ ID NO: 142649 - DNA, 25 bp, Saccharomyces pastorianus
gagaaaccaagccaccatgaccaag

SEQ ID NO: 142650 - DNA, 25 bp, Saccharomyces pastorianus
aagtcgtatcgtatggtacatgcca

SEQ ID NO: 142651 - DNA, 25 bp, Saccharomyces pastorianus
gaccggctgagcgtgttaacgtttt

SEQ ID NO: 142652 - DNA, 25 bp, Saccharomyces pastorianus
atgtcctttacaacatcagtcttgg

SEQ ID NO: 142653 - DNA, 25 bp, Saccharomyces pastorianus
aagcggagagctttttcgaagacaa

SEQ ID NO: 142654 - DNA, 25 bp, Saccharomyces pastorianus
gtcttgtgccagtacttcctatact

SEQ ID NO: 142655 - DNA, 25 bp, Saccharomyces pastorianus
ttcctatacttctcgactatgtcct

SEQ ID NO: 142656 - DNA, 25 bp, Saccharomyces pastorianus
gcatgaccttcgcagattttcttga

SEQ ID NO: 142657 - DNA, 25 bp, Saccharomyces pastorianus
atcagtcttggaggcatgaccttcg

SEQ ID NO: 142658 - DNA, 25 bp, Saccharomyces pastorianus
aaacgccttacatggatgccttgac

SEQ ID NO: 142659 - DNA, 25 bp, Saccharomyces pastorianus
gagtattcttgcaggcattcgtctt

SEQ ID NO: 142660 - DNA, 25 bp, Saccharomyces pastorianus
gattttcttgaggtcttgctccatt

SEQ ID NO: 142661 - DNA, 25 bp, Saccharomyces pastorianus
ttgctccatttctctgcgctggaag

SEQ ID NO: 142662 - DNA, 25 bp, Saccharomyces pastorianus
acatggatgccttgacacggtcata

SEQ ID NO: 142663 - DNA, 25 bp, Saccharomyces pastorianus
cattgagttcaattcgcgagtacga

SEQ ID NO: 142664 - DNA, 25 bp, Saccharomyces pastorianus
gatcatttgccccattctacaggaa

SEQ ID NO: 142665 - DNA, 25 bp, Saccharomyces pastorianus
aaaattttgacttcagggctggcgt

SEQ ID NO: 142666 - DNA, 25 bp, Saccharomyces pastorianus
tcccgcttccagtagtgacattatg

SEQ ID NO: 142667 - DNA, 25 bp, Saccharomyces pastorianus
ttctacggtgaattctgccaatgag

SEQ ID NO: 142668 - DNA, 25 bp, Saccharomyces pastorianus
agagtcgtatgcatacccttacgct

SEQ ID NO: 142669 - DNA, 25 bp, Saccharomyces pastorianus
ggttttgtcatcttgccttttcccg

SEQ ID NO: 142670 - DNA, 25 bp, Saccharomyces pastorianus
aacactggcaggattcgaaggagga

SEQ ID NO: 142671 - DNA, 25 bp, Saccharomyces pastorianus
gatttttgccacagatcatttgccc

SEQ ID NO: 142672 - DNA, 25 bp, Saccharomyces pastorianus
gagaagaactatttgccgttgtcaa

SEQ ID NO: 142673 - DNA, 25 bp, Saccharomyces pastorianus
cagggctggcgtactttattattgg

SEQ ID NO: 142674 - DNA, 25 bp, Saccharomyces pastorianus
aggagttctccttattctatgtcga

SEQ ID NO: 142675 - DNA, 25 bp, Saccharomyces pastorianus
aaaagatcaccagtgggccgctaac

SEQ ID NO: 142676 - DNA, 25 bp, Saccharomyces pastorianus
gtgggatcatgtttgtctttctaga

SEQ ID NO: 142677 - DNA, 25 bp, Saccharomyces pastorianus
tggaatcccctatttttacgagtat

SEQ ID NO: 142678 - DNA, 25 bp, Saccharomyces pastorianus
gcatctaattactgggcgtacctca

SEQ ID NO: 142679 - DNA, 25 bp, Saccharomyces pastorianus
ttcataaccagattggctcctgcac

SEQ ID NO: 142680 - DNA, 25 bp, Saccharomyces pastorianus
gcaaggtattggtatgttcccgttt

SEQ ID NO: 142681 - DNA, 25 bp, Saccharomyces pastorianus
gcagctcaggctgtattagatccta

SEQ ID NO: 142682 - DNA, 25 bp, Saccharomyces pastorianus
aacctatctcttcacattgcttaac

SEQ ID NO: 142683 - DNA, 25 bp, Saccharomyces pastorianus
tacctcagcgataccaccaaaattg

SEQ ID NO: 142684 - DNA, 25 bp, Saccharomyces pastorianus
tagttttcacattggcaggtacagc

SEQ ID NO: 142685 - DNA, 25 bp, Saccharomyces pastorianus
gagattctttgggtgctttgtctaa

SEQ ID NO: 142686 - DNA, 25 bp, Saccharomyces pastorianus
ttgggtgctttgtctaaggctttga

SEQ ID NO: 142687 - DNA, 25 bp, Saccharomyces pastorianus
gtctaaggctttgaaggaatttgaa

SEQ ID NO: 142688 - DNA, 25 bp, Saccharomyces pastorianus
atggcaaagacctcacttgattgtc

SEQ ID NO: 142689 - DNA, 25 bp, Saccharomyces pastorianus
attctttgggtgctttgtctaaggc

SEQ ID NO: 142690 - DNA, 25 bp, Saccharomyces pastorianus
ctcacttgattgtcttagatgaacc

SEQ ID NO: 142691 - DNA, 25 bp, Saccharomyces pastorianus
tgaatctcactctaagatggttgct

SEQ ID NO: 142692 - DNA, 25 bp, Saccharomyces pastorianus
tgctttgtctaaggctttgaaggaa

SEQ ID NO: 142693 - DNA, 25 bp, Saccharomyces pastorianus
ggttgaatctcactctaagatggtt

SEQ ID NO: 142694 - DNA, 25 bp, Saccharomyces pastorianus
ctttgggtgctttgtctaaggcttt

SEQ ID NO: 142695 - DNA, 25 bp, Saccharomyces pastorianus
gacctcacttgattgtcttagatga

SEQ ID NO: 142696 - DNA, 25 bp, Saccharomyces pastorianus
acttctatcactatttctcacgact

SEQ ID NO: 142697 - DNA, 25 bp, Saccharomyces pastorianus
tctcacgactccgttttcttagata

SEQ ID NO: 142698 - DNA, 25 bp, Saccharomyces pastorianus
tccgtcttggatttcgttttcgaat

SEQ ID NO: 142699 - DNA, 25 bp, Saccharomyces pastorianus
gttttcgaatctggtgttggtacta

SEQ ID NO: 142700 - DNA, 25 bp, Saccharomyces pastorianus
tagaaccgtctacgtcgaacacgac

SEQ ID NO: 142701 - DNA, 25 bp, Saccharomyces pastorianus
gtcgaacacgacattgatggtactc

SEQ ID NO: 142702 - DNA, 25 bp, Saccharomyces pastorianus
tcactctgacacttccgtcttggat

SEQ ID NO: 142703 - DNA, 25 bp, Saccharomyces pastorianus
aatgagagctattgccaacggtcaa

SEQ ID NO: 142704 - DNA, 25 bp, Saccharomyces pastorianus
cagttggtccaaacttcgacgacga

SEQ ID NO: 142705 - DNA, 25 bp, Saccharomyces pastorianus
acacctgtggtatcacttctatcac

SEQ ID NO: 142706 - DNA, 25 bp, Saccharomyces pastorianus
agttaactacttgaacacctgtggt

SEQ ID NO: 142707 - DNA, 25 bp, Saccharomyces pastorianus
gaccacatcttcaaccttgtacttg

SEQ ID NO: 142708 - DNA, 25 bp, Saccharomyces pastorianus
caacgctgcaagaagtcactgtaat

SEQ ID NO: 142709 - DNA, 25 bp, Saccharomyces pastorianus
caaaaactaacaacgctgcaagaag

SEQ ID NO: 142710 - DNA, 25 bp, Saccharomyces pastorianus
cacatcttcaaccttgtacttgcag

SEQ ID NO: 142711 - DNA, 25 bp, Saccharomyces pastorianus
atcaaagtctcgaccacatcttcaa

SEQ ID NO: 142712 - DNA, 25 bp, Saccharomyces pastorianus
gtcactgtaatattccaaataccca

SEQ ID NO: 142713 - DNA, 25 bp, Saccharomyces pastorianus
ggatactatcaaagtctcgaccaca

SEQ ID NO: 142714 - DNA, 25 bp, Saccharomyces pastorianus
gtacttgcagaacatggcaaaaact

SEQ ID NO: 142715 - DNA, 25 bp, Saccharomyces pastorianus
atcttcaaccttgtacttgcagaac

SEQ ID NO: 142716 - DNA, 25 bp, Saccharomyces pastorianus
gaagttgtttaaggatactatcaaa

SEQ ID NO: 142717 - DNA, 25 bp, Saccharomyces pastorianus
aaccttgtacttgcagaacatggca

SEQ ID NO: 142718 - DNA, 25 bp, Saccharomyces pastorianus
ccgaatttggatttggaaacagcta

SEQ ID NO: 142719 - DNA, 25 bp, Saccharomyces pastorianus
aacagatttagagatacaggtagat

SEQ ID NO: 142720 - DNA, 25 bp, Saccharomyces pastorianus
ctggagacccagttgagcgagcttg

SEQ ID NO: 142721 - DNA, 25 bp, Saccharomyces pastorianus
aggcgccacgaaagaatatgaaaat

SEQ ID NO: 142722 - DNA, 25 bp, Saccharomyces pastorianus
aaaagcgatcttcttgagagccaac

SEQ ID NO: 142723 - DNA, 25 bp, Saccharomyces pastorianus
gaaacagctatacagataatctcct

SEQ ID NO: 142724 - DNA, 25 bp, Saccharomyces pastorianus
gatcttcttgagagccaacaacaaa

SEQ ID NO: 142725 - DNA, 25 bp, Saccharomyces pastorianus
agcgagcttgaaggcgccacgaaag

SEQ ID NO: 142726 - DNA, 25 bp, Saccharomyces pastorianus
ggagacccagttgagcgagcttgaa

SEQ ID NO: 142727 - DNA, 25 bp, Saccharomyces pastorianus
ataatctcctcactggagacccagt

SEQ ID NO: 142728 - DNA, 25 bp, Saccharomyces pastorianus
gcttgaaggcgccacgaaagaatat

SEQ ID NO: 142729 - DNA, 25 bp, Saccharomyces pastorianus
gtaccattccaacggttccatcgtt

SEQ ID NO: 142730 - DNA, 25 bp, Saccharomyces pastorianus
gccactattatcgtcattttccatg

SEQ ID NO: 142731 - DNA, 25 bp, Saccharomyces pastorianus
atgataaagccttccagtctggtag

SEQ ID NO: 142732 - DNA, 25 bp, Saccharomyces pastorianus
gcatccaactctgctacacagtata

SEQ ID NO: 142733 - DNA, 25 bp, Saccharomyces pastorianus
atgacgcctatgacaagtgcattca

SEQ ID NO: 142734 - DNA, 25 bp, Saccharomyces pastorianus
ttatcgacactgagaagcccacaag

SEQ ID NO: 142735 - DNA, 25 bp, Saccharomyces pastorianus
gctatcatcggtgcagccactatta

SEQ ID NO: 142736 - DNA, 25 bp, Saccharomyces pastorianus
aaggctcagacttagcatccaactc

SEQ ID NO: 142737 - DNA, 25 bp, Saccharomyces pastorianus
attttccatgaaccagctaaacggg

SEQ ID NO: 142738 - DNA, 25 bp, Saccharomyces pastorianus
aaatttgccagacccatctagagat

SEQ ID NO: 142739 - DNA, 25 bp, Saccharomyces pastorianus
agtgccaacggcagtgctttatcga

SEQ ID NO: 142740 - DNA, 25 bp, Saccharomyces pastorianus
agaaacaccaattcactattcgatt

SEQ ID NO: 142741 - DNA, 25 bp, Saccharomyces pastorianus
gagtacgctcaagaggcattaaatt

SEQ ID NO: 142742 - DNA, 25 bp, Saccharomyces pastorianus
ccatggatggctacagaaactgcat

SEQ ID NO: 142743 - DNA, 25 bp, Saccharomyces pastorianus
gaatgttatcttgtcttacccttgt

SEQ ID NO: 142744 - DNA, 25 bp, Saccharomyces pastorianus
gcattaaattttgccatggatggct

SEQ ID NO: 142745 - DNA, 25 bp, Saccharomyces pastorianus
caccaattcactattcgattacatg

SEQ ID NO: 142746 - DNA, 25 bp, Saccharomyces pastorianus
gatcctggtactaatatcgtagcta

SEQ ID NO: 142747 - DNA, 25 bp, Saccharomyces pastorianus
gaaactgcatgattttcttcaacaa

SEQ ID NO: 142748 - DNA, 25 bp, Saccharomyces pastorianus
atcgtagctaaggagtacgctcaag

SEQ ID NO: 142749 - DNA, 25 bp, Saccharomyces pastorianus
actcattatgaaccaatgggcagtg

SEQ ID NO: 142750 - DNA, 25 bp, Saccharomyces pastorianus
atgggcagtgaagatcctggtacta

SEQ ID NO: 142751 - DNA, 25 bp, Saccharomyces pastorianus
gaaggtggttctgtagattcaaata

SEQ ID NO: 142752 - DNA, 25 bp, Saccharomyces pastorianus
caacttcggaaggtggttctgtaga

SEQ ID NO: 142753 - DNA, 25 bp, Saccharomyces pastorianus
cttcggaaggtggttctgtagattc

SEQ ID NO: 142754 - DNA, 25 bp, Saccharomyces pastorianus
gtgagcccttgatcaacaaagggtt

SEQ ID NO: 142755 - DNA, 25 bp, Saccharomyces pastorianus
tgatagtagtgagcccttgatcaac

SEQ ID NO: 142756 - DNA, 25 bp, Saccharomyces pastorianus
agtagtgagcccttgatcaacaaag

SEQ ID NO: 142757 - DNA, 25 bp, Saccharomyces pastorianus
atgtcaatgatagtagtgagccctt

SEQ ID NO: 142758 - DNA, 25 bp, Saccharomyces pastorianus
tggttctgtagattcaaataatgat

SEQ ID NO: 142759 - DNA, 25 bp, Saccharomyces pastorianus
ttaccaacttcggaaggtggttctg

SEQ ID NO: 142760 - DNA, 25 bp, Saccharomyces pastorianus
caatgatagtagtgagcccttgatc

SEQ ID NO: 142761 - DNA, 25 bp, Saccharomyces pastorianus
gatcaacaaagggttattaccaact

SEQ ID NO: 142762 - DNA, 25 bp, Saccharomyces pastorianus
gggagccctcgactactaagaaatc

SEQ ID NO: 142763 - DNA, 25 bp, Saccharomyces pastorianus
agcaaccagccaggacgtgtctaac

SEQ ID NO: 142764 - DNA, 25 bp, Saccharomyces pastorianus
ataacaacatgtctgctgccactac

SEQ ID NO: 142765 - DNA, 25 bp, Saccharomyces pastorianus
tctcaccagatcctattgtccaata

SEQ ID NO: 142766 - DNA, 25 bp, Saccharomyces pastorianus
gaagtggttctaaccctgtgaacaa

SEQ ID NO: 142767 - DNA, 25 bp, Saccharomyces pastorianus
gagaccctgataattttcctcaatt

SEQ ID NO: 142768 - DNA, 25 bp, Saccharomyces pastorianus
atggcctttagttgtgggttacaca

SEQ ID NO: 142769 - DNA, 25 bp, Saccharomyces pastorianus
gtcgaggcactggagctatgtcaaa

SEQ ID NO: 142770 - DNA, 25 bp, Saccharomyces pastorianus
tggcatggccaatcctggtcacgat

SEQ ID NO: 142771 - DNA, 25 bp, Saccharomyces pastorianus
taaccacggtgcagtttgccatttt

SEQ ID NO: 142772 - DNA, 25 bp, Saccharomyces pastorianus
gtgcctctaatgatttgactacctt

SEQ ID NO: 142773 - DNA, 25 bp, Saccharomyces pastorianus
tgacccctggtgatttgggtactct

SEQ ID NO: 142774 - DNA, 25 bp, Saccharomyces pastorianus
aaatgtctctggcttcggttcctat

SEQ ID NO: 142775 - DNA, 25 bp, Saccharomyces pastorianus
gagtgaatcctgcagctgacgatga

SEQ ID NO: 142776 - DNA, 25 bp, Saccharomyces pastorianus
tagtgtacctggctcaccaagagat

SEQ ID NO: 142777 - DNA, 25 bp, Saccharomyces pastorianus
agactgtccgacttactggactgga

SEQ ID NO: 142778 - DNA, 25 bp, Saccharomyces pastorianus
tggatcgtcgtttcaaggcacctga

SEQ ID NO: 142779 - DNA, 25 bp, Saccharomyces pastorianus
gtacagtaatgggtgttccctccat

SEQ ID NO: 142780 - DNA, 25 bp, Saccharomyces pastorianus
gttgcaagaccgcttagtgtacctg

SEQ ID NO: 142781 - DNA, 25 bp, Saccharomyces pastorianus
gaagaggctatcctgatcagttcag

SEQ ID NO: 142782 - DNA, 25 bp, Saccharomyces pastorianus
acagcacagtttacatgacccctgg

SEQ ID NO: 142783 - DNA, 25 bp, Saccharomyces pastorianus
gggtgttttcccttcatactacgag

SEQ ID NO: 142784 - DNA, 25 bp, Saccharomyces pastorianus
tcccgtgacctacaaaaccatttgt

SEQ ID NO: 142785 - DNA, 25 bp, Saccharomyces pastorianus
aagcctgaggccttttccgatgaaa

SEQ ID NO: 142786 - DNA, 25 bp, Saccharomyces pastorianus
taaaatcgaaggctcccattacggt

SEQ ID NO: 142787 - DNA, 25 bp, Saccharomyces pastorianus
ggcccttaaataaagccacttatca

SEQ ID NO: 142788 - DNA, 25 bp, Saccharomyces pastorianus
gcagcatgccctgcaaacaatggaa

SEQ ID NO: 142789 - DNA, 25 bp, Saccharomyces pastorianus
tcccattacggttgcccagtataaa

SEQ ID NO: 142790 - DNA, 25 bp, Saccharomyces pastorianus
cattaccacttgatagggcccttaa

SEQ ID NO: 142791 - DNA, 25 bp, Saccharomyces pastorianus
atactttttgacttggattctgtga

SEQ ID NO: 142792 - DNA, 25 bp, Saccharomyces pastorianus
aaatgaggccagtgcagcatgccct

SEQ ID NO: 142793 - DNA, 25 bp, Saccharomyces pastorianus
ggtggctgattgaaggtgctccaaa

SEQ ID NO: 142794 - DNA, 25 bp, Saccharomyces pastorianus
aaccatttgttattcgagactgcga

SEQ ID NO: 142795 - DNA, 25 bp, Saccharomyces pastorianus
aattgccatattatactaatactga

SEQ ID NO: 142796 - DNA, 25 bp, Saccharomyces pastorianus
gtcaaataaattgccatattatact

SEQ ID NO: 142797 - DNA, 25 bp, Saccharomyces pastorianus
aaattgccatattatactaatactg

SEQ ID NO: 142798 - DNA, 25 bp, Saccharomyces pastorianus
tattatactaatactgaactagact

SEQ ID NO: 142799 - DNA, 25 bp, Saccharomyces pastorianus
tatactaatactgaactagactatg

SEQ ID NO: 142800 - DNA, 25 bp, Saccharomyces pastorianus
tgccatattatactaatactgaact

SEQ ID NO: 142801 - DNA, 25 bp, Saccharomyces pastorianus
gccatattatactaatactgaacta

SEQ ID NO: 142802 - DNA, 25 bp, Saccharomyces pastorianus
ttgccatattatactaatactgaac

SEQ ID NO: 142803 - DNA, 25 bp, Saccharomyces pastorianus
attgccatattatactaatactgaa

SEQ ID NO: 142804 - DNA, 25 bp, Saccharomyces pastorianus
atactaatactgaactagactatgt

SEQ ID NO: 142805 - DNA, 25 bp, Saccharomyces pastorianus
tactaatactgaactagactatgtt

SEQ ID NO: 142806 - DNA, 25 bp, Saccharomyces pastorianus
aatctgttggcagttgagacatggt

SEQ ID NO: 142807 - DNA, 25 bp, Saccharomyces pastorianus
gttggcagttgagacatggtatatg

SEQ ID NO: 142808 - DNA, 25 bp, Saccharomyces pastorianus
ctgttggcagttgagacatggtata

SEQ ID NO: 142809 - DNA, 25 bp, Saccharomyces pastorianus
aaaatctgttggcagttgagacatg

SEQ ID NO: 142810 - DNA, 25 bp, Saccharomyces pastorianus
gaagcaaaatctgttggcagttgag

SEQ ID NO: 142811 - DNA, 25 bp, Saccharomyces pastorianus
agcaaaatctgttggcagttgagac

SEQ ID NO: 142812 - DNA, 25 bp, Saccharomyces pastorianus
atgaagcaaaatctgttggcagttg

SEQ ID NO: 142813 - DNA, 25 bp, Saccharomyces pastorianus
aaatctgttggcagttgagacatgg

SEQ ID NO: 142814 - DNA, 25 bp, Saccharomyces pastorianus
atctgttggcagttgagacatggta

SEQ ID NO: 142815 - DNA, 25 bp, Saccharomyces pastorianus
gcaaaatctgttggcagttgagaca

SEQ ID NO: 142816 - DNA, 25 bp, Saccharomyces pastorianus
tctgttggcagttgagacatggtat

SEQ ID NO: 142817 - DNA, 25 bp, Saccharomyces pastorianus
tttccttcgatatatagtgatgata

SEQ ID NO: 142818 - DNA, 25 bp, Saccharomyces pastorianus
gagttggaaagcctcttttccttcg

SEQ ID NO: 142819 - DNA, 25 bp, Saccharomyces pastorianus
gaaagcctcttttccttcgatatat

SEQ ID NO: 142820 - DNA, 25 bp, Saccharomyces pastorianus
aaagcctcttttccttcgatatata

SEQ ID NO: 142821 - DNA, 25 bp, Saccharomyces pastorianus
gcctcttttccttcgatatatagtg

SEQ ID NO: 142822 - DNA, 25 bp, Saccharomyces pastorianus
tggaaagcctcttttccttcgatat

SEQ ID NO: 142823 - DNA, 25 bp, Saccharomyces pastorianus
aagcctcttttccttcgatatatag

SEQ ID NO: 142824 - DNA, 25 bp, Saccharomyces pastorianus
agtgatgatatccttgaaaagactc

SEQ ID NO: 142825 - DNA, 25 bp, Saccharomyces pastorianus
gcaattcgatcatccaaaagagttg

SEQ ID NO: 142826 - DNA, 25 bp, Saccharomyces pastorianus
gttggaaagcctcttttccttcgat

SEQ ID NO: 142827 - DNA, 25 bp, Saccharomyces pastorianus
tcttttccttcgatatatagtgatg

SEQ ID NO: 142828 - DNA, 25 bp, Saccharomyces pastorianus
gaagattacctataggctggtctac

SEQ ID NO: 142829 - DNA, 25 bp, Saccharomyces pastorianus
ggccgctgaaaaactgtcatcgaac

SEQ ID NO: 142830 - DNA, 25 bp, Saccharomyces pastorianus
aggctggtctacttcttatcaaact

SEQ ID NO: 142831 - DNA, 25 bp, Saccharomyces pastorianus
ggtcgtctattccaattaccattcg

SEQ ID NO: 142832 - DNA, 25 bp, Saccharomyces pastorianus
gtcatcgaacttcgtcaccattagg

SEQ ID NO: 142833 - DNA, 25 bp, Saccharomyces pastorianus
aagcaagcggaacatctttgtcaga

SEQ ID NO: 142834 - DNA, 25 bp, Saccharomyces pastorianus
agattttcccaattagcactggata

SEQ ID NO: 142835 - DNA, 25 bp, Saccharomyces pastorianus
ggataaggccttatatgccctagag

SEQ ID NO: 142836 - DNA, 25 bp, Saccharomyces pastorianus
gagaggcatgttgacgaagctatta

SEQ ID NO: 142837 - DNA, 25 bp, Saccharomyces pastorianus
tttcaagcttctacaatggacgcag

SEQ ID NO: 142838 - DNA, 25 bp, Saccharomyces pastorianus
gacgcagcgtctcaggatccaattg

SEQ ID NO: 142839 - DNA, 25 bp, Saccharomyces pastorianus
gattctctcttattgactctttacc

SEQ ID NO: 142840 - DNA, 25 bp, Saccharomyces pastorianus
gtatggatactgattctctcttatt

SEQ ID NO: 142841 - DNA, 25 bp, Saccharomyces pastorianus
gagctcaatctgctaataacaatga

SEQ ID NO: 142842 - DNA, 25 bp, Saccharomyces pastorianus
gaaactatcagacgaaccttcagat

SEQ ID NO: 142843 - DNA, 25 bp, Saccharomyces pastorianus
atcattccattattcgaaaccgcga

SEQ ID NO: 142844 - DNA, 25 bp, Saccharomyces pastorianus
agacgaaccttcagatatcattcca

SEQ ID NO: 142845 - DNA, 25 bp, Saccharomyces pastorianus
catggagcatttgatcggatataac

SEQ ID NO: 142846 - DNA, 25 bp, Saccharomyces pastorianus
gaaaccgcgatcacacaggtggcta

SEQ ID NO: 142847 - DNA, 25 bp, Saccharomyces pastorianus
ctttaacggttaacatggagcattt

SEQ ID NO: 142848 - DNA, 25 bp, Saccharomyces pastorianus
gataagtattctgagcagagctcaa

SEQ ID NO: 142849 - DNA, 25 bp, Saccharomyces pastorianus
ggagttcagacttgactcgcaattt

SEQ ID NO: 142850 - DNA, 25 bp, Saccharomyces pastorianus
aactattcttaagaggtgattcagt

SEQ ID NO: 142851 - DNA, 25 bp, Saccharomyces pastorianus
gtgacaagaacacctgtgataatct

SEQ ID NO: 142852 - DNA, 25 bp, Saccharomyces pastorianus
gtgaaagctttcgacaggcattgta

SEQ ID NO: 142853 - DNA, 25 bp, Saccharomyces pastorianus
gaacacctgtgataatctcattaag

SEQ ID NO: 142854 - DNA, 25 bp, Saccharomyces pastorianus
taaatgatgctatggtgacaagaac

SEQ ID NO: 142855 - DNA, 25 bp, Saccharomyces pastorianus
acctgtgataatctcattaagaaac

SEQ ID NO: 142856 - DNA, 25 bp, Saccharomyces pastorianus
atcgggaaagattcataagtaaact

SEQ ID NO: 142857 - DNA, 25 bp, Saccharomyces pastorianus
cgacaggcattgtaatatggtttta

SEQ ID NO: 142858 - DNA, 25 bp, Saccharomyces pastorianus
gaagggcaaaaatgtaattaatcgg

SEQ ID NO: 142859 - DNA, 25 bp, Saccharomyces pastorianus
tccctgataaatgatgctatggtga

SEQ ID NO: 142860 - DNA, 25 bp, Saccharomyces pastorianus
aagctttcgacaggcattgtaatat

SEQ ID NO: 142861 - DNA, 25 bp, Saccharomyces pastorianus
aagtttgttcctttccacaatgcta

SEQ ID NO: 142862 - DNA, 25 bp, Saccharomyces pastorianus
aaagaccggtactgcaatttcattc

SEQ ID NO: 142863 - DNA, 25 bp, Saccharomyces pastorianus
atgttgcatgtgtcctcaatttcga

SEQ ID NO: 142864 - DNA, 25 bp, Saccharomyces pastorianus
ttccgtgctgttactcaagttgcca

SEQ ID NO: 142865 - DNA, 25 bp, Saccharomyces pastorianus
gctaagaagcgccattcacataaaa

SEQ ID NO: 142866 - DNA, 25 bp, Saccharomyces pastorianus
gacggctaagtcctacgtgcataga

SEQ ID NO: 142867 - DNA, 25 bp, Saccharomyces pastorianus
tcaatttcgatttacctacgacggc

SEQ ID NO: 142868 - DNA, 25 bp, Saccharomyces pastorianus
ttacagccttacaaattcgatcaaa

SEQ ID NO: 142869 - DNA, 25 bp, Saccharomyces pastorianus
gcaatttcattcgtagtcccactga

SEQ ID NO: 142870 - DNA, 25 bp, Saccharomyces pastorianus
aggtcgaggcgttccgttacagaat

SEQ ID NO: 142871 - DNA, 25 bp, Saccharomyces pastorianus
tagaactgctcgtggcggaaagacc

SEQ ID NO: 142872 - DNA, 25 bp, Saccharomyces pastorianus
ttctgctgatgggaagttcgccgtt

SEQ ID NO: 142873 - DNA, 25 bp, Saccharomyces pastorianus
tagcatagtttcttcggccccaatt

SEQ ID NO: 142874 - DNA, 25 bp, Saccharomyces pastorianus
tttccctacagacagctactactag

SEQ ID NO: 142875 - DNA, 25 bp, Saccharomyces pastorianus
gaatgctcaatatgcggctggtaaa

SEQ ID NO: 142876 - DNA, 25 bp, Saccharomyces pastorianus
tatcttcccaaataaccagtgctgc

SEQ ID NO: 142877 - DNA, 25 bp, Saccharomyces pastorianus
acagctatcactagtactctttcgc

SEQ ID NO: 142878 - DNA, 25 bp, Saccharomyces pastorianus
ttggtgacccctcaaacaactacta

SEQ ID NO: 142879 - DNA, 25 bp, Saccharomyces pastorianus
gccgtttgtaatcatagcgcttggg

SEQ ID NO: 142880 - DNA, 25 bp, Saccharomyces pastorianus
agagttcttctgtcgtttccctaca

SEQ ID NO: 142881 - DNA, 25 bp, Saccharomyces pastorianus
atgttatgcttatgactccggcgac

SEQ ID NO: 142882 - DNA, 25 bp, Saccharomyces pastorianus
gttactttatctccaactgcaagca

SEQ ID NO: 142883 - DNA, 25 bp, Saccharomyces pastorianus
ttggatcgtggtagcttggaagata

SEQ ID NO: 142884 - DNA, 25 bp, Saccharomyces pastorianus
aaggtgtgttccaagctatacgctg

SEQ ID NO: 142885 - DNA, 25 bp, Saccharomyces pastorianus
aatcatccgttgcaaagattggaag

SEQ ID NO: 142886 - DNA, 25 bp, Saccharomyces pastorianus
gtcgacacatgaagtaatcatccgt

SEQ ID NO: 142887 - DNA, 25 bp, Saccharomyces pastorianus
tacgctgcatttgaagaagttgttt

SEQ ID NO: 142888 - DNA, 25 bp, Saccharomyces pastorianus
cctgtatggtgggaaaggctgaaca

SEQ ID NO: 142889 - DNA, 25 bp, Saccharomyces pastorianus
tgaacaggaaagttcgtcgacacat

SEQ ID NO: 142890 - DNA, 25 bp, Saccharomyces pastorianus
gttccaagctatacgctgcatttga

SEQ ID NO: 142891 - DNA, 25 bp, Saccharomyces pastorianus
gacgaatcctgcgtattccactgtt

SEQ ID NO: 142892 - DNA, 25 bp, Saccharomyces pastorianus
actgttcgttggatcgtggtagctt

SEQ ID NO: 142893 - DNA, 25 bp, Saccharomyces pastorianus
tgcgtattccactgttcgttggatc

SEQ ID NO: 142894 - DNA, 25 bp, Saccharomyces pastorianus
attattccgagcacaagatacgcga

SEQ ID NO: 142895 - DNA, 25 bp, Saccharomyces pastorianus
gtacctgtcaaactattattccgag

SEQ ID NO: 142896 - DNA, 25 bp, Saccharomyces pastorianus
gcggataaaccgatgtcttcactat

SEQ ID NO: 142897 - DNA, 25 bp, Saccharomyces pastorianus
acatcgacacagacggccggcagga

SEQ ID NO: 142898 - DNA, 25 bp, Saccharomyces pastorianus
gccttccacgggttcattagacgtg

SEQ ID NO: 142899 - DNA, 25 bp, Saccharomyces pastorianus
atgcattcgttcaaagtacctgtca

SEQ ID NO: 142900 - DNA, 25 bp, Saccharomyces pastorianus
gtacaagctaccaccaatatcgggt

SEQ ID NO: 142901 - DNA, 25 bp, Saccharomyces pastorianus
aatatcgggtgagtttggctccgcc

SEQ ID NO: 142902 - DNA, 25 bp, Saccharomyces pastorianus
aggatagctcgatcgcagatacgcg

SEQ ID NO: 142903 - DNA, 25 bp, Saccharomyces pastorianus
ggtttaccaaccacagtaggcacag

SEQ ID NO: 142904 - DNA, 25 bp, Saccharomyces pastorianus
gaaggatctcttccgattatcgaag

SEQ ID NO: 142905 - DNA, 25 bp, Saccharomyces pastorianus
ggcactaaagccgtttttgtcaatg

SEQ ID NO: 142906 - DNA, 25 bp, Saccharomyces pastorianus
ggtttgtataagctttctcctctat

SEQ ID NO: 142907 - DNA, 25 bp, Saccharomyces pastorianus
accgattatgttccgcctgaaaata

SEQ ID NO: 142908 - DNA, 25 bp, Saccharomyces pastorianus
gactatctcgtcaaattcaggtgta

SEQ ID NO: 142909 - DNA, 25 bp, Saccharomyces pastorianus
gcgggtcccaacgtatattacctag

SEQ ID NO: 142910 - DNA, 25 bp, Saccharomyces pastorianus
tagaaaccctagtagtcccagactc

SEQ ID NO: 142911 - DNA, 25 bp, Saccharomyces pastorianus
agaactcctgtatttgctgttgcag

SEQ ID NO: 142912 - DNA, 25 bp, Saccharomyces pastorianus
aatttctgattactgctcgcgaacg

SEQ ID NO: 142913 - DNA, 25 bp, Saccharomyces pastorianus
atccgtttgtgaatgcgcccgagaa

SEQ ID NO: 142914 - DNA, 25 bp, Saccharomyces pastorianus
tttgctttaatgtcccgtgtgggta

SEQ ID NO: 142915 - DNA, 25 bp, Saccharomyces pastorianus
gattttattaactcctacacctgat

SEQ ID NO: 142916 - DNA, 25 bp, Saccharomyces pastorianus
aagtgcaaggttcatacgccatcgc

SEQ ID NO: 142917 - DNA, 25 bp, Saccharomyces pastorianus
tgacactttcgttgctaagttaaaa

SEQ ID NO: 142918 - DNA, 25 bp, Saccharomyces pastorianus
gcggcaacatctgatgtgaatgtta

SEQ ID NO: 142919 - DNA, 25 bp, Saccharomyces pastorianus
atacgccatcgccttggaaacttta

SEQ ID NO: 142920 - DNA, 25 bp, Saccharomyces pastorianus
tcctctcaagcattcacttcagtgc

SEQ ID NO: 142921 - DNA, 25 bp, Saccharomyces pastorianus
gaaactttacaactgttaatgcgat

SEQ ID NO: 142922 - DNA, 25 bp, Saccharomyces pastorianus
attcacttcagtgcatccgaatgcg

SEQ ID NO: 142923 - DNA, 25 bp, Saccharomyces pastorianus
gttactattgacactttcgttgcta

SEQ ID NO: 142924 - DNA, 25 bp, Saccharomyces pastorianus
atcgccttggaaactttacaactgt

SEQ ID NO: 142925 - DNA, 25 bp, Saccharomyces pastorianus
agtgcatccgaatgcggcaacatct

SEQ ID NO: 142926 - DNA, 25 bp, Saccharomyces pastorianus
aatgcgatttatctctgcagctcgt

SEQ ID NO: 142927 - DNA, 25 bp, Saccharomyces pastorianus
atcactaccaagtctttgcttctga

SEQ ID NO: 142928 - DNA, 25 bp, Saccharomyces pastorianus
gttatcatcatccatgacgctttcc

SEQ ID NO: 142929 - DNA, 25 bp, Saccharomyces pastorianus
gaatgaatcccactggactgtttgt

SEQ ID NO: 142930 - DNA, 25 bp, Saccharomyces pastorianus
gacgctttccaaccatacaattatt

SEQ ID NO: 142931 - DNA, 25 bp, Saccharomyces pastorianus
gccgccgctttgactgattgtacaa

SEQ ID NO: 142932 - DNA, 25 bp, Saccharomyces pastorianus
gactgtttgtggtgagtttgccgcc

SEQ ID NO: 142933 - DNA, 25 bp, Saccharomyces pastorianus
gtgtcactatcgaccatcatcacta

SEQ ID NO: 142934 - DNA, 25 bp, Saccharomyces pastorianus
atcttcttacattggctcttgtgct

SEQ ID NO: 142935 - DNA, 25 bp, Saccharomyces pastorianus
gatatagcttactggtctgacgaaa

SEQ ID NO: 142936 - DNA, 25 bp, Saccharomyces pastorianus
ttcggcgctagatacgacggttctt

SEQ ID NO: 142937 - DNA, 25 bp, Saccharomyces pastorianus
ttgaatagtgttggcttcggcgcta

SEQ ID NO: 142938 - DNA, 25 bp, Saccharomyces pastorianus
taggtaaggatttggctaaaagccg

SEQ ID NO: 142939 - DNA, 25 bp, Saccharomyces pastorianus
acttctgtcaatatttaggtaagga

SEQ ID NO: 142940 - DNA, 25 bp, Saccharomyces pastorianus
cagagccattggtctactttctacc

SEQ ID NO: 142941 - DNA, 25 bp, Saccharomyces pastorianus
ggatttggctaaaagccgtttacag

SEQ ID NO: 142942 - DNA, 25 bp, Saccharomyces pastorianus
cgacgaatatcacttctgtcaatat

SEQ ID NO: 142943 - DNA, 25 bp, Saccharomyces pastorianus
agccgtttacagagccattggtcta

SEQ ID NO: 142944 - DNA, 25 bp, Saccharomyces pastorianus
atatcacttctgtcaatatttaggt

SEQ ID NO: 142945 - DNA, 25 bp, Saccharomyces pastorianus
gtcgacgaatatcacttctgtcaat

SEQ ID NO: 142946 - DNA, 25 bp, Saccharomyces pastorianus
gacgaatatcacttctgtcaatatt

SEQ ID NO: 142947 - DNA, 25 bp, Saccharomyces pastorianus
atcacttctgtcaatatttaggtaa

SEQ ID NO: 142948 - DNA, 25 bp, Saccharomyces pastorianus
ggtctactttctaccaagaacaaga

SEQ ID NO: 142949 - DNA, 25 bp, Saccharomyces pastorianus
ggcggtttcgctatcatcacaaagt

SEQ ID NO: 142950 - DNA, 25 bp, Saccharomyces pastorianus
gaatcgatattctgggtctagctga

SEQ ID NO: 142951 - DNA, 25 bp, Saccharomyces pastorianus
aaaaaacagggtctattgccattga

SEQ ID NO: 142952 - DNA, 25 bp, Saccharomyces pastorianus
gggatgctgtgttgacccatacttt

SEQ ID NO: 142953 - DNA, 25 bp, Saccharomyces pastorianus
gaacacgctgctttggaaccaagat

SEQ ID NO: 142954 - DNA, 25 bp, Saccharomyces pastorianus
ggtctagctgaattggctccaggta

SEQ ID NO: 142955 - DNA, 25 bp, Saccharomyces pastorianus
aaagtctttcgctcgtatccatgaa

SEQ ID NO: 142956 - DNA, 25 bp, Saccharomyces pastorianus
aactttggtgaaggttcctctcgtg

SEQ ID NO: 142957 - DNA, 25 bp, Saccharomyces pastorianus
accaagattcttgggcggtttcgct

SEQ ID NO: 142958 - DNA, 25 bp, Saccharomyces pastorianus
taaggccgtcggtaagacaactact

SEQ ID NO: 142959 - DNA, 25 bp, Saccharomyces pastorianus
gacccatactttcaacgatgagcaa

SEQ ID NO: 142960 - DNA, 25 bp, Saccharomyces pastorianus
gaaaggtttgatcttagagcacgat

SEQ ID NO: 142961 - DNA, 25 bp, Saccharomyces pastorianus
gcacgatggtgcacgaagaacagtt

SEQ ID NO: 142962 - DNA, 25 bp, Saccharomyces pastorianus
gttgtcttgtgggatctcgatactt

SEQ ID NO: 142963 - DNA, 25 bp, Saccharomyces pastorianus
ttccccaagtattttaggcctccat

SEQ ID NO: 142964 - DNA, 25 bp, Saccharomyces pastorianus
tattttaggcctccatacggtgcaa

SEQ ID NO: 142965 - DNA, 25 bp, Saccharomyces pastorianus
tcaacgaacttattggtagtgacca

SEQ ID NO: 142966 - DNA, 25 bp, Saccharomyces pastorianus
ggcctccatacggtgcaattgataa

SEQ ID NO: 142967 - DNA, 25 bp, Saccharomyces pastorianus
cacaggcaaacatttccccaagtat

SEQ ID NO: 142968 - DNA, 25 bp, Saccharomyces pastorianus
cgaagaacagttgaggttgctatta

SEQ ID NO: 142969 - DNA, 25 bp, Saccharomyces pastorianus
acagtttggcctaacggttgtcttg

SEQ ID NO: 142970 - DNA, 25 bp, Saccharomyces pastorianus
agagctatagtaaaacagtttggcc

SEQ ID NO: 142971 - DNA, 25 bp, Saccharomyces pastorianus
catctgggcgatgaatgctactggc

SEQ ID NO: 142972 - DNA, 25 bp, Saccharomyces pastorianus
ggtctcacgtatatttgccaaatgt

SEQ ID NO: 142973 - DNA, 25 bp, Saccharomyces pastorianus
agggacacttaatcggctcacatac

SEQ ID NO: 142974 - DNA, 25 bp, Saccharomyces pastorianus
aacagtttctcattgtgtcggcgga

SEQ ID NO: 142975 - DNA, 25 bp, Saccharomyces pastorianus
gattggagcctccttctcaatgatt

SEQ ID NO: 142976 - DNA, 25 bp, Saccharomyces pastorianus
gaaaaaactgtcgatcttgccatta

SEQ ID NO: 142977 - DNA, 25 bp, Saccharomyces pastorianus
agctcaaattgaatggtccatctgg

SEQ ID NO: 142978 - DNA, 25 bp, Saccharomyces pastorianus
ggtgatgatcaatcaacagtttctc

SEQ ID NO: 142979 - DNA, 25 bp, Saccharomyces pastorianus
ggaacaagtcaggaaccggattaat

SEQ ID NO: 142980 - DNA, 25 bp, Saccharomyces pastorianus
gctcacatacctggtctcacgtata

SEQ ID NO: 142981 - DNA, 25 bp, Saccharomyces pastorianus
ggttcagacctccatatggcggaat

SEQ ID NO: 142982 - DNA, 25 bp, Saccharomyces pastorianus
actctcattgtctaaggctgatgaa

SEQ ID NO: 142983 - DNA, 25 bp, Saccharomyces pastorianus
aagactcaagccacttcagatgatt

SEQ ID NO: 142984 - DNA, 25 bp, Saccharomyces pastorianus
ttgtcctctcaattgaatgctttaa

SEQ ID NO: 142985 - DNA, 25 bp, Saccharomyces pastorianus
cggtactctagctaacgcgaatatt

SEQ ID NO: 142986 - DNA, 25 bp, Saccharomyces pastorianus
gaattttgagctacagtctgccaat

SEQ ID NO: 142987 - DNA, 25 bp, Saccharomyces pastorianus
taggtctggttctatcggtactcta

SEQ ID NO: 142988 - DNA, 25 bp, Saccharomyces pastorianus
agtctgccaatgagaaacttctgaa

SEQ ID NO: 142989 - DNA, 25 bp, Saccharomyces pastorianus
aaaaattatcgttcattgtcctctc

SEQ ID NO: 142990 - DNA, 25 bp, Saccharomyces pastorianus
gcgaatattgattcctcaccagcga

SEQ ID NO: 142991 - DNA, 25 bp, Saccharomyces pastorianus
atcggaaatacacgctttaaagctt

SEQ ID NO: 142992 - DNA, 25 bp, Saccharomyces pastorianus
tcctcaccagcgaataactctaatc

SEQ ID NO: 142993 - DNA, 25 bp, Saccharomyces pastorianus
agagcacaagctgagtgaattggaa

SEQ ID NO: 142994 - DNA, 25 bp, Saccharomyces pastorianus
ggaaaactcacagctcgaaaaatca

SEQ ID NO: 142995 - DNA, 25 bp, Saccharomyces pastorianus
ggaggcataactacgggtgatatca

SEQ ID NO: 142996 - DNA, 25 bp, Saccharomyces pastorianus
aacaccgagttgatcgataccaaga

SEQ ID NO: 142997 - DNA, 25 bp, Saccharomyces pastorianus
gagcaaaatttgtcttcgaaaagta

SEQ ID NO: 142998 - DNA, 25 bp, Saccharomyces pastorianus
attccctcgaggacagtcgaatgaa

SEQ ID NO: 142999 - DNA, 25 bp, Saccharomyces pastorianus
gagctggaaacccttaacaccgagt

SEQ ID NO: 143000 - DNA, 25 bp, Saccharomyces pastorianus
gttaccgaaggcgatatctcatcaa

SEQ ID NO: 143001 - DNA, 25 bp, Saccharomyces pastorianus
aaagtcctcagagttggcagaacta

SEQ ID NO: 143002 - DNA, 25 bp, Saccharomyces pastorianus
ggctataaagaaccattccctcgag

SEQ ID NO: 143003 - DNA, 25 bp, Saccharomyces pastorianus
ggaaacggtcgataactcaatcaat

SEQ ID NO: 143004 - DNA, 25 bp, Saccharomyces pastorianus
aactacagacgtgcattcattcgtt

SEQ ID NO: 143005 - DNA, 25 bp, Saccharomyces pastorianus
aatctagaccctttcatattttgga

SEQ ID NO: 143006 - DNA, 25 bp, Saccharomyces pastorianus
gggcaactttctttgcagttcagca

SEQ ID NO: 143007 - DNA, 25 bp, Saccharomyces pastorianus
gagtcgtacttgagaaatcctagcg

SEQ ID NO: 143008 - DNA, 25 bp, Saccharomyces pastorianus
ttattggtgcaattctgtcaacgaa

SEQ ID NO: 143009 - DNA, 25 bp, Saccharomyces pastorianus
acacgggtcaaagccatacaacgaa

SEQ ID NO: 143010 - DNA, 25 bp, Saccharomyces pastorianus
gttaaagaatggttcgccggccaag

SEQ ID NO: 143011 - DNA, 25 bp, Saccharomyces pastorianus
ataagtcgttcgcacacgggtcaaa

SEQ ID NO: 143012 - DNA, 25 bp, Saccharomyces pastorianus
gaaaaactgaatctgctaggagcac

SEQ ID NO: 143013 - DNA, 25 bp, Saccharomyces pastorianus
aaaacacagcatgcacattcgttaa

SEQ ID NO: 143014 - DNA, 25 bp, Saccharomyces pastorianus
tggtgaaaccacgatttttgctagt

SEQ ID NO: 143015 - DNA, 25 bp, Saccharomyces pastorianus
ttccttacagagatgcagcgcaccg

SEQ ID NO: 143016 - DNA, 25 bp, Saccharomyces pastorianus
gctaaactcaacatacgaagccttt

SEQ ID NO: 143017 - DNA, 25 bp, Saccharomyces pastorianus
gaacgataacaaacagctaaactca

SEQ ID NO: 143018 - DNA, 25 bp, Saccharomyces pastorianus
atggccctgatccattctcgtgtga

SEQ ID NO: 143019 - DNA, 25 bp, Saccharomyces pastorianus
taacgagtggtgacgggtactgcat

SEQ ID NO: 143020 - DNA, 25 bp, Saccharomyces pastorianus
tgacgggtactgcatgaacgataac

SEQ ID NO: 143021 - DNA, 25 bp, Saccharomyces pastorianus
cctgatccattctcgtgtgagacga

SEQ ID NO: 143022 - DNA, 25 bp, Saccharomyces pastorianus
gcagcgcaccgggagcttaaaatta

SEQ ID NO: 143023 - DNA, 25 bp, Saccharomyces pastorianus
agacgagtggtcttccttacagaga

SEQ ID NO: 143024 - DNA, 25 bp, Saccharomyces pastorianus
atggatcggcgaggaatatcctgtg

SEQ ID NO: 143025 - DNA, 25 bp, Saccharomyces pastorianus
gaagcctttcaatggatcggcgagg

SEQ ID NO: 143026 - DNA, 25 bp, Saccharomyces pastorianus
gctacccatcgaccacagtgtaatg

SEQ ID NO: 143027 - DNA, 25 bp, Saccharomyces pastorianus
aatggtgggcatccgtgcggtaggc

SEQ ID NO: 143028 - DNA, 25 bp, Saccharomyces pastorianus
atcgaccacagtgtaatggtgggca

SEQ ID NO: 143029 - DNA, 25 bp, Saccharomyces pastorianus
gaaactgcgaaaactcgctacccat

SEQ ID NO: 143030 - DNA, 25 bp, Saccharomyces pastorianus
tacccatcgaccacagtgtaatggt

SEQ ID NO: 143031 - DNA, 25 bp, Saccharomyces pastorianus
actgcgaaaactcgctacccatcga

SEQ ID NO: 143032 - DNA, 25 bp, Saccharomyces pastorianus
atggcagaaactgcgaaaactcgct

SEQ ID NO: 143033 - DNA, 25 bp, Saccharomyces pastorianus
gtggtggcagaagatggcagaaact

SEQ ID NO: 143034 - DNA, 25 bp, Saccharomyces pastorianus
acagtgtaatggtgggcatccgtgc

SEQ ID NO: 143035 - DNA, 25 bp, Saccharomyces pastorianus
gttgacccatcaagaaagaaggaca

SEQ ID NO: 143036 - DNA, 25 bp, Saccharomyces pastorianus
aaagaaggacaaagtggtggcagaa

SEQ ID NO: 143037 - DNA, 25 bp, Saccharomyces pastorianus
gaacgggataatagaaaatcggctt

SEQ ID NO: 143038 - DNA, 25 bp, Saccharomyces pastorianus
agaaaatcggcttctgcaaattaga

SEQ ID NO: 143039 - DNA, 25 bp, Saccharomyces pastorianus
taaaaatcgattatcagaacgggat

SEQ ID NO: 143040 - DNA, 25 bp, Saccharomyces pastorianus
atccgctaaaaatcgattatcagaa

SEQ ID NO: 143041 - DNA, 25 bp, Saccharomyces pastorianus
atagaaaatcggcttctgcaaatta

SEQ ID NO: 143042 - DNA, 25 bp, Saccharomyces pastorianus
gaaaatcggcttctgcaaattagaa

SEQ ID NO: 143043 - DNA, 25 bp, Saccharomyces pastorianus
aaatcggcttctgcaaattagaaat

SEQ ID NO: 143044 - DNA, 25 bp, Saccharomyces pastorianus
tcggcttctgcaaattagaaatttc

SEQ ID NO: 143045 - DNA, 25 bp, Saccharomyces pastorianus
ggcttctgcaaattagaaatttcaa

SEQ ID NO: 143046 - DNA, 25 bp, Saccharomyces pastorianus
gataatagaaaatcggcttctgcaa

SEQ ID NO: 143047 - DNA, 25 bp, Saccharomyces pastorianus
gggataatagaaaatcggcttctgc

SEQ ID NO: 143048 - DNA, 25 bp, Saccharomyces pastorianus
gaacatacctaatcagattcctcat

SEQ ID NO: 143049 - DNA, 25 bp, Saccharomyces pastorianus
gcaggtctggtatctgtgttgagaa

SEQ ID NO: 143050 - DNA, 25 bp, Saccharomyces pastorianus
tctggtatctgtgttgagaatcgca

SEQ ID NO: 143051 - DNA, 25 bp, Saccharomyces pastorianus
actttgcaaagttcgctatctgcga

SEQ ID NO: 143052 - DNA, 25 bp, Saccharomyces pastorianus
aatcgcagatgggttttgggagcat

SEQ ID NO: 143053 - DNA, 25 bp, Saccharomyces pastorianus
gcaaagttcgctatctgcgattgta

SEQ ID NO: 143054 - DNA, 25 bp, Saccharomyces pastorianus
acttttgcagctaaggatgcttgat

SEQ ID NO: 143055 - DNA, 25 bp, Saccharomyces pastorianus
gcagctaaggatgcttgatagtaat

SEQ ID NO: 143056 - DNA, 25 bp, Saccharomyces pastorianus
agattcctcatactactttgcaaag

SEQ ID NO: 143057 - DNA, 25 bp, Saccharomyces pastorianus
gggagcatgacaaacttttgcagct

SEQ ID NO: 143058 - DNA, 25 bp, Saccharomyces pastorianus
tcgctatctgcgattgtaataaaga

SEQ ID NO: 143059 - DNA, 25 bp, Saccharomyces pastorianus
tattagctgttttcttatccctggc

SEQ ID NO: 143060 - DNA, 25 bp, Saccharomyces pastorianus
gtgcgttctgggactcattcaatga

SEQ ID NO: 143061 - DNA, 25 bp, Saccharomyces pastorianus
gaatgaactcctgcgatgggcttat

SEQ ID NO: 143062 - DNA, 25 bp, Saccharomyces pastorianus
attgcttctgatttgctgctcattt

SEQ ID NO: 143063 - DNA, 25 bp, Saccharomyces pastorianus
ggaaaattcctcgtagattctggta

SEQ ID NO: 143064 - DNA, 25 bp, Saccharomyces pastorianus
tataacggcttagatgctgcattac

SEQ ID NO: 143065 - DNA, 25 bp, Saccharomyces pastorianus
ctatcactttctttccaatctgttg

SEQ ID NO: 143066 - DNA, 25 bp, Saccharomyces pastorianus
tggactttctttacctataacggct

SEQ ID NO: 143067 - DNA, 25 bp, Saccharomyces pastorianus
gcatttcactcccttattatcgatt

SEQ ID NO: 143068 - DNA, 25 bp, Saccharomyces pastorianus
aaaccgctttattccattgcttctg

SEQ ID NO: 143069 - DNA, 25 bp, Saccharomyces pastorianus
tacactttcagcttgcatttcactc

SEQ ID NO: 143070 - DNA, 25 bp, Saccharomyces pastorianus
atatttcttccacgaaagttcgtct

SEQ ID NO: 143071 - DNA, 25 bp, Saccharomyces pastorianus
aggtggtgtagctactgttactgga

SEQ ID NO: 143072 - DNA, 25 bp, Saccharomyces pastorianus
attggcctgcgaaagaacctcatct

SEQ ID NO: 143073 - DNA, 25 bp, Saccharomyces pastorianus
aatgttgctggctggtggtgaccta

SEQ ID NO: 143074 - DNA, 25 bp, Saccharomyces pastorianus
gattgtcgaacgtactggttctgat

SEQ ID NO: 143075 - DNA, 25 bp, Saccharomyces pastorianus
aattcggtcatcaggtatatccaag

SEQ ID NO: 143076 - DNA, 25 bp, Saccharomyces pastorianus
gtaaggtcttttttgttatcccatg

SEQ ID NO: 143077 - DNA, 25 bp, Saccharomyces pastorianus
gtctatttatcagacgcgccatgtc

SEQ ID NO: 143078 - DNA, 25 bp, Saccharomyces pastorianus
acatcacattctcggtaattacggt

SEQ ID NO: 143079 - DNA, 25 bp, Saccharomyces pastorianus
tgcatgggagtcattgcaaccttca

SEQ ID NO: 143080 - DNA, 25 bp, Saccharomyces pastorianus
ggcggacgccgatttacatcacatt

SEQ ID NO: 143081 - DNA, 25 bp, Saccharomyces pastorianus
acggcgtatcaaattctgtgtcgaa

SEQ ID NO: 143082 - DNA, 25 bp, Saccharomyces pastorianus
ggtcttctccatgatttcaaggctc

SEQ ID NO: 143083 - DNA, 25 bp, Saccharomyces pastorianus
caaggctccgattgaagtggcaaca

SEQ ID NO: 143084 - DNA, 25 bp, Saccharomyces pastorianus
gacaaatcttcaacaacggcgtatc

SEQ ID NO: 143085 - DNA, 25 bp, Saccharomyces pastorianus
gagcaattcagtacttcttccaata

SEQ ID NO: 143086 - DNA, 25 bp, Saccharomyces pastorianus
aaagttcgctcgctccgatatccta

SEQ ID NO: 143087 - DNA, 25 bp, Saccharomyces pastorianus
aatgcttaacatgattgcccaagac

SEQ ID NO: 143088 - DNA, 25 bp, Saccharomyces pastorianus
agaggtcctccaattcagaattttc

SEQ ID NO: 143089 - DNA, 25 bp, Saccharomyces pastorianus
aagtggcaacaaagttcgctcgctc

SEQ ID NO: 143090 - DNA, 25 bp, Saccharomyces pastorianus
ctgtgtcgaagaagaggtcctccaa

SEQ ID NO: 143091 - DNA, 25 bp, Saccharomyces pastorianus
atatcctacgccctaacgagcaatt

SEQ ID NO: 143092 - DNA, 25 bp, Saccharomyces pastorianus
atgaacgatcgattagttacggaag

SEQ ID NO: 143093 - DNA, 25 bp, Saccharomyces pastorianus
ttgtttacaaaattgcgcgagattg

SEQ ID NO: 143094 - DNA, 25 bp, Saccharomyces pastorianus
gttgtttacaaaattgcgcgagatt

SEQ ID NO: 143095 - DNA, 25 bp, Saccharomyces pastorianus
acggaagagcaagagttgtttacaa

SEQ ID NO: 143096 - DNA, 25 bp, Saccharomyces pastorianus
gagttgtttacaaaattgcgcgaga

SEQ ID NO: 143097 - DNA, 25 bp, Saccharomyces pastorianus
agttacggaagagcaagagttgttt

SEQ ID NO: 143098 - DNA, 25 bp, Saccharomyces pastorianus
cgatcgattagttacggaagagcaa

SEQ ID NO: 143099 - DNA, 25 bp, Saccharomyces pastorianus
aacgatcgattagttacggaagagc

SEQ ID NO: 143100 - DNA, 25 bp, Saccharomyces pastorianus
cgattagttacggaagagcaagagt

SEQ ID NO: 143101 - DNA, 25 bp, Saccharomyces pastorianus
gatcgattagttacggaagagcaag

SEQ ID NO: 143102 - DNA, 25 bp, Saccharomyces pastorianus
aaaattgcgcgagattgtaggttca

SEQ ID NO: 143103 - DNA, 25 bp, Saccharomyces pastorianus
gagcctttagctcccggaaatgata

SEQ ID NO: 143104 - DNA, 25 bp, Saccharomyces pastorianus
aaagctcctactgttgcggctgatg

SEQ ID NO: 143105 - DNA, 25 bp, Saccharomyces pastorianus
aatgctgaaaccaaatcgtacgatt

SEQ ID NO: 143106 - DNA, 25 bp, Saccharomyces pastorianus
ggacgatccttctaaagtgcgccta

SEQ ID NO: 143107 - DNA, 25 bp, Saccharomyces pastorianus
gaggcgtaggcgaaatgaagctttt

SEQ ID NO: 143108 - DNA, 25 bp, Saccharomyces pastorianus
gcggctgatgggaaacttgtaactt

SEQ ID NO: 143109 - DNA, 25 bp, Saccharomyces pastorianus
gataatctcattaaagctcctactg

SEQ ID NO: 143110 - DNA, 25 bp, Saccharomyces pastorianus
aatgcaactgttgtagactccttca

SEQ ID NO: 143111 - DNA, 25 bp, Saccharomyces pastorianus
gactccttcaaatatgagcctttag

SEQ ID NO: 143112 - DNA, 25 bp, Saccharomyces pastorianus
agtgcgcctactttgtaggtctgac

SEQ ID NO: 143113 - DNA, 25 bp, Saccharomyces pastorianus
ggaagaaggccgctcatttacgaaa

SEQ ID NO: 143114 - DNA, 25 bp, Saccharomyces pastorianus
aaacatgctgcggattctcaaaata

SEQ ID NO: 143115 - DNA, 25 bp, Saccharomyces pastorianus
gtaaaaatcccctttcattgacaga

SEQ ID NO: 143116 - DNA, 25 bp, Saccharomyces pastorianus
aagcagctgcaaaaccatcgctaga

SEQ ID NO: 143117 - DNA, 25 bp, Saccharomyces pastorianus
attttcattttcttcggccacttca

SEQ ID NO: 143118 - DNA, 25 bp, Saccharomyces pastorianus
gattccgttttctcatttggcccaa

SEQ ID NO: 143119 - DNA, 25 bp, Saccharomyces pastorianus
gacgaaaactcaacctctaactcaa

SEQ ID NO: 143120 - DNA, 25 bp, Saccharomyces pastorianus
gaggcttccttcacttttggaacaa

SEQ ID NO: 143121 - DNA, 25 bp, Saccharomyces pastorianus
taaaccgcctatttcagattccgtt

SEQ ID NO: 143122 - DNA, 25 bp, Saccharomyces pastorianus
ggagggacccaagttcacaatagat

SEQ ID NO: 143123 - DNA, 25 bp, Saccharomyces pastorianus
aaagagctcattcacgtttggttca

SEQ ID NO: 143124 - DNA, 25 bp, Saccharomyces pastorianus
ttcggccacttcaactactgaacaa

SEQ ID NO: 143125 - DNA, 25 bp, Saccharomyces pastorianus
attactacgcattggtcgcgaacaa

SEQ ID NO: 143126 - DNA, 25 bp, Saccharomyces pastorianus
ggcttgggcttcaaaagctgccaaa

SEQ ID NO: 143127 - DNA, 25 bp, Saccharomyces pastorianus
tatgctattcattctcaaaggtttg

SEQ ID NO: 143128 - DNA, 25 bp, Saccharomyces pastorianus
ggtatagccatttatcgaagtcgtt

SEQ ID NO: 143129 - DNA, 25 bp, Saccharomyces pastorianus
tactccgatgattatttgcgcgatg

SEQ ID NO: 143130 - DNA, 25 bp, Saccharomyces pastorianus
ataagcgtataatctactccgatga

SEQ ID NO: 143131 - DNA, 25 bp, Saccharomyces pastorianus
aaactgcttcgcatctcaaatcagg

SEQ ID NO: 143132 - DNA, 25 bp, Saccharomyces pastorianus
tagataccataatttccttgcagga

SEQ ID NO: 143133 - DNA, 25 bp, Saccharomyces pastorianus
gatgttttcaagcatgttccattta

SEQ ID NO: 143134 - DNA, 25 bp, Saccharomyces pastorianus
ttttttggatcgttgcttgctaatg

SEQ ID NO: 143135 - DNA, 25 bp, Saccharomyces pastorianus
aagtcgtttcaattcctattctggg

SEQ ID NO: 143136 - DNA, 25 bp, Saccharomyces pastorianus
gatagcaagaataatgtccccgccg

SEQ ID NO: 143137 - DNA, 25 bp, Saccharomyces pastorianus
tattttctacaggtggatcgacgct

SEQ ID NO: 143138 - DNA, 25 bp, Saccharomyces pastorianus
tgtgtcacaaatgcctaagccacgt

SEQ ID NO: 143139 - DNA, 25 bp, Saccharomyces pastorianus
atttagtgcaccaagtctgcctcag

SEQ ID NO: 143140 - DNA, 25 bp, Saccharomyces pastorianus
accagttccaccagttttatcagat

SEQ ID NO: 143141 - DNA, 25 bp, Saccharomyces pastorianus
ctcagcaatccgtgtctacatcaat

SEQ ID NO: 143142 - DNA, 25 bp, Saccharomyces pastorianus
cgccgcttctttattacacgatgtt

SEQ ID NO: 143143 - DNA, 25 bp, Saccharomyces pastorianus
ggatcgacgctgcaacacaagcata

SEQ ID NO: 143144 - DNA, 25 bp, Saccharomyces pastorianus
gatggataccggtacctctaatagc

SEQ ID NO: 143145 - DNA, 25 bp, Saccharomyces pastorianus
gaatcaatttcgaagaaccccacta

SEQ ID NO: 143146 - DNA, 25 bp, Saccharomyces pastorianus
tgctccgctattgccaacatttagt

SEQ ID NO: 143147 - DNA, 25 bp, Saccharomyces pastorianus
gtcagcatcatctattcctttagca

SEQ ID NO: 143148 - DNA, 25 bp, Saccharomyces pastorianus
gttgcaacgtcagtaccatcggctc

SEQ ID NO: 143149 - DNA, 25 bp, Saccharomyces pastorianus
agcatcatctattcctttagcacca

SEQ ID NO: 143150 - DNA, 25 bp, Saccharomyces pastorianus
ttcggttgcaacgtcagtaccatcg

SEQ ID NO: 143151 - DNA, 25 bp, Saccharomyces pastorianus
ttgtcagcatcatctattcctttag

SEQ ID NO: 143152 - DNA, 25 bp, Saccharomyces pastorianus
tctgccttgtcagcatcatctattc

SEQ ID NO: 143153 - DNA, 25 bp, Saccharomyces pastorianus
tcctccttcggttgcaacgtcagta

SEQ ID NO: 143154 - DNA, 25 bp, Saccharomyces pastorianus
aacatcctctgccttgtcagcatca

SEQ ID NO: 143155 - DNA, 25 bp, Saccharomyces pastorianus
tgctttttcaacatcctctgccttg

SEQ ID NO: 143156 - DNA, 25 bp, Saccharomyces pastorianus
atcatctattcctttagcaccacca

SEQ ID NO: 143157 - DNA, 25 bp, Saccharomyces pastorianus
ttttcaacatcctctgccttgtcag

SEQ ID NO: 143158 - DNA, 25 bp, Saccharomyces pastorianus
gagccgtcaacactggtatggaacc

SEQ ID NO: 143159 - DNA, 25 bp, Saccharomyces pastorianus
tcaaggtcgttgacgccggtaacaa

SEQ ID NO: 143160 - DNA, 25 bp, Saccharomyces pastorianus
tcagcaccattgcttctatctcttt

SEQ ID NO: 143161 - DNA, 25 bp, Saccharomyces pastorianus
aacagagttgctgctccagccagag

SEQ ID NO: 143162 - DNA, 25 bp, Saccharomyces pastorianus
agaaaagtacgctgctgctgctcca

SEQ ID NO: 143163 - DNA, 25 bp, Saccharomyces pastorianus
gacaacggtcaagtgttcccatctt

SEQ ID NO: 143164 - DNA, 25 bp, Saccharomyces pastorianus
ttcctaccactaccctgaaattgaa

SEQ ID NO: 143165 - DNA, 25 bp, Saccharomyces pastorianus
gaagcttccttgttgaacttgttga

SEQ ID NO: 143166 - DNA, 25 bp, Saccharomyces pastorianus
aggtcggtcaatctgaagcttcctt

SEQ ID NO: 143167 - DNA, 25 bp, Saccharomyces pastorianus
atctctccattcactttcggtttga

SEQ ID NO: 143168 - DNA, 25 bp, Saccharomyces pastorianus
agacatctgggttagagccgtcaac

SEQ ID NO: 143169 - DNA, 25 bp, Saccharomyces pastorianus
gacgaagaaggcctccaattcaata

SEQ ID NO: 143170 - DNA, 25 bp, Saccharomyces pastorianus
acggcaacaactcttgagcgcttgg

SEQ ID NO: 143171 - DNA, 25 bp, Saccharomyces pastorianus
agcgcttggtgcaacggaactgttc

SEQ ID NO: 143172 - DNA, 25 bp, Saccharomyces pastorianus
ggtcagtatccctccacaaatatag

SEQ ID NO: 143173 - DNA, 25 bp, Saccharomyces pastorianus
gagagtcctcaaacgcagaatctga

SEQ ID NO: 143174 - DNA, 25 bp, Saccharomyces pastorianus
attgtctttgagcaccagattccgc

SEQ ID NO: 143175 - DNA, 25 bp, Saccharomyces pastorianus
gccgtttgaagcatttttccaattc

SEQ ID NO: 143176 - DNA, 25 bp, Saccharomyces pastorianus
gagcaccagattccgcagttatttt

SEQ ID NO: 143177 - DNA, 25 bp, Saccharomyces pastorianus
tagtggacataatgagccgtttgaa

SEQ ID NO: 143178 - DNA, 25 bp, Saccharomyces pastorianus
attatcaactacgttcttttcagta

SEQ ID NO: 143179 - DNA, 25 bp, Saccharomyces pastorianus
tttgcaagctaaagggtcagtatcc

SEQ ID NO: 143180 - DNA, 25 bp, Saccharomyces pastorianus
tttgaagatccttgccgacgctgtc

SEQ ID NO: 143181 - DNA, 25 bp, Saccharomyces pastorianus
gtgctctccagcagacgtcatgaag

SEQ ID NO: 143182 - DNA, 25 bp, Saccharomyces pastorianus
gtttaccggttggaagcctaacatg

SEQ ID NO: 143183 - DNA, 25 bp, Saccharomyces pastorianus
gaactatacacacttgacagcgtcc

SEQ ID NO: 143184 - DNA, 25 bp, Saccharomyces pastorianus
gacgctgtccgcaaagagggcccat

SEQ ID NO: 143185 - DNA, 25 bp, Saccharomyces pastorianus
tcactagactgggtccattcacaat

SEQ ID NO: 143186 - DNA, 25 bp, Saccharomyces pastorianus
gcaaaacgactctgctttggaggca

SEQ ID NO: 143187 - DNA, 25 bp, Saccharomyces pastorianus
gaatgtgatcccacgcgagcaattg

SEQ ID NO: 143188 - DNA, 25 bp, Saccharomyces pastorianus
acatggcgtatcttttaccttgctc

SEQ ID NO: 143189 - DNA, 25 bp, Saccharomyces pastorianus
tgctccatgttcagtggtgccattg

SEQ ID NO: 143190 - DNA, 25 bp, Saccharomyces pastorianus
ggtggttgccaagtttcactagact

SEQ ID NO: 143191 - DNA, 25 bp, Saccharomyces pastorianus
gaaaatttctgctcattgtacccat

SEQ ID NO: 143192 - DNA, 25 bp, Saccharomyces pastorianus
cggtgcttattggtgtcgttcctaa

SEQ ID NO: 143193 - DNA, 25 bp, Saccharomyces pastorianus
atagtactcttgaggctcttctact

SEQ ID NO: 143194 - DNA, 25 bp, Saccharomyces pastorianus
tgaaaccattcccttctcaaagcaa

SEQ ID NO: 143195 - DNA, 25 bp, Saccharomyces pastorianus
gcccttcgactttaacggtggtgcg

SEQ ID NO: 143196 - DNA, 25 bp, Saccharomyces pastorianus
gatgagactttgtacacacccacta

SEQ ID NO: 143197 - DNA, 25 bp, Saccharomyces pastorianus
tgcgtacgacaacctgaccatgtgg

SEQ ID NO: 143198 - DNA, 25 bp, Saccharomyces pastorianus
actaccgcaacgacatgacactatt

SEQ ID NO: 143199 - DNA, 25 bp, Saccharomyces pastorianus
gcgaggcgcgtggttgattcatatc

SEQ ID NO: 143200 - DNA, 25 bp, Saccharomyces pastorianus
ttctatatcatgttccaccttgtca

SEQ ID NO: 143201 - DNA, 25 bp, Saccharomyces pastorianus
gtacccattgtgttgttcctgatta

SEQ ID NO: 143202 - DNA, 25 bp, Saccharomyces pastorianus
agcgtactgatctgcacagccaaac

SEQ ID NO: 143203 - DNA, 25 bp, Saccharomyces pastorianus
ctcgtttgtcttacctatctctata

SEQ ID NO: 143204 - DNA, 25 bp, Saccharomyces pastorianus
tcggctaagttcacggcgcacagac

SEQ ID NO: 143205 - DNA, 25 bp, Saccharomyces pastorianus
acacctaagcctgccactgaatagg

SEQ ID NO: 143206 - DNA, 25 bp, Saccharomyces pastorianus
gaaaagatcccaagcatcacgttat

SEQ ID NO: 143207 - DNA, 25 bp, Saccharomyces pastorianus
tgagaaagagtccttgccaggccca

SEQ ID NO: 143208 - DNA, 25 bp, Saccharomyces pastorianus
cttggattaagaccctcggctaagt

SEQ ID NO: 143209 - DNA, 25 bp, Saccharomyces pastorianus
gatgatttaacatcgcaggcatcaa

SEQ ID NO: 143210 - DNA, 25 bp, Saccharomyces pastorianus
atataatgatcgatgcagcctcctc

SEQ ID NO: 143211 - DNA, 25 bp, Saccharomyces pastorianus
gaggcccgcttactgtacaaggttt

SEQ ID NO: 143212 - DNA, 25 bp, Saccharomyces pastorianus
caggcccatttgtccttggattaag

SEQ ID NO: 143213 - DNA, 25 bp, Saccharomyces pastorianus
ccccaatcatcgacttaccgtatat

SEQ ID NO: 143214 - DNA, 25 bp, Saccharomyces pastorianus
cgagtcgagctcttcaatgaatcca

SEQ ID NO: 143215 - DNA, 25 bp, Saccharomyces pastorianus
agagacaacaggtccactactccat

SEQ ID NO: 143216 - DNA, 25 bp, Saccharomyces pastorianus
atcctcaattagtgtatcctgattt

SEQ ID NO: 143217 - DNA, 25 bp, Saccharomyces pastorianus
taatgcagccagagccgagtcgagc

SEQ ID NO: 143218 - DNA, 25 bp, Saccharomyces pastorianus
ggatatcgataaccctaaggatgct

SEQ ID NO: 143219 - DNA, 25 bp, Saccharomyces pastorianus
gaaagactcgtacttccgtcaaaag

SEQ ID NO: 143220 - DNA, 25 bp, Saccharomyces pastorianus
tagacagctatccagaactcaggta

SEQ ID NO: 143221 - DNA, 25 bp, Saccharomyces pastorianus
aaatacgccttagtccttgagaaat

SEQ ID NO: 143222 - DNA, 25 bp, Saccharomyces pastorianus
tgatttgggtcctctacccgatgaa

SEQ ID NO: 143223 - DNA, 25 bp, Saccharomyces pastorianus
atgaggactatgaggcgacggatat

SEQ ID NO: 143224 - DNA, 25 bp, Saccharomyces pastorianus
tattccgacattatacagatgctca

SEQ ID NO: 143225 - DNA, 25 bp, Saccharomyces pastorianus
attcaatgtccttccacctaaaaag

SEQ ID NO: 143226 - DNA, 25 bp, Saccharomyces pastorianus
gagatttcaccaatattcaatgtcc

SEQ ID NO: 143227 - DNA, 25 bp, Saccharomyces pastorianus
gattctgggttagagatttcaccaa

SEQ ID NO: 143228 - DNA, 25 bp, Saccharomyces pastorianus
tactgtaataaagcgtattccgaca

SEQ ID NO: 143229 - DNA, 25 bp, Saccharomyces pastorianus
gatcaagaaccctgtatctttcaat

SEQ ID NO: 143230 - DNA, 25 bp, Saccharomyces pastorianus
tcaccaatattcaatgtccttccac

SEQ ID NO: 143231 - DNA, 25 bp, Saccharomyces pastorianus
tccggactactacgcagtgatcaag

SEQ ID NO: 143232 - DNA, 25 bp, Saccharomyces pastorianus
aaggattatccggactactacgcag

SEQ ID NO: 143233 - DNA, 25 bp, Saccharomyces pastorianus
gattatccggactactacgcagtga

SEQ ID NO: 143234 - DNA, 25 bp, Saccharomyces pastorianus
cgcagtgatcaagaaccctgtatct

SEQ ID NO: 143235 - DNA, 25 bp, Saccharomyces pastorianus
ggtacactttattttctggactcac

SEQ ID NO: 143236 - DNA, 25 bp, Saccharomyces pastorianus
gttgcggacatgaccattgtaacga

SEQ ID NO: 143237 - DNA, 25 bp, Saccharomyces pastorianus
caaaacaggtctttcaatggcattt

SEQ ID NO: 143238 - DNA, 25 bp, Saccharomyces pastorianus
gagatgactctacgccgaacaaaat

SEQ ID NO: 143239 - DNA, 25 bp, Saccharomyces pastorianus
aatggcattttttcacatcccactg

SEQ ID NO: 143240 - DNA, 25 bp, Saccharomyces pastorianus
tcccactgccagaatacttgaatat

SEQ ID NO: 143241 - DNA, 25 bp, Saccharomyces pastorianus
gagaaaaatcccctcattggaatgt

SEQ ID NO: 143242 - DNA, 25 bp, Saccharomyces pastorianus
acagaagtcccagtaggtacacttt

SEQ ID NO: 143243 - DNA, 25 bp, Saccharomyces pastorianus
aaatctggctatgctatggcggtgg

SEQ ID NO: 143244 - DNA, 25 bp, Saccharomyces pastorianus
gaatccaagacacatcccggagaga

SEQ ID NO: 143245 - DNA, 25 bp, Saccharomyces pastorianus
acgattactgtcttcgagatgactc

SEQ ID NO: 143246 - DNA, 25 bp, Saccharomyces pastorianus
gagagcttctttgcaaggttccgta

SEQ ID NO: 143247 - DNA, 25 bp, Saccharomyces pastorianus
aggttccgtattctggatgtcacca

SEQ ID NO: 143248 - DNA, 25 bp, Saccharomyces pastorianus
agataccttcctgggctacgtcaga

SEQ ID NO: 143249 - DNA, 25 bp, Saccharomyces pastorianus
agcgatcttcaaaataggcacaaac

SEQ ID NO: 143250 - DNA, 25 bp, Saccharomyces pastorianus
ttcggtttcctccatgctgaataat

SEQ ID NO: 143251 - DNA, 25 bp, Saccharomyces pastorianus
aaacagaccgctactactgctaaag

SEQ ID NO: 143252 - DNA, 25 bp, Saccharomyces pastorianus
atttttctcaaatgcaagcgatctt

SEQ ID NO: 143253 - DNA, 25 bp, Saccharomyces pastorianus
tatggtctacaggatgtgttgtcat

SEQ ID NO: 143254 - DNA, 25 bp, Saccharomyces pastorianus
tgttacttattatggtgcttctcaa

SEQ ID NO: 143255 - DNA, 25 bp, Saccharomyces pastorianus
attacggaccatttgaggaatcact

SEQ ID NO: 143256 - DNA, 25 bp, Saccharomyces pastorianus
tatttttcttgaatacgttcctggg

SEQ ID NO: 143257 - DNA, 25 bp, Saccharomyces pastorianus
aggactaacgccttttcagggagat

SEQ ID NO: 143258 - DNA, 25 bp, Saccharomyces pastorianus
gaaccaaatgactgctggtccaaca

SEQ ID NO: 143259 - DNA, 25 bp, Saccharomyces pastorianus
ggatactttatgtgccttaaaccaa

SEQ ID NO: 143260 - DNA, 25 bp, Saccharomyces pastorianus
tatacgatcttttcgatggcatgtt

SEQ ID NO: 143261 - DNA, 25 bp, Saccharomyces pastorianus
acagagcacacggattacgcgatat

SEQ ID NO: 143262 - DNA, 25 bp, Saccharomyces pastorianus
ttgtgggagagcttttcttccgtta

SEQ ID NO: 143263 - DNA, 25 bp, Saccharomyces pastorianus
gcccaggccatttgagggatatcca

SEQ ID NO: 143264 - DNA, 25 bp, Saccharomyces pastorianus
gagggattacgttcttcttgatgac

SEQ ID NO: 143265 - DNA, 25 bp, Saccharomyces pastorianus
tcttccgttattccacgaactgact

SEQ ID NO: 143266 - DNA, 25 bp, Saccharomyces pastorianus
tgatataagagtacgcctggctgaa

SEQ ID NO: 143267 - DNA, 25 bp, Saccharomyces pastorianus
aagttcccagagatgtgacgatgta

SEQ ID NO: 143268 - DNA, 25 bp, Saccharomyces pastorianus
tagggcattaaaattattccaaagc

SEQ ID NO: 143269 - DNA, 25 bp, Saccharomyces pastorianus
atttctagcgaaaaagagtattcta

SEQ ID NO: 143270 - DNA, 25 bp, Saccharomyces pastorianus
atgcgctacagggtagggcattaaa

SEQ ID NO: 143271 - DNA, 25 bp, Saccharomyces pastorianus
taatatcgtagaggacatcaaagct

SEQ ID NO: 143272 - DNA, 25 bp, Saccharomyces pastorianus
gacatgtcaattgatgtaaacggaa

SEQ ID NO: 143273 - DNA, 25 bp, Saccharomyces pastorianus
gatatgaaaaactgatttctagcga

SEQ ID NO: 143274 - DNA, 25 bp, Saccharomyces pastorianus
gaggacatcaaagctctgagacaag

SEQ ID NO: 143275 - DNA, 25 bp, Saccharomyces pastorianus
atcaaagctctgagacaagctataa

SEQ ID NO: 143276 - DNA, 25 bp, Saccharomyces pastorianus
aaagctacggatgcgctacagggta

SEQ ID NO: 143277 - DNA, 25 bp, Saccharomyces pastorianus
aaggctaacgaaaatgacatgtcaa

SEQ ID NO: 143278 - DNA, 25 bp, Saccharomyces pastorianus
gagtattctaatatcgtagaggaca

SEQ ID NO: 143279 - DNA, 25 bp, Saccharomyces pastorianus
gaaaactcttgtagggatggcagct

SEQ ID NO: 143280 - DNA, 25 bp, Saccharomyces pastorianus
acctgggtaccacgaatagtgctgt

SEQ ID NO: 143281 - DNA, 25 bp, Saccharomyces pastorianus
attctgaaaacactttctttgctac

SEQ ID NO: 143282 - DNA, 25 bp, Saccharomyces pastorianus
atctatagttgcctttgatgtcaaa

SEQ ID NO: 143283 - DNA, 25 bp, Saccharomyces pastorianus
gacaacgaaccacaccatctatagt

SEQ ID NO: 143284 - DNA, 25 bp, Saccharomyces pastorianus
gtcattggtatcgacctgggtacca

SEQ ID NO: 143285 - DNA, 25 bp, Saccharomyces pastorianus
aacgatccctcaactggctaagaag

SEQ ID NO: 143286 - DNA, 25 bp, Saccharomyces pastorianus
tgatgtcaaaagctcgccacagaat

SEQ ID NO: 143287 - DNA, 25 bp, Saccharomyces pastorianus
atatatccgtgattctaacgacaaa

SEQ ID NO: 143288 - DNA, 25 bp, Saccharomyces pastorianus
tatcaattcacgattactatactca

SEQ ID NO: 143289 - DNA, 25 bp, Saccharomyces pastorianus
aatctggtagactcaactttctcaa

SEQ ID NO: 143290 - DNA, 25 bp, Saccharomyces pastorianus
gttctcacccttgatacctagaaat

SEQ ID NO: 143291 - DNA, 25 bp, Saccharomyces pastorianus
taggagcagctattcaaggtggtat

SEQ ID NO: 143292 - DNA, 25 bp, Saccharomyces pastorianus
gatgccgatatcgaaccggaggata

SEQ ID NO: 143293 - DNA, 25 bp, Saccharomyces pastorianus
aacatctacgagtgccaatgacaga

SEQ ID NO: 143294 - DNA, 25 bp, Saccharomyces pastorianus
aatccttgttggtggtatgacccgt

SEQ ID NO: 143295 - DNA, 25 bp, Saccharomyces pastorianus
caaggtggtattctatccggtgaaa

SEQ ID NO: 143296 - DNA, 25 bp, Saccharomyces pastorianus
gtgacaccattgacattagggattg

SEQ ID NO: 143297 - DNA, 25 bp, Saccharomyces pastorianus
aacatttggaggagcgttctcaccc

SEQ ID NO: 143298 - DNA, 25 bp, Saccharomyces pastorianus
gtctccaaattctagtgttaaccca

SEQ ID NO: 143299 - DNA, 25 bp, Saccharomyces pastorianus
ggtatgacccgtatgccaaagatta

SEQ ID NO: 143300 - DNA, 25 bp, Saccharomyces pastorianus
gactatcccacctgtgaagcaagca

SEQ ID NO: 143301 - DNA, 25 bp, Saccharomyces pastorianus
ccaacgatagtagttctgtcatatt

SEQ ID NO: 143302 - DNA, 25 bp, Saccharomyces pastorianus
aaattgtcacaccaatctcgcccat

SEQ ID NO: 143303 - DNA, 25 bp, Saccharomyces pastorianus
ggagatggaatctcccaacgatagt

SEQ ID NO: 143304 - DNA, 25 bp, Saccharomyces pastorianus
gtgattccaattctgatatctcgca

SEQ ID NO: 143305 - DNA, 25 bp, Saccharomyces pastorianus
taaggcttgaccatggtgctaacaa

SEQ ID NO: 143306 - DNA, 25 bp, Saccharomyces pastorianus
atctcgcccatgaatgaagctatta

SEQ ID NO: 143307 - DNA, 25 bp, Saccharomyces pastorianus
tgctaacaataaatcacttctgctt

SEQ ID NO: 143308 - DNA, 25 bp, Saccharomyces pastorianus
agatagtggcagtctgccattcaac

SEQ ID NO: 143309 - DNA, 25 bp, Saccharomyces pastorianus
taatcattttaaggccgtttcagaa

SEQ ID NO: 143310 - DNA, 25 bp, Saccharomyces pastorianus
tgatatctcgcaaaggtccgttagc

SEQ ID NO: 143311 - DNA, 25 bp, Saccharomyces pastorianus
tctgcttggaagttttttggacggt

SEQ ID NO: 143312 - DNA, 25 bp, Saccharomyces pastorianus
ttatctcagggaatagcgaacggca

SEQ ID NO: 143313 - DNA, 25 bp, Saccharomyces pastorianus
acaactgaacttgctagagactaca

SEQ ID NO: 143314 - DNA, 25 bp, Saccharomyces pastorianus
gaagactatagacatcgcggcaata

SEQ ID NO: 143315 - DNA, 25 bp, Saccharomyces pastorianus
tgaagctgaagctctgcccagatat

SEQ ID NO: 143316 - DNA, 25 bp, Saccharomyces pastorianus
gatcctgttcagatcttttgtcaag

SEQ ID NO: 143317 - DNA, 25 bp, Saccharomyces pastorianus
gactacttgtttaggtctggcagcc

SEQ ID NO: 143318 - DNA, 25 bp, Saccharomyces pastorianus
ggtctggcagcctaaattttgacaa

SEQ ID NO: 143319 - DNA, 25 bp, Saccharomyces pastorianus
gagcaaaatgcaaattaccccactt

SEQ ID NO: 143320 - DNA, 25 bp, Saccharomyces pastorianus
gactacaacatatttatctcaggga

SEQ ID NO: 143321 - DNA, 25 bp, Saccharomyces pastorianus
ggatcaccccattttaagaaagttg

SEQ ID NO: 143322 - DNA, 25 bp, Saccharomyces pastorianus
gcgaacggcaattactcttctttga

SEQ ID NO: 143323 - DNA, 25 bp, Saccharomyces pastorianus
gagtgataatcatcagccacctcgc

SEQ ID NO: 143324 - DNA, 25 bp, Saccharomyces pastorianus
agttgccaaatcttgacatcctcac

SEQ ID NO: 143325 - DNA, 25 bp, Saccharomyces pastorianus
agaagcagtggtcttgccttttcat

SEQ ID NO: 143326 - DNA, 25 bp, Saccharomyces pastorianus
aagattatcttcagcttctctccaa

SEQ ID NO: 143327 - DNA, 25 bp, Saccharomyces pastorianus
agccacctcgctcaagtaatactgt

SEQ ID NO: 143328 - DNA, 25 bp, Saccharomyces pastorianus
atagaaatagcattcctcctcctgg

SEQ ID NO: 143329 - DNA, 25 bp, Saccharomyces pastorianus
acacacaacttgagctcacacgtaa

SEQ ID NO: 143330 - DNA, 25 bp, Saccharomyces pastorianus
ttcgcctctatcttcatcatcaaat

SEQ ID NO: 143331 - DNA, 25 bp, Saccharomyces pastorianus
gaataatggctctgtatcttccaaa

SEQ ID NO: 143332 - DNA, 25 bp, Saccharomyces pastorianus
tgaacagattttcgttctctcctgt

SEQ ID NO: 143333 - DNA, 25 bp, Saccharomyces pastorianus
gttctctcctgtgcgtgttgcaaaa

SEQ ID NO: 143334 - DNA, 25 bp, Saccharomyces pastorianus
gctagacgaaatttgccgcgaagtt

SEQ ID NO: 143335 - DNA, 25 bp, Saccharomyces pastorianus
gccccgaggctgaaggtactgtagt

SEQ ID NO: 143336 - DNA, 25 bp, Saccharomyces pastorianus
cagaaaaaggtttgccatgatgaat

SEQ ID NO: 143337 - DNA, 25 bp, Saccharomyces pastorianus
tgagcagggctcaagagttgattaa

SEQ ID NO: 143338 - DNA, 25 bp, Saccharomyces pastorianus
gccgcgaagttaagactgcctctat

SEQ ID NO: 143339 - DNA, 25 bp, Saccharomyces pastorianus
actgtagtcagagttatcacttggc

SEQ ID NO: 143340 - DNA, 25 bp, Saccharomyces pastorianus
agagttatcacttggctagacgaaa

SEQ ID NO: 143341 - DNA, 25 bp, Saccharomyces pastorianus
tgggcccgtggtttatcattcaaag

SEQ ID NO: 143342 - DNA, 25 bp, Saccharomyces pastorianus
tgtgttttcaatacgcatcagattc

SEQ ID NO: 143343 - DNA, 25 bp, Saccharomyces pastorianus
tacgcatcagattccattaactcag

SEQ ID NO: 143344 - DNA, 25 bp, Saccharomyces pastorianus
aatcatggaaatgagccccgaggct

SEQ ID NO: 143345 - DNA, 25 bp, Saccharomyces pastorianus
gatcactaaacgcaagtttgccgca

SEQ ID NO: 143346 - DNA, 25 bp, Saccharomyces pastorianus
gaagttcctgtgacggctattgaag

SEQ ID NO: 143347 - DNA, 25 bp, Saccharomyces pastorianus
tacaaactcccaaatggtgagccaa

SEQ ID NO: 143348 - DNA, 25 bp, Saccharomyces pastorianus
gtttgccgcacccttgggaaaagtg

SEQ ID NO: 143349 - DNA, 25 bp, Saccharomyces pastorianus
gatgttgccgctttgaacgagttta

SEQ ID NO: 143350 - DNA, 25 bp, Saccharomyces pastorianus
ttctctgaaggatgctgtttgtgtc

SEQ ID NO: 143351 - DNA, 25 bp, Saccharomyces pastorianus
agaaatggttaaatcgccttcgata

SEQ ID NO: 143352 - DNA, 25 bp, Saccharomyces pastorianus
taaggaggcaacagtcaacctaatg

SEQ ID NO: 143353 - DNA, 25 bp, Saccharomyces pastorianus
tagggaccccaatgattgcttgaaa

SEQ ID NO: 143354 - DNA, 25 bp, Saccharomyces pastorianus
atcgccttcgatattgcatatcttg

SEQ ID NO: 143355 - DNA, 25 bp, Saccharomyces pastorianus
gcagactcgttgcttttagggaccc

SEQ ID NO: 143356 - DNA, 25 bp, Saccharomyces pastorianus
ccagatcattacttgaacgtggtat

SEQ ID NO: 143357 - DNA, 25 bp, Saccharomyces pastorianus
actgactccaggtgagtttacccaa

SEQ ID NO: 143358 - DNA, 25 bp, Saccharomyces pastorianus
gggctattgcccattgtcaaggagt

SEQ ID NO: 143359 - DNA, 25 bp, Saccharomyces pastorianus
ggcttggattccactggtacagtca

SEQ ID NO: 143360 - DNA, 25 bp, Saccharomyces pastorianus
cagttatctttagcagcatccgtaa

SEQ ID NO: 143361 - DNA, 25 bp, Saccharomyces pastorianus
taacgatgggtgttccgacgaggtt

SEQ ID NO: 143362 - DNA, 25 bp, Saccharomyces pastorianus
agtcctttatctattgctacgttca

SEQ ID NO: 143363 - DNA, 25 bp, Saccharomyces pastorianus
ggtacagtcattgtgatggcatata

SEQ ID NO: 143364 - DNA, 25 bp, Saccharomyces pastorianus
gagggaattaacttctgcaacaata

SEQ ID NO: 143365 - DNA, 25 bp, Saccharomyces pastorianus
ccgacgaggttgcagtctcagttta

SEQ ID NO: 143366 - DNA, 25 bp, Saccharomyces pastorianus
ggtttgaaccttcccacaagaacag

SEQ ID NO: 143367 - DNA, 25 bp, Saccharomyces pastorianus
tgcttccacagcatgtcaagtttat

SEQ ID NO: 143368 - DNA, 25 bp, Saccharomyces pastorianus
ttcaacacgtggaggtgccaaccgt

SEQ ID NO: 143369 - DNA, 25 bp, Saccharomyces pastorianus
caatgctttatagaggtgccgattt

SEQ ID NO: 143370 - DNA, 25 bp, Saccharomyces pastorianus
gtttatcttattatctgccaccgtt

SEQ ID NO: 143371 - DNA, 25 bp, Saccharomyces pastorianus
ggcgcaattggctccaacagcgtaa

SEQ ID NO: 143372 - DNA, 25 bp, Saccharomyces pastorianus
ccaccgttcctaacacttatgagtt

SEQ ID NO: 143373 - DNA, 25 bp, Saccharomyces pastorianus
aggtgccaaccgtggaggttcaaga

SEQ ID NO: 143374 - DNA, 25 bp, Saccharomyces pastorianus
tttacactcaagatggtccttcgaa

SEQ ID NO: 143375 - DNA, 25 bp, Saccharomyces pastorianus
gggccgtggtggatccaatactcga

SEQ ID NO: 143376 - DNA, 25 bp, Saccharomyces pastorianus
gggctccttcaaaaactgacaacgg

SEQ ID NO: 143377 - DNA, 25 bp, Saccharomyces pastorianus
tcatttccacaccaaaaagacccgt

SEQ ID NO: 143378 - DNA, 25 bp, Saccharomyces pastorianus
atgaaagctcatccggtgcttctaa

SEQ ID NO: 143379 - DNA, 25 bp, Saccharomyces pastorianus
aatccatgcccaatatttctgaaga

SEQ ID NO: 143380 - DNA, 25 bp, Saccharomyces pastorianus
atcttagacagtgcttcacctctga

SEQ ID NO: 143381 - DNA, 25 bp, Saccharomyces pastorianus
tgttacgcgagatgcttcgtccttg

SEQ ID NO: 143382 - DNA, 25 bp, Saccharomyces pastorianus
ggacggtacttcaggtgttacgcga

SEQ ID NO: 143383 - DNA, 25 bp, Saccharomyces pastorianus
gtagaacttgacctcgacactttag

SEQ ID NO: 143384 - DNA, 25 bp, Saccharomyces pastorianus
aaagcgctgcacacaacgggttttc

SEQ ID NO: 143385 - DNA, 25 bp, Saccharomyces pastorianus
gtgggtctaagaacgcttcttcgaa

SEQ ID NO: 143386 - DNA, 25 bp, Saccharomyces pastorianus
gaggcgcttagcacgtggatcaaag

SEQ ID NO: 143387 - DNA, 25 bp, Saccharomyces pastorianus
acgggttttcctcatcttcagatga

SEQ ID NO: 143388 - DNA, 25 bp, Saccharomyces pastorianus
tgcttctaacggtttggacggtact

SEQ ID NO: 143389 - DNA, 25 bp, Saccharomyces pastorianus
agcgcctgctggacttgcagagaac

SEQ ID NO: 143390 - DNA, 25 bp, Saccharomyces pastorianus
gggatccttcgaatggactcgcaga

SEQ ID NO: 143391 - DNA, 25 bp, Saccharomyces pastorianus
aacgatgtggatgtcaatggtaata

SEQ ID NO: 143392 - DNA, 25 bp, Saccharomyces pastorianus
ggagatgctctaacatcagcgcctg

SEQ ID NO: 143393 - DNA, 25 bp, Saccharomyces pastorianus
gcagaagaagaaaaccccgccaata

SEQ ID NO: 143394 - DNA, 25 bp, Saccharomyces pastorianus
gaagtggcgcagaagacgaacagca

SEQ ID NO: 143395 - DNA, 25 bp, Saccharomyces pastorianus
gaacggtattgaaggcgccaccctg

SEQ ID NO: 143396 - DNA, 25 bp, Saccharomyces pastorianus
aaaccccgccaataaccagttgcat

SEQ ID NO: 143397 - DNA, 25 bp, Saccharomyces pastorianus
aaggctagactggatggagatgctc

SEQ ID NO: 143398 - DNA, 25 bp, Saccharomyces pastorianus
accagttgcatctcaaaaaggctag

SEQ ID NO: 143399 - DNA, 25 bp, Saccharomyces pastorianus
gacgacgtttccagtaatctaaaga

SEQ ID NO: 143400 - DNA, 25 bp, Saccharomyces pastorianus
aatacttttcattcttccgtacacg

SEQ ID NO: 143401 - DNA, 25 bp, Saccharomyces pastorianus
atcacctctggtacttgtccaagat

SEQ ID NO: 143402 - DNA, 25 bp, Saccharomyces pastorianus
gatccagattcgaccgattcttttg

SEQ ID NO: 143403 - DNA, 25 bp, Saccharomyces pastorianus
gaaaatggctccagttccaatggaa

SEQ ID NO: 143404 - DNA, 25 bp, Saccharomyces pastorianus
gccctagtaaccacaattccatgaa

SEQ ID NO: 143405 - DNA, 25 bp, Saccharomyces pastorianus
ttccgtacacgcaaaatcttctcaa

SEQ ID NO: 143406 - DNA, 25 bp, Saccharomyces pastorianus
atgaactctgtcgtaaatccaacta

SEQ ID NO: 143407 - DNA, 25 bp, Saccharomyces pastorianus
agacgatcctgcgagaaggctctat

SEQ ID NO: 143408 - DNA, 25 bp, Saccharomyces pastorianus
aatccaactacaggttctcacaact

SEQ ID NO: 143409 - DNA, 25 bp, Saccharomyces pastorianus
catcaaaccgatttatcacctctgg

SEQ ID NO: 143410 - DNA, 25 bp, Saccharomyces pastorianus
gaagtaccatagattgcacggacat

SEQ ID NO: 143411 - DNA, 25 bp, Saccharomyces pastorianus
tgctggtgacactagttcatcagtt

SEQ ID NO: 143412 - DNA, 25 bp, Saccharomyces pastorianus
ggtgacactagttcatcagttcgta

SEQ ID NO: 143413 - DNA, 25 bp, Saccharomyces pastorianus
gacactagttcatcagttcgtatga

SEQ ID NO: 143414 - DNA, 25 bp, Saccharomyces pastorianus
tgacttataatacctcttctgccaa

SEQ ID NO: 143415 - DNA, 25 bp, Saccharomyces pastorianus
taatacctcttctgccaactatgac

SEQ ID NO: 143416 - DNA, 25 bp, Saccharomyces pastorianus
tcttctgccaactatgacctgcaga

SEQ ID NO: 143417 - DNA, 25 bp, Saccharomyces pastorianus
aactctgctggtgacactagttcat

SEQ ID NO: 143418 - DNA, 25 bp, Saccharomyces pastorianus
ttataatacctcttctgccaactat

SEQ ID NO: 143419 - DNA, 25 bp, Saccharomyces pastorianus
gccaactatgacctgcagaataaca

SEQ ID NO: 143420 - DNA, 25 bp, Saccharomyces pastorianus
tacctcttctgccaactatgacctg

SEQ ID NO: 143421 - DNA, 25 bp, Saccharomyces pastorianus
gttcatcagttcgtatgacttataa

SEQ ID NO: 143422 - DNA, 25 bp, Saccharomyces pastorianus
tgctggtgacactagttcatcagtt

SEQ ID NO: 143423 - DNA, 25 bp, Saccharomyces pastorianus
gacactagttcatcagttcgtatga

SEQ ID NO: 143424 - DNA, 25 bp, Saccharomyces pastorianus
tgacttataatacctcttctgccaa

SEQ ID NO: 143425 - DNA, 25 bp, Saccharomyces pastorianus
atggccgctcatactcataatgcag

SEQ ID NO: 143426 - DNA, 25 bp, Saccharomyces pastorianus
taatacctcttctgccaactatgac

SEQ ID NO: 143427 - DNA, 25 bp, Saccharomyces pastorianus
aactctgctggtgacactagttcat

SEQ ID NO: 143428 - DNA, 25 bp, Saccharomyces pastorianus
ggtgacactagttcatcagttcgta

SEQ ID NO: 143429 - DNA, 25 bp, Saccharomyces pastorianus
ttataatacctcttctgccaactat

SEQ ID NO: 143430 - DNA, 25 bp, Saccharomyces pastorianus
gccaactatgacctgcagaataaca

SEQ ID NO: 143431 - DNA, 25 bp, Saccharomyces pastorianus
gacctgcagaataacatggccgctc

SEQ ID NO: 143432 - DNA, 25 bp, Saccharomyces pastorianus
gttcatcagttcgtatgacttataa

SEQ ID NO: 143433 - DNA, 25 bp, Saccharomyces pastorianus
acaatctcggtgttcttgaaaacgg

SEQ ID NO: 143434 - DNA, 25 bp, Saccharomyces pastorianus
taggcccatcacgtctagacgttta

SEQ ID NO: 143435 - DNA, 25 bp, Saccharomyces pastorianus
taaacctacagctttattgccagag

SEQ ID NO: 143436 - DNA, 25 bp, Saccharomyces pastorianus
acggattccatgtcgcctcaggaga

SEQ ID NO: 143437 - DNA, 25 bp, Saccharomyces pastorianus
ggttgcactgcattcatttttgtta

SEQ ID NO: 143438 - DNA, 25 bp, Saccharomyces pastorianus
caggagatcgaacaactaggcccat

SEQ ID NO: 143439 - DNA, 25 bp, Saccharomyces pastorianus
ctttcacacttctagacctattgtc

SEQ ID NO: 143440 - DNA, 25 bp, Saccharomyces pastorianus
gaatacaagctcgatctaaacctac

SEQ ID NO: 143441 - DNA, 25 bp, Saccharomyces pastorianus
gatgtttacagaggtccaggcccgc

SEQ ID NO: 143442 - DNA, 25 bp, Saccharomyces pastorianus
ccgctattgggtgctcctggaggaa

SEQ ID NO: 143443 - DNA, 25 bp, Saccharomyces pastorianus
tattgtctgcctcgcactgacggat

SEQ ID NO: 143444 - DNA, 25 bp, Saccharomyces pastorianus
tagtcccccttaatacgttcaacat

SEQ ID NO: 143445 - DNA, 25 bp, Saccharomyces pastorianus
gttgcatttctgatacaattgctaa

SEQ ID NO: 143446 - DNA, 25 bp, Saccharomyces pastorianus
tacagtttttacaatggagttcata

SEQ ID NO: 143447 - DNA, 25 bp, Saccharomyces pastorianus
ggagttcatatattgttgttgcatt

SEQ ID NO: 143448 - DNA, 25 bp, Saccharomyces pastorianus
tatcccgtccattacagtttttaca

SEQ ID NO: 143449 - DNA, 25 bp, Saccharomyces pastorianus
tacctgccgattcctctaacgtagt

SEQ ID NO: 143450 - DNA, 25 bp, Saccharomyces pastorianus
tacctaagactattacctgccgatt

SEQ ID NO: 143451 - DNA, 25 bp, Saccharomyces pastorianus
atatatcacgatttttacctaagac

SEQ ID NO: 143452 - DNA, 25 bp, Saccharomyces pastorianus
taaatggcgtacaatttggtacaaa

SEQ ID NO: 143453 - DNA, 25 bp, Saccharomyces pastorianus
aatgtatcccgtccattacagtttt

SEQ ID NO: 143454 - DNA, 25 bp, Saccharomyces pastorianus
aatacgttcaacattttaaatggcg

SEQ ID NO: 143455 - DNA, 25 bp, Saccharomyces pastorianus
cgaaccagttttggttgcctctgct

SEQ ID NO: 143456 - DNA, 25 bp, Saccharomyces pastorianus
tcctacgtcgaaccagttttggttg

SEQ ID NO: 143457 - DNA, 25 bp, Saccharomyces pastorianus
accagttttggttgcctctgctaag

SEQ ID NO: 143458 - DNA, 25 bp, Saccharomyces pastorianus
cgtcgaaccagttttggttgcctct

SEQ ID NO: 143459 - DNA, 25 bp, Saccharomyces pastorianus
ccattgttttcctacgtcgaaccag

SEQ ID NO: 143460 - DNA, 25 bp, Saccharomyces pastorianus
gaaccagttttggttgcctctgcta

SEQ ID NO: 143461 - DNA, 25 bp, Saccharomyces pastorianus
gtcgaaccagttttggttgcctctg

SEQ ID NO: 143462 - DNA, 25 bp, Saccharomyces pastorianus
tcgaaccagttttggttgcctctgc

SEQ ID NO: 143463 - DNA, 25 bp, Saccharomyces pastorianus
cattgttttcctacgtcgaaccagt

SEQ ID NO: 143464 - DNA, 25 bp, Saccharomyces pastorianus
tacgtcgaaccagttttggttgcct

SEQ ID NO: 143465 - DNA, 25 bp, Saccharomyces pastorianus
aaccagttttggttgcctctgctaa

SEQ ID NO: 143466 - DNA, 25 bp, Saccharomyces pastorianus
gcgacttcatgacgactcatttaaa

SEQ ID NO: 143467 - DNA, 25 bp, Saccharomyces pastorianus
tctccgaatccttgaaatgacgtac

SEQ ID NO: 143468 - DNA, 25 bp, Saccharomyces pastorianus
aataagtgtgtttctcctattaact

SEQ ID NO: 143469 - DNA, 25 bp, Saccharomyces pastorianus
gggcataccgaagcattacaaaagg

SEQ ID NO: 143470 - DNA, 25 bp, Saccharomyces pastorianus
aagtacactccgtatatggggcata

SEQ ID NO: 143471 - DNA, 25 bp, Saccharomyces pastorianus
agggatctccgaatccttgaaatga

SEQ ID NO: 143472 - DNA, 25 bp, Saccharomyces pastorianus
gtgtttctcctattaactatatgtt

SEQ ID NO: 143473 - DNA, 25 bp, Saccharomyces pastorianus
ttattgcgacttcatgacgactcat

SEQ ID NO: 143474 - DNA, 25 bp, Saccharomyces pastorianus
caaaaggaagcagagcttgtggata

SEQ ID NO: 143475 - DNA, 25 bp, Saccharomyces pastorianus
gtacaggtgaagaagttattgcgac

SEQ ID NO: 143476 - DNA, 25 bp, Saccharomyces pastorianus
aactatatgttggaaaagtacactc

SEQ ID NO: 143477 - DNA, 25 bp, Saccharomyces pastorianus
tgaattcctttgagccatttgatga

SEQ ID NO: 143478 - DNA, 25 bp, Saccharomyces pastorianus
gaatcaagatattgcctctgctctt

SEQ ID NO: 143479 - DNA, 25 bp, Saccharomyces pastorianus
ctctgtcagagaaggcatagcacat

SEQ ID NO: 143480 - DNA, 25 bp, Saccharomyces pastorianus
gagagggctcacaatccaaggacta

SEQ ID NO: 143481 - DNA, 25 bp, Saccharomyces pastorianus
gagcttactgtttaaggcacacggt

SEQ ID NO: 143482 - DNA, 25 bp, Saccharomyces pastorianus
ggactattcatcattgctggccact

SEQ ID NO: 143483 - DNA, 25 bp, Saccharomyces pastorianus
gaagaaatccatcgcagagatcaag

SEQ ID NO: 143484 - DNA, 25 bp, Saccharomyces pastorianus
gcttccatttttcttgcaactatct

SEQ ID NO: 143485 - DNA, 25 bp, Saccharomyces pastorianus
gtggtttatcgacgcgttaacacag

SEQ ID NO: 143486 - DNA, 25 bp, Saccharomyces pastorianus
tgctggccactctaataaatttctc

SEQ ID NO: 143487 - DNA, 25 bp, Saccharomyces pastorianus
taaatttctcacctgctgcagtgga

SEQ ID NO: 143488 - DNA, 25 bp, Saccharomyces pastorianus
gaagcaaccgtgaatgaaccgaaaa

SEQ ID NO: 143489 - DNA, 25 bp, Saccharomyces pastorianus
gaaggcgatttactgatagacaagc

SEQ ID NO: 143490 - DNA, 25 bp, Saccharomyces pastorianus
aggcctcatatctcccatggaaatg

SEQ ID NO: 143491 - DNA, 25 bp, Saccharomyces pastorianus
gatctgatcggtgataatcctggtt

SEQ ID NO: 143492 - DNA, 25 bp, Saccharomyces pastorianus
aatcctggttctgatctcttgagat

SEQ ID NO: 143493 - DNA, 25 bp, Saccharomyces pastorianus
ttcacgttgtccgagtttaaagatt

SEQ ID NO: 143494 - DNA, 25 bp, Saccharomyces pastorianus
agattgacacagattttgagttcca

SEQ ID NO: 143495 - DNA, 25 bp, Saccharomyces pastorianus
gcaactgagtgggatttactactat

SEQ ID NO: 143496 - DNA, 25 bp, Saccharomyces pastorianus
ctatgcgtataggtacaggcctcat

SEQ ID NO: 143497 - DNA, 25 bp, Saccharomyces pastorianus
gagaagaccgctattgatccttgat

SEQ ID NO: 143498 - DNA, 25 bp, Saccharomyces pastorianus
actggacactaggtatccttatgga

SEQ ID NO: 143499 - DNA, 25 bp, Saccharomyces pastorianus
ggatatcgccacttgcaaagctata

SEQ ID NO: 143500 - DNA, 25 bp, Saccharomyces pastorianus
ggcgcgagcttccatggtaatcatt

SEQ ID NO: 143501 - DNA, 25 bp, Saccharomyces pastorianus
acaattcttgtgttaagtcatccaa

SEQ ID NO: 143502 - DNA, 25 bp, Saccharomyces pastorianus
atggcacacttgaggcatccacatt

SEQ ID NO: 143503 - DNA, 25 bp, Saccharomyces pastorianus
agagcctaggcgaattggttcccgt

SEQ ID NO: 143504 - DNA, 25 bp, Saccharomyces pastorianus
agaaacgcccctccatagaatctct

SEQ ID NO: 143505 - DNA, 25 bp, Saccharomyces pastorianus
aattggttcccgtccagatcataaa

SEQ ID NO: 143506 - DNA, 25 bp, Saccharomyces pastorianus
gtgctacagactccaagaaacgccc

SEQ ID NO: 143507 - DNA, 25 bp, Saccharomyces pastorianus
ggcatccacatttgaatagcttacc

SEQ ID NO: 143508 - DNA, 25 bp, Saccharomyces pastorianus
tgcaaagctataccggtcaattttt

SEQ ID NO: 143509 - DNA, 25 bp, Saccharomyces pastorianus
acttgatttttgttgtaccggcgcg

SEQ ID NO: 143510 - DNA, 25 bp, Saccharomyces pastorianus
aatgcctttgaatttacagtgttga

SEQ ID NO: 143511 - DNA, 25 bp, Saccharomyces pastorianus
gcagaatttacctatttgtggctac

SEQ ID NO: 143512 - DNA, 25 bp, Saccharomyces pastorianus
tagtgagccgttacctagcgcaagg

SEQ ID NO: 143513 - DNA, 25 bp, Saccharomyces pastorianus
agcgcaaggaaacactctagatgaa

SEQ ID NO: 143514 - DNA, 25 bp, Saccharomyces pastorianus
ttgtggctacaacagacggtatcta

SEQ ID NO: 143515 - DNA, 25 bp, Saccharomyces pastorianus
ggatgcaccggtgaatctacctgta

SEQ ID NO: 143516 - DNA, 25 bp, Saccharomyces pastorianus
gtagcactcaaagcttacgctcaaa

SEQ ID NO: 143517 - DNA, 25 bp, Saccharomyces pastorianus
gtgcagaagtactcaaccaatggat

SEQ ID NO: 143518 - DNA, 25 bp, Saccharomyces pastorianus
atacttcgacaaggatgcaccggtg

SEQ ID NO: 143519 - DNA, 25 bp, Saccharomyces pastorianus
gagctctgagttcgcatacttcgac

SEQ ID NO: 143520 - DNA, 25 bp, Saccharomyces pastorianus
aatctacctgtagctccggaaggat

SEQ ID NO: 143521 - DNA, 25 bp, Saccharomyces pastorianus
ttttgggcatattgacgccggccaa

SEQ ID NO: 143522 - DNA, 25 bp, Saccharomyces pastorianus
ttcattcaagaactggcccctagta

SEQ ID NO: 143523 - DNA, 25 bp, Saccharomyces pastorianus
gtaccttattcgctacaacgcattg

SEQ ID NO: 143524 - DNA, 25 bp, Saccharomyces pastorianus
atgtttgcaggattcaagcctcctc

SEQ ID NO: 143525 - DNA, 25 bp, Saccharomyces pastorianus
gatagcctttcatcagtcgtacagt

SEQ ID NO: 143526 - DNA, 25 bp, Saccharomyces pastorianus
aacactattagtgaccccagggcaa

SEQ ID NO: 143527 - DNA, 25 bp, Saccharomyces pastorianus
aagtagcagcttatgcggcgagcaa

SEQ ID NO: 143528 - DNA, 25 bp, Saccharomyces pastorianus
gataaacacatttgcaccacttcag

SEQ ID NO: 143529 - DNA, 25 bp, Saccharomyces pastorianus
gttctttgcccctgtaatagacatt

SEQ ID NO: 143530 - DNA, 25 bp, Saccharomyces pastorianus
agacattactactctagctgccaag

SEQ ID NO: 143531 - DNA, 25 bp, Saccharomyces pastorianus
catcttttgatgtgcgtaccttatt

SEQ ID NO: 143532 - DNA, 25 bp, Saccharomyces pastorianus
tgtcgttgggtagttctgccactgc

SEQ ID NO: 143533 - DNA, 25 bp, Saccharomyces pastorianus
gttgggtagttctgccactgctgcg

SEQ ID NO: 143534 - DNA, 25 bp, Saccharomyces pastorianus
ttgggtagttctgccactgctgcgc

SEQ ID NO: 143535 - DNA, 25 bp, Saccharomyces pastorianus
gtttgtgtcgttgggtagttctgcc

SEQ ID NO: 143536 - DNA, 25 bp, Saccharomyces pastorianus
tcgttgggtagttctgccactgctg

SEQ ID NO: 143537 - DNA, 25 bp, Saccharomyces pastorianus
gaatatagactgtttgtgtcgttgg

SEQ ID NO: 143538 - DNA, 25 bp, Saccharomyces pastorianus
ttgtgtcgttgggtagttctgccac

SEQ ID NO: 143539 - DNA, 25 bp, Saccharomyces pastorianus
actgtttgtgtcgttgggtagttct

SEQ ID NO: 143540 - DNA, 25 bp, Saccharomyces pastorianus
tagactgtttgtgtcgttgggtagt

SEQ ID NO: 143541 - DNA, 25 bp, Saccharomyces pastorianus
gtgtcgttgggtagttctgccactg

SEQ ID NO: 143542 - DNA, 25 bp, Saccharomyces pastorianus
ggtagttctgccactgctgcgctat

SEQ ID NO: 143543 - DNA, 25 bp, Saccharomyces pastorianus
gccaccacgatcttcagcattcaaa

SEQ ID NO: 143544 - DNA, 25 bp, Saccharomyces pastorianus
gtattgggcccacaggcacacgcaa

SEQ ID NO: 143545 - DNA, 25 bp, Saccharomyces pastorianus
aacagttcgagacggaatgcttcat

SEQ ID NO: 143546 - DNA, 25 bp, Saccharomyces pastorianus
cacaggcacacgcaacagttcgaga

SEQ ID NO: 143547 - DNA, 25 bp, Saccharomyces pastorianus
aaaggacctggtattgggcccacag

SEQ ID NO: 143548 - DNA, 25 bp, Saccharomyces pastorianus
gatcttcagcattcaaaggacctgg

SEQ ID NO: 143549 - DNA, 25 bp, Saccharomyces pastorianus
gagacggaatgcttcatctagccca

SEQ ID NO: 143550 - DNA, 25 bp, Saccharomyces pastorianus
gttcgagacggaatgcttcatctag

SEQ ID NO: 143551 - DNA, 25 bp, Saccharomyces pastorianus
ggcacacgcaacagttcgagacgga

SEQ ID NO: 143552 - DNA, 25 bp, Saccharomyces pastorianus
ggacctggtattgggcccacaggca

SEQ ID NO: 143553 - DNA, 25 bp, Saccharomyces pastorianus
accacgatcttcagcattcaaagga

SEQ ID NO: 143554 - DNA, 25 bp, Saccharomyces pastorianus
gaaaggtctcaatggcgttcctgcg

SEQ ID NO: 143555 - DNA, 25 bp, Saccharomyces pastorianus
gagctttgctcaacaatcctttgat

SEQ ID NO: 143556 - DNA, 25 bp, Saccharomyces pastorianus
tcatgcactgtcaccatccaaaaga

SEQ ID NO: 143557 - DNA, 25 bp, Saccharomyces pastorianus
gcgttcctgcgtataatagccaatt

SEQ ID NO: 143558 - DNA, 25 bp, Saccharomyces pastorianus
gatcagcttcgaatcctaacgactt

SEQ ID NO: 143559 - DNA, 25 bp, Saccharomyces pastorianus
gatttactttcttggaccttaccat

SEQ ID NO: 143560 - DNA, 25 bp, Saccharomyces pastorianus
gaccttaccattttatcatgcactg

SEQ ID NO: 143561 - DNA, 25 bp, Saccharomyces pastorianus
gataagccactagactttttgttaa

SEQ ID NO: 143562 - DNA, 25 bp, Saccharomyces pastorianus
aacccttcacattccatagcatttt

SEQ ID NO: 143563 - DNA, 25 bp, Saccharomyces pastorianus
gaattcagcaactgccttgttgaga

SEQ ID NO: 143564 - DNA, 25 bp, Saccharomyces pastorianus
ttggctccgagttttggtccaaaat

SEQ ID NO: 143565 - DNA, 25 bp, Saccharomyces pastorianus
acaggcccatatcttggcggttagt

SEQ ID NO: 143566 - DNA, 25 bp, Saccharomyces pastorianus
ggccctggtatggatatcttgaaca

SEQ ID NO: 143567 - DNA, 25 bp, Saccharomyces pastorianus
gaacaaaagaccctggcaccagctt

SEQ ID NO: 143568 - DNA, 25 bp, Saccharomyces pastorianus
tccccgtacttgctggatgttcaat

SEQ ID NO: 143569 - DNA, 25 bp, Saccharomyces pastorianus
actttcttcaattattcctctcagg

SEQ ID NO: 143570 - DNA, 25 bp, Saccharomyces pastorianus
gagccattagctccctacaaatttt

SEQ ID NO: 143571 - DNA, 25 bp, Saccharomyces pastorianus
atgttcgactttatctggttcagcc

SEQ ID NO: 143572 - DNA, 25 bp, Saccharomyces pastorianus
gaaatacgtgttgccattgagttag

SEQ ID NO: 143573 - DNA, 25 bp, Saccharomyces pastorianus
gagttagttgactaccttttcagaa

SEQ ID NO: 143574 - DNA, 25 bp, Saccharomyces pastorianus
ggttcagcccatgatgtactcgcaa

SEQ ID NO: 143575 - DNA, 25 bp, Saccharomyces pastorianus
gcatgtcaatgtaccgaactttctt

SEQ ID NO: 143576 - DNA, 25 bp, Saccharomyces pastorianus
ggcgaactgcatgaaactctgcccg

SEQ ID NO: 143577 - DNA, 25 bp, Saccharomyces pastorianus
tgattatacgccgtcaatctccgat

SEQ ID NO: 143578 - DNA, 25 bp, Saccharomyces pastorianus
gcaagacagctatcctgctgaggca

SEQ ID NO: 143579 - DNA, 25 bp, Saccharomyces pastorianus
gagaacaatttctccgcctgaaatc

SEQ ID NO: 143580 - DNA, 25 bp, Saccharomyces pastorianus
gacgatccacaagtttcgcaagcaa

SEQ ID NO: 143581 - DNA, 25 bp, Saccharomyces pastorianus
aaataggacccactctcaacatgtg

SEQ ID NO: 143582 - DNA, 25 bp, Saccharomyces pastorianus
cggtggttcttcgaggatcctgact

SEQ ID NO: 143583 - DNA, 25 bp, Saccharomyces pastorianus
acgcaggtacctgctgctattacaa

SEQ ID NO: 143584 - DNA, 25 bp, Saccharomyces pastorianus
atcctgactgcttccgattacggtg

SEQ ID NO: 143585 - DNA, 25 bp, Saccharomyces pastorianus
gtaacaacagggtggcttctcataa

SEQ ID NO: 143586 - DNA, 25 bp, Saccharomyces pastorianus
gaatcaatactcaacggctcctgtg

SEQ ID NO: 143587 - DNA, 25 bp, Saccharomyces pastorianus
ttataaaagaacgaagcaaagcctt

SEQ ID NO: 143588 - DNA, 25 bp, Saccharomyces pastorianus
aagaacgaagcaaagcctttaatat

SEQ ID NO: 143589 - DNA, 25 bp, Saccharomyces pastorianus
agaacgaagcaaagcctttaatatt

SEQ ID NO: 143590 - DNA, 25 bp, Saccharomyces pastorianus
tgtttttaaatcaagaggcattatt

SEQ ID NO: 143591 - DNA, 25 bp, Saccharomyces pastorianus
gaacgaagcaaagcctttaatattt

SEQ ID NO: 143592 - DNA, 25 bp, Saccharomyces pastorianus
gcaaagcctttaatatttgctttat

SEQ ID NO: 143593 - DNA, 25 bp, Saccharomyces pastorianus
gtttttaaatcaagaggcattatta

SEQ ID NO: 143594 - DNA, 25 bp, Saccharomyces pastorianus
acgaagcaaagcctttaatatttgc

SEQ ID NO: 143595 - DNA, 25 bp, Saccharomyces pastorianus
caaagcctttaatatttgctttatt

SEQ ID NO: 143596 - DNA, 25 bp, Saccharomyces pastorianus
tgctttattaaaggtactattcaaa

SEQ ID NO: 143597 - DNA, 25 bp, Saccharomyces pastorianus
aatcaagaggcattattataaaaga

SEQ ID NO: 143598 - DNA, 25 bp, Saccharomyces pastorianus
tggactccacctttcttcctgttgt

SEQ ID NO: 143599 - DNA, 25 bp, Saccharomyces pastorianus
attttccgcagatttcttttggact

SEQ ID NO: 143600 - DNA, 25 bp, Saccharomyces pastorianus
gatttcttttggactccacctttct

SEQ ID NO: 143601 - DNA, 25 bp, Saccharomyces pastorianus
cagatttcttttggactccaccttt

SEQ ID NO: 143602 - DNA, 25 bp, Saccharomyces pastorianus
tttccgcagatttcttttggactcc

SEQ ID NO: 143603 - DNA, 25 bp, Saccharomyces pastorianus
tccgcagatttcttttggactccac

SEQ ID NO: 143604 - DNA, 25 bp, Saccharomyces pastorianus
ttccgcagatttcttttggactcca

SEQ ID NO: 143605 - DNA, 25 bp, Saccharomyces pastorianus
ttttggactccacctttcttcctgt

SEQ ID NO: 143606 - DNA, 25 bp, Saccharomyces pastorianus
ttttccgcagatttcttttggactc

SEQ ID NO: 143607 - DNA, 25 bp, Saccharomyces pastorianus
gcagatttcttttggactccacctt

SEQ ID NO: 143608 - DNA, 25 bp, Saccharomyces pastorianus
cgcagatttcttttggactccacct

SEQ ID NO: 143609 - DNA, 25 bp, Saccharomyces pastorianus
taccgattgccgtagaggtcatcaa

SEQ ID NO: 143610 - DNA, 25 bp, Saccharomyces pastorianus
gttgaagacgactcggctttaccga

SEQ ID NO: 143611 - DNA, 25 bp, Saccharomyces pastorianus
aaccaatctaatgttctctgacgaa

SEQ ID NO: 143612 - DNA, 25 bp, Saccharomyces pastorianus
gttgacgccgctttgatcgaagaaa

SEQ ID NO: 143613 - DNA, 25 bp, Saccharomyces pastorianus
cagggattgtagtagaccttttcaa

SEQ ID NO: 143614 - DNA, 25 bp, Saccharomyces pastorianus
gtatcgtctaaacctgaaccaattg

SEQ ID NO: 143615 - DNA, 25 bp, Saccharomyces pastorianus
gcaacaggcacgttttgagctcggt

SEQ ID NO: 143616 - DNA, 25 bp, Saccharomyces pastorianus
gaggttgtacctgacttagtatcgt

SEQ ID NO: 143617 - DNA, 25 bp, Saccharomyces pastorianus
aatccttacggaacaatgagcacac

SEQ ID NO: 143618 - DNA, 25 bp, Saccharomyces pastorianus
gacagcatttgttcaggctgagcaa

SEQ ID NO: 143619 - DNA, 25 bp, Saccharomyces pastorianus
tgagctcggtgtttccatggttatt

SEQ ID NO: 143620 - DNA, 25 bp, Saccharomyces pastorianus
gtttgtatttattacaacaggaaga

SEQ ID NO: 143621 - DNA, 25 bp, Saccharomyces pastorianus
tagtttgtatttattacaacaggaa

SEQ ID NO: 143622 - DNA, 25 bp, Saccharomyces pastorianus
gtatttattacaacaggaagaaagg

SEQ ID NO: 143623 - DNA, 25 bp, Saccharomyces pastorianus
aatagtttgtatttattacaacagg

SEQ ID NO: 143624 - DNA, 25 bp, Saccharomyces pastorianus
gattcaaatagtttgtatttattac

SEQ ID NO: 143625 - DNA, 25 bp, Saccharomyces pastorianus
tcaaatagtttgtatttattacaac

SEQ ID NO: 143626 - DNA, 25 bp, Saccharomyces pastorianus
aaatagtttgtatttattacaacag

SEQ ID NO: 143627 - DNA, 25 bp, Saccharomyces pastorianus
caaatagtttgtatttattacaaca

SEQ ID NO: 143628 - DNA, 25 bp, Saccharomyces pastorianus
atagtttgtatttattacaacagga

SEQ ID NO: 143629 - DNA, 25 bp, Saccharomyces pastorianus
tgtatttattacaacaggaagaaag

SEQ ID NO: 143630 - DNA, 25 bp, Saccharomyces pastorianus
agtttgtatttattacaacaggaag

SEQ ID NO: 143631 - DNA, 25 bp, Saccharomyces pastorianus
gaagaagaaattagtcccggcgttg

SEQ ID NO: 143632 - DNA, 25 bp, Saccharomyces pastorianus
gagatccaaatgtcaacacgtcaat

SEQ ID NO: 143633 - DNA, 25 bp, Saccharomyces pastorianus
ttagtcccggcgttgtaaacaacat

SEQ ID NO: 143634 - DNA, 25 bp, Saccharomyces pastorianus
caacagtagtaacggcggattttca

SEQ ID NO: 143635 - DNA, 25 bp, Saccharomyces pastorianus
gtcttcgtcctccattactttagag

SEQ ID NO: 143636 - DNA, 25 bp, Saccharomyces pastorianus
acagcgcaaaatcactttcagcatt

SEQ ID NO: 143637 - DNA, 25 bp, Saccharomyces pastorianus
accaaggctagtcaaagagatccaa

SEQ ID NO: 143638 - DNA, 25 bp, Saccharomyces pastorianus
tgggttggaaccgacatccgactat

SEQ ID NO: 143639 - DNA, 25 bp, Saccharomyces pastorianus
gcgtaagtaccccaacaatggcatt

SEQ ID NO: 143640 - DNA, 25 bp, Saccharomyces pastorianus
gcatttaagatcgtcttcgtcttcg

SEQ ID NO: 143641 - DNA, 25 bp, Saccharomyces pastorianus
caaattctcatcatgttgctcctga

SEQ ID NO: 143642 - DNA, 25 bp, Saccharomyces pastorianus
gtggacgtgcaggacttcagcatta

SEQ ID NO: 143643 - DNA, 25 bp, Saccharomyces pastorianus
gtacgggacttcattcttcgcggct

SEQ ID NO: 143644 - DNA, 25 bp, Saccharomyces pastorianus
ttcctttcgctctacattattcttt

SEQ ID NO: 143645 - DNA, 25 bp, Saccharomyces pastorianus
attgagggtcttcccttgcaaaaca

SEQ ID NO: 143646 - DNA, 25 bp, Saccharomyces pastorianus
attatctctagtttgaacccaccca

SEQ ID NO: 143647 - DNA, 25 bp, Saccharomyces pastorianus
ttcgcggcttatcaacgccataaag

SEQ ID NO: 143648 - DNA, 25 bp, Saccharomyces pastorianus
ttaagctggattctgggcctgacgt

SEQ ID NO: 143649 - DNA, 25 bp, Saccharomyces pastorianus
actacgatgtcttttgggccacgca

SEQ ID NO: 143650 - DNA, 25 bp, Saccharomyces pastorianus
accgggtcaagtctagcacgcagga

SEQ ID NO: 143651 - DNA, 25 bp, Saccharomyces pastorianus
aacaacttgattgtcttcctttcgc

SEQ ID NO: 143652 - DNA, 25 bp, Saccharomyces pastorianus
caaatgtcccgctagataccgtctt

SEQ ID NO: 143653 - DNA, 25 bp, Saccharomyces pastorianus
agcgtgttcatgactccaacgacct

SEQ ID NO: 143654 - DNA, 25 bp, Saccharomyces pastorianus
aactacagcgtgttcatgactccaa

SEQ ID NO: 143655 - DNA, 25 bp, Saccharomyces pastorianus
aagaggcttgtgtcggcctccaaga

SEQ ID NO: 143656 - DNA, 25 bp, Saccharomyces pastorianus
gcaacttaaactacagcgtgttcat

SEQ ID NO: 143657 - DNA, 25 bp, Saccharomyces pastorianus
gggcaacttaaactacagcgtgttc

SEQ ID NO: 143658 - DNA, 25 bp, Saccharomyces pastorianus
gcgtgttcatgactccaacgacctc

SEQ ID NO: 143659 - DNA, 25 bp, Saccharomyces pastorianus
gtgtcggcctccaagacctgagaaa

SEQ ID NO: 143660 - DNA, 25 bp, Saccharomyces pastorianus
tacagcgtgttcatgactccaacga

SEQ ID NO: 143661 - DNA, 25 bp, Saccharomyces pastorianus
ttgtgtcggcctccaagacctgaga

SEQ ID NO: 143662 - DNA, 25 bp, Saccharomyces pastorianus
gtcggcctccaagacctgagaaagt

SEQ ID NO: 143663 - DNA, 25 bp, Saccharomyces pastorianus
actacagcgtgttcatgactccaac

SEQ ID NO: 143664 - DNA, 25 bp, Saccharomyces pastorianus
tccccagataataaagtccctaaat

SEQ ID NO: 143665 - DNA, 25 bp, Saccharomyces pastorianus
ggcgagtcgttcatcttattcactt

SEQ ID NO: 143666 - DNA, 25 bp, Saccharomyces pastorianus
catgccgttcaagaggcttgtgtcg

SEQ ID NO: 143667 - DNA, 25 bp, Saccharomyces pastorianus
tccaacgacctcatatccgaaatat

SEQ ID NO: 143668 - DNA, 25 bp, Saccharomyces pastorianus
ttcgaacctcatgccgttcaagagg

SEQ ID NO: 143669 - DNA, 25 bp, Saccharomyces pastorianus
aagacctgagaaagtccccagataa

SEQ ID NO: 143670 - DNA, 25 bp, Saccharomyces pastorianus
tccccaccgtgagaaaatacttgaa

SEQ ID NO: 143671 - DNA, 25 bp, Saccharomyces pastorianus
gacgaactccccaccgtgagaaaat

SEQ ID NO: 143672 - DNA, 25 bp, Saccharomyces pastorianus
taaattagacgaactccccaccgtg

SEQ ID NO: 143673 - DNA, 25 bp, Saccharomyces pastorianus
agacgtgggcgagtcgttcatctta

SEQ ID NO: 143674 - DNA, 25 bp, Saccharomyces pastorianus
acgacctcatatccgaaatatcaca

SEQ ID NO: 143675 - DNA, 25 bp, Saccharomyces pastorianus
aattggagctaagcgcccgtgacct

SEQ ID NO: 143676 - DNA, 25 bp, Saccharomyces pastorianus
ggaagtcgaaattgttacatcgcaa

SEQ ID NO: 143677 - DNA, 25 bp, Saccharomyces pastorianus
agtacgcactggacggacagaacga

SEQ ID NO: 143678 - DNA, 25 bp, Saccharomyces pastorianus
ataagagtaaggtaggcggcattgc

SEQ ID NO: 143679 - DNA, 25 bp, Saccharomyces pastorianus
catcgcaatggagcacactagaatt

SEQ ID NO: 143680 - DNA, 25 bp, Saccharomyces pastorianus
gcttactggaggtttgcccccttga

SEQ ID NO: 143681 - DNA, 25 bp, Saccharomyces pastorianus
tttgcccccttgaggaagtcgaaat

SEQ ID NO: 143682 - DNA, 25 bp, Saccharomyces pastorianus
ttgttacatcgcaatggagcacact

SEQ ID NO: 143683 - DNA, 25 bp, Saccharomyces pastorianus
cactagaattggagctaagcgcccg

SEQ ID NO: 143684 - DNA, 25 bp, Saccharomyces pastorianus
gacagacaagtacgcactggacgga

SEQ ID NO: 143685 - DNA, 25 bp, Saccharomyces pastorianus
ggacggacagaacgacaataagagt

SEQ ID NO: 143686 - DNA, 25 bp, Saccharomyces pastorianus
ggaagatttatgaacgccctcaaag

SEQ ID NO: 143687 - DNA, 25 bp, Saccharomyces pastorianus
gtttagaccatggaaatcacaccgc

SEQ ID NO: 143688 - DNA, 25 bp, Saccharomyces pastorianus
tcgggttttcttaccatcttggagt

SEQ ID NO: 143689 - DNA, 25 bp, Saccharomyces pastorianus
gtcatacttagcttggtctggctta

SEQ ID NO: 143690 - DNA, 25 bp, Saccharomyces pastorianus
taccaagccggtttatttactgatg

SEQ ID NO: 143691 - DNA, 25 bp, Saccharomyces pastorianus
acgacagtctacttcgggcgaggct

SEQ ID NO: 143692 - DNA, 25 bp, Saccharomyces pastorianus
aacacgaaccatttgctactagaga

SEQ ID NO: 143693 - DNA, 25 bp, Saccharomyces pastorianus
gtcttgcctgggttaactacactat

SEQ ID NO: 143694 - DNA, 25 bp, Saccharomyces pastorianus
tggagttacatggtttgcgcttctg

SEQ ID NO: 143695 - DNA, 25 bp, Saccharomyces pastorianus
cttcttacagtcaacgttatccgca

SEQ ID NO: 143696 - DNA, 25 bp, Saccharomyces pastorianus
gggcacttgttcatatcaactctct

SEQ ID NO: 143697 - DNA, 25 bp, Saccharomyces pastorianus
ttgctgccggtcacctggtacaaag

SEQ ID NO: 143698 - DNA, 25 bp, Saccharomyces pastorianus
gatcctgcgcagaacgtcgaaagtt

SEQ ID NO: 143699 - DNA, 25 bp, Saccharomyces pastorianus
taaggatctctgtttccatgccatc

SEQ ID NO: 143700 - DNA, 25 bp, Saccharomyces pastorianus
aacgcgcacgcagctaatttggtca

SEQ ID NO: 143701 - DNA, 25 bp, Saccharomyces pastorianus
tggctggtgaactgtctctgtgctc

SEQ ID NO: 143702 - DNA, 25 bp, Saccharomyces pastorianus
gtcactgcacttttcttggcattag

SEQ ID NO: 143703 - DNA, 25 bp, Saccharomyces pastorianus
tggcattaggccaagatcctgcgca

SEQ ID NO: 143704 - DNA, 25 bp, Saccharomyces pastorianus
gaataatcgcgtgtgctgtcttggc

SEQ ID NO: 143705 - DNA, 25 bp, Saccharomyces pastorianus
aagccaatgaactgccacaaccaag

SEQ ID NO: 143706 - DNA, 25 bp, Saccharomyces pastorianus
atgcttgatcttctcggcgttcgtg

SEQ ID NO: 143707 - DNA, 25 bp, Saccharomyces pastorianus
atctgttggtggtttcaacgcgcac

SEQ ID NO: 143708 - DNA, 25 bp, Saccharomyces pastorianus
accactgaagcaactcacaacttat

SEQ ID NO: 143709 - DNA, 25 bp, Saccharomyces pastorianus
aacttgggatgttgataagcctgta

SEQ ID NO: 143710 - DNA, 25 bp, Saccharomyces pastorianus
ggcgagtgatgttccgttagttcaa

SEQ ID NO: 143711 - DNA, 25 bp, Saccharomyces pastorianus
tcaatttcccgactttaagattgtc

SEQ ID NO: 143712 - DNA, 25 bp, Saccharomyces pastorianus
ttgagggtcacagatctattacttg

SEQ ID NO: 143713 - DNA, 25 bp, Saccharomyces pastorianus
tggagcttccagtatttttgatatg

SEQ ID NO: 143714 - DNA, 25 bp, Saccharomyces pastorianus
tatggtgtcatcagaatcagaggaa

SEQ ID NO: 143715 - DNA, 25 bp, Saccharomyces pastorianus
aaacgttgagaccactttgtcgagt

SEQ ID NO: 143716 - DNA, 25 bp, Saccharomyces pastorianus
agattgtccaaccaaactttgaggg

SEQ ID NO: 143717 - DNA, 25 bp, Saccharomyces pastorianus
gagattggctaacgttactaacttt

SEQ ID NO: 143718 - DNA, 25 bp, Saccharomyces pastorianus
ttgctgacgatacttcaccactgaa

SEQ ID NO: 143719 - DNA, 25 bp, Saccharomyces pastorianus
taatgttctactgtacaagtggctt

SEQ ID NO: 143720 - DNA, 25 bp, Saccharomyces pastorianus
gtttccgattaatgttctactgtac

SEQ ID NO: 143721 - DNA, 25 bp, Saccharomyces pastorianus
tgttctactgtacaagtggcttata

SEQ ID NO: 143722 - DNA, 25 bp, Saccharomyces pastorianus
atgatgtttccgattaatgttctac

SEQ ID NO: 143723 - DNA, 25 bp, Saccharomyces pastorianus
aatgttctactgtacaagtggctta

SEQ ID NO: 143724 - DNA, 25 bp, Saccharomyces pastorianus
atgtttccgattaatgttctactgt

SEQ ID NO: 143725 - DNA, 25 bp, Saccharomyces pastorianus
ttccgattaatgttctactgtacaa

SEQ ID NO: 143726 - DNA, 25 bp, Saccharomyces pastorianus
atgttctactgtacaagtggcttat

SEQ ID NO: 143727 - DNA, 25 bp, Saccharomyces pastorianus
ccgattaatgttctactgtacaagt

SEQ ID NO: 143728 - DNA, 25 bp, Saccharomyces pastorianus
gatgtttccgattaatgttctactg

SEQ ID NO: 143729 - DNA, 25 bp, Saccharomyces pastorianus
attaatgttctactgtacaagtggc

SEQ ID NO: 143730 - DNA, 25 bp, Saccharomyces pastorianus
ataggcaagttttctgtcttcatga

SEQ ID NO: 143731 - DNA, 25 bp, Saccharomyces pastorianus
aagggtggacagcattgccatagaa

SEQ ID NO: 143732 - DNA, 25 bp, Saccharomyces pastorianus
gctagatttatctgaacttccaaca

SEQ ID NO: 143733 - DNA, 25 bp, Saccharomyces pastorianus
tttcctttatcaaatgcttcctatc

SEQ ID NO: 143734 - DNA, 25 bp, Saccharomyces pastorianus
gatatcgacacgctaatgctagatt

SEQ ID NO: 143735 - DNA, 25 bp, Saccharomyces pastorianus
taaagtctttacgtcctcttgtccg

SEQ ID NO: 143736 - DNA, 25 bp, Saccharomyces pastorianus
taagtgttttttgcctctaatcaat

SEQ ID NO: 143737 - DNA, 25 bp, Saccharomyces pastorianus
agaagagacgcaacacattttttat

SEQ ID NO: 143738 - DNA, 25 bp, Saccharomyces pastorianus
gtcttcatgataagccatcactcta

SEQ ID NO: 143739 - DNA, 25 bp, Saccharomyces pastorianus
tatgttctgcaaacgctgatatcga

SEQ ID NO: 143740 - DNA, 25 bp, Saccharomyces pastorianus
caaggcgtagagtcctatttgacta

SEQ ID NO: 143741 - DNA, 25 bp, Saccharomyces pastorianus
agacaaggtccatttcagcattccc

SEQ ID NO: 143742 - DNA, 25 bp, Saccharomyces pastorianus
aaaagcattatttgactcgtctatg

SEQ ID NO: 143743 - DNA, 25 bp, Saccharomyces pastorianus
cactggatatgggtattctcttcga

SEQ ID NO: 143744 - DNA, 25 bp, Saccharomyces pastorianus
aaagcctccattagatccttctgtt

SEQ ID NO: 143745 - DNA, 25 bp, Saccharomyces pastorianus
aaaaaatttttatcctgcagcgcag

SEQ ID NO: 143746 - DNA, 25 bp, Saccharomyces pastorianus
caggacgatacgaacatgcagagat

SEQ ID NO: 143747 - DNA, 25 bp, Saccharomyces pastorianus
gcggcgaatcagctggtttcatagt

SEQ ID NO: 143748 - DNA, 25 bp, Saccharomyces pastorianus
aatgttcattccaaaccaggacgat

SEQ ID NO: 143749 - DNA, 25 bp, Saccharomyces pastorianus
gtccctatatgcttggcggcgaatc

SEQ ID NO: 143750 - DNA, 25 bp, Saccharomyces pastorianus
aagccgttactggtatggtctagac

SEQ ID NO: 143751 - DNA, 25 bp, Saccharomyces pastorianus
ggtctagacctagtaccaatacaat

SEQ ID NO: 143752 - DNA, 25 bp, Saccharomyces pastorianus
gatccatctaaatttgtctttaagg

SEQ ID NO: 143753 - DNA, 25 bp, Saccharomyces pastorianus
aagattgacctcttgaaatccgcta

SEQ ID NO: 143754 - DNA, 25 bp, Saccharomyces pastorianus
atagtctgtggtgctataagtgcct

SEQ ID NO: 143755 - DNA, 25 bp, Saccharomyces pastorianus
tgaaatccgctacccttgaagatgg

SEQ ID NO: 143756 - DNA, 25 bp, Saccharomyces pastorianus
gataaattgggttctctggttaagc

SEQ ID NO: 143757 - DNA, 25 bp, Saccharomyces pastorianus
gggtatagctttattctgactaaac

SEQ ID NO: 143758 - DNA, 25 bp, Saccharomyces pastorianus
aagatggtaccggtgataagttcaa

SEQ ID NO: 143759 - DNA, 25 bp, Saccharomyces pastorianus
tgggttctctggttaagcatggtaa

SEQ ID NO: 143760 - DNA, 25 bp, Saccharomyces pastorianus
cgattggtcgttaaaggagtactag

SEQ ID NO: 143761 - DNA, 25 bp, Saccharomyces pastorianus
attgatgattttccaaaggcattag

SEQ ID NO: 143762 - DNA, 25 bp, Saccharomyces pastorianus
ataagtgcctataatgatccatcta

SEQ ID NO: 143763 - DNA, 25 bp, Saccharomyces pastorianus
tatttatctaatgatcctgcccaaa

SEQ ID NO: 143764 - DNA, 25 bp, Saccharomyces pastorianus
atctctctgtcttaggtggtacgtc

SEQ ID NO: 143765 - DNA, 25 bp, Saccharomyces pastorianus
ggcgattatgtctctgcagtgaccg

SEQ ID NO: 143766 - DNA, 25 bp, Saccharomyces pastorianus
gatcctgcatgtactttcgagctca

SEQ ID NO: 143767 - DNA, 25 bp, Saccharomyces pastorianus
gaaaaggaactctcttcagaacaat

SEQ ID NO: 143768 - DNA, 25 bp, Saccharomyces pastorianus
aataaagcattctctcctggcgatt

SEQ ID NO: 143769 - DNA, 25 bp, Saccharomyces pastorianus
gcagtgaccggctggactacacatg

SEQ ID NO: 143770 - DNA, 25 bp, Saccharomyces pastorianus
gaattggtaaagtcttggcctctag

SEQ ID NO: 143771 - DNA, 25 bp, Saccharomyces pastorianus
ggtggtacgtctttaacagcttatt

SEQ ID NO: 143772 - DNA, 25 bp, Saccharomyces pastorianus
aattatggtggtatctctctgtctt

SEQ ID NO: 143773 - DNA, 25 bp, Saccharomyces pastorianus
aattacgccaaaggtgtccagcctg

SEQ ID NO: 143774 - DNA, 25 bp, Saccharomyces pastorianus
gaatccaactccgtgtcagaaatca

SEQ ID NO: 143775 - DNA, 25 bp, Saccharomyces pastorianus
accaagtgtgataccaagttccgaa

SEQ ID NO: 143776 - DNA, 25 bp, Saccharomyces pastorianus
attcgacctgatgtatgccaaacgt

SEQ ID NO: 143777 - DNA, 25 bp, Saccharomyces pastorianus
gatatcatctgttacagcctctttg

SEQ ID NO: 143778 - DNA, 25 bp, Saccharomyces pastorianus
tagagctgtctgcatgctatccaac

SEQ ID NO: 143779 - DNA, 25 bp, Saccharomyces pastorianus
gggaatttctagaccaagcttcagc

SEQ ID NO: 143780 - DNA, 25 bp, Saccharomyces pastorianus
gcttgtttcgaaccgggcaatcaaa

SEQ ID NO: 143781 - DNA, 25 bp, Saccharomyces pastorianus
aacgggttgattgcccaagtgatat

SEQ ID NO: 143782 - DNA, 25 bp, Saccharomyces pastorianus
agaagagggccacccatgaatccaa

SEQ ID NO: 143783 - DNA, 25 bp, Saccharomyces pastorianus
tcatttccctttggtttcctacgca

SEQ ID NO: 143784 - DNA, 25 bp, Saccharomyces pastorianus
gcctctttgaggttcgatggttcat

SEQ ID NO: 143785 - DNA, 25 bp, Saccharomyces pastorianus
cagacagtgcttttggattcccatt

SEQ ID NO: 143786 - DNA, 25 bp, Saccharomyces pastorianus
taccaatgatcaccaactctacagt

SEQ ID NO: 143787 - DNA, 25 bp, Saccharomyces pastorianus
gagaagttcaaatgcttccaccctt

SEQ ID NO: 143788 - DNA, 25 bp, Saccharomyces pastorianus
tagccttcaatggtgattctgcctt

SEQ ID NO: 143789 - DNA, 25 bp, Saccharomyces pastorianus
gagttagacggcgacgattcatttg

SEQ ID NO: 143790 - DNA, 25 bp, Saccharomyces pastorianus
agccatactagccacagttctgaat

SEQ ID NO: 143791 - DNA, 25 bp, Saccharomyces pastorianus
aaatctcaactttgcctccaagaaa

SEQ ID NO: 143792 - DNA, 25 bp, Saccharomyces pastorianus
aactacgacgtggaagtgcattcta

SEQ ID NO: 143793 - DNA, 25 bp, Saccharomyces pastorianus
cagattacccaaacgctccaataaa

SEQ ID NO: 143794 - DNA, 25 bp, Saccharomyces pastorianus
tcagccatctgaagcttagcgatcc

SEQ ID NO: 143795 - DNA, 25 bp, Saccharomyces pastorianus
gattatgtttgaccatcgtctagga

SEQ ID NO: 143796 - DNA, 25 bp, Saccharomyces pastorianus
gccagaagcttgagcatgtcagggt

SEQ ID NO: 143797 - DNA, 25 bp, Saccharomyces pastorianus
agcccgaaaactatttggaattgat

SEQ ID NO: 143798 - DNA, 25 bp, Saccharomyces pastorianus
ttagaactgggtaacaatcatgtaa

SEQ ID NO: 143799 - DNA, 25 bp, Saccharomyces pastorianus
acaaattagaactgggtaacaatca

SEQ ID NO: 143800 - DNA, 25 bp, Saccharomyces pastorianus
tcaaataagcacaaatcaagacatt

SEQ ID NO: 143801 - DNA, 25 bp, Saccharomyces pastorianus
aagcttgagcatgtcagggtcattt

SEQ ID NO: 143802 - DNA, 25 bp, Saccharomyces pastorianus
ggaattgatccaagacactttacaa

SEQ ID NO: 143803 - DNA, 25 bp, Saccharomyces pastorianus
gcccgaaaactatttggaattgatc

SEQ ID NO: 143804 - DNA, 25 bp, Saccharomyces pastorianus
agaagcttgagcatgtcagggtcat

SEQ ID NO: 143805 - DNA, 25 bp, Saccharomyces pastorianus
gaattgatccaagacactttacaaa

SEQ ID NO: 143806 - DNA, 25 bp, Saccharomyces pastorianus
gaagcttgagcatgtcagggtcatt

SEQ ID NO: 143807 - DNA, 25 bp, Saccharomyces pastorianus
gatttccaataatgccggtttaacg

SEQ ID NO: 143808 - DNA, 25 bp, Saccharomyces pastorianus
atgcggtgactttagccagaagctt

SEQ ID NO: 143809 - DNA, 25 bp, Saccharomyces pastorianus
gaagagcttactaagatttccaata

SEQ ID NO: 143810 - DNA, 25 bp, Saccharomyces pastorianus
aaacgcacgggctctgtagttagaa

SEQ ID NO: 143811 - DNA, 25 bp, Saccharomyces pastorianus
taagcgaatatcctcatctgacatc

SEQ ID NO: 143812 - DNA, 25 bp, Saccharomyces pastorianus
taacggactcagatgcggtgacttt

SEQ ID NO: 143813 - DNA, 25 bp, Saccharomyces pastorianus
aaatttgatgacgagcctccccttg

SEQ ID NO: 143814 - DNA, 25 bp, Saccharomyces pastorianus
tccccttgcagacaaaccacaagaa

SEQ ID NO: 143815 - DNA, 25 bp, Saccharomyces pastorianus
gctctgtagttagaaggccttctcg

SEQ ID NO: 143816 - DNA, 25 bp, Saccharomyces pastorianus
gaatagaaaacgcacgggctctgta

SEQ ID NO: 143817 - DNA, 25 bp, Saccharomyces pastorianus
aggccttctcggttgaagacatctt

SEQ ID NO: 143818 - DNA, 25 bp, Saccharomyces pastorianus
ttacgttgaaaagagcgctgaagca

SEQ ID NO: 143819 - DNA, 25 bp, Saccharomyces pastorianus
gaaaagacccagtattccttgtcca

SEQ ID NO: 143820 - DNA, 25 bp, Saccharomyces pastorianus
atggctaagggcaagttcacagaat

SEQ ID NO: 143821 - DNA, 25 bp, Saccharomyces pastorianus
tattaaaacagtctcccaagcagga

SEQ ID NO: 143822 - DNA, 25 bp, Saccharomyces pastorianus
tgaagcagcaatcgcattttaccaa

SEQ ID NO: 143823 - DNA, 25 bp, Saccharomyces pastorianus
acatcccaggtaagattgtagacaa

SEQ ID NO: 143824 - DNA, 25 bp, Saccharomyces pastorianus
gacaagccgctattagacagcatga

SEQ ID NO: 143825 - DNA, 25 bp, Saccharomyces pastorianus
ggcccaaataagacaagccgctatt

SEQ ID NO: 143826 - DNA, 25 bp, Saccharomyces pastorianus
aattcatggtcgacattggtacagg

SEQ ID NO: 143827 - DNA, 25 bp, Saccharomyces pastorianus
gggcaaaaactactggttccagcat

SEQ ID NO: 143828 - DNA, 25 bp, Saccharomyces pastorianus
tccttgtccatcgaggcccaaataa

SEQ ID NO: 143829 - DNA, 25 bp, Saccharomyces pastorianus
ggtatccttactaacaccggacatt

SEQ ID NO: 143830 - DNA, 25 bp, Saccharomyces pastorianus
atgcaagaggctacacagtccggtg

SEQ ID NO: 143831 - DNA, 25 bp, Saccharomyces pastorianus
gccactggccatgtcagaaacactt

SEQ ID NO: 143832 - DNA, 25 bp, Saccharomyces pastorianus
gaatttatggtgaataccctcccac

SEQ ID NO: 143833 - DNA, 25 bp, Saccharomyces pastorianus
ttgattgctggccacgacgaattta

SEQ ID NO: 143834 - DNA, 25 bp, Saccharomyces pastorianus
agaccctttggtgtttcactgttga

SEQ ID NO: 143835 - DNA, 25 bp, Saccharomyces pastorianus
agacgccattcatattgccttacta

SEQ ID NO: 143836 - DNA, 25 bp, Saccharomyces pastorianus
atatcaagtggatccttccggttcc

SEQ ID NO: 143837 - DNA, 25 bp, Saccharomyces pastorianus
agaaaagaagtcgtcctcgccactg

SEQ ID NO: 143838 - DNA, 25 bp, Saccharomyces pastorianus
gtattccaaccgataaaggccctag

SEQ ID NO: 143839 - DNA, 25 bp, Saccharomyces pastorianus
tgagaaccctgacttgctaggctac

SEQ ID NO: 143840 - DNA, 25 bp, Saccharomyces pastorianus
gaagcctgtcgaaaaagtagtgcaa

SEQ ID NO: 143841 - DNA, 25 bp, Saccharomyces pastorianus
atttgaacagccagatatcgatatt

SEQ ID NO: 143842 - DNA, 25 bp, Saccharomyces pastorianus
gttatgcaaggcctcatagatgaaa

SEQ ID NO: 143843 - DNA, 25 bp, Saccharomyces pastorianus
ctttcttgccgcatcatactgatat

SEQ ID NO: 143844 - DNA, 25 bp, Saccharomyces pastorianus
tatgaatgcaaaagccacgtgggaa

SEQ ID NO: 143845 - DNA, 25 bp, Saccharomyces pastorianus
gggtggttcatatagaactgttcca

SEQ ID NO: 143846 - DNA, 25 bp, Saccharomyces pastorianus
tagaactgttccatactggagatgt

SEQ ID NO: 143847 - DNA, 25 bp, Saccharomyces pastorianus
ttaggtcaacacttgctactatgaa

SEQ ID NO: 143848 - DNA, 25 bp, Saccharomyces pastorianus
gaaacgtaaagctgacgtgccatta

SEQ ID NO: 143849 - DNA, 25 bp, Saccharomyces pastorianus
tactatcggcgaaaagcaatcatgg

SEQ ID NO: 143850 - DNA, 25 bp, Saccharomyces pastorianus
gaacaagtagtgaagcctgtcgaaa

SEQ ID NO: 143851 - DNA, 25 bp, Saccharomyces pastorianus
gagctcaatttttaaccgtccatgg

SEQ ID NO: 143852 - DNA, 25 bp, Saccharomyces pastorianus
atggtgctggatgctggagctcaat

SEQ ID NO: 143853 - DNA, 25 bp, Saccharomyces pastorianus
aagatacggtgcaaccttggcgtac

SEQ ID NO: 143854 - DNA, 25 bp, Saccharomyces pastorianus
taggccgttggttgtacagttctgc

SEQ ID NO: 143855 - DNA, 25 bp, Saccharomyces pastorianus
tagacggctctagcgtagataggcc

SEQ ID NO: 143856 - DNA, 25 bp, Saccharomyces pastorianus
gaatgggaccttatacacaatttaa

SEQ ID NO: 143857 - DNA, 25 bp, Saccharomyces pastorianus
gaaaggtcactatgggtcatttttg

SEQ ID NO: 143858 - DNA, 25 bp, Saccharomyces pastorianus
cagagtatctattggcggcagctaa

SEQ ID NO: 143859 - DNA, 25 bp, Saccharomyces pastorianus
tacagttctgcgctaatgacccaga

SEQ ID NO: 143860 - DNA, 25 bp, Saccharomyces pastorianus
tggaacatatcggtgctgacgcagt

SEQ ID NO: 143861 - DNA, 25 bp, Saccharomyces pastorianus
aattggtcttccttagacggctcta

SEQ ID NO: 143862 - DNA, 25 bp, Saccharomyces pastorianus
ctattgtccgactttaaacagcagt

SEQ ID NO: 143863 - DNA, 25 bp, Saccharomyces pastorianus
gtcttacactcaggttttacagtat

SEQ ID NO: 143864 - DNA, 25 bp, Saccharomyces pastorianus
acatactgtacagcgtcagggctat

SEQ ID NO: 143865 - DNA, 25 bp, Saccharomyces pastorianus
tattatcaccgtacgatttcgctga

SEQ ID NO: 143866 - DNA, 25 bp, Saccharomyces pastorianus
gcgtcagggctatggtttgttctat

SEQ ID NO: 143867 - DNA, 25 bp, Saccharomyces pastorianus
tagagtccacacatactgtacagcg

SEQ ID NO: 143868 - DNA, 25 bp, Saccharomyces pastorianus
gagcaacaacttattatcaccgtac

SEQ ID NO: 143869 - DNA, 25 bp, Saccharomyces pastorianus
tggtttgttctattgtccgacttta

SEQ ID NO: 143870 - DNA, 25 bp, Saccharomyces pastorianus
caccgtacgatttcgctgaaaacga

SEQ ID NO: 143871 - DNA, 25 bp, Saccharomyces pastorianus
gtcaagggacaagaaagatcaccaa

SEQ ID NO: 143872 - DNA, 25 bp, Saccharomyces pastorianus
aacagcagtcttacactcaggtttt

SEQ ID NO: 143873 - DNA, 25 bp, Saccharomyces pastorianus
cacaacaggaaacctgctgaaccaa

SEQ ID NO: 143874 - DNA, 25 bp, Saccharomyces pastorianus
ggacgccactgatataaatcgtttg

SEQ ID NO: 143875 - DNA, 25 bp, Saccharomyces pastorianus
aacaggaaacctgctgaaccaacaa

SEQ ID NO: 143876 - DNA, 25 bp, Saccharomyces pastorianus
acccacaacaggaaacctgctgaac

SEQ ID NO: 143877 - DNA, 25 bp, Saccharomyces pastorianus
caggaaacctgctgaaccaacaaaa

SEQ ID NO: 143878 - DNA, 25 bp, Saccharomyces pastorianus
acctaacaatttggacgccactgat

SEQ ID NO: 143879 - DNA, 25 bp, Saccharomyces pastorianus
acaggaaacctgctgaaccaacaaa

SEQ ID NO: 143880 - DNA, 25 bp, Saccharomyces pastorianus
tgaaccaacaaaacctaacaatttg

SEQ ID NO: 143881 - DNA, 25 bp, Saccharomyces pastorianus
gacgccactgatataaatcgtttga

SEQ ID NO: 143882 - DNA, 25 bp, Saccharomyces pastorianus
cctaacaatttggacgccactgata

SEQ ID NO: 143883 - DNA, 25 bp, Saccharomyces pastorianus
acgccactgatataaatcgtttgaa

SEQ ID NO: 143884 - DNA, 25 bp, Saccharomyces pastorianus
ggaaggctctttcaattttggcaga

SEQ ID NO: 143885 - DNA, 25 bp, Saccharomyces pastorianus
taagttacctttgtacgctttggag

SEQ ID NO: 143886 - DNA, 25 bp, Saccharomyces pastorianus
atgcctttgcccgttggtgttatag

SEQ ID NO: 143887 - DNA, 25 bp, Saccharomyces pastorianus
ggcagaagctcctgtattagcatct

SEQ ID NO: 143888 - DNA, 25 bp, Saccharomyces pastorianus
ttagcatctgatcgtttaccatata

SEQ ID NO: 143889 - DNA, 25 bp, Saccharomyces pastorianus
gttataggttacatgcctttgcccg

SEQ ID NO: 143890 - DNA, 25 bp, Saccharomyces pastorianus
tgacaagaggcccagtagtccgttt

SEQ ID NO: 143891 - DNA, 25 bp, Saccharomyces pastorianus
gactacgaccgcgtatttggcgctt

SEQ ID NO: 143892 - DNA, 25 bp, Saccharomyces pastorianus
ataggccccttggttatcgatggta

SEQ ID NO: 143893 - DNA, 25 bp, Saccharomyces pastorianus
tcgctgccttggttattcacggtaa

SEQ ID NO: 143894 - DNA, 25 bp, Saccharomyces pastorianus
gagggttgtttggtagcttctgcca

SEQ ID NO: 143895 - DNA, 25 bp, Saccharomyces pastorianus
gaaggcggcatagtaatcgaagacc

SEQ ID NO: 143896 - DNA, 25 bp, Saccharomyces pastorianus
gccaggtattcctgccaattccgaa

SEQ ID NO: 143897 - DNA, 25 bp, Saccharomyces pastorianus
ggacattggtgttgccggtatgtct

SEQ ID NO: 143898 - DNA, 25 bp, Saccharomyces pastorianus
ttgcattcaaacttggccgtggtga

SEQ ID NO: 143899 - DNA, 25 bp, Saccharomyces pastorianus
tggtggcgaacgtagaatcatcatt

SEQ ID NO: 143900 - DNA, 25 bp, Saccharomyces pastorianus
gtactatcggtgatggcccacaggc

SEQ ID NO: 143901 - DNA, 25 bp, Saccharomyces pastorianus
agcaccatatgcctacgggaagcaa

SEQ ID NO: 143902 - DNA, 25 bp, Saccharomyces pastorianus
cagcggtaaaccatttgcattcaaa

SEQ ID NO: 143903 - DNA, 25 bp, Saccharomyces pastorianus
cgggaagcaagctctgccaggtatt

SEQ ID NO: 143904 - DNA, 25 bp, Saccharomyces pastorianus
agttttcgacaagaacaccagcggt

SEQ ID NO: 143905 - DNA, 25 bp, Saccharomyces pastorianus
gaatcatcattccagcaccatatgc

SEQ ID NO: 143906 - DNA, 25 bp, Saccharomyces pastorianus
cgatgagttccaagaatccgtcctt

SEQ ID NO: 143907 - DNA, 25 bp, Saccharomyces pastorianus
ggttccagcaatcgacgtcacgatg

SEQ ID NO: 143908 - DNA, 25 bp, Saccharomyces pastorianus
tctccttgagcggtaactatgttaa

SEQ ID NO: 143909 - DNA, 25 bp, Saccharomyces pastorianus
tgaatgttgaaccttataccccggt

SEQ ID NO: 143910 - DNA, 25 bp, Saccharomyces pastorianus
tgcccatcaccgttcgtattactat

SEQ ID NO: 143911 - DNA, 25 bp, Saccharomyces pastorianus
attactatggctgctttgaacccgg

SEQ ID NO: 143912 - DNA, 25 bp, Saccharomyces pastorianus
ggacttgaccattactccagaagaa

SEQ ID NO: 143913 - DNA, 25 bp, Saccharomyces pastorianus
tgaagactacgacttgaccccagat

SEQ ID NO: 143914 - DNA, 25 bp, Saccharomyces pastorianus
ggaagcccaataccaacaatctttg

SEQ ID NO: 143915 - DNA, 25 bp, Saccharomyces pastorianus
gtccttttgactttatctccggaag

SEQ ID NO: 143916 - DNA, 25 bp, Saccharomyces pastorianus
tttgaacccggaagccatcgatgaa

SEQ ID NO: 143917 - DNA, 25 bp, Saccharomyces pastorianus
gtgcttcgtggattttcacactact

SEQ ID NO: 143918 - DNA, 25 bp, Saccharomyces pastorianus
atggctcttatcaccatcatgggac

SEQ ID NO: 143919 - DNA, 25 bp, Saccharomyces pastorianus
ggcaatctgctcatttttggtctac

SEQ ID NO: 143920 - DNA, 25 bp, Saccharomyces pastorianus
acaaggcacatcttccggaattcaa

SEQ ID NO: 143921 - DNA, 25 bp, Saccharomyces pastorianus
gccgggcatcttcttcaaatacaat

SEQ ID NO: 143922 - DNA, 25 bp, Saccharomyces pastorianus
tgttgtgcccactcttttcaagaaa

SEQ ID NO: 143923 - DNA, 25 bp, Saccharomyces pastorianus
taagtggtccttgcgttatcagcca

SEQ ID NO: 143924 - DNA, 25 bp, Saccharomyces pastorianus
taacccattggataacactgcacag

SEQ ID NO: 143925 - DNA, 25 bp, Saccharomyces pastorianus
ggtgccatgtatttgggtccattcc

SEQ ID NO: 143926 - DNA, 25 bp, Saccharomyces pastorianus
ttcacactactggatatggctctta

SEQ ID NO: 143927 - DNA, 25 bp, Saccharomyces pastorianus
gatgaacctttaactacttacgtct

SEQ ID NO: 143928 - DNA, 25 bp, Saccharomyces pastorianus
gaagaagaaggtcgttgacccattt

SEQ ID NO: 143929 - DNA, 25 bp, Saccharomyces pastorianus
aatggttcgatattaaagccccatc

SEQ ID NO: 143930 - DNA, 25 bp, Saccharomyces pastorianus
ggaatggttcgatattaaagcccca

SEQ ID NO: 143931 - DNA, 25 bp, Saccharomyces pastorianus
tattaaagccccatccacttttgaa

SEQ ID NO: 143932 - DNA, 25 bp, Saccharomyces pastorianus
gagactatccagaggtaagaagggt

SEQ ID NO: 143933 - DNA, 25 bp, Saccharomyces pastorianus
tatccagaggtaagaagggtttgaa

SEQ ID NO: 143934 - DNA, 25 bp, Saccharomyces pastorianus
tgaagaagaaggtcgttgacccatt

SEQ ID NO: 143935 - DNA, 25 bp, Saccharomyces pastorianus
ggtcgttgacccatttaccagaaag

SEQ ID NO: 143936 - DNA, 25 bp, Saccharomyces pastorianus
tggctgttggtaagaataagagact

SEQ ID NO: 143937 - DNA, 25 bp, Saccharomyces pastorianus
ctatccagaggtaagaagggtttga

SEQ ID NO: 143938 - DNA, 25 bp, Saccharomyces pastorianus
gactatccagaggtaagaagggttt

SEQ ID NO: 143939 - DNA, 25 bp, Saccharomyces pastorianus
aatctcagggtcagacacttccaaa

SEQ ID NO: 143940 - DNA, 25 bp, Saccharomyces pastorianus
gaaggctacctctcgtgagattcaa

SEQ ID NO: 143941 - DNA, 25 bp, Saccharomyces pastorianus
tatcttactttatcttcagccgaaa

SEQ ID NO: 143942 - DNA, 25 bp, Saccharomyces pastorianus
aagccactggtatcaagggttcaat

SEQ ID NO: 143943 - DNA, 25 bp, Saccharomyces pastorianus
agggttcaattaccgctaatgcttg

SEQ ID NO: 143944 - DNA, 25 bp, Saccharomyces pastorianus
aagttcattcattggtttccgacga

SEQ ID NO: 143945 - DNA, 25 bp, Saccharomyces pastorianus
ggaagttagactacgcaccaggccc

SEQ ID NO: 143946 - DNA, 25 bp, Saccharomyces pastorianus
catatcagcgaccacacaatctaat

SEQ ID NO: 143947 - DNA, 25 bp, Saccharomyces pastorianus
gttgccctttctagagctgtttcaa

SEQ ID NO: 143948 - DNA, 25 bp, Saccharomyces pastorianus
gtcactatccattcacaaatctcag

SEQ ID NO: 143949 - DNA, 25 bp, Saccharomyces pastorianus
aagtcaaattctccagcacccatat

SEQ ID NO: 143950 - DNA, 25 bp, Saccharomyces pastorianus
gaagacctagatttgctctctgatt

SEQ ID NO: 143951 - DNA, 25 bp, Saccharomyces pastorianus
gagtagtcgtggtttcaggtctaat

SEQ ID NO: 143952 - DNA, 25 bp, Saccharomyces pastorianus
tcatattataccaagaagaccattt

SEQ ID NO: 143953 - DNA, 25 bp, Saccharomyces pastorianus
gtatcgcacgccaaactatcgtttt

SEQ ID NO: 143954 - DNA, 25 bp, Saccharomyces pastorianus
ttttactcaaaaacgtatcgcacgc

SEQ ID NO: 143955 - DNA, 25 bp, Saccharomyces pastorianus
ggaagaacctgattgcatacagtta

SEQ ID NO: 143956 - DNA, 25 bp, Saccharomyces pastorianus
ctatcgttttctatgagtagtcgtg

SEQ ID NO: 143957 - DNA, 25 bp, Saccharomyces pastorianus
agcacaattgaagcatccttccata

SEQ ID NO: 143958 - DNA, 25 bp, Saccharomyces pastorianus
gtggtttcaggtctaataactttat

SEQ ID NO: 143959 - DNA, 25 bp, Saccharomyces pastorianus
gatttgctctctgattcggatgatt

SEQ ID NO: 143960 - DNA, 25 bp, Saccharomyces pastorianus
gaagaccatttatctgtagtttcaa

SEQ ID NO: 143961 - DNA, 25 bp, Saccharomyces pastorianus
tcgttatttctctgagtcagacagt

SEQ ID NO: 143962 - DNA, 25 bp, Saccharomyces pastorianus
ttctctgagtcagacagtgtcttgg

SEQ ID NO: 143963 - DNA, 25 bp, Saccharomyces pastorianus
gtcaccaggtgaatacttctacaag

SEQ ID NO: 143964 - DNA, 25 bp, Saccharomyces pastorianus
gaccggtaacaagggtaatgcctct

SEQ ID NO: 143965 - DNA, 25 bp, Saccharomyces pastorianus
tcctccaccgtcatgatgggtggta

SEQ ID NO: 143966 - DNA, 25 bp, Saccharomyces pastorianus
atcaccaaggctttggcccttggtt

SEQ ID NO: 143967 - DNA, 25 bp, Saccharomyces pastorianus
agggtaatgcctctacctctcgtta

SEQ ID NO: 143968 - DNA, 25 bp, Saccharomyces pastorianus
ttccatcaagaagtttatcccatat

SEQ ID NO: 143969 - DNA, 25 bp, Saccharomyces pastorianus
gggctgtcgtagacaaaggttccat

SEQ ID NO: 143970 - DNA, 25 bp, Saccharomyces pastorianus
agctgtctacaacgtttgtcaattt

SEQ ID NO: 143971 - DNA, 25 bp, Saccharomyces pastorianus
ttggttcctccaccgtcatgatggg

SEQ ID NO: 143972 - DNA, 25 bp, Saccharomyces pastorianus
aatttcccatcttctgctgtcagtt

SEQ ID NO: 143973 - DNA, 25 bp, Saccharomyces pastorianus
gctgatatggctatttatatggctt

SEQ ID NO: 143974 - DNA, 25 bp, Saccharomyces pastorianus
gaccaagaaaatcactttgaacact

SEQ ID NO: 143975 - DNA, 25 bp, Saccharomyces pastorianus
aatttctccaaccaccactgttggt

SEQ ID NO: 143976 - DNA, 25 bp, Saccharomyces pastorianus
attgatggactccacaactagaggt

SEQ ID NO: 143977 - DNA, 25 bp, Saccharomyces pastorianus
gattttttggtcttaccaggcttgg

SEQ ID NO: 143978 - DNA, 25 bp, Saccharomyces pastorianus
aaggacggtctttctgtccaggaat

SEQ ID NO: 143979 - DNA, 25 bp, Saccharomyces pastorianus
aaggctttagaacatttgaagacat

SEQ ID NO: 143980 - DNA, 25 bp, Saccharomyces pastorianus
accaggcttggtcaatttcccatct

SEQ ID NO: 143981 - DNA, 25 bp, Saccharomyces pastorianus
tccaatagtaatttctccaaccacc

SEQ ID NO: 143982 - DNA, 25 bp, Saccharomyces pastorianus
gaagacatacagttccaaggacggt

SEQ ID NO: 143983 - DNA, 25 bp, Saccharomyces pastorianus
ttttttcacgaaaattctctctcta

SEQ ID NO: 143984 - DNA, 25 bp, Saccharomyces pastorianus
gcattctgcccatttttttcacgaa

SEQ ID NO: 143985 - DNA, 25 bp, Saccharomyces pastorianus
ttctgcccatttttttcacgaaaat

SEQ ID NO: 143986 - DNA, 25 bp, Saccharomyces pastorianus
tggcattctgcccatttttttcacg

SEQ ID NO: 143987 - DNA, 25 bp, Saccharomyces pastorianus
ggcattctgcccatttttttcacga

SEQ ID NO: 143988 - DNA, 25 bp, Saccharomyces pastorianus
ttttcacgaaaattctctctctata

SEQ ID NO: 143989 - DNA, 25 bp, Saccharomyces pastorianus
tttttcacgaaaattctctctctat

SEQ ID NO: 143990 - DNA, 25 bp, Saccharomyces pastorianus
cattctgcccatttttttcacgaaa

SEQ ID NO: 143991 - DNA, 25 bp, Saccharomyces pastorianus
tctgcccatttttttcacgaaaatt

SEQ ID NO: 143992 - DNA, 25 bp, Saccharomyces pastorianus
tgcccatttttttcacgaaaattct

SEQ ID NO: 143993 - DNA, 25 bp, Saccharomyces pastorianus
catttttttcacgaaaattctctct

SEQ ID NO: 143994 - DNA, 25 bp, Saccharomyces pastorianus
agtcgtgcattgctaacatgtggca

SEQ ID NO: 143995 - DNA, 25 bp, Saccharomyces pastorianus
gcattgctaacatgtggcattctgc

SEQ ID NO: 143996 - DNA, 25 bp, Saccharomyces pastorianus
cgtgcattgctaacatgtggcattc

SEQ ID NO: 143997 - DNA, 25 bp, Saccharomyces pastorianus
aagtcgtgcattgctaacatgtggc

SEQ ID NO: 143998 - DNA, 25 bp, Saccharomyces pastorianus
tgcattgctaacatgtggcattctg

SEQ ID NO: 143999 - DNA, 25 bp, Saccharomyces pastorianus
cattgctaacatgtggcattctgcc

SEQ ID NO: 144000 - DNA, 25 bp, Saccharomyces pastorianus
gtgcattgctaacatgtggcattct

SEQ ID NO: 144001 - DNA, 25 bp, Saccharomyces pastorianus
gtcgtgcattgctaacatgtggcat

SEQ ID NO: 144002 - DNA, 25 bp, Saccharomyces pastorianus
tcgtgcattgctaacatgtggcatt

SEQ ID NO: 144003 - DNA, 25 bp, Saccharomyces pastorianus
attgctaacatgtggcattctgccc

SEQ ID NO: 144004 - DNA, 25 bp, Saccharomyces pastorianus
tcaagtcgtgcattgctaacatgtg

SEQ ID NO: 144005 - DNA, 25 bp, Saccharomyces pastorianus
ggcaatgttccagtgtcatgcagtt

SEQ ID NO: 144006 - DNA, 25 bp, Saccharomyces pastorianus
gacaacaagctcctttagacccggg

SEQ ID NO: 144007 - DNA, 25 bp, Saccharomyces pastorianus
aatctggtcctttactacagtggaa

SEQ ID NO: 144008 - DNA, 25 bp, Saccharomyces pastorianus
gaactagagcaaacgacttcccgct

SEQ ID NO: 144009 - DNA, 25 bp, Saccharomyces pastorianus
gacttcccgctagctaatggacaac

SEQ ID NO: 144010 - DNA, 25 bp, Saccharomyces pastorianus
gtaccggatcatcttttattccaag

SEQ ID NO: 144011 - DNA, 25 bp, Saccharomyces pastorianus
gtatcaatctatctctgacttccac

SEQ ID NO: 144012 - DNA, 25 bp, Saccharomyces pastorianus
ggtcattgatattcacggtaccaag

SEQ ID NO: 144013 - DNA, 25 bp, Saccharomyces pastorianus
ccaccttgatggatgctctgatatt

SEQ ID NO: 144014 - DNA, 25 bp, Saccharomyces pastorianus
gggccagcgagtcccaaagacagta

SEQ ID NO: 144015 - DNA, 25 bp, Saccharomyces pastorianus
gatttcgaaggctttcccaccttga

SEQ ID NO: 144016 - DNA, 25 bp, Saccharomyces pastorianus
attgagtaatgccactgcttttccc

SEQ ID NO: 144017 - DNA, 25 bp, Saccharomyces pastorianus
aattgagacttctattgccaccatc

SEQ ID NO: 144018 - DNA, 25 bp, Saccharomyces pastorianus
aagagtcggattcgtcggtctcaac

SEQ ID NO: 144019 - DNA, 25 bp, Saccharomyces pastorianus
tgccaccatccagcgtctaaaattg

SEQ ID NO: 144020 - DNA, 25 bp, Saccharomyces pastorianus
gtgcctaatgcagctcccataagag

SEQ ID NO: 144021 - DNA, 25 bp, Saccharomyces pastorianus
tgggcaatcaagacacattaccccg

SEQ ID NO: 144022 - DNA, 25 bp, Saccharomyces pastorianus
actgcttttcccactttagagtcat

SEQ ID NO: 144023 - DNA, 25 bp, Saccharomyces pastorianus
atgacgttgttatgcctctcttgga

SEQ ID NO: 144024 - DNA, 25 bp, Saccharomyces pastorianus
atccaagtggccagtcattatgacg

SEQ ID NO: 144025 - DNA, 25 bp, Saccharomyces pastorianus
agatctttggtctcaaccgtgccta

SEQ ID NO: 144026 - DNA, 25 bp, Saccharomyces pastorianus
tcggtctcaacgcagccaaaggatg

SEQ ID NO: 144027 - DNA, 25 bp, Saccharomyces pastorianus
atcctggacagcctttcaaattctg

SEQ ID NO: 144028 - DNA, 25 bp, Saccharomyces pastorianus
atcaagtacccgctagacgtcatca

SEQ ID NO: 144029 - DNA, 25 bp, Saccharomyces pastorianus
atgggcttacaaggaaccgtgggat

SEQ ID NO: 144030 - DNA, 25 bp, Saccharomyces pastorianus
gtgggatgctttatccccttattat

SEQ ID NO: 144031 - DNA, 25 bp, Saccharomyces pastorianus
atcatgatcccagcgaattatctaa

SEQ ID NO: 144032 - DNA, 25 bp, Saccharomyces pastorianus
gctattatgcccctgtacgtaaagt

SEQ ID NO: 144033 - DNA, 25 bp, Saccharomyces pastorianus
aaatttcctgagactttccttgaat

SEQ ID NO: 144034 - DNA, 25 bp, Saccharomyces pastorianus
agacgtcatcactttacagcagaaa

SEQ ID NO: 144035 - DNA, 25 bp, Saccharomyces pastorianus
tcaactactgaaccacttctttgtt

SEQ ID NO: 144036 - DNA, 25 bp, Saccharomyces pastorianus
tgagggttcctgttccattttaggt

SEQ ID NO: 144037 - DNA, 25 bp, Saccharomyces pastorianus
atcatcactgatttccatatcctgg

SEQ ID NO: 144038 - DNA, 25 bp, Saccharomyces pastorianus
tattgtatgtgccacgtcctcgaaa

SEQ ID NO: 144039 - DNA, 25 bp, Saccharomyces pastorianus
gaagcaacgcgttcggctttcaagc

SEQ ID NO: 144040 - DNA, 25 bp, Saccharomyces pastorianus
aatgccctctaaagttgcgattgta

SEQ ID NO: 144041 - DNA, 25 bp, Saccharomyces pastorianus
gccaccagcgggaattcgtattgta

SEQ ID NO: 144042 - DNA, 25 bp, Saccharomyces pastorianus
atgggctcacactctattatccaag

SEQ ID NO: 144043 - DNA, 25 bp, Saccharomyces pastorianus
taataagctgacttgggtgccacca

SEQ ID NO: 144044 - DNA, 25 bp, Saccharomyces pastorianus
gatcctgcaacaaccggcgataaca

SEQ ID NO: 144045 - DNA, 25 bp, Saccharomyces pastorianus
tattatccaagtatgcaccgcagaa

SEQ ID NO: 144046 - DNA, 25 bp, Saccharomyces pastorianus
gaactaagacatatcgtaccgactg

SEQ ID NO: 144047 - DNA, 25 bp, Saccharomyces pastorianus
tttcaagctctctcaggacacaaca

SEQ ID NO: 144048 - DNA, 25 bp, Saccharomyces pastorianus
ttatggctaatacccgatcctgcaa

SEQ ID NO: 144049 - DNA, 25 bp, Saccharomyces pastorianus
gctactcggatgtagaaacgtacga

SEQ ID NO: 144050 - DNA, 25 bp, Saccharomyces pastorianus
gaagggaccatatgtggtgacaaca

SEQ ID NO: 144051 - DNA, 25 bp, Saccharomyces pastorianus
gtacgaaagagtatatacgcccata

SEQ ID NO: 144052 - DNA, 25 bp, Saccharomyces pastorianus
gaaagcacaataccgagttactact

SEQ ID NO: 144053 - DNA, 25 bp, Saccharomyces pastorianus
atatgtggtgacaacaaaacgcaaa

SEQ ID NO: 144054 - DNA, 25 bp, Saccharomyces pastorianus
ttatggcgacgaaagcacaataccg

SEQ ID NO: 144055 - DNA, 25 bp, Saccharomyces pastorianus
gtatatacgcccataaaggcatatt

SEQ ID NO: 144056 - DNA, 25 bp, Saccharomyces pastorianus
atgatagtcctgattatggcgacga

SEQ ID NO: 144057 - DNA, 25 bp, Saccharomyces pastorianus
ggcgacgaaagcacaataccgagtt

SEQ ID NO: 144058 - DNA, 25 bp, Saccharomyces pastorianus
gagttactactgctactcggatgta

SEQ ID NO: 144059 - DNA, 25 bp, Saccharomyces pastorianus
aaaattcgattatgatagtcctgat

SEQ ID NO: 144060 - DNA, 25 bp, Saccharomyces pastorianus
gaatgagaccagtagcggaacccat

SEQ ID NO: 144061 - DNA, 25 bp, Saccharomyces pastorianus
tttactgacagtttcgaatgagacc

SEQ ID NO: 144062 - DNA, 25 bp, Saccharomyces pastorianus
atgtttgaggctattgttcggtgac

SEQ ID NO: 144063 - DNA, 25 bp, Saccharomyces pastorianus
gtccttcatgttgttctcgtttatc

SEQ ID NO: 144064 - DNA, 25 bp, Saccharomyces pastorianus
atcaacggattaactttgtggtcag

SEQ ID NO: 144065 - DNA, 25 bp, Saccharomyces pastorianus
gcggaacccatagtactcaaagcct

SEQ ID NO: 144066 - DNA, 25 bp, Saccharomyces pastorianus
gaaagtgtgatcttgtccttcatgt

SEQ ID NO: 144067 - DNA, 25 bp, Saccharomyces pastorianus
gttcggtgactctccaaggcaaata

SEQ ID NO: 144068 - DNA, 25 bp, Saccharomyces pastorianus
acgtccgagatttttgtctagtaca

SEQ ID NO: 144069 - DNA, 25 bp, Saccharomyces pastorianus
tattcatcattttcatacgtccgag

SEQ ID NO: 144070 - DNA, 25 bp, Saccharomyces pastorianus
gcggatgcatattatgctcctcatt

SEQ ID NO: 144071 - DNA, 25 bp, Saccharomyces pastorianus
gaaaacgcgtatttgagcatagttc

SEQ ID NO: 144072 - DNA, 25 bp, Saccharomyces pastorianus
ggcaagaattgaagaactcgttact

SEQ ID NO: 144073 - DNA, 25 bp, Saccharomyces pastorianus
ggataggtccgatggaacccaatga

SEQ ID NO: 144074 - DNA, 25 bp, Saccharomyces pastorianus
gaacttaactgaaattcgaggtgaa

SEQ ID NO: 144075 - DNA, 25 bp, Saccharomyces pastorianus
aattgcgtgacatctttctttctga

SEQ ID NO: 144076 - DNA, 25 bp, Saccharomyces pastorianus
acatctttctttctgatattgtcga

SEQ ID NO: 144077 - DNA, 25 bp, Saccharomyces pastorianus
gagcatagttcaattgcgtgacatc

SEQ ID NO: 144078 - DNA, 25 bp, Saccharomyces pastorianus
gaactcgttactcaaaccatggaaa

SEQ ID NO: 144079 - DNA, 25 bp, Saccharomyces pastorianus
gtccgatccgaaagaaaacgcgtat

SEQ ID NO: 144080 - DNA, 25 bp, Saccharomyces pastorianus
gattaaatcaatgtccgatccgaaa

SEQ ID NO: 144081 - DNA, 25 bp, Saccharomyces pastorianus
ggccaatatggctaatgtttttact

SEQ ID NO: 144082 - DNA, 25 bp, Saccharomyces pastorianus
gtatgacggaagatgccctctatca

SEQ ID NO: 144083 - DNA, 25 bp, Saccharomyces pastorianus
gaagtaccatcccatcgagttagtg

SEQ ID NO: 144084 - DNA, 25 bp, Saccharomyces pastorianus
gtggcaattccttcgagtttattca

SEQ ID NO: 144085 - DNA, 25 bp, Saccharomyces pastorianus
ttgttattcctctcttatttggcct

SEQ ID NO: 144086 - DNA, 25 bp, Saccharomyces pastorianus
agaccgaaatgtatcccttgtccac

SEQ ID NO: 144087 - DNA, 25 bp, Saccharomyces pastorianus
gaggacctgtggatccaagttatca

SEQ ID NO: 144088 - DNA, 25 bp, Saccharomyces pastorianus
gagctccttggattcgcgacgatga

SEQ ID NO: 144089 - DNA, 25 bp, Saccharomyces pastorianus
atttgttgcaggactacagaccgaa

SEQ ID NO: 144090 - DNA, 25 bp, Saccharomyces pastorianus
agactgctcataggttactgtgggc

SEQ ID NO: 144091 - DNA, 25 bp, Saccharomyces pastorianus
tgagcaaatcattactggcgctatt

SEQ ID NO: 144092 - DNA, 25 bp, Saccharomyces pastorianus
gttagcaccatctagacttgacttt

SEQ ID NO: 144093 - DNA, 25 bp, Saccharomyces pastorianus
gaccttctcgatgattctcttatgt

SEQ ID NO: 144094 - DNA, 25 bp, Saccharomyces pastorianus
gtccaagcatgttccagcgagtgtg

SEQ ID NO: 144095 - DNA, 25 bp, Saccharomyces pastorianus
agaaggatcccgttgtagctaagca

SEQ ID NO: 144096 - DNA, 25 bp, Saccharomyces pastorianus
ggcacaccgttgatcagactacgtc

SEQ ID NO: 144097 - DNA, 25 bp, Saccharomyces pastorianus
agccgttccgcaacaaagatcgaca

SEQ ID NO: 144098 - DNA, 25 bp, Saccharomyces pastorianus
aggcacaatccattaggcacaccgt

SEQ ID NO: 144099 - DNA, 25 bp, Saccharomyces pastorianus
ggctgggaatcaagtaccgcgtgaa

SEQ ID NO: 144100 - DNA, 25 bp, Saccharomyces pastorianus
agctaaggctgcaacttccgtacaa

SEQ ID NO: 144101 - DNA, 25 bp, Saccharomyces pastorianus
aaacgatgaccaccgcgagggattc

SEQ ID NO: 144102 - DNA, 25 bp, Saccharomyces pastorianus
taaaacgaacgctacagcttttccg

SEQ ID NO: 144103 - DNA, 25 bp, Saccharomyces pastorianus
gaaatggtgcagtgccagccgttcc

SEQ ID NO: 144104 - DNA, 25 bp, Saccharomyces pastorianus
tgagaagctggttccattgcccata

SEQ ID NO: 144105 - DNA, 25 bp, Saccharomyces pastorianus
tgttctttatcagctgtccactagt

SEQ ID NO: 144106 - DNA, 25 bp, Saccharomyces pastorianus
ggatccggaatcgatggcatacact

SEQ ID NO: 144107 - DNA, 25 bp, Saccharomyces pastorianus
gaggtccatctgtgcactgggtgaa

SEQ ID NO: 144108 - DNA, 25 bp, Saccharomyces pastorianus
actaccgacatgatcagtgttcttt

SEQ ID NO: 144109 - DNA, 25 bp, Saccharomyces pastorianus
acaatgttgctctgaacgacgtata

SEQ ID NO: 144110 - DNA, 25 bp, Saccharomyces pastorianus
ttatgactgctatgcgtctgatgtt

SEQ ID NO: 144111 - DNA, 25 bp, Saccharomyces pastorianus
gcactgacaggactgctgatccgat

SEQ ID NO: 144112 - DNA, 25 bp, Saccharomyces pastorianus
aaggcggtatcattgcatccgttgg

SEQ ID NO: 144113 - DNA, 25 bp, Saccharomyces pastorianus
gcagacgtggccaagttagcgaact

SEQ ID NO: 144114 - DNA, 25 bp, Saccharomyces pastorianus
tataatgtcgtttatcttcccttcc

SEQ ID NO: 144115 - DNA, 25 bp, Saccharomyces pastorianus
gtttcttgtataccagggagtctat

SEQ ID NO: 144116 - DNA, 25 bp, Saccharomyces pastorianus
ttatttggctagtcgttcccacgat

SEQ ID NO: 144117 - DNA, 25 bp, Saccharomyces pastorianus
gagtctatagcatgggcagcatcct

SEQ ID NO: 144118 - DNA, 25 bp, Saccharomyces pastorianus
acgaatggcgtgctagctgtcacaa

SEQ ID NO: 144119 - DNA, 25 bp, Saccharomyces pastorianus
aggccccacaagactacgtattaga

SEQ ID NO: 144120 - DNA, 25 bp, Saccharomyces pastorianus
acttactttcattctaggccaattg

SEQ ID NO: 144121 - DNA, 25 bp, Saccharomyces pastorianus
gcagcatccttttatcattcgtact

SEQ ID NO: 144122 - DNA, 25 bp, Saccharomyces pastorianus
aacctagtttcccttttgatcattg

SEQ ID NO: 144123 - DNA, 25 bp, Saccharomyces pastorianus
cattcgtactgggtgtggttttcgg

SEQ ID NO: 144124 - DNA, 25 bp, Saccharomyces pastorianus
ttgggttcgctaattcacttacttt

SEQ ID NO: 144125 - DNA, 25 bp, Saccharomyces pastorianus
atatgtccataggttgtctgcacaa

SEQ ID NO: 144126 - DNA, 25 bp, Saccharomyces pastorianus
tctgccatgtaactggactccaggt

SEQ ID NO: 144127 - DNA, 25 bp, Saccharomyces pastorianus
tgtctgccatgtaactggactccag

SEQ ID NO: 144128 - DNA, 25 bp, Saccharomyces pastorianus
atgtaactggactccaggtgctgct

SEQ ID NO: 144129 - DNA, 25 bp, Saccharomyces pastorianus
taactggactccaggtgctgctacc

SEQ ID NO: 144130 - DNA, 25 bp, Saccharomyces pastorianus
aagaacggtactgtctgccatgtaa

SEQ ID NO: 144131 - DNA, 25 bp, Saccharomyces pastorianus
gaacggtactgtctgccatgtaact

SEQ ID NO: 144132 - DNA, 25 bp, Saccharomyces pastorianus
acaagaacggtactgtctgccatgt

SEQ ID NO: 144133 - DNA, 25 bp, Saccharomyces pastorianus
gaccgacaagaacggtactgtctgc

SEQ ID NO: 144134 - DNA, 25 bp, Saccharomyces pastorianus
tactgtctgccatgtaactggactc

SEQ ID NO: 144135 - DNA, 25 bp, Saccharomyces pastorianus
ggtactgtctgccatgtaactggac

SEQ ID NO: 144136 - DNA, 25 bp, Saccharomyces pastorianus
acggtactgtctgccatgtaactgg

SEQ ID NO: 144137 - DNA, 25 bp, Saccharomyces pastorianus
ttgttcatcatcgacccaaagggtg

SEQ ID NO: 144138 - DNA, 25 bp, Saccharomyces pastorianus
aacaaggcgctcaagttcttttcgc

SEQ ID NO: 144139 - DNA, 25 bp, Saccharomyces pastorianus
taacgatttgccagtcggtagaaac

SEQ ID NO: 144140 - DNA, 25 bp, Saccharomyces pastorianus
gtctgtccaaccgaaatcattgctt

SEQ ID NO: 144141 - DNA, 25 bp, Saccharomyces pastorianus
gaaacgttgacgaagccttgagatt

SEQ ID NO: 144142 - DNA, 25 bp, Saccharomyces pastorianus
aaggaatacttcgaagctgccaaca

SEQ ID NO: 144143 - DNA, 25 bp, Saccharomyces pastorianus
tttgggcccaatcaacattccattg

SEQ ID NO: 144144 - DNA, 25 bp, Saccharomyces pastorianus
gttgaagccttccaatggaccgaca

SEQ ID NO: 144145 - DNA, 25 bp, Saccharomyces pastorianus
gtaagtacgttgtcctagcctttat

SEQ ID NO: 144146 - DNA, 25 bp, Saccharomyces pastorianus
acattccattgttggctgacaccaa

SEQ ID NO: 144147 - DNA, 25 bp, Saccharomyces pastorianus
gtcgccttgagaggtttgttcatca

SEQ ID NO: 144148 - DNA, 25 bp, Saccharomyces pastorianus
actcattacaagatcccagcctggt

SEQ ID NO: 144149 - DNA, 25 bp, Saccharomyces pastorianus
ctcattacaagatcccagcctggtt

SEQ ID NO: 144150 - DNA, 25 bp, Saccharomyces pastorianus
gatcccagcctggttcttaaaccgt

SEQ ID NO: 144151 - DNA, 25 bp, Saccharomyces pastorianus
tacaagatcccagcctggttcttaa

SEQ ID NO: 144152 - DNA, 25 bp, Saccharomyces pastorianus
tcattacaagatcccagcctggttc

SEQ ID NO: 144153 - DNA, 25 bp, Saccharomyces pastorianus
attacaagatcccagcctggttctt

SEQ ID NO: 144154 - DNA, 25 bp, Saccharomyces pastorianus
agatcccagcctggttcttaaaccg

SEQ ID NO: 144155 - DNA, 25 bp, Saccharomyces pastorianus
ttacaagatcccagcctggttctta

SEQ ID NO: 144156 - DNA, 25 bp, Saccharomyces pastorianus
aactcattacaagatcccagcctgg

SEQ ID NO: 144157 - DNA, 25 bp, Saccharomyces pastorianus
caactcattacaagatcccagcctg

SEQ ID NO: 144158 - DNA, 25 bp, Saccharomyces pastorianus
caagatcccagcctggttcttaaac

SEQ ID NO: 144159 - DNA, 25 bp, Saccharomyces pastorianus
actcattacaagatcccagcctggt

SEQ ID NO: 144160 - DNA, 25 bp, Saccharomyces pastorianus
ctcattacaagatcccagcctggtt

SEQ ID NO: 144161 - DNA, 25 bp, Saccharomyces pastorianus
gagcccaccgtggtattagacactt

SEQ ID NO: 144162 - DNA, 25 bp, Saccharomyces pastorianus
gatcccagcctggttcttaaaccgt

SEQ ID NO: 144163 - DNA, 25 bp, Saccharomyces pastorianus
tacaagatcccagcctggttcttaa

SEQ ID NO: 144164 - DNA, 25 bp, Saccharomyces pastorianus
tcattacaagatcccagcctggttc

SEQ ID NO: 144165 - DNA, 25 bp, Saccharomyces pastorianus
attacaagatcccagcctggttctt

SEQ ID NO: 144166 - DNA, 25 bp, Saccharomyces pastorianus
agatcccagcctggttcttaaaccg

SEQ ID NO: 144167 - DNA, 25 bp, Saccharomyces pastorianus
caagatcccagcctggttcttaaac

SEQ ID NO: 144168 - DNA, 25 bp, Saccharomyces pastorianus
aactcattacaagatcccagcctgg

SEQ ID NO: 144169 - DNA, 25 bp, Saccharomyces pastorianus
ttacaagatcccagcctggttctta

SEQ ID NO: 144170 - DNA, 25 bp, Saccharomyces pastorianus
aatgacatactaagagcgcaagctg

SEQ ID NO: 144171 - DNA, 25 bp, Saccharomyces pastorianus
gggctgataaagagttctgatccat

SEQ ID NO: 144172 - DNA, 25 bp, Saccharomyces pastorianus
gctaccatccaaggtttattccatg

SEQ ID NO: 144173 - DNA, 25 bp, Saccharomyces pastorianus
aaggtcgacttaatatctcccacac

SEQ ID NO: 144174 - DNA, 25 bp, Saccharomyces pastorianus
aaacgactatactacagagctacca

SEQ ID NO: 144175 - DNA, 25 bp, Saccharomyces pastorianus
agaactcgacttgaacaggctggat

SEQ ID NO: 144176 - DNA, 25 bp, Saccharomyces pastorianus
gtagggcattggcaagaactgcacc

SEQ ID NO: 144177 - DNA, 25 bp, Saccharomyces pastorianus
gagcgcaagctgtttttatcgaatt

SEQ ID NO: 144178 - DNA, 25 bp, Saccharomyces pastorianus
atttttgagggcgaagtcatcttca

SEQ ID NO: 144179 - DNA, 25 bp, Saccharomyces pastorianus
acaggctggatcttgtgaatacaaa

SEQ ID NO: 144180 - DNA, 25 bp, Saccharomyces pastorianus
tcttgaatatctagcaatggcccat

SEQ ID NO: 144181 - DNA, 25 bp, Saccharomyces pastorianus
gaatccaaaagggtccagttagagg

SEQ ID NO: 144182 - DNA, 25 bp, Saccharomyces pastorianus
tttggacttgtctcgttctaacggt

SEQ ID NO: 144183 - DNA, 25 bp, Saccharomyces pastorianus
tgacttggttaaatctttgggtttg

SEQ ID NO: 144184 - DNA, 25 bp, Saccharomyces pastorianus
tggacttgtctcgttctaacggtgt

SEQ ID NO: 144185 - DNA, 25 bp, Saccharomyces pastorianus
ccagaagtctctgctttggacttgt

SEQ ID NO: 144186 - DNA, 25 bp, Saccharomyces pastorianus
tctgacttggttaaatctttgggtt

SEQ ID NO: 144187 - DNA, 25 bp, Saccharomyces pastorianus
ttgtctcgttctaacggtgttttga

SEQ ID NO: 144188 - DNA, 25 bp, Saccharomyces pastorianus
ctgctttggacttgtctcgttctaa

SEQ ID NO: 144189 - DNA, 25 bp, Saccharomyces pastorianus
tccaaaagggtccagttagaggtat

SEQ ID NO: 144190 - DNA, 25 bp, Saccharomyces pastorianus
aagtctctgctttggacttgtctcg

SEQ ID NO: 144191 - DNA, 25 bp, Saccharomyces pastorianus
gacttgtctcgttctaacggtgttt

SEQ ID NO: 144192 - DNA, 25 bp, Saccharomyces pastorianus
tgagttaggagccaacccctatcgt

SEQ ID NO: 144193 - DNA, 25 bp, Saccharomyces pastorianus
aacccctatcgtctgccatggtgta

SEQ ID NO: 144194 - DNA, 25 bp, Saccharomyces pastorianus
cccctatcgtctgccatggtgtatg

SEQ ID NO: 144195 - DNA, 25 bp, Saccharomyces pastorianus
aatttgaggaatgggagcctgagac

SEQ ID NO: 144196 - DNA, 25 bp, Saccharomyces pastorianus
gtactcaccatataaattgtctgag

SEQ ID NO: 144197 - DNA, 25 bp, Saccharomyces pastorianus
attgtctgagttaggagccaacccc

SEQ ID NO: 144198 - DNA, 25 bp, Saccharomyces pastorianus
gggattgatgtacgagtccaacaag

SEQ ID NO: 144199 - DNA, 25 bp, Saccharomyces pastorianus
gagtccaacaagcatttcagtaatg

SEQ ID NO: 144200 - DNA, 25 bp, Saccharomyces pastorianus
gtacgagtccaacaagcatttcagt

SEQ ID NO: 144201 - DNA, 25 bp, Saccharomyces pastorianus
tatccaattgagtactcaccatata

SEQ ID NO: 144202 - DNA, 25 bp, Saccharomyces pastorianus
tgggagcctgagacaaagcaattga

SEQ ID NO: 144203 - DNA, 25 bp, Saccharomyces pastorianus
cattctacggttgcagatcatactt

SEQ ID NO: 144204 - DNA, 25 bp, Saccharomyces pastorianus
cggttgcagatcatactttgtttgt

SEQ ID NO: 144205 - DNA, 25 bp, Saccharomyces pastorianus
catactttgtttgttcgtgcttacc

SEQ ID NO: 144206 - DNA, 25 bp, Saccharomyces pastorianus
ctacggttgcagatcatactttgtt

SEQ ID NO: 144207 - DNA, 25 bp, Saccharomyces pastorianus
gtccattctacggttgcagatcata

SEQ ID NO: 144208 - DNA, 25 bp, Saccharomyces pastorianus
ctttgtttgttcgtgcttaccatac

SEQ ID NO: 144209 - DNA, 25 bp, Saccharomyces pastorianus
gatcatactttgtttgttcgtgctt

SEQ ID NO: 144210 - DNA, 25 bp, Saccharomyces pastorianus
gtttgttcgtgcttaccatacgagt

SEQ ID NO: 144211 - DNA, 25 bp, Saccharomyces pastorianus
tactttgtttgttcgtgcttaccat

SEQ ID NO: 144212 - DNA, 25 bp, Saccharomyces pastorianus
tgttcgtgcttaccatacgagtgat

SEQ ID NO: 144213 - DNA, 25 bp, Saccharomyces pastorianus
gcagatcatactttgtttgttcgtg

SEQ ID NO: 144214 - DNA, 25 bp, Saccharomyces pastorianus
ggtgcagcactcacaaaatcagtta

SEQ ID NO: 144215 - DNA, 25 bp, Saccharomyces pastorianus
gacataggcaatcagtttccgaaca

SEQ ID NO: 144216 - DNA, 25 bp, Saccharomyces pastorianus
agattaccaatctaggcccatcaga

SEQ ID NO: 144217 - DNA, 25 bp, Saccharomyces pastorianus
ggtacatctaccaagtttgtcacag

SEQ ID NO: 144218 - DNA, 25 bp, Saccharomyces pastorianus
attggtgagccaacgggtacatcta

SEQ ID NO: 144219 - DNA, 25 bp, Saccharomyces pastorianus
gaagaccttcatcaagggtacgaga

SEQ ID NO: 144220 - DNA, 25 bp, Saccharomyces pastorianus
gaacattgttgtaccaagtttcgat

SEQ ID NO: 144221 - DNA, 25 bp, Saccharomyces pastorianus
atcagagttctcattgtcggcgttc

SEQ ID NO: 144222 - DNA, 25 bp, Saccharomyces pastorianus
ctctatttagggttgatccatggaa

SEQ ID NO: 144223 - DNA, 25 bp, Saccharomyces pastorianus
gttggaacacaacagaggatctcta

SEQ ID NO: 144224 - DNA, 25 bp, Saccharomyces pastorianus
gaatacagtcacatccacaatttgg

SEQ ID NO: 144225 - DNA, 25 bp, Saccharomyces pastorianus
aagtgccccagctatggccaaatgg

SEQ ID NO: 144226 - DNA, 25 bp, Saccharomyces pastorianus
gactttgaattggtatcgcccttcc

SEQ ID NO: 144227 - DNA, 25 bp, Saccharomyces pastorianus
agattcgtcaagaagttcccctcca

SEQ ID NO: 144228 - DNA, 25 bp, Saccharomyces pastorianus
tgctactgctaccacgatcgaagag

SEQ ID NO: 144229 - DNA, 25 bp, Saccharomyces pastorianus
attgggtgtcacatatacctcgcgg

SEQ ID NO: 144230 - DNA, 25 bp, Saccharomyces pastorianus
gcggtatattctagtgaccccgtag

SEQ ID NO: 144231 - DNA, 25 bp, Saccharomyces pastorianus
gcccttccctaagtatactgtgcat

SEQ ID NO: 144232 - DNA, 25 bp, Saccharomyces pastorianus
gcttacctcatttgatctcgaacgt

SEQ ID NO: 144233 - DNA, 25 bp, Saccharomyces pastorianus
agacgatgatgtgctctgctttaaa

SEQ ID NO: 144234 - DNA, 25 bp, Saccharomyces pastorianus
gaaattaaactcaactgctcggcaa

SEQ ID NO: 144235 - DNA, 25 bp, Saccharomyces pastorianus
ggccacatcatcaacaacgagctta

SEQ ID NO: 144236 - DNA, 25 bp, Saccharomyces pastorianus
gataattgcctgattttgtcctgga

SEQ ID NO: 144237 - DNA, 25 bp, Saccharomyces pastorianus
gagctcttcgatcgtggtagcagta

SEQ ID NO: 144238 - DNA, 25 bp, Saccharomyces pastorianus
gaagactgccatttggccatagctg

SEQ ID NO: 144239 - DNA, 25 bp, Saccharomyces pastorianus
ttgttgatgatgtggccgagctctt

SEQ ID NO: 144240 - DNA, 25 bp, Saccharomyces pastorianus
gctcgttaggatgcacagtatactt

SEQ ID NO: 144241 - DNA, 25 bp, Saccharomyces pastorianus
caagtttaccacgttcgagatcaaa

SEQ ID NO: 144242 - DNA, 25 bp, Saccharomyces pastorianus
gtcctggagggcgttagaccattct

SEQ ID NO: 144243 - DNA, 25 bp, Saccharomyces pastorianus
ttggtccaccgacatgtgctcgtta

SEQ ID NO: 144244 - DNA, 25 bp, Saccharomyces pastorianus
gagcacatcatcgtctgcagataat

SEQ ID NO: 144245 - DNA, 25 bp, Saccharomyces pastorianus
gtagcagtttcaagttgtccttctt

SEQ ID NO: 144246 - DNA, 25 bp, Saccharomyces pastorianus
ttcatccagtgcttccactagaaga

SEQ ID NO: 144247 - DNA, 25 bp, Saccharomyces pastorianus
acctcttctggtcttagcggtggta

SEQ ID NO: 144248 - DNA, 25 bp, Saccharomyces pastorianus
gaatgggcccaagttacgtcagtgc

SEQ ID NO: 144249 - DNA, 25 bp, Saccharomyces pastorianus
acaccagctgtaaatgcgcatggag

SEQ ID NO: 144250 - DNA, 25 bp, Saccharomyces pastorianus
aaacatggccactggcggtattgca

SEQ ID NO: 144251 - DNA, 25 bp, Saccharomyces pastorianus
gtgccccaagaaacatggccactgg

SEQ ID NO: 144252 - DNA, 25 bp, Saccharomyces pastorianus
cactggcggtattgcagcaggtgct

SEQ ID NO: 144253 - DNA, 25 bp, Saccharomyces pastorianus
acgtcagtgccccaagaaacatggc

SEQ ID NO: 144254 - DNA, 25 bp, Saccharomyces pastorianus
cttctggtcttagcggtggtatgac

SEQ ID NO: 144255 - DNA, 25 bp, Saccharomyces pastorianus
tattgcagcaggtgctgcggctacc

SEQ ID NO: 144256 - DNA, 25 bp, Saccharomyces pastorianus
aggtgctgcggctacctcttctggt

SEQ ID NO: 144257 - DNA, 25 bp, Saccharomyces pastorianus
acaggccagaatgggcccaagttac

SEQ ID NO: 144258 - DNA, 25 bp, Saccharomyces pastorianus
gaagccgcgaaagttctcataaaga

SEQ ID NO: 144259 - DNA, 25 bp, Saccharomyces pastorianus
gacaaacgcctttattttccatctt

SEQ ID NO: 144260 - DNA, 25 bp, Saccharomyces pastorianus
aaacattccaatccttttacaactg

SEQ ID NO: 144261 - DNA, 25 bp, Saccharomyces pastorianus
ggtgaagaccgcatttgatatcgca

SEQ ID NO: 144262 - DNA, 25 bp, Saccharomyces pastorianus
gtggctcattatctaacccatgaaa

SEQ ID NO: 144263 - DNA, 25 bp, Saccharomyces pastorianus
aagatcatgctgttcaattgtactg

SEQ ID NO: 144264 - DNA, 25 bp, Saccharomyces pastorianus
tcgaccttcttcacttgttttgatt

SEQ ID NO: 144265 - DNA, 25 bp, Saccharomyces pastorianus
agatatgcacgtaccgtggctcatt

SEQ ID NO: 144266 - DNA, 25 bp, Saccharomyces pastorianus
gtttgactatctagaccacaccgat

SEQ ID NO: 144267 - DNA, 25 bp, Saccharomyces pastorianus
aaagatcactcggtactaagcaaga

SEQ ID NO: 144268 - DNA, 25 bp, Saccharomyces pastorianus
tattgacgccatcacgaaagaccgt

SEQ ID NO: 144269 - DNA, 25 bp, Saccharomyces pastorianus
ccacatatcccttagttgaagtact

SEQ ID NO: 144270 - DNA, 25 bp, Saccharomyces pastorianus
atggcaatatccgacggaggtaaat

SEQ ID NO: 144271 - DNA, 25 bp, Saccharomyces pastorianus
tacatttctccctcccatgaaagca

SEQ ID NO: 144272 - DNA, 25 bp, Saccharomyces pastorianus
atggcgagatcccaggatatccaga

SEQ ID NO: 144273 - DNA, 25 bp, Saccharomyces pastorianus
catgaaagcaccacatatcccttag

SEQ ID NO: 144274 - DNA, 25 bp, Saccharomyces pastorianus
tatccgacggaggtaaattggtgac

SEQ ID NO: 144275 - DNA, 25 bp, Saccharomyces pastorianus
aaattggtgacctacatttctccct

SEQ ID NO: 144276 - DNA, 25 bp, Saccharomyces pastorianus
gaaagcaccacatatcccttagttg

SEQ ID NO: 144277 - DNA, 25 bp, Saccharomyces pastorianus
aagtactaaaatatggcgagatccc

SEQ ID NO: 144278 - DNA, 25 bp, Saccharomyces pastorianus
aaatatggcgagatcccaggatatc

SEQ ID NO: 144279 - DNA, 25 bp, Saccharomyces pastorianus
agcaccacatatcccttagttgaag

SEQ ID NO: 144280 - DNA, 25 bp, Saccharomyces pastorianus
gagcagtcactggttaacttcaaag

SEQ ID NO: 144281 - DNA, 25 bp, Saccharomyces pastorianus
ggaacacctaattacatcgcacctg

SEQ ID NO: 144282 - DNA, 25 bp, Saccharomyces pastorianus
gtcatgtcagaagcaccaaattttg

SEQ ID NO: 144283 - DNA, 25 bp, Saccharomyces pastorianus
taagccacccttccaagcaagagat

SEQ ID NO: 144284 - DNA, 25 bp, Saccharomyces pastorianus
gacattctctccttagatccaatag

SEQ ID NO: 144285 - DNA, 25 bp, Saccharomyces pastorianus
tctggcagctgtgttggcgaatgaa

SEQ ID NO: 144286 - DNA, 25 bp, Saccharomyces pastorianus
gggtaagcattctggacattcattt

SEQ ID NO: 144287 - DNA, 25 bp, Saccharomyces pastorianus
gaacgtaaatacaccatatgcggaa

SEQ ID NO: 144288 - DNA, 25 bp, Saccharomyces pastorianus
atgtcgtgatttttcgtttccaaga

SEQ ID NO: 144289 - DNA, 25 bp, Saccharomyces pastorianus
agattggtgacttcggtctggcagc

SEQ ID NO: 144290 - DNA, 25 bp, Saccharomyces pastorianus
atctattccttcgacggtcatgtca

SEQ ID NO: 144291 - DNA, 25 bp, Saccharomyces pastorianus
gttgggtagcaagtcattatttatt

SEQ ID NO: 144292 - DNA, 25 bp, Saccharomyces pastorianus
ggattctcctatcagttatcaacag

SEQ ID NO: 144293 - DNA, 25 bp, Saccharomyces pastorianus
gtatattagttatgacgatcgggaa

SEQ ID NO: 144294 - DNA, 25 bp, Saccharomyces pastorianus
aataatggcaccacagttctccgat

SEQ ID NO: 144295 - DNA, 25 bp, Saccharomyces pastorianus
caccacagttctccgattggcagat

SEQ ID NO: 144296 - DNA, 25 bp, Saccharomyces pastorianus
gcgaaaaaccacgagagctaagtag

SEQ ID NO: 144297 - DNA, 25 bp, Saccharomyces pastorianus
tgcctaaaattaaacacccaatgat

SEQ ID NO: 144298 - DNA, 25 bp, Saccharomyces pastorianus
cagaggatattggtgtcttatttaa

SEQ ID NO: 144299 - DNA, 25 bp, Saccharomyces pastorianus
tttattgagcgaaaaaccacgagag

SEQ ID NO: 144300 - DNA, 25 bp, Saccharomyces pastorianus
catgaaggcaaatttgagccgagta

SEQ ID NO: 144301 - DNA, 25 bp, Saccharomyces pastorianus
ctccaacaaacacggattctcctat

SEQ ID NO: 144302 - DNA, 25 bp, Saccharomyces pastorianus
tattcttcttctgcttccttgtctg

SEQ ID NO: 144303 - DNA, 25 bp, Saccharomyces pastorianus
tgcagccagtgttttaccaactact

SEQ ID NO: 144304 - DNA, 25 bp, Saccharomyces pastorianus
attgccctctgaatgcagccagtgt

SEQ ID NO: 144305 - DNA, 25 bp, Saccharomyces pastorianus
ggaacggtactattgacagcaggtc

SEQ ID NO: 144306 - DNA, 25 bp, Saccharomyces pastorianus
acactaacacttttattggtgtctt

SEQ ID NO: 144307 - DNA, 25 bp, Saccharomyces pastorianus
aacttgaatgctacattgccctctg

SEQ ID NO: 144308 - DNA, 25 bp, Saccharomyces pastorianus
gcgggcaatgctttggtgaattatt

SEQ ID NO: 144309 - DNA, 25 bp, Saccharomyces pastorianus
cttctgggtcttccactcataagaa

SEQ ID NO: 144310 - DNA, 25 bp, Saccharomyces pastorianus
agcaggtcagtctcaggtgtaggaa

SEQ ID NO: 144311 - DNA, 25 bp, Saccharomyces pastorianus
tgatgattattcttcttctgcttcc

SEQ ID NO: 144312 - DNA, 25 bp, Saccharomyces pastorianus
accaactactgctggaacggtacta

SEQ ID NO: 144313 - DNA, 25 bp, Saccharomyces pastorianus
gagtacattccaccattaattgttt

SEQ ID NO: 144314 - DNA, 25 bp, Saccharomyces pastorianus
atttggcagccaaggtctcaatttg

SEQ ID NO: 144315 - DNA, 25 bp, Saccharomyces pastorianus
aaaagaacgcaacctccagtattat

SEQ ID NO: 144316 - DNA, 25 bp, Saccharomyces pastorianus
gtacttttaagatgtcatactccga

SEQ ID NO: 144317 - DNA, 25 bp, Saccharomyces pastorianus
aacttagccaccgatttcctggaag

SEQ ID NO: 144318 - DNA, 25 bp, Saccharomyces pastorianus
gttaacacctatcagcgtcaatttg

SEQ ID NO: 144319 - DNA, 25 bp, Saccharomyces pastorianus
gtctcaatttgtctttcccatatgt

SEQ ID NO: 144320 - DNA, 25 bp, Saccharomyces pastorianus
gaattctaccgatttaccttcattt

SEQ ID NO: 144321 - DNA, 25 bp, Saccharomyces pastorianus
tgctgatactgacgactattggcca

SEQ ID NO: 144322 - DNA, 25 bp, Saccharomyces pastorianus
ttggccagatggtgcttcattagtt

SEQ ID NO: 144323 - DNA, 25 bp, Saccharomyces pastorianus
tattcctttagttccattgttgcaa

SEQ ID NO: 144324 - DNA, 25 bp, Saccharomyces pastorianus
ttcttgggctgtgttggttgcgcca

SEQ ID NO: 144325 - DNA, 25 bp, Saccharomyces pastorianus
ccattatcagacgtaagcaacaaaa

SEQ ID NO: 144326 - DNA, 25 bp, Saccharomyces pastorianus
ggctgtgttggttgcgccattatca

SEQ ID NO: 144327 - DNA, 25 bp, Saccharomyces pastorianus
cattatcagacgtaagcaacaaaac

SEQ ID NO: 144328 - DNA, 25 bp, Saccharomyces pastorianus
ttggttgcgccattatcagacgtaa

SEQ ID NO: 144329 - DNA, 25 bp, Saccharomyces pastorianus
cagacgtaagcaacaaaacttgaat

SEQ ID NO: 144330 - DNA, 25 bp, Saccharomyces pastorianus
tgttggttgcgccattatcagacgt

SEQ ID NO: 144331 - DNA, 25 bp, Saccharomyces pastorianus
ggttgcgccattatcagacgtaagc

SEQ ID NO: 144332 - DNA, 25 bp, Saccharomyces pastorianus
ttatcagacgtaagcaacaaaactt

SEQ ID NO: 144333 - DNA, 25 bp, Saccharomyces pastorianus
attatcagacgtaagcaacaaaact

SEQ ID NO: 144334 - DNA, 25 bp, Saccharomyces pastorianus
tatcagacgtaagcaacaaaacttg

SEQ ID NO: 144335 - DNA, 25 bp, Saccharomyces pastorianus
gagttaccaaaaatccatcacccag

SEQ ID NO: 144336 - DNA, 25 bp, Saccharomyces pastorianus
aagtccttataacgctactgtggtt

SEQ ID NO: 144337 - DNA, 25 bp, Saccharomyces pastorianus
acccaagggattttcaccaagcaat

SEQ ID NO: 144338 - DNA, 25 bp, Saccharomyces pastorianus
gcatatggctataccgagtcacgtt

SEQ ID NO: 144339 - DNA, 25 bp, Saccharomyces pastorianus
gagcacatcactgtaacccaaggga

SEQ ID NO: 144340 - DNA, 25 bp, Saccharomyces pastorianus
tgggtatgaatcacacgcactcagc

SEQ ID NO: 144341 - DNA, 25 bp, Saccharomyces pastorianus
aaggcgattcttccaactctaagag

SEQ ID NO: 144342 - DNA, 25 bp, Saccharomyces pastorianus
cttgggacaactaagctcctatgtt

SEQ ID NO: 144343 - DNA, 25 bp, Saccharomyces pastorianus
aacgggatcaaattcagctggccat

SEQ ID NO: 144344 - DNA, 25 bp, Saccharomyces pastorianus
gaaggatttccaccgtgcattagag

SEQ ID NO: 144345 - DNA, 25 bp, Saccharomyces pastorianus
aattagccctaggtgttcaagatac

SEQ ID NO: 144346 - DNA, 25 bp, Saccharomyces pastorianus
ggatgaagctgcaatcgctgcttcc

SEQ ID NO: 144347 - DNA, 25 bp, Saccharomyces pastorianus
atcccttggacatcaactttgctag

SEQ ID NO: 144348 - DNA, 25 bp, Saccharomyces pastorianus
tagcattttcatcgcaatccaaggg

SEQ ID NO: 144349 - DNA, 25 bp, Saccharomyces pastorianus
tgttggattcgataagaggcgctat

SEQ ID NO: 144350 - DNA, 25 bp, Saccharomyces pastorianus
tgaaaaccgttacccacacaggcaa

SEQ ID NO: 144351 - DNA, 25 bp, Saccharomyces pastorianus
gcttgcatatgcacgaagttcgtta

SEQ ID NO: 144352 - DNA, 25 bp, Saccharomyces pastorianus
gtttccgacgttagtggcaattatg

SEQ ID NO: 144353 - DNA, 25 bp, Saccharomyces pastorianus
atcttttattcctatgtttccgacg

SEQ ID NO: 144354 - DNA, 25 bp, Saccharomyces pastorianus
ttagccaacacgtatcccttggaca

SEQ ID NO: 144355 - DNA, 25 bp, Saccharomyces pastorianus
gatgctgactttgattctgttttag

SEQ ID NO: 144356 - DNA, 25 bp, Saccharomyces pastorianus
tcgctgcttccaaccaagacttgaa

SEQ ID NO: 144357 - DNA, 25 bp, Saccharomyces pastorianus
ggcatttcatcattttcttactcat

SEQ ID NO: 144358 - DNA, 25 bp, Saccharomyces pastorianus
tcatacctttatttactcttcggaa

SEQ ID NO: 144359 - DNA, 25 bp, Saccharomyces pastorianus
gaacacctcccgaaaattgtggcat

SEQ ID NO: 144360 - DNA, 25 bp, Saccharomyces pastorianus
gaattggtgattccttagcatctat

SEQ ID NO: 144361 - DNA, 25 bp, Saccharomyces pastorianus
cacagcgggccattgatcatatcat

SEQ ID NO: 144362 - DNA, 25 bp, Saccharomyces pastorianus
aaggtatggccgcattcgttggaaa

SEQ ID NO: 144363 - DNA, 25 bp, Saccharomyces pastorianus
atgatagggaccacagcgggccatt

SEQ ID NO: 144364 - DNA, 25 bp, Saccharomyces pastorianus
aattgcttaccctttgtacactgag

SEQ ID NO: 144365 - DNA, 25 bp, Saccharomyces pastorianus
taccgccgttaggatctgctattga

SEQ ID NO: 144366 - DNA, 25 bp, Saccharomyces pastorianus
aatgaataactctccaatgggtcta

SEQ ID NO: 144367 - DNA, 25 bp, Saccharomyces pastorianus
gctgcaatttttaaccacctaacta

SEQ ID NO: 144368 - DNA, 25 bp, Saccharomyces pastorianus
tatgaggactcgtaaatttgatgtg

SEQ ID NO: 144369 - DNA, 25 bp, Saccharomyces pastorianus
gataatggttggtctgatattcaca

SEQ ID NO: 144370 - DNA, 25 bp, Saccharomyces pastorianus
atgccaactgaggagatctgcaaaa

SEQ ID NO: 144371 - DNA, 25 bp, Saccharomyces pastorianus
gcaacatggttacaaaagcctaccc

SEQ ID NO: 144372 - DNA, 25 bp, Saccharomyces pastorianus
ctcgtaaatttgatgtgggcgggaa

SEQ ID NO: 144373 - DNA, 25 bp, Saccharomyces pastorianus
ttacaaaagcctacccaagttcgat

SEQ ID NO: 144374 - DNA, 25 bp, Saccharomyces pastorianus
aatgtctttgtggtgtgtttgataa

SEQ ID NO: 144375 - DNA, 25 bp, Saccharomyces pastorianus
tattcacaaaatattggcaacatgg

SEQ ID NO: 144376 - DNA, 25 bp, Saccharomyces pastorianus
gatctgcaaaatcaatatgaggact

SEQ ID NO: 144377 - DNA, 25 bp, Saccharomyces pastorianus
atggttggtctgatattcacaaaat

SEQ ID NO: 144378 - DNA, 25 bp, Saccharomyces pastorianus
aagcctacccaagttcgataccatt

SEQ ID NO: 144379 - DNA, 25 bp, Saccharomyces pastorianus
tctccggaaagtgcagtagcaaatc

SEQ ID NO: 144380 - DNA, 25 bp, Saccharomyces pastorianus
ctgtcagtaaaatagggaactctcc

SEQ ID NO: 144381 - DNA, 25 bp, Saccharomyces pastorianus
gtagcaaatctaggtactgatactg

SEQ ID NO: 144382 - DNA, 25 bp, Saccharomyces pastorianus
tgccctcagatgttcttgatactgt

SEQ ID NO: 144383 - DNA, 25 bp, Saccharomyces pastorianus
actggattgccctcagatgttcttg

SEQ ID NO: 144384 - DNA, 25 bp, Saccharomyces pastorianus
ctctcctaatgtgtttgatgatgat

SEQ ID NO: 144385 - DNA, 25 bp, Saccharomyces pastorianus
gattgccctcagatgttcttgatac

SEQ ID NO: 144386 - DNA, 25 bp, Saccharomyces pastorianus
tgatactggattgccctcagatgtt

SEQ ID NO: 144387 - DNA, 25 bp, Saccharomyces pastorianus
agggaactctcctaatgtgtttgat

SEQ ID NO: 144388 - DNA, 25 bp, Saccharomyces pastorianus
aggtactgatactggattgccctca

SEQ ID NO: 144389 - DNA, 25 bp, Saccharomyces pastorianus
agatgttcttgatactgtcagtaaa

SEQ ID NO: 144390 - DNA, 25 bp, Saccharomyces pastorianus
aaaaatcggccttcaatgcttcctg

SEQ ID NO: 144391 - DNA, 25 bp, Saccharomyces pastorianus
gatcatggtgatgacacccctaata

SEQ ID NO: 144392 - DNA, 25 bp, Saccharomyces pastorianus
gctactctcggaactgatcatggtg

SEQ ID NO: 144393 - DNA, 25 bp, Saccharomyces pastorianus
tggtggttaaacctttctcaactat

SEQ ID NO: 144394 - DNA, 25 bp, Saccharomyces pastorianus
gtaatcttttctttgttccgtggtg

SEQ ID NO: 144395 - DNA, 25 bp, Saccharomyces pastorianus
tatgtattatctacctgcacgcagg

SEQ ID NO: 144396 - DNA, 25 bp, Saccharomyces pastorianus
atgcttcctgagtgcttatggtgtt

SEQ ID NO: 144397 - DNA, 25 bp, Saccharomyces pastorianus
ttgcaattggaagctactctcggaa

SEQ ID NO: 144398 - DNA, 25 bp, Saccharomyces pastorianus
atatggcgaaccttagagtgctcta

SEQ ID NO: 144399 - DNA, 25 bp, Saccharomyces pastorianus
gcacgcagggattgccgtaactcaa

SEQ ID NO: 144400 - DNA, 25 bp, Saccharomyces pastorianus
acgactgagagattctgctttgcaa

SEQ ID NO: 144401 - DNA, 25 bp, Saccharomyces pastorianus
tacccgcgagcgagatgtgcgaaca

SEQ ID NO: 144402 - DNA, 25 bp, Saccharomyces pastorianus
aatgggtcggttctaccaactatca

SEQ ID NO: 144403 - DNA, 25 bp, Saccharomyces pastorianus
agttcaaccattcatgacatacctg

SEQ ID NO: 144404 - DNA, 25 bp, Saccharomyces pastorianus
atggtatgacacctttatagttgga

SEQ ID NO: 144405 - DNA, 25 bp, Saccharomyces pastorianus
aatcgtggcttttgataaccttcta

SEQ ID NO: 144406 - DNA, 25 bp, Saccharomyces pastorianus
gaacgcgttaagtcaagcggtgaac

SEQ ID NO: 144407 - DNA, 25 bp, Saccharomyces pastorianus
gacaactatcgttacttctatcaag

SEQ ID NO: 144408 - DNA, 25 bp, Saccharomyces pastorianus
gaacgagaccgtgcaattgcgcagc

SEQ ID NO: 144409 - DNA, 25 bp, Saccharomyces pastorianus
aaatttcctgagatccattccactt

SEQ ID NO: 144410 - DNA, 25 bp, Saccharomyces pastorianus
acctgttacagacagacggcgtgct

SEQ ID NO: 144411 - DNA, 25 bp, Saccharomyces pastorianus
ttgcgcagccaacttggtcaatggt

SEQ ID NO: 144412 - DNA, 25 bp, Saccharomyces pastorianus
agcgtacagagcgacttatgtttat

SEQ ID NO: 144413 - DNA, 25 bp, Saccharomyces pastorianus
gatgcaagtcctgtcattgtttcca

SEQ ID NO: 144414 - DNA, 25 bp, Saccharomyces pastorianus
gaatcgttaattagcactctgacaa

SEQ ID NO: 144415 - DNA, 25 bp, Saccharomyces pastorianus
ttgtctcaatcaagtgccgatgcaa

SEQ ID NO: 144416 - DNA, 25 bp, Saccharomyces pastorianus
gagcgacttagtttccgatgatgag

SEQ ID NO: 144417 - DNA, 25 bp, Saccharomyces pastorianus
gtaccccatattaagcgtgtcctgt

SEQ ID NO: 144418 - DNA, 25 bp, Saccharomyces pastorianus
ttagcacacctatcatcgaagacgt

SEQ ID NO: 144419 - DNA, 25 bp, Saccharomyces pastorianus
tagactcggatcgaagtaccccata

SEQ ID NO: 144420 - DNA, 25 bp, Saccharomyces pastorianus
atcaaaacttttgcctgaggacata

SEQ ID NO: 144421 - DNA, 25 bp, Saccharomyces pastorianus
gagattctcaaaaacgacgtactgt

SEQ ID NO: 144422 - DNA, 25 bp, Saccharomyces pastorianus
cgtactgtacggcttggaagagttt

SEQ ID NO: 144423 - DNA, 25 bp, Saccharomyces pastorianus
gccaagaaattcagaatacggatga

SEQ ID NO: 144424 - DNA, 25 bp, Saccharomyces pastorianus
gcacagttgactgctataatagatt

SEQ ID NO: 144425 - DNA, 25 bp, Saccharomyces pastorianus
tgtagaaaagaacatcatatgtctg

SEQ ID NO: 144426 - DNA, 25 bp, Saccharomyces pastorianus
tgctataatagattttgccgacgat

SEQ ID NO: 144427 - DNA, 25 bp, Saccharomyces pastorianus
atggcacagttgactgctataatag

SEQ ID NO: 144428 - DNA, 25 bp, Saccharomyces pastorianus
atagattttgccgacgataatagcc

SEQ ID NO: 144429 - DNA, 25 bp, Saccharomyces pastorianus
ggatgagattttccataatgtagaa

SEQ ID NO: 144430 - DNA, 25 bp, Saccharomyces pastorianus
gctataatagattttgccgacgata

SEQ ID NO: 144431 - DNA, 25 bp, Saccharomyces pastorianus
atacggatgagattttccataatgt

SEQ ID NO: 144432 - DNA, 25 bp, Saccharomyces pastorianus
tagattttgccgacgataatagcca

SEQ ID NO: 144433 - DNA, 25 bp, Saccharomyces pastorianus
cagaatacggatgagattttccata

SEQ ID NO: 144434 - DNA, 25 bp, Saccharomyces pastorianus
aggatacgtggcatgctacccgtgt

SEQ ID NO: 144435 - DNA, 25 bp, Saccharomyces pastorianus
gatgaagatattccaaggccgcctt

SEQ ID NO: 144436 - DNA, 25 bp, Saccharomyces pastorianus
ttggaaacaggatacgtggcatgct

SEQ ID NO: 144437 - DNA, 25 bp, Saccharomyces pastorianus
aactgtacaaaacccctgcgtattg

SEQ ID NO: 144438 - DNA, 25 bp, Saccharomyces pastorianus
agagggagtttctgaggcctgtccc

SEQ ID NO: 144439 - DNA, 25 bp, Saccharomyces pastorianus
caaaacccctgcgtattggaaacag

SEQ ID NO: 144440 - DNA, 25 bp, Saccharomyces pastorianus
gtcccgttaccaataaaaagctgct

SEQ ID NO: 144441 - DNA, 25 bp, Saccharomyces pastorianus
gcctgtcccgtttgcgaaaaaactg

SEQ ID NO: 144442 - DNA, 25 bp, Saccharomyces pastorianus
aaaagctgctgggttgtacatacaa

SEQ ID NO: 144443 - DNA, 25 bp, Saccharomyces pastorianus
gcctttctcctcacatagtgacaaa

SEQ ID NO: 144444 - DNA, 25 bp, Saccharomyces pastorianus
ctacccgtgtgccataagctatttg

SEQ ID NO: 144445 - DNA, 25 bp, Saccharomyces pastorianus
gagggtcttcaacaagcggtcgaaa

SEQ ID NO: 144446 - DNA, 25 bp, Saccharomyces pastorianus
agaaatcgattcgttactgcccgca

SEQ ID NO: 144447 - DNA, 25 bp, Saccharomyces pastorianus
gagctattattcaaacctaccgtct

SEQ ID NO: 144448 - DNA, 25 bp, Saccharomyces pastorianus
gcatccatccgttatctactggcaa

SEQ ID NO: 144449 - DNA, 25 bp, Saccharomyces pastorianus
tctactggcaaatcatttagtggcg

SEQ ID NO: 144450 - DNA, 25 bp, Saccharomyces pastorianus
attgtatccgactatctttgagata

SEQ ID NO: 144451 - DNA, 25 bp, Saccharomyces pastorianus
ttattcaaacctaccgtctgcagga

SEQ ID NO: 144452 - DNA, 25 bp, Saccharomyces pastorianus
taccgtctgcaggacaatctagtcg

SEQ ID NO: 144453 - DNA, 25 bp, Saccharomyces pastorianus
acaatctagtcgagggtcttcaaca

SEQ ID NO: 144454 - DNA, 25 bp, Saccharomyces pastorianus
gggattagaaccattgtatccgact

SEQ ID NO: 144455 - DNA, 25 bp, Saccharomyces pastorianus
tcatttagtggcgaacttccctaac

SEQ ID NO: 144456 - DNA, 25 bp, Saccharomyces pastorianus
ggtttccttgttgcaatacttattc

SEQ ID NO: 144457 - DNA, 25 bp, Saccharomyces pastorianus
gagcgtttctaagaatttatccatt

SEQ ID NO: 144458 - DNA, 25 bp, Saccharomyces pastorianus
aatatatcgtcaattttcgcgctaa

SEQ ID NO: 144459 - DNA, 25 bp, Saccharomyces pastorianus
ttagcgttatccaatttactcgtta

SEQ ID NO: 144460 - DNA, 25 bp, Saccharomyces pastorianus
aaatggcccaagagagcgtttctaa

SEQ ID NO: 144461 - DNA, 25 bp, Saccharomyces pastorianus
gtcagaactctctggtctcaaagag

SEQ ID NO: 144462 - DNA, 25 bp, Saccharomyces pastorianus
agaccactatcgtcagaactctctg

SEQ ID NO: 144463 - DNA, 25 bp, Saccharomyces pastorianus
gagtacacaacggtaagaccactat

SEQ ID NO: 144464 - DNA, 25 bp, Saccharomyces pastorianus
aggacaattatcgattatacccaga

SEQ ID NO: 144465 - DNA, 25 bp, Saccharomyces pastorianus
aacaggatcggtttccttgttgcaa

SEQ ID NO: 144466 - DNA, 25 bp, Saccharomyces pastorianus
ttttcgcgctaatgcaaggacaatt

SEQ ID NO: 144467 - DNA, 25 bp, Saccharomyces pastorianus
actggcgacagaaaatggccccgca

SEQ ID NO: 144468 - DNA, 25 bp, Saccharomyces pastorianus
tacaagttgctttacctgaaggtct

SEQ ID NO: 144469 - DNA, 25 bp, Saccharomyces pastorianus
ggacctcttgctacgaatggtatta

SEQ ID NO: 144470 - DNA, 25 bp, Saccharomyces pastorianus
ttacctgaaggtctagacgcgaaat

SEQ ID NO: 144471 - DNA, 25 bp, Saccharomyces pastorianus
atgggaaacggctatcggacctctt

SEQ ID NO: 144472 - DNA, 25 bp, Saccharomyces pastorianus
catcattgagcttgagaacctgtaa

SEQ ID NO: 144473 - DNA, 25 bp, Saccharomyces pastorianus
tatcggacctcttgctacgaatggt

SEQ ID NO: 144474 - DNA, 25 bp, Saccharomyces pastorianus
atggtattacatcattgagcttgag

SEQ ID NO: 144475 - DNA, 25 bp, Saccharomyces pastorianus
ggtctagacgcgaaattaagtcaag

SEQ ID NO: 144476 - DNA, 25 bp, Saccharomyces pastorianus
gccgatgtacaagttgctttacctg

SEQ ID NO: 144477 - DNA, 25 bp, Saccharomyces pastorianus
gccccgcaccactaaatgggaaacg

SEQ ID NO: 144478 - DNA, 25 bp, Saccharomyces pastorianus
aaataccatggatccattcttgcac

SEQ ID NO: 144479 - DNA, 25 bp, Saccharomyces pastorianus
gatgttggcagcttttctgttacaa

SEQ ID NO: 144480 - DNA, 25 bp, Saccharomyces pastorianus
ttcccaagtggtgaaccctcgacaa

SEQ ID NO: 144481 - DNA, 25 bp, Saccharomyces pastorianus
agagatcgtgagttcttcccaagtg

SEQ ID NO: 144482 - DNA, 25 bp, Saccharomyces pastorianus
gcaagagctgcatccgagtccaaga

SEQ ID NO: 144483 - DNA, 25 bp, Saccharomyces pastorianus
ttttccacgctaaagacattccata

SEQ ID NO: 144484 - DNA, 25 bp, Saccharomyces pastorianus
ggtattaaccaaagccagggccgat

SEQ ID NO: 144485 - DNA, 25 bp, Saccharomyces pastorianus
gaaaagttcgtctctagcggtaaga

SEQ ID NO: 144486 - DNA, 25 bp, Saccharomyces pastorianus
atctttattgaccaacgctacgtta

SEQ ID NO: 144487 - DNA, 25 bp, Saccharomyces pastorianus
gctcttgatttatttgctggtgaaa

SEQ ID NO: 144488 - DNA, 25 bp, Saccharomyces pastorianus
ggctaccaaatgtattttccacgct

SEQ ID NO: 144489 - DNA, 25 bp, Saccharomyces pastorianus
gaagaaccagagcaagcaccagatg

SEQ ID NO: 144490 - DNA, 25 bp, Saccharomyces pastorianus
aagagtttgaagaaggtcgcgttct

SEQ ID NO: 144491 - DNA, 25 bp, Saccharomyces pastorianus
aaagctcgtgagtgggacgagttca

SEQ ID NO: 144492 - DNA, 25 bp, Saccharomyces pastorianus
tttcctcaagaaattcccgtacatg

SEQ ID NO: 144493 - DNA, 25 bp, Saccharomyces pastorianus
tcatcaggtactcagatacgaaaag

SEQ ID NO: 144494 - DNA, 25 bp, Saccharomyces pastorianus
gatgattccactggttttaccgata

SEQ ID NO: 144495 - DNA, 25 bp, Saccharomyces pastorianus
gtcaagtcttgaggaacttcacgct

SEQ ID NO: 144496 - DNA, 25 bp, Saccharomyces pastorianus
aaaagtgcgaggatatggtcaatat

SEQ ID NO: 144497 - DNA, 25 bp, Saccharomyces pastorianus
gaacttcacgcttgtcgacaaaagg

SEQ ID NO: 144498 - DNA, 25 bp, Saccharomyces pastorianus
acgagttcaaggaaagtcatgctaa

SEQ ID NO: 144499 - DNA, 25 bp, Saccharomyces pastorianus
atatggaccaacaatgtcggtggag

SEQ ID NO: 144500 - DNA, 25 bp, Saccharomyces pastorianus
gcttagcgaattgtacgcgcaacca

SEQ ID NO: 144501 - DNA, 25 bp, Saccharomyces pastorianus
gcacaaaactgcactgcttggagtt

SEQ ID NO: 144502 - DNA, 25 bp, Saccharomyces pastorianus
gacgaggaccacgaccatgatgaat

SEQ ID NO: 144503 - DNA, 25 bp, Saccharomyces pastorianus
tgaggttacatcactttagtcttga

SEQ ID NO: 144504 - DNA, 25 bp, Saccharomyces pastorianus
aagattgagctattccagcgcaata

SEQ ID NO: 144505 - DNA, 25 bp, Saccharomyces pastorianus
aagcttctagatcctttggttggtg

SEQ ID NO: 144506 - DNA, 25 bp, Saccharomyces pastorianus
tcgttataaccctcagcttagcgaa

SEQ ID NO: 144507 - DNA, 25 bp, Saccharomyces pastorianus
atgattcggatgttgctcaaaggca

SEQ ID NO: 144508 - DNA, 25 bp, Saccharomyces pastorianus
tgtgtctactgcttccatcaaattt

SEQ ID NO: 144509 - DNA, 25 bp, Saccharomyces pastorianus
gacaggttggcattgttcagtacta

SEQ ID NO: 144510 - DNA, 25 bp, Saccharomyces pastorianus
gtgaaatgctctctaatttcctcaa

SEQ ID NO: 144511 - DNA, 25 bp, Saccharomyces pastorianus
caccagtgaaggttttccagtcatt

SEQ ID NO: 144512 - DNA, 25 bp, Saccharomyces pastorianus
tgaggcacctggattagcgaatttc

SEQ ID NO: 144513 - DNA, 25 bp, Saccharomyces pastorianus
caaggccatgtatccattgattgga

SEQ ID NO: 144514 - DNA, 25 bp, Saccharomyces pastorianus
gggcgactatctgctaattactgag

SEQ ID NO: 144515 - DNA, 25 bp, Saccharomyces pastorianus
gaaagaacgcctaactctgagcaca

SEQ ID NO: 144516 - DNA, 25 bp, Saccharomyces pastorianus
atccgcttcttcgaggtcggatgat

SEQ ID NO: 144517 - DNA, 25 bp, Saccharomyces pastorianus
aagcacaattttgttcaaccctcct

SEQ ID NO: 144518 - DNA, 25 bp, Saccharomyces pastorianus
taccttgcctattgtcaccagtgaa

SEQ ID NO: 144519 - DNA, 25 bp, Saccharomyces pastorianus
ttcaaccctcctgtggcagtaagag

SEQ ID NO: 144520 - DNA, 25 bp, Saccharomyces pastorianus
attactgttaccttgcctattgtca

SEQ ID NO: 144521 - DNA, 25 bp, Saccharomyces pastorianus
agcgaatttccataagggcgactat

SEQ ID NO: 144522 - DNA, 25 bp, Saccharomyces pastorianus
gagattatattcttgggtgcccaaa

SEQ ID NO: 144523 - DNA, 25 bp, Saccharomyces pastorianus
gcaccgcatttgttccaactataga

SEQ ID NO: 144524 - DNA, 25 bp, Saccharomyces pastorianus
gaatacgtacagtgtcctacagtaa

SEQ ID NO: 144525 - DNA, 25 bp, Saccharomyces pastorianus
ggtgcccaaattgtttctaagcaaa

SEQ ID NO: 144526 - DNA, 25 bp, Saccharomyces pastorianus
gtttatgacaaatagcaccgcattt

SEQ ID NO: 144527 - DNA, 25 bp, Saccharomyces pastorianus
atatccagattactttcctgagtgg

SEQ ID NO: 144528 - DNA, 25 bp, Saccharomyces pastorianus
gaagctttactaggtcaactactga

SEQ ID NO: 144529 - DNA, 25 bp, Saccharomyces pastorianus
gcgaaatccgtattaccagctgcaa

SEQ ID NO: 144530 - DNA, 25 bp, Saccharomyces pastorianus
ggtggcactacttcaatttcaggtt

SEQ ID NO: 144531 - DNA, 25 bp, Saccharomyces pastorianus
gaaaatattatcatcgtcggtggca

SEQ ID NO: 144532 - DNA, 25 bp, Saccharomyces pastorianus
ctaagcaaattttcactcatcctaa

SEQ ID NO: 144533 - DNA, 25 bp, Saccharomyces pastorianus
gaatatggctccattatcgcctgca

SEQ ID NO: 144534 - DNA, 25 bp, Saccharomyces pastorianus
actgtcacatttgtcccaagagctt

SEQ ID NO: 144535 - DNA, 25 bp, Saccharomyces pastorianus
ctactccaaatttcgatctttccat

SEQ ID NO: 144536 - DNA, 25 bp, Saccharomyces pastorianus
gtgtcaactcaactggcaatggtgc

SEQ ID NO: 144537 - DNA, 25 bp, Saccharomyces pastorianus
agtctgctgtgcctttgatgggtac

SEQ ID NO: 144538 - DNA, 25 bp, Saccharomyces pastorianus
agggtcaccataccatgaactctaa

SEQ ID NO: 144539 - DNA, 25 bp, Saccharomyces pastorianus
aatgcgtccgttattgcgaaagtgg

SEQ ID NO: 144540 - DNA, 25 bp, Saccharomyces pastorianus
ggtacggtgccgcttacaaatcaac

SEQ ID NO: 144541 - DNA, 25 bp, Saccharomyces pastorianus
gaacgaccatttgcttgtcacatat

SEQ ID NO: 144542 - DNA, 25 bp, Saccharomyces pastorianus
aagtggcgactacaggcttgagtaa

SEQ ID NO: 144543 - DNA, 25 bp, Saccharomyces pastorianus
aaatcatttctatcaccatttccca

SEQ ID NO: 144544 - DNA, 25 bp, Saccharomyces pastorianus
gatgcactggcttcaagggcatata

SEQ ID NO: 144545 - DNA, 25 bp, Saccharomyces pastorianus
agtggatgcactggcttcaagggca

SEQ ID NO: 144546 - DNA, 25 bp, Saccharomyces pastorianus
gctggagatgacattctgaaggaaa

SEQ ID NO: 144547 - DNA, 25 bp, Saccharomyces pastorianus
ttcaagggcatataaccaaaggaat

SEQ ID NO: 144548 - DNA, 25 bp, Saccharomyces pastorianus
ggcttcatcatctacttttatatat

SEQ ID NO: 144549 - DNA, 25 bp, Saccharomyces pastorianus
gtaccgcaaccagaaaaatccctat

SEQ ID NO: 144550 - DNA, 25 bp, Saccharomyces pastorianus
aataaatagtgtaaccccagtggat

SEQ ID NO: 144551 - DNA, 25 bp, Saccharomyces pastorianus
ttcaggcttcatcatctacttttat

SEQ ID NO: 144552 - DNA, 25 bp, Saccharomyces pastorianus
tacatttcaggcttcatcatctact

SEQ ID NO: 144553 - DNA, 25 bp, Saccharomyces pastorianus
tgaaggctggagatgacattctgaa

SEQ ID NO: 144554 - DNA, 25 bp, Saccharomyces pastorianus
ccgtgatgagtatattgcgaagaat

SEQ ID NO: 144555 - DNA, 25 bp, Saccharomyces pastorianus
taatgttcgggccaggattacctgc

SEQ ID NO: 144556 - DNA, 25 bp, Saccharomyces pastorianus
aaaggctgtttttgcggacgttgcg

SEQ ID NO: 144557 - DNA, 25 bp, Saccharomyces pastorianus
ttgcaactgcgcaaagttcctcatt

SEQ ID NO: 144558 - DNA, 25 bp, Saccharomyces pastorianus
gctggaattcctttgacctcattag

SEQ ID NO: 144559 - DNA, 25 bp, Saccharomyces pastorianus
atgcgaacttgccaaacagaccgaa

SEQ ID NO: 144560 - DNA, 25 bp, Saccharomyces pastorianus
attatcctcttattctctcttgcaa

SEQ ID NO: 144561 - DNA, 25 bp, Saccharomyces pastorianus
gcgcaacgaaacatcattcccggaa

SEQ ID NO: 144562 - DNA, 25 bp, Saccharomyces pastorianus
gattacctgctttaactgttatcct

SEQ ID NO: 144563 - DNA, 25 bp, Saccharomyces pastorianus
gttcctcatttagttgtgggtcata

SEQ ID NO: 144564 - DNA, 25 bp, Saccharomyces pastorianus
tgaacctgttgacctcgctggaatt

SEQ ID NO: 144565 - DNA, 25 bp, Saccharomyces pastorianus
gttgcggaaaaagatgcctccttca

SEQ ID NO: 144566 - DNA, 25 bp, Saccharomyces pastorianus
tacaggatcccttttcggaggtact

SEQ ID NO: 144567 - DNA, 25 bp, Saccharomyces pastorianus
ccaaacgcctcttcgggtggaatat

SEQ ID NO: 144568 - DNA, 25 bp, Saccharomyces pastorianus
gcaaacctgctacaggatccctttt

SEQ ID NO: 144569 - DNA, 25 bp, Saccharomyces pastorianus
aatcctgcctcaactagcggcggat

SEQ ID NO: 144570 - DNA, 25 bp, Saccharomyces pastorianus
agcggcggattatttggtagcaaac

SEQ ID NO: 144571 - DNA, 25 bp, Saccharomyces pastorianus
cgaacactgttggaggcggattatt

SEQ ID NO: 144572 - DNA, 25 bp, Saccharomyces pastorianus
ggtggcctgtttggttcaaaaccat

SEQ ID NO: 144573 - DNA, 25 bp, Saccharomyces pastorianus
ggtaataatacctctcaatctacta

SEQ ID NO: 144574 - DNA, 25 bp, Saccharomyces pastorianus
gaggtactaattccacggctccaaa

SEQ ID NO: 144575 - DNA, 25 bp, Saccharomyces pastorianus
aatcaaaacaatcctgcctcaacta

SEQ ID NO: 144576 - DNA, 25 bp, Saccharomyces pastorianus
taaacagcaacctgcttcgggtggc

SEQ ID NO: 144577 - DNA, 25 bp, Saccharomyces pastorianus
atgttgcatgcgctacgtttgcatt

SEQ ID NO: 144578 - DNA, 25 bp, Saccharomyces pastorianus
tactgcttgcggcactagtttgtgt

SEQ ID NO: 144579 - DNA, 25 bp, Saccharomyces pastorianus
gcatcatatctacgtctttgggcac

SEQ ID NO: 144580 - DNA, 25 bp, Saccharomyces pastorianus
tcatcagtgatgttgccagtgttgc

SEQ ID NO: 144581 - DNA, 25 bp, Saccharomyces pastorianus
aaaaactcagggtcgcctttggctg

SEQ ID NO: 144582 - DNA, 25 bp, Saccharomyces pastorianus
gtgtcccgtggttattgctgtataa

SEQ ID NO: 144583 - DNA, 25 bp, Saccharomyces pastorianus
ggcgcatgcgcaattatctagtgtt

SEQ ID NO: 144584 - DNA, 25 bp, Saccharomyces pastorianus
tggtggcaggcctcacggataccaa

SEQ ID NO: 144585 - DNA, 25 bp, Saccharomyces pastorianus
tttgggcactatcgttggcgcatgc

SEQ ID NO: 144586 - DNA, 25 bp, Saccharomyces pastorianus
gggccatttaatttcggcgatgtca

SEQ ID NO: 144587 - DNA, 25 bp, Saccharomyces pastorianus
aaccgtttgtatcctagttttcatg

SEQ ID NO: 144588 - DNA, 25 bp, Saccharomyces pastorianus
taccatggaaccactatcgttggaa

SEQ ID NO: 144589 - DNA, 25 bp, Saccharomyces pastorianus
tggaagagctacaaaccccgagatt

SEQ ID NO: 144590 - DNA, 25 bp, Saccharomyces pastorianus
gacctcactagaaaccaatcagtcg

SEQ ID NO: 144591 - DNA, 25 bp, Saccharomyces pastorianus
aagcgatgctttttcttttgacgac

SEQ ID NO: 144592 - DNA, 25 bp, Saccharomyces pastorianus
ggcgctctagggaatgacctcacta

SEQ ID NO: 144593 - DNA, 25 bp, Saccharomyces pastorianus
ttttgacgacgaaacaccacaggac

SEQ ID NO: 144594 - DNA, 25 bp, Saccharomyces pastorianus
ttgcccaacccgatatggcggatct

SEQ ID NO: 144595 - DNA, 25 bp, Saccharomyces pastorianus
tactgattgcgaatcccgtgcaagg

SEQ ID NO: 144596 - DNA, 25 bp, Saccharomyces pastorianus
gaaggaaacgacattgcccaacccg

SEQ ID NO: 144597 - DNA, 25 bp, Saccharomyces pastorianus
ggcggatctcatcaataccatggaa

SEQ ID NO: 144598 - DNA, 25 bp, Saccharomyces pastorianus
gacgagtttagaatgacccctgatg

SEQ ID NO: 144599 - DNA, 25 bp, Saccharomyces pastorianus
tatggcgtatcaacttttcactaag

SEQ ID NO: 144600 - DNA, 25 bp, Saccharomyces pastorianus
aatattctctttgtggtggcattcc

SEQ ID NO: 144601 - DNA, 25 bp, Saccharomyces pastorianus
tcaaatcggattcccctgttaattt

SEQ ID NO: 144602 - DNA, 25 bp, Saccharomyces pastorianus
atactcacgttatccagctgcaata

SEQ ID NO: 144603 - DNA, 25 bp, Saccharomyces pastorianus
tactacgacagtttccggattttga

SEQ ID NO: 144604 - DNA, 25 bp, Saccharomyces pastorianus
tcgctaagatccctgctcaaattta

SEQ ID NO: 144605 - DNA, 25 bp, Saccharomyces pastorianus
atgtccttctgaacctatggcgtat

SEQ ID NO: 144606 - DNA, 25 bp, Saccharomyces pastorianus
tgaacgtgttattagctcctctgct

SEQ ID NO: 144607 - DNA, 25 bp, Saccharomyces pastorianus
ctgacgagatcattcggctgggcgt

SEQ ID NO: 144608 - DNA, 25 bp, Saccharomyces pastorianus
tgggcgtcgggttcatcgctaagat

SEQ ID NO: 144609 - DNA, 25 bp, Saccharomyces pastorianus
gaacggcgccaaactactagatatt

SEQ ID NO: 144610 - DNA, 25 bp, Saccharomyces pastorianus
gtaccttgcgctcttgaaactgggc

SEQ ID NO: 144611 - DNA, 25 bp, Saccharomyces pastorianus
gaggcgtctacacaacggtaccttg

SEQ ID NO: 144612 - DNA, 25 bp, Saccharomyces pastorianus
agcgcacgcgatgttacgtgtggac

SEQ ID NO: 144613 - DNA, 25 bp, Saccharomyces pastorianus
aacttcgctacctcatactcagtga

SEQ ID NO: 144614 - DNA, 25 bp, Saccharomyces pastorianus
tggacggtgctctctcaaacttcta

SEQ ID NO: 144615 - DNA, 25 bp, Saccharomyces pastorianus
agatctgatatcaaatcctcccctg

SEQ ID NO: 144616 - DNA, 25 bp, Saccharomyces pastorianus
gataaacagcagcagcgcacgcgat

SEQ ID NO: 144617 - DNA, 25 bp, Saccharomyces pastorianus
gaagggcttcccatatctgaagata

SEQ ID NO: 144618 - DNA, 25 bp, Saccharomyces pastorianus
ctcatactcagtgaagggcttccca

SEQ ID NO: 144619 - DNA, 25 bp, Saccharomyces pastorianus
tgcgctcttgaaactgggcccacct

SEQ ID NO: 144620 - DNA, 25 bp, Saccharomyces pastorianus
caaacttctatggaggcgtctacac

SEQ ID NO: 144621 - DNA, 25 bp, Saccharomyces pastorianus
tcatccggtgtctgtcgtgctttgc

SEQ ID NO: 144622 - DNA, 25 bp, Saccharomyces pastorianus
ggatgccctcatccggtgtctgtcg

SEQ ID NO: 144623 - DNA, 25 bp, Saccharomyces pastorianus
cgtgctttgcttggcaaacacaaca

SEQ ID NO: 144624 - DNA, 25 bp, Saccharomyces pastorianus
ctgtcgtgctttgcttggcaaacac

SEQ ID NO: 144625 - DNA, 25 bp, Saccharomyces pastorianus
gtgtctgtcgtgctttgcttggcaa

SEQ ID NO: 144626 - DNA, 25 bp, Saccharomyces pastorianus
gtctgtcgtgctttgcttggcaaac

SEQ ID NO: 144627 - DNA, 25 bp, Saccharomyces pastorianus
gtcgtgctttgcttggcaaacacaa

SEQ ID NO: 144628 - DNA, 25 bp, Saccharomyces pastorianus
tctgtcgtgctttgcttggcaaaca

SEQ ID NO: 144629 - DNA, 25 bp, Saccharomyces pastorianus
atccggtgtctgtcgtgctttgctt

SEQ ID NO: 144630 - DNA, 25 bp, Saccharomyces pastorianus
tggcaaacacaacaaagaagacaaa

SEQ ID NO: 144631 - DNA, 25 bp, Saccharomyces pastorianus
agaggatgccctcatccggtgtctg

SEQ ID NO: 144632 - DNA, 25 bp, Saccharomyces pastorianus
caattgcaatttatggtatgatgga

SEQ ID NO: 144633 - DNA, 25 bp, Saccharomyces pastorianus
aaaggttattcgagacttgcacgtg

SEQ ID NO: 144634 - DNA, 25 bp, Saccharomyces pastorianus
tggtattatcacaattgcaatttat

SEQ ID NO: 144635 - DNA, 25 bp, Saccharomyces pastorianus
aacgaagatcgtcattccactgaaa

SEQ ID NO: 144636 - DNA, 25 bp, Saccharomyces pastorianus
tcgagacttgcacgtggaccctgaa

SEQ ID NO: 144637 - DNA, 25 bp, Saccharomyces pastorianus
gagcgtgaggtaaacgaagatcgtc

SEQ ID NO: 144638 - DNA, 25 bp, Saccharomyces pastorianus
gctttgccggtattcttggtattat

SEQ ID NO: 144639 - DNA, 25 bp, Saccharomyces pastorianus
gaagtcttgctaaatgaggttgatg

SEQ ID NO: 144640 - DNA, 25 bp, Saccharomyces pastorianus
atggatatggaagatacgaccgaaa

SEQ ID NO: 144641 - DNA, 25 bp, Saccharomyces pastorianus
acattctcctgctttgccggtattc

SEQ ID NO: 144642 - DNA, 25 bp, Saccharomyces pastorianus
acgtggaccctgaagtcttgctaaa

SEQ ID NO: 144643 - DNA, 25 bp, Saccharomyces pastorianus
aatccaatttcgtcatcaggttcaa

SEQ ID NO: 144644 - DNA, 25 bp, Saccharomyces pastorianus
atggcgagccagatcatgtgattac

SEQ ID NO: 144645 - DNA, 25 bp, Saccharomyces pastorianus
cgctttccaaaccatccagagagat

SEQ ID NO: 144646 - DNA, 25 bp, Saccharomyces pastorianus
aggtacccatcctttccatttacat

SEQ ID NO: 144647 - DNA, 25 bp, Saccharomyces pastorianus
atgatgccctaggtgaagttcctca

SEQ ID NO: 144648 - DNA, 25 bp, Saccharomyces pastorianus
ggtgatcaagcaaacaactccgaaa

SEQ ID NO: 144649 - DNA, 25 bp, Saccharomyces pastorianus
tacggttcaaacacgcacactttca

SEQ ID NO: 144650 - DNA, 25 bp, Saccharomyces pastorianus
gttcaaagccgataacccaggtgtt

SEQ ID NO: 144651 - DNA, 25 bp, Saccharomyces pastorianus
ccatttacatggtcacgctttccaa

SEQ ID NO: 144652 - DNA, 25 bp, Saccharomyces pastorianus
tgcgctgcccacacaaaattacgtg

SEQ ID NO: 144653 - DNA, 25 bp, Saccharomyces pastorianus
agttcctactttgatgaccgttttg

SEQ ID NO: 144654 - DNA, 25 bp, Saccharomyces pastorianus
tttgcttttctcgatgctctcgcta

SEQ ID NO: 144655 - DNA, 25 bp, Saccharomyces pastorianus
gcacacgtttaattggaccactggc

SEQ ID NO: 144656 - DNA, 25 bp, Saccharomyces pastorianus
taacactttgctctctatagccgtt

SEQ ID NO: 144657 - DNA, 25 bp, Saccharomyces pastorianus
atgactaacactttgctctctatag

SEQ ID NO: 144658 - DNA, 25 bp, Saccharomyces pastorianus
atagccgttttgcttttctcgatgc

SEQ ID NO: 144659 - DNA, 25 bp, Saccharomyces pastorianus
aattggaccactggctgggactaca

SEQ ID NO: 144660 - DNA, 25 bp, Saccharomyces pastorianus
actttgctctctatagccgttttgc

SEQ ID NO: 144661 - DNA, 25 bp, Saccharomyces pastorianus
gatgctctcgctagcacaagcggag

SEQ ID NO: 144662 - DNA, 25 bp, Saccharomyces pastorianus
tctatagccgttttgcttttctcga

SEQ ID NO: 144663 - DNA, 25 bp, Saccharomyces pastorianus
gcacaagcggagacgcacacgttta

SEQ ID NO: 144664 - DNA, 25 bp, Saccharomyces pastorianus
gacgcacacgtttaattggaccact

SEQ ID NO: 144665 - DNA, 25 bp, Saccharomyces pastorianus
gatgacttcgtccatagaccaagta

SEQ ID NO: 144666 - DNA, 25 bp, Saccharomyces pastorianus
ggagcaaagagatcctcaatttaga

SEQ ID NO: 144667 - DNA, 25 bp, Saccharomyces pastorianus
ttagagagcaaggaaacgttgtgat

SEQ ID NO: 144668 - DNA, 25 bp, Saccharomyces pastorianus
tgatgacttcgtccatagaccaagt

SEQ ID NO: 144669 - DNA, 25 bp, Saccharomyces pastorianus
aaattgatgacttcgtccatagacc

SEQ ID NO: 144670 - DNA, 25 bp, Saccharomyces pastorianus
gaacaaaattgatgacttcgtccat

SEQ ID NO: 144671 - DNA, 25 bp, Saccharomyces pastorianus
attgatgacttcgtccatagaccaa

SEQ ID NO: 144672 - DNA, 25 bp, Saccharomyces pastorianus
tcgtccatagaccaagtaataactt

SEQ ID NO: 144673 - DNA, 25 bp, Saccharomyces pastorianus
gacttcgtccatagaccaagtaata

SEQ ID NO: 144674 - DNA, 25 bp, Saccharomyces pastorianus
gagatcctcaatttagagagcaagg

SEQ ID NO: 144675 - DNA, 25 bp, Saccharomyces pastorianus
taacttggagcaaagagatcctcaa

SEQ ID NO: 144676 - DNA, 25 bp, Saccharomyces pastorianus
cgtgaacatcgtacaattcttacat

SEQ ID NO: 144677 - DNA, 25 bp, Saccharomyces pastorianus
gaaagtatctggttacgtgaacatc

SEQ ID NO: 144678 - DNA, 25 bp, Saccharomyces pastorianus
caaagagtatggttgcgggattgca

SEQ ID NO: 144679 - DNA, 25 bp, Saccharomyces pastorianus
gaagcatcgttgatttcagtggaca

SEQ ID NO: 144680 - DNA, 25 bp, Saccharomyces pastorianus
gcgggattgcagatcgtattctcaa

SEQ ID NO: 144681 - DNA, 25 bp, Saccharomyces pastorianus
ctaccagctctttttgaacaccaaa

SEQ ID NO: 144682 - DNA, 25 bp, Saccharomyces pastorianus
tcagtggacagcattgcgcttgtat

SEQ ID NO: 144683 - DNA, 25 bp, Saccharomyces pastorianus
tagactaacggactaccagctcttt

SEQ ID NO: 144684 - DNA, 25 bp, Saccharomyces pastorianus
acaatacagacctatcatcagatgg

SEQ ID NO: 144685 - DNA, 25 bp, Saccharomyces pastorianus
gatcgccttttagagtattccctat

SEQ ID NO: 144686 - DNA, 25 bp, Saccharomyces pastorianus
cagcattgcgcttgtatggtttatc

SEQ ID NO: 144687 - DNA, 25 bp, Saccharomyces pastorianus
gaaccggtgatcaggcagcacaatt

SEQ ID NO: 144688 - DNA, 25 bp, Saccharomyces pastorianus
aatattgtgcgcgatcgggtatgca

SEQ ID NO: 144689 - DNA, 25 bp, Saccharomyces pastorianus
gaagatgctgactttcgctactacc

SEQ ID NO: 144690 - DNA, 25 bp, Saccharomyces pastorianus
atgctttgcattttgaagacgccaa

SEQ ID NO: 144691 - DNA, 25 bp, Saccharomyces pastorianus
aggtcacagaatttgctcagcgctt

SEQ ID NO: 144692 - DNA, 25 bp, Saccharomyces pastorianus
ggtcaaaaccgcactatatgggcaa

SEQ ID NO: 144693 - DNA, 25 bp, Saccharomyces pastorianus
agcttgtcgctaatggtgtgccaca

SEQ ID NO: 144694 - DNA, 25 bp, Saccharomyces pastorianus
tgttggccaacggtgctattgacac

SEQ ID NO: 144695 - DNA, 25 bp, Saccharomyces pastorianus
tgtctgtcgacttgggaaccggtga

SEQ ID NO: 144696 - DNA, 25 bp, Saccharomyces pastorianus
gacacaatttgcatgttggccaacg

SEQ ID NO: 144697 - DNA, 25 bp, Saccharomyces pastorianus
cttggcccagttagtcgttcgcgat

SEQ ID NO: 144698 - DNA, 25 bp, Saccharomyces pastorianus
ggagcctggacctgggtgtaatctt

SEQ ID NO: 144699 - DNA, 25 bp, Saccharomyces pastorianus
gtaggctacactgcatctggagtca

SEQ ID NO: 144700 - DNA, 25 bp, Saccharomyces pastorianus
aagtccttgaaactgctcgtggtaa

SEQ ID NO: 144701 - DNA, 25 bp, Saccharomyces pastorianus
atcatcaacattgcttcaacgctcg

SEQ ID NO: 144702 - DNA, 25 bp, Saccharomyces pastorianus
aagtatgcattatacgtgcccaaga

SEQ ID NO: 144703 - DNA, 25 bp, Saccharomyces pastorianus
agctgcgccagtttggacatcgaaa

SEQ ID NO: 144704 - DNA, 25 bp, Saccharomyces pastorianus
tcaacgctcgaagcagcttatagat

SEQ ID NO: 144705 - DNA, 25 bp, Saccharomyces pastorianus
aataaattcaaagctgcgccagttt

SEQ ID NO: 144706 - DNA, 25 bp, Saccharomyces pastorianus
ataccaataaatctcgtccttcaac

SEQ ID NO: 144707 - DNA, 25 bp, Saccharomyces pastorianus
atacgtgcccaagacgggctctttt

SEQ ID NO: 144708 - DNA, 25 bp, Saccharomyces pastorianus
cagcagctgttttcacgaccaataa

SEQ ID NO: 144709 - DNA, 25 bp, Saccharomyces pastorianus
ggtctgtgtattgccattattatca

SEQ ID NO: 144710 - DNA, 25 bp, Saccharomyces pastorianus
tgagtcttcattatccacctcaaac

SEQ ID NO: 144711 - DNA, 25 bp, Saccharomyces pastorianus
gagatcatcaatccgctacttgaat

SEQ ID NO: 144712 - DNA, 25 bp, Saccharomyces pastorianus
caacaggtgagctctgagtcttcat

SEQ ID NO: 144713 - DNA, 25 bp, Saccharomyces pastorianus
gaaaccgctgtaccacaagatttgg

SEQ ID NO: 144714 - DNA, 25 bp, Saccharomyces pastorianus
gaaggcacaaaatacgccctcattt

SEQ ID NO: 144715 - DNA, 25 bp, Saccharomyces pastorianus
cgtcgcatcataacgaaaccgctgt

SEQ ID NO: 144716 - DNA, 25 bp, Saccharomyces pastorianus
ttgccgattttacaaccgtcgcatc

SEQ ID NO: 144717 - DNA, 25 bp, Saccharomyces pastorianus
taaagattcacccaacttgtcaccc

SEQ ID NO: 144718 - DNA, 25 bp, Saccharomyces pastorianus
gtcacccaagagtactgttccaaat

SEQ ID NO: 144719 - DNA, 25 bp, Saccharomyces pastorianus
gaggttatcccaaatgctgtttttt

SEQ ID NO: 144720 - DNA, 25 bp, Saccharomyces pastorianus
gcagcaacagctcccgaaaatgaag

SEQ ID NO: 144721 - DNA, 25 bp, Saccharomyces pastorianus
aagacattttctatgcccttggtgc

SEQ ID NO: 144722 - DNA, 25 bp, Saccharomyces pastorianus
atgccaattttgtgagaagtctttc

SEQ ID NO: 144723 - DNA, 25 bp, Saccharomyces pastorianus
aatctcaatattaacccggcacaac

SEQ ID NO: 144724 - DNA, 25 bp, Saccharomyces pastorianus
gaaccctgtggcctcgaactcggtt

SEQ ID NO: 144725 - DNA, 25 bp, Saccharomyces pastorianus
aacaattcttcctcctctaataata

SEQ ID NO: 144726 - DNA, 25 bp, Saccharomyces pastorianus
aataaacactatgccgcaaccacgt

SEQ ID NO: 144727 - DNA, 25 bp, Saccharomyces pastorianus
gaaaaggcacctattgtcacactcg

SEQ ID NO: 144728 - DNA, 25 bp, Saccharomyces pastorianus
ataacagcaatagcgctagcggcag

SEQ ID NO: 144729 - DNA, 25 bp, Saccharomyces pastorianus
tgccccatcatcagaccataaatat

SEQ ID NO: 144730 - DNA, 25 bp, Saccharomyces pastorianus
gcccttggtgcttaagcaggcagaa

SEQ ID NO: 144731 - DNA, 25 bp, Saccharomyces pastorianus
gcggaccatcacctgcaacagcagc

SEQ ID NO: 144732 - DNA, 25 bp, Saccharomyces pastorianus
catcacctgcaacagcagcagcaac

SEQ ID NO: 144733 - DNA, 25 bp, Saccharomyces pastorianus
tgcggaccatcacctgcaacagcag

SEQ ID NO: 144734 - DNA, 25 bp, Saccharomyces pastorianus
accatcacctgcaacagcagcagca

SEQ ID NO: 144735 - DNA, 25 bp, Saccharomyces pastorianus
ggaccatcacctgcaacagcagcag

SEQ ID NO: 144736 - DNA, 25 bp, Saccharomyces pastorianus
ccatcacctgcaacagcagcagcaa

SEQ ID NO: 144737 - DNA, 25 bp, Saccharomyces pastorianus
aatgcggaccatcacctgcaacagc

SEQ ID NO: 144738 - DNA, 25 bp, Saccharomyces pastorianus
atgcggaccatcacctgcaacagca

SEQ ID NO: 144739 - DNA, 25 bp, Saccharomyces pastorianus
gcagcagcaacagcgacaacagcat

SEQ ID NO: 144740 - DNA, 25 bp, Saccharomyces pastorianus
gaccatcacctgcaacagcagcagc

SEQ ID NO: 144741 - DNA, 25 bp, Saccharomyces pastorianus
cggaccatcacctgcaacagcagca

SEQ ID NO: 144742 - DNA, 25 bp, Saccharomyces pastorianus
tatcctcgctattgccattttggga

SEQ ID NO: 144743 - DNA, 25 bp, Saccharomyces pastorianus
gactacgttagtcagttctttcaaa

SEQ ID NO: 144744 - DNA, 25 bp, Saccharomyces pastorianus
aagttattgcttttggaagccgatt

SEQ ID NO: 144745 - DNA, 25 bp, Saccharomyces pastorianus
gtctttgaccatattatcctcgcta

SEQ ID NO: 144746 - DNA, 25 bp, Saccharomyces pastorianus
gttcgttcgacacgactacgttagt

SEQ ID NO: 144747 - DNA, 25 bp, Saccharomyces pastorianus
actactcttgtcgttgttgctaact

SEQ ID NO: 144748 - DNA, 25 bp, Saccharomyces pastorianus
gttctttcaaatcccataattttct

SEQ ID NO: 144749 - DNA, 25 bp, Saccharomyces pastorianus
tatagaatctagttcgttcgacacg

SEQ ID NO: 144750 - DNA, 25 bp, Saccharomyces pastorianus
ggtttggattcgataatcttcttta

SEQ ID NO: 144751 - DNA, 25 bp, Saccharomyces pastorianus
ttaacgaggctatgtctttgaccat

SEQ ID NO: 144752 - DNA, 25 bp, Saccharomyces pastorianus
agccgatttattgttactactcttg

SEQ ID NO: 144753 - DNA, 25 bp, Saccharomyces pastorianus
aaattttacatcatcaacgcgccat

SEQ ID NO: 144754 - DNA, 25 bp, Saccharomyces pastorianus
gttcaatacagattacctgcctgtt

SEQ ID NO: 144755 - DNA, 25 bp, Saccharomyces pastorianus
atcaacgcgccattcggtttctcta

SEQ ID NO: 144756 - DNA, 25 bp, Saccharomyces pastorianus
aaaccgataaagatggccgcccagt

SEQ ID NO: 144757 - DNA, 25 bp, Saccharomyces pastorianus
ttatgtcatatgttagggaagcctc

SEQ ID NO: 144758 - DNA, 25 bp, Saccharomyces pastorianus
aaacctttcttggatccagtcactg

SEQ ID NO: 144759 - DNA, 25 bp, Saccharomyces pastorianus
ctctaccgcatttaggctatttaaa

SEQ ID NO: 144760 - DNA, 25 bp, Saccharomyces pastorianus
gattgccaaattctacccacaatat

SEQ ID NO: 144761 - DNA, 25 bp, Saccharomyces pastorianus
tctccatatctagtgcatacagtgt

SEQ ID NO: 144762 - DNA, 25 bp, Saccharomyces pastorianus
agagctgctggtcacctagtggaaa

SEQ ID NO: 144763 - DNA, 25 bp, Saccharomyces pastorianus
gaatccaagggtgggttatacctat

SEQ ID NO: 144764 - DNA, 25 bp, Saccharomyces pastorianus
gggtctaacccgtgccaaatatggt

SEQ ID NO: 144765 - DNA, 25 bp, Saccharomyces pastorianus
ggaaccatctgttaatccacttcag

SEQ ID NO: 144766 - DNA, 25 bp, Saccharomyces pastorianus
gactgaacggccaatgaacgctcaa

SEQ ID NO: 144767 - DNA, 25 bp, Saccharomyces pastorianus
tcttggtaatcctagatctttggca

SEQ ID NO: 144768 - DNA, 25 bp, Saccharomyces pastorianus
gaggaggcttctcatttgaactcta

SEQ ID NO: 144769 - DNA, 25 bp, Saccharomyces pastorianus
caggccattggtttcttacgtgatc

SEQ ID NO: 144770 - DNA, 25 bp, Saccharomyces pastorianus
tgttcaattagttcgtcctcagcca

SEQ ID NO: 144771 - DNA, 25 bp, Saccharomyces pastorianus
gaagttccaggattttgatgcacag

SEQ ID NO: 144772 - DNA, 25 bp, Saccharomyces pastorianus
aatgggtgactttccgaagttccag

SEQ ID NO: 144773 - DNA, 25 bp, Saccharomyces pastorianus
tgatcctcgtcgtctaaacgtgggt

SEQ ID NO: 144774 - DNA, 25 bp, Saccharomyces pastorianus
gtatggtgtcattcagtggtcaaat

SEQ ID NO: 144775 - DNA, 25 bp, Saccharomyces pastorianus
gtcatgtattacaacgtccgttatc

SEQ ID NO: 144776 - DNA, 25 bp, Saccharomyces pastorianus
tagcttccaggacacattcacatta

SEQ ID NO: 144777 - DNA, 25 bp, Saccharomyces pastorianus
atctttaattcaaggcccaccaggc

SEQ ID NO: 144778 - DNA, 25 bp, Saccharomyces pastorianus
gcatctttcactttatctactttcg

SEQ ID NO: 144779 - DNA, 25 bp, Saccharomyces pastorianus
tatttctgtttcatggtccttagct

SEQ ID NO: 144780 - DNA, 25 bp, Saccharomyces pastorianus
ttcatttgatgtcccattacctaag

SEQ ID NO: 144781 - DNA, 25 bp, Saccharomyces pastorianus
aattaaactcatcccagtcgaacgc

SEQ ID NO: 144782 - DNA, 25 bp, Saccharomyces pastorianus
agtcgaacgctgttagtcatgtatt

SEQ ID NO: 144783 - DNA, 25 bp, Saccharomyces pastorianus
aggtacctcttatgacaggatgcaa

SEQ ID NO: 144784 - DNA, 25 bp, Saccharomyces pastorianus
ctccaacacatttgaccactggttt

SEQ ID NO: 144785 - DNA, 25 bp, Saccharomyces pastorianus
tgttcggttaccaaatagcttccag

SEQ ID NO: 144786 - DNA, 25 bp, Saccharomyces pastorianus
tgaaagctggtgactgggttgccat

SEQ ID NO: 144787 - DNA, 25 bp, Saccharomyces pastorianus
aagccgctatttctctatctacgga

SEQ ID NO: 144788 - DNA, 25 bp, Saccharomyces pastorianus
gacttggccgaagtagccccaatat

SEQ ID NO: 144789 - DNA, 25 bp, Saccharomyces pastorianus
tggcttgggttccttggccgttcaa

SEQ ID NO: 144790 - DNA, 25 bp, Saccharomyces pastorianus
ttggtttgcccgctaacgcctacgt

SEQ ID NO: 144791 - DNA, 25 bp, Saccharomyces pastorianus
agaccatgtggtaccgtcgttttgg

SEQ ID NO: 144792 - DNA, 25 bp, Saccharomyces pastorianus
gtattctctcatgtggtgaagtcca

SEQ ID NO: 144793 - DNA, 25 bp, Saccharomyces pastorianus
ggtgaagtccatcaatatcaagggt

SEQ ID NO: 144794 - DNA, 25 bp, Saccharomyces pastorianus
aacgcctacgttaaatcagaggtat

SEQ ID NO: 144795 - DNA, 25 bp, Saccharomyces pastorianus
gtagccccaatattatgtgctggtg

SEQ ID NO: 144796 - DNA, 25 bp, Saccharomyces pastorianus
ggccgttcaatatgcaactgcgatg

SEQ ID NO: 144797 - DNA, 25 bp, Saccharomyces pastorianus
caagccttaactatagtcccaagcc

SEQ ID NO: 144798 - DNA, 25 bp, Saccharomyces pastorianus
gagtcttagctgtggcatctgataa

SEQ ID NO: 144799 - DNA, 25 bp, Saccharomyces pastorianus
tatacttctcaatacatcgctttag

SEQ ID NO: 144800 - DNA, 25 bp, Saccharomyces pastorianus
aaggatgctttttcgcccaaaatcg

SEQ ID NO: 144801 - DNA, 25 bp, Saccharomyces pastorianus
gataatccgccaattatcgcctttg

SEQ ID NO: 144802 - DNA, 25 bp, Saccharomyces pastorianus
atcgctttagtcatgattgccctat

SEQ ID NO: 144803 - DNA, 25 bp, Saccharomyces pastorianus
gattgccctatggatgtcggaagat

SEQ ID NO: 144804 - DNA, 25 bp, Saccharomyces pastorianus
gaaagtattcttaccgacgagctag

SEQ ID NO: 144805 - DNA, 25 bp, Saccharomyces pastorianus
aaatcgcgtcttgcattgaccaaat

SEQ ID NO: 144806 - DNA, 25 bp, Saccharomyces pastorianus
tgaggtaccccaaaccgtagattgt

SEQ ID NO: 144807 - DNA, 25 bp, Saccharomyces pastorianus
tctgctttggaaggcgcctcgaaga

SEQ ID NO: 144808 - DNA, 25 bp, Saccharomyces pastorianus
gaacggcgaaaacaggctcccacaa

SEQ ID NO: 144809 - DNA, 25 bp, Saccharomyces pastorianus
caagcacaggaagtcagcgttacaa

SEQ ID NO: 144810 - DNA, 25 bp, Saccharomyces pastorianus
aataatgtggtttcccctggagtct

SEQ ID NO: 144811 - DNA, 25 bp, Saccharomyces pastorianus
agatgagtcccaatttttcaaccaa

SEQ ID NO: 144812 - DNA, 25 bp, Saccharomyces pastorianus
aagtcctaatcatactaccaccgat

SEQ ID NO: 144813 - DNA, 25 bp, Saccharomyces pastorianus
caccgatcctgccattacaagtaaa

SEQ ID NO: 144814 - DNA, 25 bp, Saccharomyces pastorianus
gaccaataggttacgcttctctagt

SEQ ID NO: 144815 - DNA, 25 bp, Saccharomyces pastorianus
caagatttgcggattcagactcaga

SEQ ID NO: 144816 - DNA, 25 bp, Saccharomyces pastorianus
attcaaacccttcgatgaccaatag

SEQ ID NO: 144817 - DNA, 25 bp, Saccharomyces pastorianus
aattcagcgggttatctttaagagc

SEQ ID NO: 144818 - DNA, 25 bp, Saccharomyces pastorianus
taacggtgctttttcgcttttcaag

SEQ ID NO: 144819 - DNA, 25 bp, Saccharomyces pastorianus
gagaatgacacaacatcgtctccca

SEQ ID NO: 144820 - DNA, 25 bp, Saccharomyces pastorianus
aaaataaccgtcaagcatctactct

SEQ ID NO: 144821 - DNA, 25 bp, Saccharomyces pastorianus
gttcctctcattgaaacacaagttc

SEQ ID NO: 144822 - DNA, 25 bp, Saccharomyces pastorianus
agtagcagaacatcctcttccggag

SEQ ID NO: 144823 - DNA, 25 bp, Saccharomyces pastorianus
gaaaaaccttcttcactaaacattg

SEQ ID NO: 144824 - DNA, 25 bp, Saccharomyces pastorianus
ttccggaggccgaagtggatgacaa

SEQ ID NO: 144825 - DNA, 25 bp, Saccharomyces pastorianus
tctaactcttccgaatccgaaacag

SEQ ID NO: 144826 - DNA, 25 bp, Saccharomyces pastorianus
agaccttgatgaaaaatcccgctca

SEQ ID NO: 144827 - DNA, 25 bp, Saccharomyces pastorianus
attcggcccaaggatcagttgaaaa

SEQ ID NO: 144828 - DNA, 25 bp, Saccharomyces pastorianus
tagcggcagttattcggcccaagga

SEQ ID NO: 144829 - DNA, 25 bp, Saccharomyces pastorianus
gaacaacatttcttctagcggcagt

SEQ ID NO: 144830 - DNA, 25 bp, Saccharomyces pastorianus
gagtccctatttctttctaccaaag

SEQ ID NO: 144831 - DNA, 25 bp, Saccharomyces pastorianus
gttacagtgcatggaagccatcgtt

SEQ ID NO: 144832 - DNA, 25 bp, Saccharomyces pastorianus
aacttgtacaaggagagaatttctg

SEQ ID NO: 144833 - DNA, 25 bp, Saccharomyces pastorianus
tggaagccatcgttcagaagttgaa

SEQ ID NO: 144834 - DNA, 25 bp, Saccharomyces pastorianus
aaaatcctttatatgttacagtgca

SEQ ID NO: 144835 - DNA, 25 bp, Saccharomyces pastorianus
ggagatttcttgattattcattatt

SEQ ID NO: 144836 - DNA, 25 bp, Saccharomyces pastorianus
ttcagaagttgaacgagcacgaaaa

SEQ ID NO: 144837 - DNA, 25 bp, Saccharomyces pastorianus
gcatggaagccatcgttcagaagtt

SEQ ID NO: 144838 - DNA, 25 bp, Saccharomyces pastorianus
gaatttctgccgagagtccctattt

SEQ ID NO: 144839 - DNA, 25 bp, Saccharomyces pastorianus
tgccgagagtccctatttctttcta

SEQ ID NO: 144840 - DNA, 25 bp, Saccharomyces pastorianus
gagagaatttctgccgagagtccct

SEQ ID NO: 144841 - DNA, 25 bp, Saccharomyces pastorianus
accgatgattattatgcttctgaac

SEQ ID NO: 144842 - DNA, 25 bp, Saccharomyces pastorianus
gaaaacttgctggtgatcctattga

SEQ ID NO: 144843 - DNA, 25 bp, Saccharomyces pastorianus
atgatgtatcctgcttccgagaatg

SEQ ID NO: 144844 - DNA, 25 bp, Saccharomyces pastorianus
agggccttagaaaccatgatgtatc

SEQ ID NO: 144845 - DNA, 25 bp, Saccharomyces pastorianus
gaattctttgaacacaggccacatg

SEQ ID NO: 144846 - DNA, 25 bp, Saccharomyces pastorianus
gaagacgttttaagggctatcaccg

SEQ ID NO: 144847 - DNA, 25 bp, Saccharomyces pastorianus
tggtgctaaaatcattcgtggcggc

SEQ ID NO: 144848 - DNA, 25 bp, Saccharomyces pastorianus
aattggctctatcagcattctgctg

SEQ ID NO: 144849 - DNA, 25 bp, Saccharomyces pastorianus
gaatccacacagtcaaccactgttt

SEQ ID NO: 144850 - DNA, 25 bp, Saccharomyces pastorianus
cagcattctgctgcgtgtagtagat

SEQ ID NO: 144851 - DNA, 25 bp, Saccharomyces pastorianus
atagtcccagcgacacaagcattgt

SEQ ID NO: 144852 - DNA, 25 bp, Saccharomyces pastorianus
gattcagagggaggtctagcttccg

SEQ ID NO: 144853 - DNA, 25 bp, Saccharomyces pastorianus
aattatgcaattgatactgaggatt

SEQ ID NO: 144854 - DNA, 25 bp, Saccharomyces pastorianus
ggaggtctagcttccgaagttgaac

SEQ ID NO: 144855 - DNA, 25 bp, Saccharomyces pastorianus
cagagggaggtctagcttccgaagt

SEQ ID NO: 144856 - DNA, 25 bp, Saccharomyces pastorianus
gcaattgatactgaggatttagata

SEQ ID NO: 144857 - DNA, 25 bp, Saccharomyces pastorianus
ttcagagggaggtctagcttccgaa

SEQ ID NO: 144858 - DNA, 25 bp, Saccharomyces pastorianus
gggaggtctagcttccgaagttgaa

SEQ ID NO: 144859 - DNA, 25 bp, Saccharomyces pastorianus
agagggaggtctagcttccgaagtt

SEQ ID NO: 144860 - DNA, 25 bp, Saccharomyces pastorianus
tagcttccgaagttgaacatgagaa

SEQ ID NO: 144861 - DNA, 25 bp, Saccharomyces pastorianus
attcagagggaggtctagcttccga

SEQ ID NO: 144862 - DNA, 25 bp, Saccharomyces pastorianus
gaagcggtcaagatctactagcaac

SEQ ID NO: 144863 - DNA, 25 bp, Saccharomyces pastorianus
tttttaatttacgacacacaagaat

SEQ ID NO: 144864 - DNA, 25 bp, Saccharomyces pastorianus
gtttttaacaatatcatcgtaccta

SEQ ID NO: 144865 - DNA, 25 bp, Saccharomyces pastorianus
cttcgatgtcaagcaatagtttggc

SEQ ID NO: 144866 - DNA, 25 bp, Saccharomyces pastorianus
atcatcgtacctagagcattgttcg

SEQ ID NO: 144867 - DNA, 25 bp, Saccharomyces pastorianus
gctatcttttcggactttgaaccat

SEQ ID NO: 144868 - DNA, 25 bp, Saccharomyces pastorianus
aatcaagtggtggaacatcgaggaa

SEQ ID NO: 144869 - DNA, 25 bp, Saccharomyces pastorianus
gtacctagagcattgttcgatagta

SEQ ID NO: 144870 - DNA, 25 bp, Saccharomyces pastorianus
gagaacttttaaatcgttgtacata

SEQ ID NO: 144871 - DNA, 25 bp, Saccharomyces pastorianus
aataacataccttcgatgtcaagca

SEQ ID NO: 144872 - DNA, 25 bp, Saccharomyces pastorianus
atagtttggctatcttttcggactt

SEQ ID NO: 144873 - DNA, 25 bp, Saccharomyces pastorianus
ggactttgaaccatatcaagctaca

SEQ ID NO: 144874 - DNA, 25 bp, Saccharomyces pastorianus
aattctgacgaaaactcctcaccta

SEQ ID NO: 144875 - DNA, 25 bp, Saccharomyces pastorianus
gagcctgcggaagatcactgtgaga

SEQ ID NO: 144876 - DNA, 25 bp, Saccharomyces pastorianus
gacgagcttgacttacttaatgtaa

SEQ ID NO: 144877 - DNA, 25 bp, Saccharomyces pastorianus
cagtgttgcttttgacgagcttgac

SEQ ID NO: 144878 - DNA, 25 bp, Saccharomyces pastorianus
atggacgtaccttgataatgaactt

SEQ ID NO: 144879 - DNA, 25 bp, Saccharomyces pastorianus
tatggaatccatgaagagcctgcgg

SEQ ID NO: 144880 - DNA, 25 bp, Saccharomyces pastorianus
ctcacctagctccacaattaaaaac

SEQ ID NO: 144881 - DNA, 25 bp, Saccharomyces pastorianus
ataatgaacttcgactggcctactt

SEQ ID NO: 144882 - DNA, 25 bp, Saccharomyces pastorianus
atgggttcagagacaatcctggtaa

SEQ ID NO: 144883 - DNA, 25 bp, Saccharomyces pastorianus
aaaccatctttatgacggaacgctt

SEQ ID NO: 144884 - DNA, 25 bp, Saccharomyces pastorianus
gggagcaacgcacaaccaactaaca

SEQ ID NO: 144885 - DNA, 25 bp, Saccharomyces pastorianus
tttccagaaccggactagctgactt

SEQ ID NO: 144886 - DNA, 25 bp, Saccharomyces pastorianus
acgcctatcacgcatgaatcaaatt

SEQ ID NO: 144887 - DNA, 25 bp, Saccharomyces pastorianus
tagagtagcttacatcgacctgaat

SEQ ID NO: 144888 - DNA, 25 bp, Saccharomyces pastorianus
accggactagctgactttacaagat

SEQ ID NO: 144889 - DNA, 25 bp, Saccharomyces pastorianus
agaaccggactagctgactttacaa

SEQ ID NO: 144890 - DNA, 25 bp, Saccharomyces pastorianus
acgtagagtagcttacatcgacctg

SEQ ID NO: 144891 - DNA, 25 bp, Saccharomyces pastorianus
agctgactttacaagatgggacaac

SEQ ID NO: 144892 - DNA, 25 bp, Saccharomyces pastorianus
gaatcaaatttccagaaccggacta

SEQ ID NO: 144893 - DNA, 25 bp, Saccharomyces pastorianus
aaaatacgcctatcacgcatgaatc

SEQ ID NO: 144894 - DNA, 25 bp, Saccharomyces pastorianus
gatgggacaacttgcaaaagcttgt

SEQ ID NO: 144895 - DNA, 25 bp, Saccharomyces pastorianus
gcaaaagcttgtattacgtagagta

SEQ ID NO: 144896 - DNA, 25 bp, Saccharomyces pastorianus
caggatggagacgatttcactttat

SEQ ID NO: 144897 - DNA, 25 bp, Saccharomyces pastorianus
gaggctctcagactatatgctatgg

SEQ ID NO: 144898 - DNA, 25 bp, Saccharomyces pastorianus
ggtgatcaatctttactatctccag

SEQ ID NO: 144899 - DNA, 25 bp, Saccharomyces pastorianus
gtacatgggtttccattccaataaa

SEQ ID NO: 144900 - DNA, 25 bp, Saccharomyces pastorianus
aacaagtgggcataggaggctctca

SEQ ID NO: 144901 - DNA, 25 bp, Saccharomyces pastorianus
cgttgtggccaaattttagcttctt

SEQ ID NO: 144902 - DNA, 25 bp, Saccharomyces pastorianus
atatgttttccttacacttcaagaa

SEQ ID NO: 144903 - DNA, 25 bp, Saccharomyces pastorianus
gtacctgatgattctcaaatggtcc

SEQ ID NO: 144904 - DNA, 25 bp, Saccharomyces pastorianus
atgttacatactattcgtgattcag

SEQ ID NO: 144905 - DNA, 25 bp, Saccharomyces pastorianus
gagccaaggactataaggatccctt

SEQ ID NO: 144906 - DNA, 25 bp, Saccharomyces pastorianus
agcttctttgctatgtacctgatga

SEQ ID NO: 144907 - DNA, 25 bp, Saccharomyces pastorianus
caaagaacagatgtgcttcgcagtg

SEQ ID NO: 144908 - DNA, 25 bp, Saccharomyces pastorianus
gtagaaaccaaagaacagatgtgct

SEQ ID NO: 144909 - DNA, 25 bp, Saccharomyces pastorianus
attcagattcagtttgtagccctaa

SEQ ID NO: 144910 - DNA, 25 bp, Saccharomyces pastorianus
gtgcttcgcagtgaaaagtatattt

SEQ ID NO: 144911 - DNA, 25 bp, Saccharomyces pastorianus
tcagattcagtttgtagccctaaaa

SEQ ID NO: 144912 - DNA, 25 bp, Saccharomyces pastorianus
cagagagtatttgagtgggttatgt

SEQ ID NO: 144913 - DNA, 25 bp, Saccharomyces pastorianus
gagtgggttatgtcattaagcttgt

SEQ ID NO: 144914 - DNA, 25 bp, Saccharomyces pastorianus
ggttatgtcattaagcttgttttca

SEQ ID NO: 144915 - DNA, 25 bp, Saccharomyces pastorianus
gattcagtttgtagccctaaaaagg

SEQ ID NO: 144916 - DNA, 25 bp, Saccharomyces pastorianus
gaacagatgtgcttcgcagtgaaaa

SEQ ID NO: 144917 - DNA, 25 bp, Saccharomyces pastorianus
gatgtgcttcgcagtgaaaagtata

SEQ ID NO: 144918 - DNA, 25 bp, Saccharomyces pastorianus
gagaacgttcctgttatgtacaaga

SEQ ID NO: 144919 - DNA, 25 bp, Saccharomyces pastorianus
cactgtgtgattttgggctttgcaa

SEQ ID NO: 144920 - DNA, 25 bp, Saccharomyces pastorianus
gacccaagcagaagactcggcgtta

SEQ ID NO: 144921 - DNA, 25 bp, Saccharomyces pastorianus
gtggtactcccgaatatttggcacc

SEQ ID NO: 144922 - DNA, 25 bp, Saccharomyces pastorianus
gaaaattctgcagcaaccgctacta

SEQ ID NO: 144923 - DNA, 25 bp, Saccharomyces pastorianus
gaccctgcggctaaagacctattaa

SEQ ID NO: 144924 - DNA, 25 bp, Saccharomyces pastorianus
gcaaccgctactatttcctgatgga

SEQ ID NO: 144925 - DNA, 25 bp, Saccharomyces pastorianus
tttcctgatggatttgaccctgcgg

SEQ ID NO: 144926 - DNA, 25 bp, Saccharomyces pastorianus
ttgaagggctatattccgccttaca

SEQ ID NO: 144927 - DNA, 25 bp, Saccharomyces pastorianus
acagggctgccaccatactatgatg

SEQ ID NO: 144928 - DNA, 25 bp, Saccharomyces pastorianus
gacctattaattggcctcttaagca

SEQ ID NO: 144929 - DNA, 25 bp, Saccharomyces pastorianus
atgtctttgcaaggattccatccct

SEQ ID NO: 144930 - DNA, 25 bp, Saccharomyces pastorianus
attccttcctctatattgttacctg

SEQ ID NO: 144931 - DNA, 25 bp, Saccharomyces pastorianus
ttcatcatccaatgacgcttccgaa

SEQ ID NO: 144932 - DNA, 25 bp, Saccharomyces pastorianus
tttaccctctaaaaactggcaacag

SEQ ID NO: 144933 - DNA, 25 bp, Saccharomyces pastorianus
tttgccactaaattcattccttcct

SEQ ID NO: 144934 - DNA, 25 bp, Saccharomyces pastorianus
aggatatccatttggactccttcca

SEQ ID NO: 144935 - DNA, 25 bp, Saccharomyces pastorianus
aaatcgattctgcagcccaaataag

SEQ ID NO: 144936 - DNA, 25 bp, Saccharomyces pastorianus
taagttccggcatccttacttcatc

SEQ ID NO: 144937 - DNA, 25 bp, Saccharomyces pastorianus
taatgcggcagctaccacgatacaa

SEQ ID NO: 144938 - DNA, 25 bp, Saccharomyces pastorianus
gacgcttccgaagttgcagccataa

SEQ ID NO: 144939 - DNA, 25 bp, Saccharomyces pastorianus
tcacgcggactacaaaccttctaag

SEQ ID NO: 144940 - DNA, 25 bp, Saccharomyces pastorianus
ggagattacccgcagaagtagaaat

SEQ ID NO: 144941 - DNA, 25 bp, Saccharomyces pastorianus
taggacacatcagcaagagaacttg

SEQ ID NO: 144942 - DNA, 25 bp, Saccharomyces pastorianus
gaatgttgacatctctaacatgtcg

SEQ ID NO: 144943 - DNA, 25 bp, Saccharomyces pastorianus
cttgcagagcatgagaagatcttcc

SEQ ID NO: 144944 - DNA, 25 bp, Saccharomyces pastorianus
gtaccgtcaacctaggacacatcag

SEQ ID NO: 144945 - DNA, 25 bp, Saccharomyces pastorianus
gaagatcttccataggatcacagga

SEQ ID NO: 144946 - DNA, 25 bp, Saccharomyces pastorianus
gacagttccgatgttgaggacgtta

SEQ ID NO: 144947 - DNA, 25 bp, Saccharomyces pastorianus
gtcgcaaggtgagtttttaagactt

SEQ ID NO: 144948 - DNA, 25 bp, Saccharomyces pastorianus
tctctaacatgtcgcaaggtgagtt

SEQ ID NO: 144949 - DNA, 25 bp, Saccharomyces pastorianus
taggatcacaggacagttccgatgt

SEQ ID NO: 144950 - DNA, 25 bp, Saccharomyces pastorianus
tttcgaaagagtaccgtcaacctag

SEQ ID NO: 144951 - DNA, 25 bp, Saccharomyces pastorianus
tcgggaaacttctggatggctctaa

SEQ ID NO: 144952 - DNA, 25 bp, Saccharomyces pastorianus
gttgggtgccaacagcttacatgaa

SEQ ID NO: 144953 - DNA, 25 bp, Saccharomyces pastorianus
aaataataatatccctactcctcct

SEQ ID NO: 144954 - DNA, 25 bp, Saccharomyces pastorianus
agaagatctgttcctaatcctgctt

SEQ ID NO: 144955 - DNA, 25 bp, Saccharomyces pastorianus
ggatcaccatctgagttacctttaa

SEQ ID NO: 144956 - DNA, 25 bp, Saccharomyces pastorianus
caagcggttggtctctcgggaaact

SEQ ID NO: 144957 - DNA, 25 bp, Saccharomyces pastorianus
aacacctctgcaaacgttattccag

SEQ ID NO: 144958 - DNA, 25 bp, Saccharomyces pastorianus
agaacccatgtttgaagcggcttac

SEQ ID NO: 144959 - DNA, 25 bp, Saccharomyces pastorianus
ggatgttcctaaacccgttctgaat

SEQ ID NO: 144960 - DNA, 25 bp, Saccharomyces pastorianus
atgcgcttgctgctagggccaataa

SEQ ID NO: 144961 - DNA, 25 bp, Saccharomyces pastorianus
agcggcttacgatttttctggttca

SEQ ID NO: 144962 - DNA, 25 bp, Saccharomyces pastorianus
cagcttattgtctgtcatcaaaaga

SEQ ID NO: 144963 - DNA, 25 bp, Saccharomyces pastorianus
aagattcgatcactatggccaagga

SEQ ID NO: 144964 - DNA, 25 bp, Saccharomyces pastorianus
gggtcattgttctatcttcaagcag

SEQ ID NO: 144965 - DNA, 25 bp, Saccharomyces pastorianus
gatcaactggatccttcaattgcac

SEQ ID NO: 144966 - DNA, 25 bp, Saccharomyces pastorianus
gcacagtcaattgctctatctacct

SEQ ID NO: 144967 - DNA, 25 bp, Saccharomyces pastorianus
aatgaactccttgcagaagctgaaa

SEQ ID NO: 144968 - DNA, 25 bp, Saccharomyces pastorianus
ggcagacatgccaccaggacagata

SEQ ID NO: 144969 - DNA, 25 bp, Saccharomyces pastorianus
taaaagccgttagattcgtacgcaa

SEQ ID NO: 144970 - DNA, 25 bp, Saccharomyces pastorianus
gacagcgttattgcgtttgccaaaa

SEQ ID NO: 144971 - DNA, 25 bp, Saccharomyces pastorianus
gcacaaaaatgttacgacagcgtta

SEQ ID NO: 144972 - DNA, 25 bp, Saccharomyces pastorianus
aggacagatattgctatcacaggca

SEQ ID NO: 144973 - DNA, 25 bp, Saccharomyces pastorianus
ctacatgatataaggccgcctgcat

SEQ ID NO: 144974 - DNA, 25 bp, Saccharomyces pastorianus
ataccggagtctccagcaaactcac

SEQ ID NO: 144975 - DNA, 25 bp, Saccharomyces pastorianus
atgcgatcgctctcatgtcgattta

SEQ ID NO: 144976 - DNA, 25 bp, Saccharomyces pastorianus
tacctctttcggcacaaaaagtctg

SEQ ID NO: 144977 - DNA, 25 bp, Saccharomyces pastorianus
aggccgcctgcatcaaacttcaata

SEQ ID NO: 144978 - DNA, 25 bp, Saccharomyces pastorianus
cgctctcatgtcgatttattgtcag

SEQ ID NO: 144979 - DNA, 25 bp, Saccharomyces pastorianus
gcgttggatgaatgcgatcgctctc

SEQ ID NO: 144980 - DNA, 25 bp, Saccharomyces pastorianus
gatggcacctaaacccaatttgaaa

SEQ ID NO: 144981 - DNA, 25 bp, Saccharomyces pastorianus
gtggactacgaaccctgctcatata

SEQ ID NO: 144982 - DNA, 25 bp, Saccharomyces pastorianus
aactcgaccacagatggcacctaaa

SEQ ID NO: 144983 - DNA, 25 bp, Saccharomyces pastorianus
acttcaatacgcaagaatcggcccc

SEQ ID NO: 144984 - DNA, 25 bp, Saccharomyces pastorianus
ctgccactgctaccggtattaaggt

SEQ ID NO: 144985 - DNA, 25 bp, Saccharomyces pastorianus
tgctaccggtattaaggtcttttct

SEQ ID NO: 144986 - DNA, 25 bp, Saccharomyces pastorianus
gtctgcccaagatgaagttttctct

SEQ ID NO: 144987 - DNA, 25 bp, Saccharomyces pastorianus
acagatactggttggctgctgccac

SEQ ID NO: 144988 - DNA, 25 bp, Saccharomyces pastorianus
aaacagatactggttggctgctgcc

SEQ ID NO: 144989 - DNA, 25 bp, Saccharomyces pastorianus
atgttgtggaacttggccgctaaga

SEQ ID NO: 144990 - DNA, 25 bp, Saccharomyces pastorianus
cactgctaccggtattaaggtcttt

SEQ ID NO: 144991 - DNA, 25 bp, Saccharomyces pastorianus
tactggttggctgctgccactgcta

SEQ ID NO: 144992 - DNA, 25 bp, Saccharomyces pastorianus
ccaagatgaagttttctctttggct

SEQ ID NO: 144993 - DNA, 25 bp, Saccharomyces pastorianus
gatactggttggctgctgccactgc

SEQ ID NO: 144994 - DNA, 25 bp, Saccharomyces pastorianus
actttgtctgcccaagatgaagttt

SEQ ID NO: 144995 - DNA, 25 bp, Saccharomyces pastorianus
ctgctgacggtcaaactttgtttgc

SEQ ID NO: 144996 - DNA, 25 bp, Saccharomyces pastorianus
gatgacttgagaccagaatttgctg

SEQ ID NO: 144997 - DNA, 25 bp, Saccharomyces pastorianus
tttggcttggtctgctgacggtcaa

SEQ ID NO: 144998 - DNA, 25 bp, Saccharomyces pastorianus
tctttggacccacaatacttggtcg

SEQ ID NO: 144999 - DNA, 25 bp, Saccharomyces pastorianus
tgctggttacagcaaggccgctgaa

SEQ ID NO: 145000 - DNA, 25 bp, Saccharomyces pastorianus
agaaggctatgtacactttgtctgc

SEQ ID NO: 145001 - DNA, 25 bp, Saccharomyces pastorianus
cttggtctgctgacggtcaaacttt

SEQ ID NO: 145002 - DNA, 25 bp, Saccharomyces pastorianus
ctttggctttctctccaaacagata

SEQ ID NO: 145003 - DNA, 25 bp, Saccharomyces pastorianus
acagcaaggccgctgaaccacatgc

SEQ ID NO: 145004 - DNA, 25 bp, Saccharomyces pastorianus
gacccacaatacttggtcgatgact

SEQ ID NO: 145005 - DNA, 25 bp, Saccharomyces pastorianus
ttctctttggctttctctccaaaca

SEQ ID NO: 145006 - DNA, 25 bp, Saccharomyces pastorianus
ttgttgtccgcttcccgtgataaga

SEQ ID NO: 145007 - DNA, 25 bp, Saccharomyces pastorianus
gtgataagactttgatctcctggaa

SEQ ID NO: 145008 - DNA, 25 bp, Saccharomyces pastorianus
ggtgtcccagttagatctttcaagg

SEQ ID NO: 145009 - DNA, 25 bp, Saccharomyces pastorianus
actttgactgctgacggtgcttacg

SEQ ID NO: 145010 - DNA, 25 bp, Saccharomyces pastorianus
gttcccgtgacaagaccatcaaggt

SEQ ID NO: 145011 - DNA, 25 bp, Saccharomyces pastorianus
gatctcctggaagttgactggtgac

SEQ ID NO: 145012 - DNA, 25 bp, Saccharomyces pastorianus
ttacgctttgtctgcttcttgggac

SEQ ID NO: 145013 - DNA, 25 bp, Saccharomyces pastorianus
acaagtccgatgttatgtccgttga

SEQ ID NO: 145014 - DNA, 25 bp, Saccharomyces pastorianus
gatctttcaagggtcacagtcacat

SEQ ID NO: 145015 - DNA, 25 bp, Saccharomyces pastorianus
ggtttcccaagtcagagttgttcca

SEQ ID NO: 145016 - DNA, 25 bp, Saccharomyces pastorianus
tggctacttctgctggtcaaccaaa

SEQ ID NO: 145017 - DNA, 25 bp, Saccharomyces pastorianus
gattcttcgagtgtgtctttttctg

SEQ ID NO: 145018 - DNA, 25 bp, Saccharomyces pastorianus
gtaccgcatatggatggttcaccct

SEQ ID NO: 145019 - DNA, 25 bp, Saccharomyces pastorianus
acttccgccggatcaactagtggag

SEQ ID NO: 145020 - DNA, 25 bp, Saccharomyces pastorianus
aaatcagccccagttagctacgata

SEQ ID NO: 145021 - DNA, 25 bp, Saccharomyces pastorianus
ttagccaaaccgtatgaaccgttat

SEQ ID NO: 145022 - DNA, 25 bp, Saccharomyces pastorianus
gaagatagctctcagccaaagatga

SEQ ID NO: 145023 - DNA, 25 bp, Saccharomyces pastorianus
gatggttcaccctccaaaacaaaat

SEQ ID NO: 145024 - DNA, 25 bp, Saccharomyces pastorianus
agaggagacataacttccgccggat

SEQ ID NO: 145025 - DNA, 25 bp, Saccharomyces pastorianus
gaatctgataattttgtaccgcata

SEQ ID NO: 145026 - DNA, 25 bp, Saccharomyces pastorianus
aatggcaccaaaccaagttctatgg

SEQ ID NO: 145027 - DNA, 25 bp, Saccharomyces pastorianus
gcaccatcttttgacgattcttcga

SEQ ID NO: 145028 - DNA, 25 bp, Saccharomyces pastorianus
aatagagcgtccttgtcgactttct

SEQ ID NO: 145029 - DNA, 25 bp, Saccharomyces pastorianus
gtgaaagtgcagtcgccaatagagc

SEQ ID NO: 145030 - DNA, 25 bp, Saccharomyces pastorianus
agggcttctttgttacaatccatac

SEQ ID NO: 145031 - DNA, 25 bp, Saccharomyces pastorianus
aatccataccggaaagagatcccaa

SEQ ID NO: 145032 - DNA, 25 bp, Saccharomyces pastorianus
acgagtgcgctagagactggtttaa

SEQ ID NO: 145033 - DNA, 25 bp, Saccharomyces pastorianus
gaaatgtctcagatgctaccattaa

SEQ ID NO: 145034 - DNA, 25 bp, Saccharomyces pastorianus
aaatttaagacctacgagtgcgcta

SEQ ID NO: 145035 - DNA, 25 bp, Saccharomyces pastorianus
tcgactttctcatccacatttagtg

SEQ ID NO: 145036 - DNA, 25 bp, Saccharomyces pastorianus
atacgtgaccgcacaagaattcccc

SEQ ID NO: 145037 - DNA, 25 bp, Saccharomyces pastorianus
atgttttgcaattatccactcctca

SEQ ID NO: 145038 - DNA, 25 bp, Saccharomyces pastorianus
aacgaggtcgattttgatttcaata

SEQ ID NO: 145039 - DNA, 25 bp, Saccharomyces pastorianus
attccttccgtaactgtttctcaag

SEQ ID NO: 145040 - DNA, 25 bp, Saccharomyces pastorianus
ggatatccgcgaaggtgaccaggct

SEQ ID NO: 145041 - DNA, 25 bp, Saccharomyces pastorianus
cggtgtggcacctttcatgattaag

SEQ ID NO: 145042 - DNA, 25 bp, Saccharomyces pastorianus
gttaacagcctcatatctggaccgc

SEQ ID NO: 145043 - DNA, 25 bp, Saccharomyces pastorianus
gattagcatctgaaccgggcattat

SEQ ID NO: 145044 - DNA, 25 bp, Saccharomyces pastorianus
gatccttctaccgagtattgtgttg

SEQ ID NO: 145045 - DNA, 25 bp, Saccharomyces pastorianus
gcattgtcgactttacgaaccctaa

SEQ ID NO: 145046 - DNA, 25 bp, Saccharomyces pastorianus
tggaccgcgtaatcaaattcttgtg

SEQ ID NO: 145047 - DNA, 25 bp, Saccharomyces pastorianus
acgcagctcccaatttgttagatta

SEQ ID NO: 145048 - DNA, 25 bp, Saccharomyces pastorianus
gggcattatatctatcacttcttta

SEQ ID NO: 145049 - DNA, 25 bp, Saccharomyces pastorianus
ttaaacatacatcctattccttccg

SEQ ID NO: 145050 - DNA, 25 bp, Saccharomyces pastorianus
agaagatattcagtggtctcgcact

SEQ ID NO: 145051 - DNA, 25 bp, Saccharomyces pastorianus
gcaagcggtgacgataacggtacat

SEQ ID NO: 145052 - DNA, 25 bp, Saccharomyces pastorianus
aaccggttgctcaatatgacttcca

SEQ ID NO: 145053 - DNA, 25 bp, Saccharomyces pastorianus
gagtctatcgttgcggtaggctcag

SEQ ID NO: 145054 - DNA, 25 bp, Saccharomyces pastorianus
accgtttttgcaaccgcaggatgtg

SEQ ID NO: 145055 - DNA, 25 bp, Saccharomyces pastorianus
gccaagtaatgctgacgccgtccaa

SEQ ID NO: 145056 - DNA, 25 bp, Saccharomyces pastorianus
gagccattacttccattgcattcaa

SEQ ID NO: 145057 - DNA, 25 bp, Saccharomyces pastorianus
taagcaaatcccaggttgtttagta

SEQ ID NO: 145058 - DNA, 25 bp, Saccharomyces pastorianus
cacaattattgttcgttcactggca

SEQ ID NO: 145059 - DNA, 25 bp, Saccharomyces pastorianus
aaacctgctatctctgttaaagctt

SEQ ID NO: 145060 - DNA, 25 bp, Saccharomyces pastorianus
ggatttaagacagtttacgccaagt

SEQ ID NO: 145061 - DNA, 25 bp, Saccharomyces pastorianus
gatgatgttcaattatgtttcctga

SEQ ID NO: 145062 - DNA, 25 bp, Saccharomyces pastorianus
gcaagaaagtttacgatttccaacg

SEQ ID NO: 145063 - DNA, 25 bp, Saccharomyces pastorianus
tacgatttccaacggtgtcaaaatt

SEQ ID NO: 145064 - DNA, 25 bp, Saccharomyces pastorianus
gttcaattatgtttcctgaagattg

SEQ ID NO: 145065 - DNA, 25 bp, Saccharomyces pastorianus
tgatgttcaattatgtttcctgaag

SEQ ID NO: 145066 - DNA, 25 bp, Saccharomyces pastorianus
attatgtttcctgaagattgatacg

SEQ ID NO: 145067 - DNA, 25 bp, Saccharomyces pastorianus
cgatgatgttcaattatgtttcctg

SEQ ID NO: 145068 - DNA, 25 bp, Saccharomyces pastorianus
ttccaacggtgtcaaaatttacaat

SEQ ID NO: 145069 - DNA, 25 bp, Saccharomyces pastorianus
cggtgtcaaaatttacaatcataaa

SEQ ID NO: 145070 - DNA, 25 bp, Saccharomyces pastorianus
caacggtgtcaaaatttacaatcat

SEQ ID NO: 145071 - DNA, 25 bp, Saccharomyces pastorianus
gatgttcaattatgtttcctgaaga

SEQ ID NO: 145072 - DNA, 25 bp, Saccharomyces pastorianus
gatgggaaagaacttctgtccaccc

SEQ ID NO: 145073 - DNA, 25 bp, Saccharomyces pastorianus
gatagtggttggtacgcttgcattt

SEQ ID NO: 145074 - DNA, 25 bp, Saccharomyces pastorianus
gtggtaggataactctctttttgat

SEQ ID NO: 145075 - DNA, 25 bp, Saccharomyces pastorianus
acaggagttgccatatgttcatcaa

SEQ ID NO: 145076 - DNA, 25 bp, Saccharomyces pastorianus
aacgatcgaaatgagtcttctacaa

SEQ ID NO: 145077 - DNA, 25 bp, Saccharomyces pastorianus
ttctgtccaccccattaaaatttca

SEQ ID NO: 145078 - DNA, 25 bp, Saccharomyces pastorianus
actaccttgcgtgtattgaggctga

SEQ ID NO: 145079 - DNA, 25 bp, Saccharomyces pastorianus
tcatgttgaattttctccagaggat

SEQ ID NO: 145080 - DNA, 25 bp, Saccharomyces pastorianus
gaaagtctgaagcttcatcggatgt

SEQ ID NO: 145081 - DNA, 25 bp, Saccharomyces pastorianus
ggctgagactttaccactactttaa

SEQ ID NO: 145082 - DNA, 25 bp, Saccharomyces pastorianus
agacctgagtttggtactaccttgc

SEQ ID NO: 145083 - DNA, 25 bp, Saccharomyces pastorianus
gggccatctatctcccgatgaacta

SEQ ID NO: 145084 - DNA, 25 bp, Saccharomyces pastorianus
gaaagatttaatgctctacaatgcc

SEQ ID NO: 145085 - DNA, 25 bp, Saccharomyces pastorianus
aacaactgatttgaaattgctagag

SEQ ID NO: 145086 - DNA, 25 bp, Saccharomyces pastorianus
gcctgtgtagtccatattttgatga

SEQ ID NO: 145087 - DNA, 25 bp, Saccharomyces pastorianus
attgggccatctatctcccgatgaa

SEQ ID NO: 145088 - DNA, 25 bp, Saccharomyces pastorianus
acaatgcctgtgtagtccatatttt

SEQ ID NO: 145089 - DNA, 25 bp, Saccharomyces pastorianus
gaaaatgtcgaattgggccatctat

SEQ ID NO: 145090 - DNA, 25 bp, Saccharomyces pastorianus
gatttaatgctctacaatgcctgtg

SEQ ID NO: 145091 - DNA, 25 bp, Saccharomyces pastorianus
tcgaattgggccatctatctcccga

SEQ ID NO: 145092 - DNA, 25 bp, Saccharomyces pastorianus
ttgaaattgctagagttcgatgaaa

SEQ ID NO: 145093 - DNA, 25 bp, Saccharomyces pastorianus
aatgctctacaatgcctgtgtagtc

SEQ ID NO: 145094 - DNA, 25 bp, Saccharomyces pastorianus
attgaattacctccatcatttcgcg

SEQ ID NO: 145095 - DNA, 25 bp, Saccharomyces pastorianus
atcatttcgcgaacgtctgtcatag

SEQ ID NO: 145096 - DNA, 25 bp, Saccharomyces pastorianus
tctggctgcgtaatggcggaactgc

SEQ ID NO: 145097 - DNA, 25 bp, Saccharomyces pastorianus
tagtagatcctgagacctggtcctt

SEQ ID NO: 145098 - DNA, 25 bp, Saccharomyces pastorianus
ctgtggaatttctagctgacgtttt

SEQ ID NO: 145099 - DNA, 25 bp, Saccharomyces pastorianus
ttaggtactccatcaaagccagaaa

SEQ ID NO: 145100 - DNA, 25 bp, Saccharomyces pastorianus
aaatcgacatatggtcctctggctg

SEQ ID NO: 145101 - DNA, 25 bp, Saccharomyces pastorianus
cagagctaatcttcggcgcaacaaa

SEQ ID NO: 145102 - DNA, 25 bp, Saccharomyces pastorianus
gacctggtccttaaaactgtgcgat

SEQ ID NO: 145103 - DNA, 25 bp, Saccharomyces pastorianus
gcggaactgctattgggccaaccaa

SEQ ID NO: 145104 - DNA, 25 bp, Saccharomyces pastorianus
gaggttacgtcatttcgtccatcaa

SEQ ID NO: 145105 - DNA, 25 bp, Saccharomyces pastorianus
acctacgatagacccgaatgatccg

SEQ ID NO: 145106 - DNA, 25 bp, Saccharomyces pastorianus
tacgatagacccgaatgatccggtg

SEQ ID NO: 145107 - DNA, 25 bp, Saccharomyces pastorianus
ccaccgaagtagttgggcatggttc

SEQ ID NO: 145108 - DNA, 25 bp, Saccharomyces pastorianus
agcaataattctccgaatctcagta

SEQ ID NO: 145109 - DNA, 25 bp, Saccharomyces pastorianus
ccgaatctcagtaataacatagtgt

SEQ ID NO: 145110 - DNA, 25 bp, Saccharomyces pastorianus
tccctaccaccgaagtagttgggca

SEQ ID NO: 145111 - DNA, 25 bp, Saccharomyces pastorianus
tccacctacgatagacccgaatgat

SEQ ID NO: 145112 - DNA, 25 bp, Saccharomyces pastorianus
gatatctttccctaccaccgaagta

SEQ ID NO: 145113 - DNA, 25 bp, Saccharomyces pastorianus
aattctccgaatctcagtaataaca

SEQ ID NO: 145114 - DNA, 25 bp, Saccharomyces pastorianus
tctttccctaccaccgaagtagttg

SEQ ID NO: 145115 - DNA, 25 bp, Saccharomyces pastorianus
ggtgcagatatctttccctaccacc

SEQ ID NO: 145116 - DNA, 25 bp, Saccharomyces pastorianus
aagaccctccaattgcctaaaatga

SEQ ID NO: 145117 - DNA, 25 bp, Saccharomyces pastorianus
aatcaaacgattctgcaactggctg

SEQ ID NO: 145118 - DNA, 25 bp, Saccharomyces pastorianus
gatgaaattgacgatgattctggaa

SEQ ID NO: 145119 - DNA, 25 bp, Saccharomyces pastorianus
ttacgtgcagtcctgaaatgggaag

SEQ ID NO: 145120 - DNA, 25 bp, Saccharomyces pastorianus
ttctgcaactggctgcagggagtat

SEQ ID NO: 145121 - DNA, 25 bp, Saccharomyces pastorianus
ggaaattacgtgcagtcctgaaatg

SEQ ID NO: 145122 - DNA, 25 bp, Saccharomyces pastorianus
acacacaatcgaccaaatactaaag

SEQ ID NO: 145123 - DNA, 25 bp, Saccharomyces pastorianus
atgggaataagaccctccaattgcc

SEQ ID NO: 145124 - DNA, 25 bp, Saccharomyces pastorianus
gactattacacacaatcgaccaaat

SEQ ID NO: 145125 - DNA, 25 bp, Saccharomyces pastorianus
gagtcaattcaggattcacatggga

SEQ ID NO: 145126 - DNA, 25 bp, Saccharomyces pastorianus
gcagggagtataagcaacgattgta

SEQ ID NO: 145127 - DNA, 25 bp, Saccharomyces pastorianus
tagtccgatggattctgcgtacgcc

SEQ ID NO: 145128 - DNA, 25 bp, Saccharomyces pastorianus
cgtttgcgtcttcttatgcaagcaa

SEQ ID NO: 145129 - DNA, 25 bp, Saccharomyces pastorianus
gaaaacgccttcttcgactacaacg

SEQ ID NO: 145130 - DNA, 25 bp, Saccharomyces pastorianus
atggaagaagagcattcgcaacctt

SEQ ID NO: 145131 - DNA, 25 bp, Saccharomyces pastorianus
gtgtcagtttctattggaacgtcaa

SEQ ID NO: 145132 - DNA, 25 bp, Saccharomyces pastorianus
gttacgcatctgaaccaagctgtca

SEQ ID NO: 145133 - DNA, 25 bp, Saccharomyces pastorianus
agtaggcacatattctagtccgatg

SEQ ID NO: 145134 - DNA, 25 bp, Saccharomyces pastorianus
atgaacagggccgtttgcgtcttct

SEQ ID NO: 145135 - DNA, 25 bp, Saccharomyces pastorianus
tgaagtcggacatgttgaacacctt

SEQ ID NO: 145136 - DNA, 25 bp, Saccharomyces pastorianus
gcaatatctgatacctctcaaatag

SEQ ID NO: 145137 - DNA, 25 bp, Saccharomyces pastorianus
tcgcaaccttcatcttcacaagaga

SEQ ID NO: 145138 - DNA, 25 bp, Saccharomyces pastorianus
gaaacagagttcttgtcgctatgga

SEQ ID NO: 145139 - DNA, 25 bp, Saccharomyces pastorianus
gacccatgccaaagacgattcagaa

SEQ ID NO: 145140 - DNA, 25 bp, Saccharomyces pastorianus
gctcaagttgcccaccaagaaggtg

SEQ ID NO: 145141 - DNA, 25 bp, Saccharomyces pastorianus
gggtgctctggcttatattggttca

SEQ ID NO: 145142 - DNA, 25 bp, Saccharomyces pastorianus
caacttttgggtgctaagggatcta

SEQ ID NO: 145143 - DNA, 25 bp, Saccharomyces pastorianus
atttggcaatgtgtctatcctttag

SEQ ID NO: 145144 - DNA, 25 bp, Saccharomyces pastorianus
agggatctatttttgctatcggcga

SEQ ID NO: 145145 - DNA, 25 bp, Saccharomyces pastorianus
tgacgctaccactataactgccaaa

SEQ ID NO: 145146 - DNA, 25 bp, Saccharomyces pastorianus
ctcattcaccttcctattctggaaa

SEQ ID NO: 145147 - DNA, 25 bp, Saccharomyces pastorianus
tgctatcggcgattgtaccttccac

SEQ ID NO: 145148 - DNA, 25 bp, Saccharomyces pastorianus
ccaaatataggttagccggctcatt

SEQ ID NO: 145149 - DNA, 25 bp, Saccharomyces pastorianus
cattaatgaaaacagtgtgggctaa

SEQ ID NO: 145150 - DNA, 25 bp, Saccharomyces pastorianus
ttaatgaaaacagtgtgggctaact

SEQ ID NO: 145151 - DNA, 25 bp, Saccharomyces pastorianus
aatcattaatgaaaacagtgtgggc

SEQ ID NO: 145152 - DNA, 25 bp, Saccharomyces pastorianus
taatgaaaacagtgtgggctaactc

SEQ ID NO: 145153 - DNA, 25 bp, Saccharomyces pastorianus
attaatgaaaacagtgtgggctaac

SEQ ID NO: 145154 - DNA, 25 bp, Saccharomyces pastorianus
tgaaaacagtgtgggctaactcctc

SEQ ID NO: 145155 - DNA, 25 bp, Saccharomyces pastorianus
aatgaaaacagtgtgggctaactcc

SEQ ID NO: 145156 - DNA, 25 bp, Saccharomyces pastorianus
gaaaacagtgtgggctaactcctcc

SEQ ID NO: 145157 - DNA, 25 bp, Saccharomyces pastorianus
atgaaaacagtgtgggctaactcct

SEQ ID NO: 145158 - DNA, 25 bp, Saccharomyces pastorianus
tcattaatgaaaacagtgtgggcta

SEQ ID NO: 145159 - DNA, 25 bp, Saccharomyces pastorianus
atcattaatgaaaacagtgtgggct

SEQ ID NO: 145160 - DNA, 25 bp, Saccharomyces pastorianus
gatttcttccctgtcattgatcaat

SEQ ID NO: 145161 - DNA, 25 bp, Saccharomyces pastorianus
aaaaactacttcaacatcggcactg

SEQ ID NO: 145162 - DNA, 25 bp, Saccharomyces pastorianus
acctctgtgtcatatgcttttgtcc

SEQ ID NO: 145163 - DNA, 25 bp, Saccharomyces pastorianus
atcggcactgttgttggcatttgta

SEQ ID NO: 145164 - DNA, 25 bp, Saccharomyces pastorianus
attccgtctacgagtttgatcaata

SEQ ID NO: 145165 - DNA, 25 bp, Saccharomyces pastorianus
aagttctggttattggcgcttcaac

SEQ ID NO: 145166 - DNA, 25 bp, Saccharomyces pastorianus
ggttccctatgacgaaggatccatc

SEQ ID NO: 145167 - DNA, 25 bp, Saccharomyces pastorianus
gtgggtaaccatgatttcttccctg

SEQ ID NO: 145168 - DNA, 25 bp, Saccharomyces pastorianus
atacaactggcgctttggacaccct

SEQ ID NO: 145169 - DNA, 25 bp, Saccharomyces pastorianus
ttataagccgcctattgattccgtc

SEQ ID NO: 145170 - DNA, 25 bp, Saccharomyces pastorianus
ggatatgactacttggttccctatg

SEQ ID NO: 145171 - DNA, 25 bp, Saccharomyces pastorianus
ttcctcattcgattgctgatgcaac

SEQ ID NO: 145172 - DNA, 25 bp, Saccharomyces pastorianus
atgttggtcatgcttttgggtagat

SEQ ID NO: 145173 - DNA, 25 bp, Saccharomyces pastorianus
aagagaacttcaaggccggtgacaa

SEQ ID NO: 145174 - DNA, 25 bp, Saccharomyces pastorianus
gtagttgtgaactttcctcattcga

SEQ ID NO: 145175 - DNA, 25 bp, Saccharomyces pastorianus
caaggccggtgacaagctagtagtt

SEQ ID NO: 145176 - DNA, 25 bp, Saccharomyces pastorianus
ggtcatgcttttgggtagatatttc

SEQ ID NO: 145177 - DNA, 25 bp, Saccharomyces pastorianus
aaatgaggtttctatagtgtctaaa

SEQ ID NO: 145178 - DNA, 25 bp, Saccharomyces pastorianus
gagtggctctgacgtctgtaaatat

SEQ ID NO: 145179 - DNA, 25 bp, Saccharomyces pastorianus
tgttccgaggaaattgagtggctct

SEQ ID NO: 145180 - DNA, 25 bp, Saccharomyces pastorianus
gaactttcctcattcgattgctgat

SEQ ID NO: 145181 - DNA, 25 bp, Saccharomyces pastorianus
gtgtctaaaatctttgttccgagga

SEQ ID NO: 145182 - DNA, 25 bp, Saccharomyces pastorianus
ggatccacgcccaataaatctacaa

SEQ ID NO: 145183 - DNA, 25 bp, Saccharomyces pastorianus
aaatgcgtctgacctggtgggttcc

SEQ ID NO: 145184 - DNA, 25 bp, Saccharomyces pastorianus
tcaaggagagcatcttctgcagccg

SEQ ID NO: 145185 - DNA, 25 bp, Saccharomyces pastorianus
aaagctctctgtgtcaaaggccggc

SEQ ID NO: 145186 - DNA, 25 bp, Saccharomyces pastorianus
gcaaattcagtcaaaaccgccaagg

SEQ ID NO: 145187 - DNA, 25 bp, Saccharomyces pastorianus
gtgggttcccatagtagctcaggat

SEQ ID NO: 145188 - DNA, 25 bp, Saccharomyces pastorianus
tttggagctaggttctccacttgca

SEQ ID NO: 145189 - DNA, 25 bp, Saccharomyces pastorianus
tctgcagccgcgactagtatcgata

SEQ ID NO: 145190 - DNA, 25 bp, Saccharomyces pastorianus
caaggtcactaaagccccgcaaaga

SEQ ID NO: 145191 - DNA, 25 bp, Saccharomyces pastorianus
tttagccgcttcgtctgatgtagaa

SEQ ID NO: 145192 - DNA, 25 bp, Saccharomyces pastorianus
aaggccggcgctccaacaagaattg

SEQ ID NO: 145193 - DNA, 25 bp, Saccharomyces pastorianus
ggcagcaaactaccaaatgggcctg

SEQ ID NO: 145194 - DNA, 25 bp, Saccharomyces pastorianus
gggcctgtgattttatcacccgata

SEQ ID NO: 145195 - DNA, 25 bp, Saccharomyces pastorianus
atcacccgatagaacgatggctgcg

SEQ ID NO: 145196 - DNA, 25 bp, Saccharomyces pastorianus
actctatctaactgcaagaagtgct

SEQ ID NO: 145197 - DNA, 25 bp, Saccharomyces pastorianus
ggacgcacttgggtgtagccaagtt

SEQ ID NO: 145198 - DNA, 25 bp, Saccharomyces pastorianus
gttatttagcgagatctccaggaat

SEQ ID NO: 145199 - DNA, 25 bp, Saccharomyces pastorianus
ggacaagctgattccacgaggagtt

SEQ ID NO: 145200 - DNA, 25 bp, Saccharomyces pastorianus
gcgagatctccaggaatggctataa

SEQ ID NO: 145201 - DNA, 25 bp, Saccharomyces pastorianus
gaagtgctggacaagctgattccac

SEQ ID NO: 145202 - DNA, 25 bp, Saccharomyces pastorianus
ggctataatatactctatctaactg

SEQ ID NO: 145203 - DNA, 25 bp, Saccharomyces pastorianus
ccacgaggagttatttgcgatcaat

SEQ ID NO: 145204 - DNA, 25 bp, Saccharomyces pastorianus
agaggaagtttgttgagcagcgtac

SEQ ID NO: 145205 - DNA, 25 bp, Saccharomyces pastorianus
caccttctggttccgatactgagga

SEQ ID NO: 145206 - DNA, 25 bp, Saccharomyces pastorianus
tactgaatcctctacaacgacacca

SEQ ID NO: 145207 - DNA, 25 bp, Saccharomyces pastorianus
aattcgttatcttcttcaccttctg

SEQ ID NO: 145208 - DNA, 25 bp, Saccharomyces pastorianus
gtacgcctccaacaatggccacaag

SEQ ID NO: 145209 - DNA, 25 bp, Saccharomyces pastorianus
taacaatggcgacttactactagac

SEQ ID NO: 145210 - DNA, 25 bp, Saccharomyces pastorianus
tactgatttatctcctccaggtacg

SEQ ID NO: 145211 - DNA, 25 bp, Saccharomyces pastorianus
tggccacaagcggatcagttttagg

SEQ ID NO: 145212 - DNA, 25 bp, Saccharomyces pastorianus
gaaactacagggtcgctttctccta

SEQ ID NO: 145213 - DNA, 25 bp, Saccharomyces pastorianus
taaatccttacgagcaccttactga

SEQ ID NO: 145214 - DNA, 25 bp, Saccharomyces pastorianus
acgacaccaccagattcagttgaag

SEQ ID NO: 145215 - DNA, 25 bp, Saccharomyces pastorianus
tgaagctaaaatctctaccactact

SEQ ID NO: 145216 - DNA, 25 bp, Saccharomyces pastorianus
ggatgtcgtggaaatagccaacctt

SEQ ID NO: 145217 - DNA, 25 bp, Saccharomyces pastorianus
tatcctcattactagaacacgttct

SEQ ID NO: 145218 - DNA, 25 bp, Saccharomyces pastorianus
gcccctagacacattctcaaggatg

SEQ ID NO: 145219 - DNA, 25 bp, Saccharomyces pastorianus
gtcagaagacgaaaaagcccagttt

SEQ ID NO: 145220 - DNA, 25 bp, Saccharomyces pastorianus
tcaaacgaaggttcctggcccctag

SEQ ID NO: 145221 - DNA, 25 bp, Saccharomyces pastorianus
acctgatatggttccgaaagtcgat

SEQ ID NO: 145222 - DNA, 25 bp, Saccharomyces pastorianus
gattgcattactctatatacctgat

SEQ ID NO: 145223 - DNA, 25 bp, Saccharomyces pastorianus
gttctcttcccttgtatcaaacgaa

SEQ ID NO: 145224 - DNA, 25 bp, Saccharomyces pastorianus
aaaaggctacattccatctctggtc

SEQ ID NO: 145225 - DNA, 25 bp, Saccharomyces pastorianus
gatacatctgatgcatcgttgtcag

SEQ ID NO: 145226 - DNA, 25 bp, Saccharomyces pastorianus
gagctttgaacagcgtttactccaa

SEQ ID NO: 145227 - DNA, 25 bp, Saccharomyces pastorianus
atccggcggctgttgatgttaacgt

SEQ ID NO: 145228 - DNA, 25 bp, Saccharomyces pastorianus
gagtctccgacaagcccaagtggta

SEQ ID NO: 145229 - DNA, 25 bp, Saccharomyces pastorianus
gagagaggttcgtttcctgagccaa

SEQ ID NO: 145230 - DNA, 25 bp, Saccharomyces pastorianus
gatgttaacgttcacccgacaaaga

SEQ ID NO: 145231 - DNA, 25 bp, Saccharomyces pastorianus
gcgtttactccaattatctgccaaa

SEQ ID NO: 145232 - DNA, 25 bp, Saccharomyces pastorianus
gaattgttatagatccggcggctgt

SEQ ID NO: 145233 - DNA, 25 bp, Saccharomyces pastorianus
aattgcacgccgaattatctgccat

SEQ ID NO: 145234 - DNA, 25 bp, Saccharomyces pastorianus
gactagtgacatgtgatcctctaag

SEQ ID NO: 145235 - DNA, 25 bp, Saccharomyces pastorianus
tcacgtactttcaaggcttcttcaa

SEQ ID NO: 145236 - DNA, 25 bp, Saccharomyces pastorianus
atctgccattgatacttcacgtact

SEQ ID NO: 145237 - DNA, 25 bp, Saccharomyces pastorianus
ttgatcgatggctttcctcttattc

SEQ ID NO: 145238 - DNA, 25 bp, Saccharomyces pastorianus
tattccagtatcatactcttcccat

SEQ ID NO: 145239 - DNA, 25 bp, Saccharomyces pastorianus
agcctccacttgttaccatacttgg

SEQ ID NO: 145240 - DNA, 25 bp, Saccharomyces pastorianus
catacttggcctcaagatgcttgat

SEQ ID NO: 145241 - DNA, 25 bp, Saccharomyces pastorianus
tattgagcctccacttgttaccata

SEQ ID NO: 145242 - DNA, 25 bp, Saccharomyces pastorianus
gtacaatctttttcgccttgaaaag

SEQ ID NO: 145243 - DNA, 25 bp, Saccharomyces pastorianus
acttgtacaatctttttcgccttga

SEQ ID NO: 145244 - DNA, 25 bp, Saccharomyces pastorianus
gtatcatactcttcccatatagtct

SEQ ID NO: 145245 - DNA, 25 bp, Saccharomyces pastorianus
cttatttttattgagcctccacttg

SEQ ID NO: 145246 - DNA, 25 bp, Saccharomyces pastorianus
agatgcttgatcgatggctttcctc

SEQ ID NO: 145247 - DNA, 25 bp, Saccharomyces pastorianus
tggctttcctcttattccagtatca

SEQ ID NO: 145248 - DNA, 25 bp, Saccharomyces pastorianus
gaccctttcatttatctcaacgtta

SEQ ID NO: 145249 - DNA, 25 bp, Saccharomyces pastorianus
gagccagaaaccatattgcctctac

SEQ ID NO: 145250 - DNA, 25 bp, Saccharomyces pastorianus
ccagggtaaattggcttatctgatt

SEQ ID NO: 145251 - DNA, 25 bp, Saccharomyces pastorianus
acctgtcttagtattgtgaggccaa

SEQ ID NO: 145252 - DNA, 25 bp, Saccharomyces pastorianus
ttgcctctacttgcagaattttatg

SEQ ID NO: 145253 - DNA, 25 bp, Saccharomyces pastorianus
ggatttgatttacttccctttgagt

SEQ ID NO: 145254 - DNA, 25 bp, Saccharomyces pastorianus
agtgccgtacacttgatacatgatt

SEQ ID NO: 145255 - DNA, 25 bp, Saccharomyces pastorianus
aaaggacttacaacgctatgtgaat

SEQ ID NO: 145256 - DNA, 25 bp, Saccharomyces pastorianus
aattcgcgatatgctggattgtgta

SEQ ID NO: 145257 - DNA, 25 bp, Saccharomyces pastorianus
gggtgtctcggatagaattcgcgat

SEQ ID NO: 145258 - DNA, 25 bp, Saccharomyces pastorianus
gtatgtgccttcaaatcaacgccag

SEQ ID NO: 145259 - DNA, 25 bp, Saccharomyces pastorianus
atatgaaacgcctcgatggcacacc

SEQ ID NO: 145260 - DNA, 25 bp, Saccharomyces pastorianus
ttagggagccaatcctttcgaagtt

SEQ ID NO: 145261 - DNA, 25 bp, Saccharomyces pastorianus
ggtatagatgctaatttgtctccta

SEQ ID NO: 145262 - DNA, 25 bp, Saccharomyces pastorianus
aaggcagtgcttacgcaaacatttt

SEQ ID NO: 145263 - DNA, 25 bp, Saccharomyces pastorianus
ttgtctcctacgatgaaaattccat

SEQ ID NO: 145264 - DNA, 25 bp, Saccharomyces pastorianus
caacggaggctcatcgaaagtaaaa

SEQ ID NO: 145265 - DNA, 25 bp, Saccharomyces pastorianus
gattgtgttacatttgcagttgcct

SEQ ID NO: 145266 - DNA, 25 bp, Saccharomyces pastorianus
gcctaataggtactcttcacaaatg

SEQ ID NO: 145267 - DNA, 25 bp, Saccharomyces pastorianus
gagaggtcttctgactacctgagag

SEQ ID NO: 145268 - DNA, 25 bp, Saccharomyces pastorianus
cagcttgattgatttcgttttgggt

SEQ ID NO: 145269 - DNA, 25 bp, Saccharomyces pastorianus
aagtgacttattgcctatctcattg

SEQ ID NO: 145270 - DNA, 25 bp, Saccharomyces pastorianus
aatgccttagtagcaggtcaaccaa

SEQ ID NO: 145271 - DNA, 25 bp, Saccharomyces pastorianus
taaattctggcctactgtcgctaga

SEQ ID NO: 145272 - DNA, 25 bp, Saccharomyces pastorianus
gcttacccattaccctttttgagat

SEQ ID NO: 145273 - DNA, 25 bp, Saccharomyces pastorianus
tcgctagactggatgacacttatgg

SEQ ID NO: 145274 - DNA, 25 bp, Saccharomyces pastorianus
ctgttcccggaactttgatgataga

SEQ ID NO: 145275 - DNA, 25 bp, Saccharomyces pastorianus
gtgaagaagccgcttacccattacc

SEQ ID NO: 145276 - DNA, 25 bp, Saccharomyces pastorianus
gaaaaatgcccctcattcattggaa

SEQ ID NO: 145277 - DNA, 25 bp, Saccharomyces pastorianus
aaacactgcgctcatgaatttatag

SEQ ID NO: 145278 - DNA, 25 bp, Saccharomyces pastorianus
attgcaagactacggattccatgcc

SEQ ID NO: 145279 - DNA, 25 bp, Saccharomyces pastorianus
tgaagctatcgatgttgccaagaga

SEQ ID NO: 145280 - DNA, 25 bp, Saccharomyces pastorianus
agatcttattacttcctccaattgg

SEQ ID NO: 145281 - DNA, 25 bp, Saccharomyces pastorianus
gatatcgtacattcttttggtggac

SEQ ID NO: 145282 - DNA, 25 bp, Saccharomyces pastorianus
gtcaactgtttgcaggatggctcat

SEQ ID NO: 145283 - DNA, 25 bp, Saccharomyces pastorianus
aatgcgcaggttgggctaacttcac

SEQ ID NO: 145284 - DNA, 25 bp, Saccharomyces pastorianus
gtaatgatcacctatccttctactt

SEQ ID NO: 145285 - DNA, 25 bp, Saccharomyces pastorianus
atcttggtgcagatgtttgccactt

SEQ ID NO: 145286 - DNA, 25 bp, Saccharomyces pastorianus
ataagacattctccattcctcatgg

SEQ ID NO: 145287 - DNA, 25 bp, Saccharomyces pastorianus
tgatcactggaatcggcggtagcaa

SEQ ID NO: 145288 - DNA, 25 bp, Saccharomyces pastorianus
gagggattaccattttctagtgtga

SEQ ID NO: 145289 - DNA, 25 bp, Saccharomyces pastorianus
agctggagctcccatttgcgtcaaa

SEQ ID NO: 145290 - DNA, 25 bp, Saccharomyces pastorianus
ggctcattagatctggttgacttaa

SEQ ID NO: 145291 - DNA, 25 bp, Saccharomyces pastorianus
tagcaaatccatcgattcggtctcc

SEQ ID NO: 145292 - DNA, 25 bp, Saccharomyces pastorianus
aatttgtttgccgtggacaccacca

SEQ ID NO: 145293 - DNA, 25 bp, Saccharomyces pastorianus
gtaccgctcaagctttactggctaa

SEQ ID NO: 145294 - DNA, 25 bp, Saccharomyces pastorianus
cttcgcagtttctttctgaggacta

SEQ ID NO: 145295 - DNA, 25 bp, Saccharomyces pastorianus
acgaagtctttcacatgcaccatag

SEQ ID NO: 145296 - DNA, 25 bp, Saccharomyces pastorianus
gttgcttcgagctactgtgtttatc

SEQ ID NO: 145297 - DNA, 25 bp, Saccharomyces pastorianus
gactattctaacagtttcccaaggg

SEQ ID NO: 145298 - DNA, 25 bp, Saccharomyces pastorianus
cactatttccttggctcttgatgaa

SEQ ID NO: 145299 - DNA, 25 bp, Saccharomyces pastorianus
gcggttggccctccaaacaagagaa

SEQ ID NO: 145300 - DNA, 25 bp, Saccharomyces pastorianus
gtaatggcatatcctccgagcagtt

SEQ ID NO: 145301 - DNA, 25 bp, Saccharomyces pastorianus
tgtttatcacggtcctaagggccta

SEQ ID NO: 145302 - DNA, 25 bp, Saccharomyces pastorianus
gaaaatgacagttgccctcacgaac

SEQ ID NO: 145303 - DNA, 25 bp, Saccharomyces pastorianus
atgggattgcccaaagtactggaac

SEQ ID NO: 145304 - DNA, 25 bp, Saccharomyces pastorianus
gcagcaaatcaggtacaaggtccat

SEQ ID NO: 145305 - DNA, 25 bp, Saccharomyces pastorianus
atctaagttttttggcgccaatcca

SEQ ID NO: 145306 - DNA, 25 bp, Saccharomyces pastorianus
gcgccaatccaaacgaagccaaaga

SEQ ID NO: 145307 - DNA, 25 bp, Saccharomyces pastorianus
gaatttgtgaacagggccgcagctt

SEQ ID NO: 145308 - DNA, 25 bp, Saccharomyces pastorianus
aagtcgtccaagaagtctgctaatg

SEQ ID NO: 145309 - DNA, 25 bp, Saccharomyces pastorianus
aagccacgatagcagatcttagcaa

SEQ ID NO: 145310 - DNA, 25 bp, Saccharomyces pastorianus
gattcggcttttgcaactttaggca

SEQ ID NO: 145311 - DNA, 25 bp, Saccharomyces pastorianus
gtatcgccgaaggttcaagtacttt

SEQ ID NO: 145312 - DNA, 25 bp, Saccharomyces pastorianus
gccgcagcttccagcaatgggattg

SEQ ID NO: 145313 - DNA, 25 bp, Saccharomyces pastorianus
aggtccatcagtaagtcgtccaaga

SEQ ID NO: 145314 - DNA, 25 bp, Saccharomyces pastorianus
attgtgtttgctgtctttcttgttt

SEQ ID NO: 145315 - DNA, 25 bp, Saccharomyces pastorianus
atacctgtcttaacggccatttctt

SEQ ID NO: 145316 - DNA, 25 bp, Saccharomyces pastorianus
gaaaatcgtcataacccgttcagtt

SEQ ID NO: 145317 - DNA, 25 bp, Saccharomyces pastorianus
acggccatttcttattgtgtttgct

SEQ ID NO: 145318 - DNA, 25 bp, Saccharomyces pastorianus
cactcatgttcttctcgtatttggg

SEQ ID NO: 145319 - DNA, 25 bp, Saccharomyces pastorianus
atgcactcatgttcttctcgtattt

SEQ ID NO: 145320 - DNA, 25 bp, Saccharomyces pastorianus
tatgtctcacatacctgtcttaacg

SEQ ID NO: 145321 - DNA, 25 bp, Saccharomyces pastorianus
gctgtctttcttgtttctttgatac

SEQ ID NO: 145322 - DNA, 25 bp, Saccharomyces pastorianus
gttcagttccttgtttatgtctcac

SEQ ID NO: 145323 - DNA, 25 bp, Saccharomyces pastorianus
taacccgttcagttccttgtttatg

SEQ ID NO: 145324 - DNA, 25 bp, Saccharomyces pastorianus
gtcttaacggccatttcttattgtg

SEQ ID NO: 145325 - DNA, 25 bp, Saccharomyces pastorianus
ggcgttttcgcaatactattccttt

SEQ ID NO: 145326 - DNA, 25 bp, Saccharomyces pastorianus
ccatttgaaggcgttttcgcaatac

SEQ ID NO: 145327 - DNA, 25 bp, Saccharomyces pastorianus
gtaaaatggacctcatcttcaaaca

SEQ ID NO: 145328 - DNA, 25 bp, Saccharomyces pastorianus
attccttttgtaaaatggacctcat

SEQ ID NO: 145329 - DNA, 25 bp, Saccharomyces pastorianus
atgttccatttgaaggcgttttcgc

SEQ ID NO: 145330 - DNA, 25 bp, Saccharomyces pastorianus
gttttcgcaatactattccttttgt

SEQ ID NO: 145331 - DNA, 25 bp, Saccharomyces pastorianus
aatggacctcatcttcaaacacaat

SEQ ID NO: 145332 - DNA, 25 bp, Saccharomyces pastorianus
cctcatcttcaaacacaatattttt

SEQ ID NO: 145333 - DNA, 25 bp, Saccharomyces pastorianus
tcgcaatactattccttttgtaaaa

SEQ ID NO: 145334 - DNA, 25 bp, Saccharomyces pastorianus
gttccatttgaaggcgttttcgcaa

SEQ ID NO: 145335 - DNA, 25 bp, Saccharomyces pastorianus
ggacctcatcttcaaacacaatatt

SEQ ID NO: 145336 - DNA, 25 bp, Saccharomyces pastorianus
aggtgctgcttccaacagaaccaag

SEQ ID NO: 145337 - DNA, 25 bp, Saccharomyces pastorianus
gctccaaaaatctcttacaagaaag

SEQ ID NO: 145338 - DNA, 25 bp, Saccharomyces pastorianus
aagagagctagaaaggtcgccaaga

SEQ ID NO: 145339 - DNA, 25 bp, Saccharomyces pastorianus
ttacaagaaaggtgctgcttccaac

SEQ ID NO: 145340 - DNA, 25 bp, Saccharomyces pastorianus
agctccaaaaatctcttacaagaaa

SEQ ID NO: 145341 - DNA, 25 bp, Saccharomyces pastorianus
gctggtttgtctccatacgaaagaa

SEQ ID NO: 145342 - DNA, 25 bp, Saccharomyces pastorianus
agaaatcgctggtttgtctccatac

SEQ ID NO: 145343 - DNA, 25 bp, Saccharomyces pastorianus
tccaaaaatctcttacaagaaaggt

SEQ ID NO: 145344 - DNA, 25 bp, Saccharomyces pastorianus
caagttcgtaagatctttggtcaga

SEQ ID NO: 145345 - DNA, 25 bp, Saccharomyces pastorianus
atcgctggtttgtctccatacgaaa

SEQ ID NO: 145346 - DNA, 25 bp, Saccharomyces pastorianus
agattgggttctttcaccagagcca

SEQ ID NO: 145347 - DNA, 25 bp, Saccharomyces pastorianus
aactgtctacttgactgccagagat

SEQ ID NO: 145348 - DNA, 25 bp, Saccharomyces pastorianus
tggcggctccttcgctttagaattg

SEQ ID NO: 145349 - DNA, 25 bp, Saccharomyces pastorianus
cattcggattcttggatactttctc

SEQ ID NO: 145350 - DNA, 25 bp, Saccharomyces pastorianus
gctccttcgctttagaattggctca

SEQ ID NO: 145351 - DNA, 25 bp, Saccharomyces pastorianus
atgcatgttgccattcggattcttg

SEQ ID NO: 145352 - DNA, 25 bp, Saccharomyces pastorianus
ctacttgactgccagagatatgggt

SEQ ID NO: 145353 - DNA, 25 bp, Saccharomyces pastorianus
gcatgttgccattcggattcttgga

SEQ ID NO: 145354 - DNA, 25 bp, Saccharomyces pastorianus
attcttggatactttctccagtact

SEQ ID NO: 145355 - DNA, 25 bp, Saccharomyces pastorianus
ggattcttggatactttctccagta

SEQ ID NO: 145356 - DNA, 25 bp, Saccharomyces pastorianus
tccatgcatgttgccattcggattc

SEQ ID NO: 145357 - DNA, 25 bp, Saccharomyces pastorianus
gttgccattcggattcttggatact

SEQ ID NO: 145358 - DNA, 25 bp, Saccharomyces pastorianus
agtgttactcctcaattagctttag

SEQ ID NO: 145359 - DNA, 25 bp, Saccharomyces pastorianus
gaaactttatactccagaactgacg

SEQ ID NO: 145360 - DNA, 25 bp, Saccharomyces pastorianus
ggccaattgcaagccaacggtgctt

SEQ ID NO: 145361 - DNA, 25 bp, Saccharomyces pastorianus
tactgtcgagggttctaccactatt

SEQ ID NO: 145362 - DNA, 25 bp, Saccharomyces pastorianus
ggttcctattactgatccattgatg

SEQ ID NO: 145363 - DNA, 25 bp, Saccharomyces pastorianus
taccaagattggttgcggtctacaa

SEQ ID NO: 145364 - DNA, 25 bp, Saccharomyces pastorianus
gaaaagttctgccaactctgtccgt

SEQ ID NO: 145365 - DNA, 25 bp, Saccharomyces pastorianus
gttgctgttgcatcttttctacaaa

SEQ ID NO: 145366 - DNA, 25 bp, Saccharomyces pastorianus
aacggtgctttaattgcatcgctat

SEQ ID NO: 145367 - DNA, 25 bp, Saccharomyces pastorianus
gatgggcactccaattggtattcaa

SEQ ID NO: 145368 - DNA, 25 bp, Saccharomyces pastorianus
tgacggtagcgctccaggtgatgct

SEQ ID NO: 145369 - DNA, 25 bp, Saccharomyces pastorianus
aaatgaagtacgacgacctgttgaa

SEQ ID NO: 145370 - DNA, 25 bp, Saccharomyces pastorianus
atctcgctgttgatcgatgagctta

SEQ ID NO: 145371 - DNA, 25 bp, Saccharomyces pastorianus
aacgatctggatgttaatgatgaca

SEQ ID NO: 145372 - DNA, 25 bp, Saccharomyces pastorianus
gtacgacgacctgttgaaaatagtt

SEQ ID NO: 145373 - DNA, 25 bp, Saccharomyces pastorianus
gtcatggtataacgatctggatgtt

SEQ ID NO: 145374 - DNA, 25 bp, Saccharomyces pastorianus
atagttcagtcatggtataacgatc

SEQ ID NO: 145375 - DNA, 25 bp, Saccharomyces pastorianus
tgatgacagagcagtagtggagttc

SEQ ID NO: 145376 - DNA, 25 bp, Saccharomyces pastorianus
gggaaacattgtccttgaagagcta

SEQ ID NO: 145377 - DNA, 25 bp, Saccharomyces pastorianus
gaagagtttgagatctcgctgttga

SEQ ID NO: 145378 - DNA, 25 bp, Saccharomyces pastorianus
agagcagtagtggagttcatagaaa

SEQ ID NO: 145379 - DNA, 25 bp, Saccharomyces pastorianus
ctgttgatcgatgagcttaagaaaa

SEQ ID NO: 145380 - DNA, 25 bp, Saccharomyces pastorianus
atgaatgattgtaacgatggtgtgc

SEQ ID NO: 145381 - DNA, 25 bp, Saccharomyces pastorianus
gcgagtaccattgattatcttagcc

SEQ ID NO: 145382 - DNA, 25 bp, Saccharomyces pastorianus
acgatggtgtgcgagtaccattgat

SEQ ID NO: 145383 - DNA, 25 bp, Saccharomyces pastorianus
gattgtaacgatggtgtgcgagtac

SEQ ID NO: 145384 - DNA, 25 bp, Saccharomyces pastorianus
attgtaacgatggtgtgcgagtacc

SEQ ID NO: 145385 - DNA, 25 bp, Saccharomyces pastorianus
gtaacgatggtgtgcgagtaccatt

SEQ ID NO: 145386 - DNA, 25 bp, Saccharomyces pastorianus
gtgcgagtaccattgattatcttag

SEQ ID NO: 145387 - DNA, 25 bp, Saccharomyces pastorianus
gagtaccattgattatcttagccaa

SEQ ID NO: 145388 - DNA, 25 bp, Saccharomyces pastorianus
gtgtgcgagtaccattgattatctt

SEQ ID NO: 145389 - DNA, 25 bp, Saccharomyces pastorianus
gatggtgtgcgagtaccattgatta

SEQ ID NO: 145390 - DNA, 25 bp, Saccharomyces pastorianus
gtaccattgattatcttagccaatt

SEQ ID NO: 145391 - DNA, 25 bp, Saccharomyces pastorianus
gattcgattagactccacatatgga

SEQ ID NO: 145392 - DNA, 25 bp, Saccharomyces pastorianus
acattccgccctgtggtgaattaag

SEQ ID NO: 145393 - DNA, 25 bp, Saccharomyces pastorianus
atactgatatacattccgccctgtg

SEQ ID NO: 145394 - DNA, 25 bp, Saccharomyces pastorianus
gactacaaactacccatactgatat

SEQ ID NO: 145395 - DNA, 25 bp, Saccharomyces pastorianus
gaacctgacggagtagttagcataa

SEQ ID NO: 145396 - DNA, 25 bp, Saccharomyces pastorianus
ttgacgctctggttgactacaaact

SEQ ID NO: 145397 - DNA, 25 bp, Saccharomyces pastorianus
gactccacatatggacatttgagaa

SEQ ID NO: 145398 - DNA, 25 bp, Saccharomyces pastorianus
atgtatgccgatgttgaatctaggg

SEQ ID NO: 145399 - DNA, 25 bp, Saccharomyces pastorianus
atgggttgttatagatccaactatt

SEQ ID NO: 145400 - DNA, 25 bp, Saccharomyces pastorianus
gtacgggtcttttatcgttgacgct

SEQ ID NO: 145401 - DNA, 25 bp, Saccharomyces pastorianus
tatcgttgacgctctggttgactac

SEQ ID NO: 145402 - DNA, 25 bp, Saccharomyces pastorianus
agccacgatgttgataatgagccac

SEQ ID NO: 145403 - DNA, 25 bp, Saccharomyces pastorianus
gccaccacgcttgagaaacacgata

SEQ ID NO: 145404 - DNA, 25 bp, Saccharomyces pastorianus
gacagattcttatccctattcaaat

SEQ ID NO: 145405 - DNA, 25 bp, Saccharomyces pastorianus
tcagaacatttatctagccacgatg

SEQ ID NO: 145406 - DNA, 25 bp, Saccharomyces pastorianus
tgagccacacgataattccattaac

SEQ ID NO: 145407 - DNA, 25 bp, Saccharomyces pastorianus
aagagtgcgccaacatcaccagaag

SEQ ID NO: 145408 - DNA, 25 bp, Saccharomyces pastorianus
agacacgccaaatgaagtccctatg

SEQ ID NO: 145409 - DNA, 25 bp, Saccharomyces pastorianus
gcagttctgccgcatcaaatactaa

SEQ ID NO: 145410 - DNA, 25 bp, Saccharomyces pastorianus
ttaatgatgaaattcccgccaccac

SEQ ID NO: 145411 - DNA, 25 bp, Saccharomyces pastorianus
tctgatcctccgtctgataaggaag

SEQ ID NO: 145412 - DNA, 25 bp, Saccharomyces pastorianus
gtgaggagcccgaacatcaagcagt

SEQ ID NO: 145413 - DNA, 25 bp, Saccharomyces pastorianus
gaagcacacatttccattatcgaaa

SEQ ID NO: 145414 - DNA, 25 bp, Saccharomyces pastorianus
gaagacgacgaatcactcaagaagg

SEQ ID NO: 145415 - DNA, 25 bp, Saccharomyces pastorianus
agattatgcggatccagaaccaagc

SEQ ID NO: 145416 - DNA, 25 bp, Saccharomyces pastorianus
gacaacactgaattctcttctacta

SEQ ID NO: 145417 - DNA, 25 bp, Saccharomyces pastorianus
gaagccaatgtcagttcatccgtaa

SEQ ID NO: 145418 - DNA, 25 bp, Saccharomyces pastorianus
acagattcgccagacaattttcaag

SEQ ID NO: 145419 - DNA, 25 bp, Saccharomyces pastorianus
aagctgagatgtcttctggcgatga

SEQ ID NO: 145420 - DNA, 25 bp, Saccharomyces pastorianus
gcacaccgacgtcatcaatcaagag

SEQ ID NO: 145421 - DNA, 25 bp, Saccharomyces pastorianus
tacagatacggaggaagcacacatt

SEQ ID NO: 145422 - DNA, 25 bp, Saccharomyces pastorianus
aggacagagacatgcacaccgacgt

SEQ ID NO: 145423 - DNA, 25 bp, Saccharomyces pastorianus
ttcgttttcaacagattcgccagac

SEQ ID NO: 145424 - DNA, 25 bp, Saccharomyces pastorianus
gatccatcaaacatgaactttcagg

SEQ ID NO: 145425 - DNA, 25 bp, Saccharomyces pastorianus
gaactttcaggaattagccaatcat

SEQ ID NO: 145426 - DNA, 25 bp, Saccharomyces pastorianus
attccaccaacgcaacgaaacatgg

SEQ ID NO: 145427 - DNA, 25 bp, Saccharomyces pastorianus
ttacaataaagtcaagcctcttgtg

SEQ ID NO: 145428 - DNA, 25 bp, Saccharomyces pastorianus
gaaatggaagtcgatccatcaaaca

SEQ ID NO: 145429 - DNA, 25 bp, Saccharomyces pastorianus
gattcaatcggaaattatctcagat

SEQ ID NO: 145430 - DNA, 25 bp, Saccharomyces pastorianus
aagcctcttgtgaaagtaacctaca

SEQ ID NO: 145431 - DNA, 25 bp, Saccharomyces pastorianus
ttagtacttgctgccattccaccaa

SEQ ID NO: 145432 - DNA, 25 bp, Saccharomyces pastorianus
caatcatttcgaccgtcactcgaaa

SEQ ID NO: 145433 - DNA, 25 bp, Saccharomyces pastorianus
catgggcacgcagattcaatcggaa

SEQ ID NO: 145434 - DNA, 25 bp, Saccharomyces pastorianus
ttgctaggttagtacttgctgccat

SEQ ID NO: 145435 - DNA, 25 bp, Saccharomyces pastorianus
gcagaattgttcaaagctacagcta

SEQ ID NO: 145436 - DNA, 25 bp, Saccharomyces pastorianus
gtaatgctttgaaggccctaccaaa

SEQ ID NO: 145437 - DNA, 25 bp, Saccharomyces pastorianus
gaaggccctaccaaagcgtaatcat

SEQ ID NO: 145438 - DNA, 25 bp, Saccharomyces pastorianus
gcaagaggcacgtactattttaggt

SEQ ID NO: 145439 - DNA, 25 bp, Saccharomyces pastorianus
cagggcttgtcagtatatggactca

SEQ ID NO: 145440 - DNA, 25 bp, Saccharomyces pastorianus
attgacctgtggaacgtttacgtag

SEQ ID NO: 145441 - DNA, 25 bp, Saccharomyces pastorianus
tatcgaggttgtccgcaagtttgct

SEQ ID NO: 145442 - DNA, 25 bp, Saccharomyces pastorianus
gggtgattttttgatcagccacaat

SEQ ID NO: 145443 - DNA, 25 bp, Saccharomyces pastorianus
gaagcaggctaagtttttctttaat

SEQ ID NO: 145444 - DNA, 25 bp, Saccharomyces pastorianus
aaagtttctatctgggtatcgtggg

SEQ ID NO: 145445 - DNA, 25 bp, Saccharomyces pastorianus
gggtcggtcattattcgaaggtttg

SEQ ID NO: 145446 - DNA, 25 bp, Saccharomyces pastorianus
agattccgaggcctcatcagcaaac

SEQ ID NO: 145447 - DNA, 25 bp, Saccharomyces pastorianus
ggaagactccacaaagcagccctct

SEQ ID NO: 145448 - DNA, 25 bp, Saccharomyces pastorianus
gagatccacttctaaagattccgag

SEQ ID NO: 145449 - DNA, 25 bp, Saccharomyces pastorianus
aagtgtcaaagcatctgaaccagca

SEQ ID NO: 145450 - DNA, 25 bp, Saccharomyces pastorianus
gctagagctggactaattgaacatg

SEQ ID NO: 145451 - DNA, 25 bp, Saccharomyces pastorianus
ggtagcttccaccaaaagaaagaga

SEQ ID NO: 145452 - DNA, 25 bp, Saccharomyces pastorianus
agccctctacctcatcattagtaag

SEQ ID NO: 145453 - DNA, 25 bp, Saccharomyces pastorianus
acgaagctgcaagtgatgtgttatt

SEQ ID NO: 145454 - DNA, 25 bp, Saccharomyces pastorianus
tgaaccagcaagtagacccttgaaa

SEQ ID NO: 145455 - DNA, 25 bp, Saccharomyces pastorianus
gcaaactctgatgaagctagagctg

SEQ ID NO: 145456 - DNA, 25 bp, Saccharomyces pastorianus
actgaggaagtctcttttccaaggg

SEQ ID NO: 145457 - DNA, 25 bp, Saccharomyces pastorianus
gtagtagagaccgtttcaaagttat

SEQ ID NO: 145458 - DNA, 25 bp, Saccharomyces pastorianus
ataattaaagcgctatcccgtacaa

SEQ ID NO: 145459 - DNA, 25 bp, Saccharomyces pastorianus
attaattcagatcaacctctccacg

SEQ ID NO: 145460 - DNA, 25 bp, Saccharomyces pastorianus
atcccgtacaaatgtagcccacttt

SEQ ID NO: 145461 - DNA, 25 bp, Saccharomyces pastorianus
gtagactgacattggatattcctgt

SEQ ID NO: 145462 - DNA, 25 bp, Saccharomyces pastorianus
gagaaagctctttaaatgtcccaaa

SEQ ID NO: 145463 - DNA, 25 bp, Saccharomyces pastorianus
atgtcccaaatgcttggtggactta

SEQ ID NO: 145464 - DNA, 25 bp, Saccharomyces pastorianus
tggtggacttagaaacctccaacaa

SEQ ID NO: 145465 - DNA, 25 bp, Saccharomyces pastorianus
gtcacatttaccaccaacattgtct

SEQ ID NO: 145466 - DNA, 25 bp, Saccharomyces pastorianus
aaacgtgtttcatgtgtagactgac

SEQ ID NO: 145467 - DNA, 25 bp, Saccharomyces pastorianus
cccactttgggctgatacaagacat

SEQ ID NO: 145468 - DNA, 25 bp, Saccharomyces pastorianus
gaaaccctaagatgccttgtggcgt

SEQ ID NO: 145469 - DNA, 25 bp, Saccharomyces pastorianus
aagcgtctctcatacagacttgcaa

SEQ ID NO: 145470 - DNA, 25 bp, Saccharomyces pastorianus
gagtcagattttaagcgtctctcat

SEQ ID NO: 145471 - DNA, 25 bp, Saccharomyces pastorianus
gaatctattgcataaccctgtaaaa

SEQ ID NO: 145472 - DNA, 25 bp, Saccharomyces pastorianus
aggaggttcctgacccagagagtat

SEQ ID NO: 145473 - DNA, 25 bp, Saccharomyces pastorianus
acgcgatcatgttacccttttgtta

SEQ ID NO: 145474 - DNA, 25 bp, Saccharomyces pastorianus
gggaagttcaaaccatccacttttg

SEQ ID NO: 145475 - DNA, 25 bp, Saccharomyces pastorianus
gaattctatttctcaacgcgatcat

SEQ ID NO: 145476 - DNA, 25 bp, Saccharomyces pastorianus
gactatctgtggtctttgatcaaga

SEQ ID NO: 145477 - DNA, 25 bp, Saccharomyces pastorianus
aggaacttggctgactatctgtggt

SEQ ID NO: 145478 - DNA, 25 bp, Saccharomyces pastorianus
atgccttgtggcgtactcgaaaaaa

SEQ ID NO: 145479 - DNA, 25 bp, Saccharomyces pastorianus
gcgcagctacaatagtagatcctca

SEQ ID NO: 145480 - DNA, 25 bp, Saccharomyces pastorianus
gtagatcctcaaactctgatcatag

SEQ ID NO: 145481 - DNA, 25 bp, Saccharomyces pastorianus
gatcatagctgtaaattcaaatatt

SEQ ID NO: 145482 - DNA, 25 bp, Saccharomyces pastorianus
tattgtactcggacccaacactttg

SEQ ID NO: 145483 - DNA, 25 bp, Saccharomyces pastorianus
cctaattttggaggagattccctat

SEQ ID NO: 145484 - DNA, 25 bp, Saccharomyces pastorianus
ttccagcttttcgagaatattccca

SEQ ID NO: 145485 - DNA, 25 bp, Saccharomyces pastorianus
ggagattccctattgtactcggacc

SEQ ID NO: 145486 - DNA, 25 bp, Saccharomyces pastorianus
caacactttgcgcagctacaatagt

SEQ ID NO: 145487 - DNA, 25 bp, Saccharomyces pastorianus
tgtcaaattaaatcaatcgcaagta

SEQ ID NO: 145488 - DNA, 25 bp, Saccharomyces pastorianus
gaatattcccataaaagatcctaat

SEQ ID NO: 145489 - DNA, 25 bp, Saccharomyces pastorianus
agctcctggaggcaattccagcttt

SEQ ID NO: 145490 - DNA, 25 bp, Saccharomyces pastorianus
gaaaggcttgaaaaggaactgctag

SEQ ID NO: 145491 - DNA, 25 bp, Saccharomyces pastorianus
tacctgaattggaaaagctagaaat

SEQ ID NO: 145492 - DNA, 25 bp, Saccharomyces pastorianus
gaaacttacctgaattggaaaagct

SEQ ID NO: 145493 - DNA, 25 bp, Saccharomyces pastorianus
ggaactgctagaagtacaagtagat

SEQ ID NO: 145494 - DNA, 25 bp, Saccharomyces pastorianus
agtatccttcttaccggctatggaa

SEQ ID NO: 145495 - DNA, 25 bp, Saccharomyces pastorianus
aatttgatgatttagaggttgacga

SEQ ID NO: 145496 - DNA, 25 bp, Saccharomyces pastorianus
gatttagaggttgacgattttgaag

SEQ ID NO: 145497 - DNA, 25 bp, Saccharomyces pastorianus
atggctcaagaaaccattgaagtat

SEQ ID NO: 145498 - DNA, 25 bp, Saccharomyces pastorianus
attttgaagaggtcgatagtgaaga

SEQ ID NO: 145499 - DNA, 25 bp, Saccharomyces pastorianus
attgaagtatccttcttaccggcta

SEQ ID NO: 145500 - DNA, 25 bp, Saccharomyces pastorianus
tgaagtatccttcttaccggctatg

SEQ ID NO: 145501 - DNA, 25 bp, Saccharomyces pastorianus
agtttttattgcctgttctgttgaa

SEQ ID NO: 145502 - DNA, 25 bp, Saccharomyces pastorianus
gttctgttgaaatgtcctcacttgg

SEQ ID NO: 145503 - DNA, 25 bp, Saccharomyces pastorianus
gaacaagtttactccatctctggga

SEQ ID NO: 145504 - DNA, 25 bp, Saccharomyces pastorianus
ccatctctgggaaggcactcaagtt

SEQ ID NO: 145505 - DNA, 25 bp, Saccharomyces pastorianus
aatcggtactgaagcttcggaagca

SEQ ID NO: 145506 - DNA, 25 bp, Saccharomyces pastorianus
ttggtaaggccctatttcatctcgc

SEQ ID NO: 145507 - DNA, 25 bp, Saccharomyces pastorianus
tgtaccaaattagacctttcaggga

SEQ ID NO: 145508 - DNA, 25 bp, Saccharomyces pastorianus
tttgctgacttatacacttcgaggt

SEQ ID NO: 145509 - DNA, 25 bp, Saccharomyces pastorianus
gaagattacattgcacatgccgtga

SEQ ID NO: 145510 - DNA, 25 bp, Saccharomyces pastorianus
gtgacgatatcaaaccatacctgga

SEQ ID NO: 145511 - DNA, 25 bp, Saccharomyces pastorianus
aacctttctgataatgcgtttgggc

SEQ ID NO: 145512 - DNA, 25 bp, Saccharomyces pastorianus
ctgcgaaggctttccaaattgggct

SEQ ID NO: 145513 - DNA, 25 bp, Saccharomyces pastorianus
agatgctctgagtgttgcagtacaa

SEQ ID NO: 145514 - DNA, 25 bp, Saccharomyces pastorianus
tgggctttcccaaagattttctcca

SEQ ID NO: 145515 - DNA, 25 bp, Saccharomyces pastorianus
ttgctggaatcatcgttggtacatc

SEQ ID NO: 145516 - DNA, 25 bp, Saccharomyces pastorianus
cgacagctcaatcatcgatctagta

SEQ ID NO: 145517 - DNA, 25 bp, Saccharomyces pastorianus
gtatcaatgacatcgacagctcaat

SEQ ID NO: 145518 - DNA, 25 bp, Saccharomyces pastorianus
atcgttggtacatcgagttctcaat

SEQ ID NO: 145519 - DNA, 25 bp, Saccharomyces pastorianus
gattcagtctcagcaaactccgagt

SEQ ID NO: 145520 - DNA, 25 bp, Saccharomyces pastorianus
atgggaattattcggcctttgtgcg

SEQ ID NO: 145521 - DNA, 25 bp, Saccharomyces pastorianus
ctccgagttaacctcttctcaaata

SEQ ID NO: 145522 - DNA, 25 bp, Saccharomyces pastorianus
tagattttctgacccagtagcccaa

SEQ ID NO: 145523 - DNA, 25 bp, Saccharomyces pastorianus
gccattaccattggatgcctcaatt

SEQ ID NO: 145524 - DNA, 25 bp, Saccharomyces pastorianus
agccgacgattcaaagactagccat

SEQ ID NO: 145525 - DNA, 25 bp, Saccharomyces pastorianus
gaaaatcttcatctgccattaccat

SEQ ID NO: 145526 - DNA, 25 bp, Saccharomyces pastorianus
gaagacgagtaccaaggctccactt

SEQ ID NO: 145527 - DNA, 25 bp, Saccharomyces pastorianus
ggagatttcgtcattgaaccgcatg

SEQ ID NO: 145528 - DNA, 25 bp, Saccharomyces pastorianus
tatcgttaaacgcttgccccatgtc

SEQ ID NO: 145529 - DNA, 25 bp, Saccharomyces pastorianus
gaattgcgcctattacttcagatga

SEQ ID NO: 145530 - DNA, 25 bp, Saccharomyces pastorianus
ggctccacttcttccattgatgaag

SEQ ID NO: 145531 - DNA, 25 bp, Saccharomyces pastorianus
gtcaatctctctgcgtcaagtttaa

SEQ ID NO: 145532 - DNA, 25 bp, Saccharomyces pastorianus
atgccaaatgccttgctatcgttaa

SEQ ID NO: 145533 - DNA, 25 bp, Saccharomyces pastorianus
aaaagtccgcagatccaaacctagt

SEQ ID NO: 145534 - DNA, 25 bp, Saccharomyces pastorianus
tttctggtttcgaggaatgtgccat

SEQ ID NO: 145535 - DNA, 25 bp, Saccharomyces pastorianus
gacatgtccgacttgtaaaaataag

SEQ ID NO: 145536 - DNA, 25 bp, Saccharomyces pastorianus
gatcatcgggtaacaatacatgtcc

SEQ ID NO: 145537 - DNA, 25 bp, Saccharomyces pastorianus
gtgcacttacaattttctggtttcg

SEQ ID NO: 145538 - DNA, 25 bp, Saccharomyces pastorianus
actaccttcgaagacatgtccgact

SEQ ID NO: 145539 - DNA, 25 bp, Saccharomyces pastorianus
gttccacggagcatgtctttacaag

SEQ ID NO: 145540 - DNA, 25 bp, Saccharomyces pastorianus
gttactctatactacatgccgtgga

SEQ ID NO: 145541 - DNA, 25 bp, Saccharomyces pastorianus
tttacaagtggtttcgatcatcggg

SEQ ID NO: 145542 - DNA, 25 bp, Saccharomyces pastorianus
ttggattcgttggagttgtttacta

SEQ ID NO: 145543 - DNA, 25 bp, Saccharomyces pastorianus
gaatgtgccatatgttactctatac

SEQ ID NO: 145544 - DNA, 25 bp, Saccharomyces pastorianus
tgccgtggataggaaactaccttcg

SEQ ID NO: 145545 - DNA, 25 bp, Saccharomyces pastorianus
attttatacctttgatacttctcgg

SEQ ID NO: 145546 - DNA, 25 bp, Saccharomyces pastorianus
gagtgtttcaacaaagacccagcaa

SEQ ID NO: 145547 - DNA, 25 bp, Saccharomyces pastorianus
ttctaaaagtatgccctgttctccc

SEQ ID NO: 145548 - DNA, 25 bp, Saccharomyces pastorianus
gaagaatctgagtttagctaccaca

SEQ ID NO: 145549 - DNA, 25 bp, Saccharomyces pastorianus
gaacgtaattcttccagtcttaagg

SEQ ID NO: 145550 - DNA, 25 bp, Saccharomyces pastorianus
caagtgccgtattgctgctgattaa

SEQ ID NO: 145551 - DNA, 25 bp, Saccharomyces pastorianus
gttacatgccttcccacaaaaatat

SEQ ID NO: 145552 - DNA, 25 bp, Saccharomyces pastorianus
acttctcggtacatgcgaactcgat

SEQ ID NO: 145553 - DNA, 25 bp, Saccharomyces pastorianus
gtgtttccaaaccttctcttaatga

SEQ ID NO: 145554 - DNA, 25 bp, Saccharomyces pastorianus
cgccttatgggctgtttttcaagaa

SEQ ID NO: 145555 - DNA, 25 bp, Saccharomyces pastorianus
aatactgaaccttttagctaccttg

SEQ ID NO: 145556 - DNA, 25 bp, Saccharomyces pastorianus
ggcacagtactcaaactccaaattt

SEQ ID NO: 145557 - DNA, 25 bp, Saccharomyces pastorianus
tttaccgaagcgcagttgccaatgg

SEQ ID NO: 145558 - DNA, 25 bp, Saccharomyces pastorianus
tactgacgcgattacttcgttggaa

SEQ ID NO: 145559 - DNA, 25 bp, Saccharomyces pastorianus
ggaagacttttttatcgttgcgctt

SEQ ID NO: 145560 - DNA, 25 bp, Saccharomyces pastorianus
gccaatggccaagttgaacaatttt

SEQ ID NO: 145561 - DNA, 25 bp, Saccharomyces pastorianus
gaaattccaacgttggtccaagaat

SEQ ID NO: 145562 - DNA, 25 bp, Saccharomyces pastorianus
aactttgctggtatcatggcacagt

SEQ ID NO: 145563 - DNA, 25 bp, Saccharomyces pastorianus
ggactataaccacactttaccgaag

SEQ ID NO: 145564 - DNA, 25 bp, Saccharomyces pastorianus
taccgattttctttcttgtgcattg

SEQ ID NO: 145565 - DNA, 25 bp, Saccharomyces pastorianus
tcaacgttattgctgaataccgatt

SEQ ID NO: 145566 - DNA, 25 bp, Saccharomyces pastorianus
tatcgttgcgctttcttttaactta

SEQ ID NO: 145567 - DNA, 25 bp, Saccharomyces pastorianus
acttttgggccatacactttatcag

SEQ ID NO: 145568 - DNA, 25 bp, Saccharomyces pastorianus
ggcaagctatctgattgacgaccaa

SEQ ID NO: 145569 - DNA, 25 bp, Saccharomyces pastorianus
acaacgtcggttgtctaacgagtat

SEQ ID NO: 145570 - DNA, 25 bp, Saccharomyces pastorianus
gatggaccgcctgacttctaatgat

SEQ ID NO: 145571 - DNA, 25 bp, Saccharomyces pastorianus
atatccaagttaatggcgtctctag

SEQ ID NO: 145572 - DNA, 25 bp, Saccharomyces pastorianus
ttgtcggcaataatttctctcctta

SEQ ID NO: 145573 - DNA, 25 bp, Saccharomyces pastorianus
tggagatttccttcaaactaccaaa

SEQ ID NO: 145574 - DNA, 25 bp, Saccharomyces pastorianus
atcaattctaagatggaccgcctga

SEQ ID NO: 145575 - DNA, 25 bp, Saccharomyces pastorianus
agttcatctccccaattttgatcaa

SEQ ID NO: 145576 - DNA, 25 bp, Saccharomyces pastorianus
aagtttgtctcagagttcatctccc

SEQ ID NO: 145577 - DNA, 25 bp, Saccharomyces pastorianus
gagttttggaaacaggtcgacacca

SEQ ID NO: 145578 - DNA, 25 bp, Saccharomyces pastorianus
gaagaataccgtcaagtccgtctgg

SEQ ID NO: 145579 - DNA, 25 bp, Saccharomyces pastorianus
acaaggccggttttgcagaatgtgc

SEQ ID NO: 145580 - DNA, 25 bp, Saccharomyces pastorianus
ggtaacaagcctttttcagtatctt

SEQ ID NO: 145581 - DNA, 25 bp, Saccharomyces pastorianus
aattccgctgcgtttgatgagtttg

SEQ ID NO: 145582 - DNA, 25 bp, Saccharomyces pastorianus
gtacctgttctttgcgacttggaaa

SEQ ID NO: 145583 - DNA, 25 bp, Saccharomyces pastorianus
gaggcggacgtgagactctacccaa

SEQ ID NO: 145584 - DNA, 25 bp, Saccharomyces pastorianus
gtacctcggtctctagaggcacaga

SEQ ID NO: 145585 - DNA, 25 bp, Saccharomyces pastorianus
tagatcgctactttgccatcggaga

SEQ ID NO: 145586 - DNA, 25 bp, Saccharomyces pastorianus
gattattcccgtatacacacgtggc

SEQ ID NO: 145587 - DNA, 25 bp, Saccharomyces pastorianus
acttcaaatgcaatctggccaccat

SEQ ID NO: 145588 - DNA, 25 bp, Saccharomyces pastorianus
agggaagattcaccgtacctgttct

SEQ ID NO: 145589 - DNA, 25 bp, Saccharomyces pastorianus
gaactttattcaaactgcagactgg

SEQ ID NO: 145590 - DNA, 25 bp, Saccharomyces pastorianus
gattttaaagattccccactcggct

SEQ ID NO: 145591 - DNA, 25 bp, Saccharomyces pastorianus
aactgtacaacttcttatgggacga

SEQ ID NO: 145592 - DNA, 25 bp, Saccharomyces pastorianus
gaatatgatatgtttgctgccgaag

SEQ ID NO: 145593 - DNA, 25 bp, Saccharomyces pastorianus
gctggtgctctaatgctgaaatatt

SEQ ID NO: 145594 - DNA, 25 bp, Saccharomyces pastorianus
ggagcacttcaacaccgaggatttt

SEQ ID NO: 145595 - DNA, 25 bp, Saccharomyces pastorianus
atcggcgaagaattgtctatttact

SEQ ID NO: 145596 - DNA, 25 bp, Saccharomyces pastorianus
aacaccagtgtgaccgctcttatat

SEQ ID NO: 145597 - DNA, 25 bp, Saccharomyces pastorianus
gaatgtttaactgcttatccagaaa

SEQ ID NO: 145598 - DNA, 25 bp, Saccharomyces pastorianus
gattcaacattattctccttctgat

SEQ ID NO: 145599 - DNA, 25 bp, Saccharomyces pastorianus
tgacgtattcacaagttctgaggtg

SEQ ID NO: 145600 - DNA, 25 bp, Saccharomyces pastorianus
atattcacagtcatgggctctcaaa

SEQ ID NO: 145601 - DNA, 25 bp, Saccharomyces pastorianus
tattcgtcatagtggcgccttccaa

SEQ ID NO: 145602 - DNA, 25 bp, Saccharomyces pastorianus
atcggcgatctttttattgttcagc

SEQ ID NO: 145603 - DNA, 25 bp, Saccharomyces pastorianus
gctggagctaccgtatatgagttca

SEQ ID NO: 145604 - DNA, 25 bp, Saccharomyces pastorianus
atatgctaattgtggtgtaccggac

SEQ ID NO: 145605 - DNA, 25 bp, Saccharomyces pastorianus
tgttcagctttctactattcgtcat

SEQ ID NO: 145606 - DNA, 25 bp, Saccharomyces pastorianus
ctcactttgctgcactaagcttgat

SEQ ID NO: 145607 - DNA, 25 bp, Saccharomyces pastorianus
gttgtcaacttgaatttcccgctat

SEQ ID NO: 145608 - DNA, 25 bp, Saccharomyces pastorianus
agaaaattcaatcggtcctcacttt

SEQ ID NO: 145609 - DNA, 25 bp, Saccharomyces pastorianus
aaggcattttgtattcgttgtcaac

SEQ ID NO: 145610 - DNA, 25 bp, Saccharomyces pastorianus
gattctgcccatggaatactacctg

SEQ ID NO: 145611 - DNA, 25 bp, Saccharomyces pastorianus
gacccaagctgtatgaacatccctt

SEQ ID NO: 145612 - DNA, 25 bp, Saccharomyces pastorianus
gaacatcccttgtatataccgtgcg

SEQ ID NO: 145613 - DNA, 25 bp, Saccharomyces pastorianus
gaacccggtaaagatatccctgcac

SEQ ID NO: 145614 - DNA, 25 bp, Saccharomyces pastorianus
ttggttatatcctttgcacggcatc

SEQ ID NO: 145615 - DNA, 25 bp, Saccharomyces pastorianus
aacagatacactttcactctctttc

SEQ ID NO: 145616 - DNA, 25 bp, Saccharomyces pastorianus
gatatccctgcacttgaaatcgcta

SEQ ID NO: 145617 - DNA, 25 bp, Saccharomyces pastorianus
aatgacactcgcacgtttgattctg

SEQ ID NO: 145618 - DNA, 25 bp, Saccharomyces pastorianus
tattcactgggttccgttagacaat

SEQ ID NO: 145619 - DNA, 25 bp, Saccharomyces pastorianus
cggcatctcatcgtctattatcaat

SEQ ID NO: 145620 - DNA, 25 bp, Saccharomyces pastorianus
caagctctcagcacttcacaaaagt

SEQ ID NO: 145621 - DNA, 25 bp, Saccharomyces pastorianus
aacagcctgggaagtgcatcgtaca

SEQ ID NO: 145622 - DNA, 25 bp, Saccharomyces pastorianus
aatagttgcgcttgcgagttggccg

SEQ ID NO: 145623 - DNA, 25 bp, Saccharomyces pastorianus
tttgaggttcctgagcatgcgatta

SEQ ID NO: 145624 - DNA, 25 bp, Saccharomyces pastorianus
ggaggagtcatattctgccaaggat

SEQ ID NO: 145625 - DNA, 25 bp, Saccharomyces pastorianus
gatactatctcgatcgttttaacgg

SEQ ID NO: 145626 - DNA, 25 bp, Saccharomyces pastorianus
gattgagcatgctttacagacggca

SEQ ID NO: 145627 - DNA, 25 bp, Saccharomyces pastorianus
atttgttgacatcgagcacgctacc

SEQ ID NO: 145628 - DNA, 25 bp, Saccharomyces pastorianus
agcacgctaccgaatggaggctggt

SEQ ID NO: 145629 - DNA, 25 bp, Saccharomyces pastorianus
atacattatttgcaacgccgggtcc

SEQ ID NO: 145630 - DNA, 25 bp, Saccharomyces pastorianus
gagtttaggttccatgcagtttgcc

SEQ ID NO: 145631 - DNA, 25 bp, Saccharomyces pastorianus
agatgtggcaatcaccgtgtgctca

SEQ ID NO: 145632 - DNA, 25 bp, Saccharomyces pastorianus
acgccgggtcctacagagcaattgt

SEQ ID NO: 145633 - DNA, 25 bp, Saccharomyces pastorianus
ggttgcctgtagttgtgtaccacat

SEQ ID NO: 145634 - DNA, 25 bp, Saccharomyces pastorianus
tttgcatgtttcttgttctgtgtcg

SEQ ID NO: 145635 - DNA, 25 bp, Saccharomyces pastorianus
tggcgttacatcctggttttgggac

SEQ ID NO: 145636 - DNA, 25 bp, Saccharomyces pastorianus
gtaccgtttagttatgccacctact

SEQ ID NO: 145637 - DNA, 25 bp, Saccharomyces pastorianus
acaagttggtatttgctctgctgcc

SEQ ID NO: 145638 - DNA, 25 bp, Saccharomyces pastorianus
caccgtttcctatttcatttcgatg

SEQ ID NO: 145639 - DNA, 25 bp, Saccharomyces pastorianus
gcctcccttcatgcgtaagttgaaa

SEQ ID NO: 145640 - DNA, 25 bp, Saccharomyces pastorianus
tgggacgaagtttttggcacctact

SEQ ID NO: 145641 - DNA, 25 bp, Saccharomyces pastorianus
tgccccgctatttggtaatttcttg

SEQ ID NO: 145642 - DNA, 25 bp, Saccharomyces pastorianus
acgaatgtcatttcttcttgcacca

SEQ ID NO: 145643 - DNA, 25 bp, Saccharomyces pastorianus
atggttgccatcattacttgcccat

SEQ ID NO: 145644 - DNA, 25 bp, Saccharomyces pastorianus
actgccaatgactgctgggtcactt

SEQ ID NO: 145645 - DNA, 25 bp, Saccharomyces pastorianus
gactgctgggtcacttatcaaaaca

SEQ ID NO: 145646 - DNA, 25 bp, Saccharomyces pastorianus
atgtcgactaatacttccaagactt

SEQ ID NO: 145647 - DNA, 25 bp, Saccharomyces pastorianus
ggtacaagaacacaatactgccaat

SEQ ID NO: 145648 - DNA, 25 bp, Saccharomyces pastorianus
gaccaggtttttgagcgaacaccct

SEQ ID NO: 145649 - DNA, 25 bp, Saccharomyces pastorianus
tccaagactttggaactgttttcaa

SEQ ID NO: 145650 - DNA, 25 bp, Saccharomyces pastorianus
ggactatgctggtaaggacattact

SEQ ID NO: 145651 - DNA, 25 bp, Saccharomyces pastorianus
gacgagtccatcttggactatgctg

SEQ ID NO: 145652 - DNA, 25 bp, Saccharomyces pastorianus
tggtggtgacgagtccatcttggac

SEQ ID NO: 145653 - DNA, 25 bp, Saccharomyces pastorianus
tttttgagcgaacaccctggtggtg

SEQ ID NO: 145654 - DNA, 25 bp, Saccharomyces pastorianus
aacaccctggtggtgacgagtccat

SEQ ID NO: 145655 - DNA, 25 bp, Saccharomyces pastorianus
atggtgctgcataatcctgcatgcc

SEQ ID NO: 145656 - DNA, 25 bp, Saccharomyces pastorianus
agaacaggcgggaacctatggtgct

SEQ ID NO: 145657 - DNA, 25 bp, Saccharomyces pastorianus
tatacacaacactttttggagggtt

SEQ ID NO: 145658 - DNA, 25 bp, Saccharomyces pastorianus
gtagacaagaaagctggacgcattt

SEQ ID NO: 145659 - DNA, 25 bp, Saccharomyces pastorianus
ataagtgctacttcgcactgctggt

SEQ ID NO: 145660 - DNA, 25 bp, Saccharomyces pastorianus
cgcactgctggtccttggattaata

SEQ ID NO: 145661 - DNA, 25 bp, Saccharomyces pastorianus
agctggacgcatttccaaattggtc

SEQ ID NO: 145662 - DNA, 25 bp, Saccharomyces pastorianus
ggtttcctggtccttcaagattgaa

SEQ ID NO: 145663 - DNA, 25 bp, Saccharomyces pastorianus
attctgctgacaacatgcttccaaa

SEQ ID NO: 145664 - DNA, 25 bp, Saccharomyces pastorianus
tgcatgccctttgcaatatcatggg

SEQ ID NO: 145665 - DNA, 25 bp, Saccharomyces pastorianus
tgacaactgtttccattctgctgac

SEQ ID NO: 145666 - DNA, 25 bp, Saccharomyces pastorianus
aattctcaacatttctagtgctcct

SEQ ID NO: 145667 - DNA, 25 bp, Saccharomyces pastorianus
ggcaattcagccagttcgtgaaaga

SEQ ID NO: 145668 - DNA, 25 bp, Saccharomyces pastorianus
aggttattacgctgcattgccaaac

SEQ ID NO: 145669 - DNA, 25 bp, Saccharomyces pastorianus
gaagatttgtaccatgaattcctga

SEQ ID NO: 145670 - DNA, 25 bp, Saccharomyces pastorianus
ggcttaggtattatcccaggttatt

SEQ ID NO: 145671 - DNA, 25 bp, Saccharomyces pastorianus
gtgttgcgatgttattgaccttata

SEQ ID NO: 145672 - DNA, 25 bp, Saccharomyces pastorianus
tagtgctcctatacatctccatatc

SEQ ID NO: 145673 - DNA, 25 bp, Saccharomyces pastorianus
atatcctatgtgctaccgctatatg

SEQ ID NO: 145674 - DNA, 25 bp, Saccharomyces pastorianus
tgaccttatattgtggacccgtttt

SEQ ID NO: 145675 - DNA, 25 bp, Saccharomyces pastorianus
gctaccgctatatgcaacttcacaa

SEQ ID NO: 145676 - DNA, 25 bp, Saccharomyces pastorianus
tggtgccttttttacaatctcaatt

SEQ ID NO: 145677 - DNA, 25 bp, Saccharomyces pastorianus
ttcgcaactaagctatcaacagtta

SEQ ID NO: 145678 - DNA, 25 bp, Saccharomyces pastorianus
tacttaaacctaataccgcattcgc

SEQ ID NO: 145679 - DNA, 25 bp, Saccharomyces pastorianus
taccgcattcgcaactaagctatca

SEQ ID NO: 145680 - DNA, 25 bp, Saccharomyces pastorianus
tacgtacttaaacctaataccgcat

SEQ ID NO: 145681 - DNA, 25 bp, Saccharomyces pastorianus
gctatcaacagttattttggctacc

SEQ ID NO: 145682 - DNA, 25 bp, Saccharomyces pastorianus
tgcttttgactacgtacttaaacct

SEQ ID NO: 145683 - DNA, 25 bp, Saccharomyces pastorianus
agctatcaacagttattttggctac

SEQ ID NO: 145684 - DNA, 25 bp, Saccharomyces pastorianus
gcattcgcaactaagctatcaacag

SEQ ID NO: 145685 - DNA, 25 bp, Saccharomyces pastorianus
ataccgcattcgcaactaagctatc

SEQ ID NO: 145686 - DNA, 25 bp, Saccharomyces pastorianus
gtacttaaacctaataccgcattcg

SEQ ID NO: 145687 - DNA, 25 bp, Saccharomyces pastorianus
accgcattcgcaactaagctatcaa

SEQ ID NO: 145688 - DNA, 25 bp, Saccharomyces pastorianus
ggttaggattgctcctttacagtac

SEQ ID NO: 145689 - DNA, 25 bp, Saccharomyces pastorianus
gaaaaccatcttggcgtagcgaaga

SEQ ID NO: 145690 - DNA, 25 bp, Saccharomyces pastorianus
agctcgtctacttccctgaaattta

SEQ ID NO: 145691 - DNA, 25 bp, Saccharomyces pastorianus
gttagtgttcacaacttatccaaca

SEQ ID NO: 145692 - DNA, 25 bp, Saccharomyces pastorianus
gtaacggtagttcatcgtcgcccag

SEQ ID NO: 145693 - DNA, 25 bp, Saccharomyces pastorianus
caaagcacgcattatctgaggattc

SEQ ID NO: 145694 - DNA, 25 bp, Saccharomyces pastorianus
gattttattacttcacagctgttta

SEQ ID NO: 145695 - DNA, 25 bp, Saccharomyces pastorianus
tatttttacctagcggtagctcgtc

SEQ ID NO: 145696 - DNA, 25 bp, Saccharomyces pastorianus
ttaacgccagtaacttcttcatcca

SEQ ID NO: 145697 - DNA, 25 bp, Saccharomyces pastorianus
tccaagttttgaaagctgcctatgt

SEQ ID NO: 145698 - DNA, 25 bp, Saccharomyces pastorianus
gtcgcccagttcagcgtcattaacg

SEQ ID NO: 145699 - DNA, 25 bp, Saccharomyces pastorianus
ggatatacctcccatacttgatgac

SEQ ID NO: 145700 - DNA, 25 bp, Saccharomyces pastorianus
acgatggttctgtatttgggctaaa

SEQ ID NO: 145701 - DNA, 25 bp, Saccharomyces pastorianus
gacgacgaagcatgcacctatacca

SEQ ID NO: 145702 - DNA, 25 bp, Saccharomyces pastorianus
aaaaatgtccacacccatcgaaatc

SEQ ID NO: 145703 - DNA, 25 bp, Saccharomyces pastorianus
tagacttgagcgcttcttggtcata

SEQ ID NO: 145704 - DNA, 25 bp, Saccharomyces pastorianus
agcacatcaatcaaccgctgtcgat

SEQ ID NO: 145705 - DNA, 25 bp, Saccharomyces pastorianus
attcccgcagatgttgactacgatg

SEQ ID NO: 145706 - DNA, 25 bp, Saccharomyces pastorianus
cacacgttcttcgtcaacatcaaat

SEQ ID NO: 145707 - DNA, 25 bp, Saccharomyces pastorianus
gaacatcacagtattgcagcacatc

SEQ ID NO: 145708 - DNA, 25 bp, Saccharomyces pastorianus
ttctggaacccggagtcaagtacaa

SEQ ID NO: 145709 - DNA, 25 bp, Saccharomyces pastorianus
atcattgtccactgacgcattgggt

SEQ ID NO: 145710 - DNA, 25 bp, Saccharomyces pastorianus
atcccttttggttttgacgccaatg

SEQ ID NO: 145711 - DNA, 25 bp, Saccharomyces pastorianus
aacgatttgaagttgggccacgatt

SEQ ID NO: 145712 - DNA, 25 bp, Saccharomyces pastorianus
agaacccataacgaaccgcgacatt

SEQ ID NO: 145713 - DNA, 25 bp, Saccharomyces pastorianus
gacaacctttcgatcaattacacta

SEQ ID NO: 145714 - DNA, 25 bp, Saccharomyces pastorianus
taataccgatacttccagagcttgg

SEQ ID NO: 145715 - DNA, 25 bp, Saccharomyces pastorianus
gaaagaaccactatgagtcagctga

SEQ ID NO: 145716 - DNA, 25 bp, Saccharomyces pastorianus
gcgacattcacggtgcagacttgag

SEQ ID NO: 145717 - DNA, 25 bp, Saccharomyces pastorianus
gattctattgaatcagactcccaag

SEQ ID NO: 145718 - DNA, 25 bp, Saccharomyces pastorianus
gagtcagctgaatgatatcaccaaa

SEQ ID NO: 145719 - DNA, 25 bp, Saccharomyces pastorianus
gatcaaaaggcctctaaactgtata

SEQ ID NO: 145720 - DNA, 25 bp, Saccharomyces pastorianus
cgatttggacaatggccgcagtgga

SEQ ID NO: 145721 - DNA, 25 bp, Saccharomyces pastorianus
actcgcttctctcggtgttgtgatt

SEQ ID NO: 145722 - DNA, 25 bp, Saccharomyces pastorianus
atatctgggagttggactcgcttct

SEQ ID NO: 145723 - DNA, 25 bp, Saccharomyces pastorianus
aagttgaactttgcgatgcaggcta

SEQ ID NO: 145724 - DNA, 25 bp, Saccharomyces pastorianus
gtgacgggcttccaatgcagtatca

SEQ ID NO: 145725 - DNA, 25 bp, Saccharomyces pastorianus
cactaatggcatttgacgctggttc

SEQ ID NO: 145726 - DNA, 25 bp, Saccharomyces pastorianus
ggctggatcattagtaaacaccgtt

SEQ ID NO: 145727 - DNA, 25 bp, Saccharomyces pastorianus
atgttttggtatggacctgtccttc

SEQ ID NO: 145728 - DNA, 25 bp, Saccharomyces pastorianus
ttcccggcatcatccattatattga

SEQ ID NO: 145729 - DNA, 25 bp, Saccharomyces pastorianus
attattcagcgtctctatgtttagg

SEQ ID NO: 145730 - DNA, 25 bp, Saccharomyces pastorianus
ttaccgagcagctgtatatctggga

SEQ ID NO: 145731 - DNA, 25 bp, Saccharomyces pastorianus
tgggaggcactgttgaacaccaaat

SEQ ID NO: 145732 - DNA, 25 bp, Saccharomyces pastorianus
atattattggcggtattcctgggat

SEQ ID NO: 145733 - DNA, 25 bp, Saccharomyces pastorianus
atgcctttggtattgcaacgtttct

SEQ ID NO: 145734 - DNA, 25 bp, Saccharomyces pastorianus
caatcagtggccttgggtattttat

SEQ ID NO: 145735 - DNA, 25 bp, Saccharomyces pastorianus
tggctgggacaaaccttatatcatt

SEQ ID NO: 145736 - DNA, 25 bp, Saccharomyces pastorianus
attgttattagtttcatcggcgcat

SEQ ID NO: 145737 - DNA, 25 bp, Saccharomyces pastorianus
ttaatggcgtggtactccatcccaa

SEQ ID NO: 145738 - DNA, 25 bp, Saccharomyces pastorianus
atcgggctgattcttttcaactttg

SEQ ID NO: 145739 - DNA, 25 bp, Saccharomyces pastorianus
aattttcggatccatggctgcattc

SEQ ID NO: 145740 - DNA, 25 bp, Saccharomyces pastorianus
ggacattctattatgtttccttcca

SEQ ID NO: 145741 - DNA, 25 bp, Saccharomyces pastorianus
gcattacagtcctgtttggaccgga

SEQ ID NO: 145742 - DNA, 25 bp, Saccharomyces pastorianus
atgtgctccaacaggcggcatgttt

SEQ ID NO: 145743 - DNA, 25 bp, Saccharomyces pastorianus
gggatggtatcctccgtaagtacga

SEQ ID NO: 145744 - DNA, 25 bp, Saccharomyces pastorianus
caaagatctctttcatcgggcaatg

SEQ ID NO: 145745 - DNA, 25 bp, Saccharomyces pastorianus
aaggtgacagtagttctcaagagaa

SEQ ID NO: 145746 - DNA, 25 bp, Saccharomyces pastorianus
cgtggtccaagacggcctcagaaaa

SEQ ID NO: 145747 - DNA, 25 bp, Saccharomyces pastorianus
gagaagtattgaatcctaccgactc

SEQ ID NO: 145748 - DNA, 25 bp, Saccharomyces pastorianus
atgagaaggacctcttcagggccct

SEQ ID NO: 145749 - DNA, 25 bp, Saccharomyces pastorianus
gaatcctaccgactcaattttaagt

SEQ ID NO: 145750 - DNA, 25 bp, Saccharomyces pastorianus
tcaaagagtgcaactggcaaccagt

SEQ ID NO: 145751 - DNA, 25 bp, Saccharomyces pastorianus
ggcaaccagttggatacaccttcta

SEQ ID NO: 145752 - DNA, 25 bp, Saccharomyces pastorianus
gatacaccttctacactgtttcaaa

SEQ ID NO: 145753 - DNA, 25 bp, Saccharomyces pastorianus
gttctggtggcggaagttccaacac

SEQ ID NO: 145754 - DNA, 25 bp, Saccharomyces pastorianus
tcttacagaccggtagctccaatat

SEQ ID NO: 145755 - DNA, 25 bp, Saccharomyces pastorianus
tatggactctaaaccggaacaatta

SEQ ID NO: 145756 - DNA, 25 bp, Saccharomyces pastorianus
aaatgatcagaactccgcgtcagcg

SEQ ID NO: 145757 - DNA, 25 bp, Saccharomyces pastorianus
gttacaaatgcaggtgccaacttca

SEQ ID NO: 145758 - DNA, 25 bp, Saccharomyces pastorianus
gtaataccagccaaggcagtatcct

SEQ ID NO: 145759 - DNA, 25 bp, Saccharomyces pastorianus
cctttattagtggatacgcccgatt

SEQ ID NO: 145760 - DNA, 25 bp, Saccharomyces pastorianus
cgcgtcagcggatccgggaacaaat

SEQ ID NO: 145761 - DNA, 25 bp, Saccharomyces pastorianus
ttcaaatcaccttcaactggcagta

SEQ ID NO: 145762 - DNA, 25 bp, Saccharomyces pastorianus
ggatgcgatattcagtctaccaagt

SEQ ID NO: 145763 - DNA, 25 bp, Saccharomyces pastorianus
ataagcctatgcacatggatgcgat

SEQ ID NO: 145764 - DNA, 25 bp, Saccharomyces pastorianus
tgtagatgcatcacttgggttggct

SEQ ID NO: 145765 - DNA, 25 bp, Saccharomyces pastorianus
agatacggatggtggatattttcca

SEQ ID NO: 145766 - DNA, 25 bp, Saccharomyces pastorianus
gccactatgctaaatgctcacgaat

SEQ ID NO: 145767 - DNA, 25 bp, Saccharomyces pastorianus
gtactagcgtttgccactatgctaa

SEQ ID NO: 145768 - DNA, 25 bp, Saccharomyces pastorianus
caagttgtgtggtttagatacggat

SEQ ID NO: 145769 - DNA, 25 bp, Saccharomyces pastorianus
gtttgccactatgctaaatgctcac

SEQ ID NO: 145770 - DNA, 25 bp, Saccharomyces pastorianus
cacgaatcccaagttgtgtggttta

SEQ ID NO: 145771 - DNA, 25 bp, Saccharomyces pastorianus
tgctaaatgctcacgaatcccaagt

SEQ ID NO: 145772 - DNA, 25 bp, Saccharomyces pastorianus
aatgctcacgaatcccaagttgtgt

SEQ ID NO: 145773 - DNA, 25 bp, Saccharomyces pastorianus
gtggatattttccagatttgtcttc

SEQ ID NO: 145774 - DNA, 25 bp, Saccharomyces pastorianus
atacgtactagcgtttgccactatg

SEQ ID NO: 145775 - DNA, 25 bp, Saccharomyces pastorianus
tacacatgcacaatacgtactagcg

SEQ ID NO: 145776 - DNA, 25 bp, Saccharomyces pastorianus
gtcccatttaacataatctgcttat

SEQ ID NO: 145777 - DNA, 25 bp, Saccharomyces pastorianus
tgaattcgtactttccgagaaccgt

SEQ ID NO: 145778 - DNA, 25 bp, Saccharomyces pastorianus
ggcaacgccgaaggtcttggcgaaa

SEQ ID NO: 145779 - DNA, 25 bp, Saccharomyces pastorianus
gagaattaaatgagtcggccgcttt

SEQ ID NO: 145780 - DNA, 25 bp, Saccharomyces pastorianus
tcgtctcccgaaacaatgcatcatt

SEQ ID NO: 145781 - DNA, 25 bp, Saccharomyces pastorianus
atagcgcaccctgacgacgaagtta

SEQ ID NO: 145782 - DNA, 25 bp, Saccharomyces pastorianus
agagcagtctccgtacaggtgatgg

SEQ ID NO: 145783 - DNA, 25 bp, Saccharomyces pastorianus
cggccgctttattgctacacaatga

SEQ ID NO: 145784 - DNA, 25 bp, Saccharomyces pastorianus
atctgcttatcaaagggcaacgccg

SEQ ID NO: 145785 - DNA, 25 bp, Saccharomyces pastorianus
gaaatcaatttggtcatagcgcacc

SEQ ID NO: 145786 - DNA, 25 bp, Saccharomyces pastorianus
tctataacttcttctctttcacaaa

SEQ ID NO: 145787 - DNA, 25 bp, Saccharomyces pastorianus
ataattggtcccatactttctcacc

SEQ ID NO: 145788 - DNA, 25 bp, Saccharomyces pastorianus
agcaatcgctccaatagtagataaa

SEQ ID NO: 145789 - DNA, 25 bp, Saccharomyces pastorianus
cccagcaatcgctccaatagtagat

SEQ ID NO: 145790 - DNA, 25 bp, Saccharomyces pastorianus
cataattggtcccatactttctcac

SEQ ID NO: 145791 - DNA, 25 bp, Saccharomyces pastorianus
tcacccagcaatcgctccaatagta

SEQ ID NO: 145792 - DNA, 25 bp, Saccharomyces pastorianus
taattggtcccatactttctcaccc

SEQ ID NO: 145793 - DNA, 25 bp, Saccharomyces pastorianus
aattggtcccatactttctcaccca

SEQ ID NO: 145794 - DNA, 25 bp, Saccharomyces pastorianus
acccagcaatcgctccaatagtaga

SEQ ID NO: 145795 - DNA, 25 bp, Saccharomyces pastorianus
tggtcccatactttctcacccagca

SEQ ID NO: 145796 - DNA, 25 bp, Saccharomyces pastorianus
cccataattggtcccatactttctc

SEQ ID NO: 145797 - DNA, 25 bp, Saccharomyces pastorianus
attggtcccatactttctcacccag

SEQ ID NO: 145798 - DNA, 25 bp, Saccharomyces pastorianus
aagctgcaaaagttccgggatagac

SEQ ID NO: 145799 - DNA, 25 bp, Saccharomyces pastorianus
ggaagaagcttctcgaaacatatga

SEQ ID NO: 145800 - DNA, 25 bp, Saccharomyces pastorianus
gtgatcgaggtgtacgaaaccacga

SEQ ID NO: 145801 - DNA, 25 bp, Saccharomyces pastorianus
cactaccactgctggcggagaggat

SEQ ID NO: 145802 - DNA, 25 bp, Saccharomyces pastorianus
ccacgaaagggctggattcacaaat

SEQ ID NO: 145803 - DNA, 25 bp, Saccharomyces pastorianus
tccgggatagactcgtagaactgaa

SEQ ID NO: 145804 - DNA, 25 bp, Saccharomyces pastorianus
aagataccgtgatattgccaaacat

SEQ ID NO: 145805 - DNA, 25 bp, Saccharomyces pastorianus
attcctgatggaacgttttgttggc

SEQ ID NO: 145806 - DNA, 25 bp, Saccharomyces pastorianus
tatcaagattcactaccactgctgg

SEQ ID NO: 145807 - DNA, 25 bp, Saccharomyces pastorianus
tttgttggcataccagaagctttgg

SEQ ID NO: 145808 - DNA, 25 bp, Saccharomyces pastorianus
gatgacaccgtgagcaagcttgtta

SEQ ID NO: 145809 - DNA, 25 bp, Saccharomyces pastorianus
ggaaatcaggcctgccaaaccacta

SEQ ID NO: 145810 - DNA, 25 bp, Saccharomyces pastorianus
taaaagtgcacaagcctgggaatta

SEQ ID NO: 145811 - DNA, 25 bp, Saccharomyces pastorianus
aagccgcaccagaaacgggaatcat

SEQ ID NO: 145812 - DNA, 25 bp, Saccharomyces pastorianus
aagagccctcggaagcattagacaa

SEQ ID NO: 145813 - DNA, 25 bp, Saccharomyces pastorianus
gaccagattggactatttatccggt

SEQ ID NO: 145814 - DNA, 25 bp, Saccharomyces pastorianus
aagccattattcaaagccgcaccag

SEQ ID NO: 145815 - DNA, 25 bp, Saccharomyces pastorianus
tttatccggtaaaatcaatgccagt

SEQ ID NO: 145816 - DNA, 25 bp, Saccharomyces pastorianus
agggcagcattcacatacttgatca

SEQ ID NO: 145817 - DNA, 25 bp, Saccharomyces pastorianus
tgatcaacgatcctgaactcgcaaa

SEQ ID NO: 145818 - DNA, 25 bp, Saccharomyces pastorianus
gtcattccattccatgaaatcgtta

SEQ ID NO: 145819 - DNA, 25 bp, Saccharomyces pastorianus
tattgagtgcgaacccagtcattcc

SEQ ID NO: 145820 - DNA, 25 bp, Saccharomyces pastorianus
ttaatgctctctgctttcgagtcaa

SEQ ID NO: 145821 - DNA, 25 bp, Saccharomyces pastorianus
tatcctacttcttaatgctctctgc

SEQ ID NO: 145822 - DNA, 25 bp, Saccharomyces pastorianus
gaaatattttgaaactatcctactt

SEQ ID NO: 145823 - DNA, 25 bp, Saccharomyces pastorianus
gagtcaaaattcttttatgcgcgat

SEQ ID NO: 145824 - DNA, 25 bp, Saccharomyces pastorianus
atgctctctgctttcgagtcaaaat

SEQ ID NO: 145825 - DNA, 25 bp, Saccharomyces pastorianus
tttatgcgcgataatacttcttgga

SEQ ID NO: 145826 - DNA, 25 bp, Saccharomyces pastorianus
aaaaggagcacacctagcatcacaa

SEQ ID NO: 145827 - DNA, 25 bp, Saccharomyces pastorianus
gagcacacctagcatcacaaaatat

SEQ ID NO: 145828 - DNA, 25 bp, Saccharomyces pastorianus
acttcttaatgctctctgctttcga

SEQ ID NO: 145829 - DNA, 25 bp, Saccharomyces pastorianus
ctctgctttcgagtcaaaattcttt

SEQ ID NO: 145830 - DNA, 25 bp, Saccharomyces pastorianus
aactatcctacttcttaatgctctc

SEQ ID NO: 145831 - DNA, 25 bp, Saccharomyces pastorianus
tcaggtactcgtccgaagcatttcg

SEQ ID NO: 145832 - DNA, 25 bp, Saccharomyces pastorianus
atttcgagtaatgtaaccccacaag

SEQ ID NO: 145833 - DNA, 25 bp, Saccharomyces pastorianus
ggtactcgtccgaagcatttcgagt

SEQ ID NO: 145834 - DNA, 25 bp, Saccharomyces pastorianus
tcgtccgaagcatttcgagtaatgt

SEQ ID NO: 145835 - DNA, 25 bp, Saccharomyces pastorianus
gaatcaggtactcgtccgaagcatt

SEQ ID NO: 145836 - DNA, 25 bp, Saccharomyces pastorianus
tgtaaccccacaagtgtccctcaag

SEQ ID NO: 145837 - DNA, 25 bp, Saccharomyces pastorianus
taacgaatcaggtactcgtccgaag

SEQ ID NO: 145838 - DNA, 25 bp, Saccharomyces pastorianus
aagcatttcgagtaatgtaacccca

SEQ ID NO: 145839 - DNA, 25 bp, Saccharomyces pastorianus
tcgagtaatgtaaccccacaagtgt

SEQ ID NO: 145840 - DNA, 25 bp, Saccharomyces pastorianus
gtaatgtaaccccacaagtgtccct

SEQ ID NO: 145841 - DNA, 25 bp, Saccharomyces pastorianus
tatatgtttaacgaatcaggtactc

SEQ ID NO: 145842 - DNA, 25 bp, Saccharomyces pastorianus
gtatgagcaggctctgacacccgag

SEQ ID NO: 145843 - DNA, 25 bp, Saccharomyces pastorianus
gcaggctctgacacccgagttcttc

SEQ ID NO: 145844 - DNA, 25 bp, Saccharomyces pastorianus
agcaggctctgacacccgagttctt

SEQ ID NO: 145845 - DNA, 25 bp, Saccharomyces pastorianus
tatgagcaggctctgacacccgagt

SEQ ID NO: 145846 - DNA, 25 bp, Saccharomyces pastorianus
atgtatgagcaggctctgacacccg

SEQ ID NO: 145847 - DNA, 25 bp, Saccharomyces pastorianus
tgagcaggctctgacacccgagttc

SEQ ID NO: 145848 - DNA, 25 bp, Saccharomyces pastorianus
tgtatgagcaggctctgacacccga

SEQ ID NO: 145849 - DNA, 25 bp, Saccharomyces pastorianus
gagcaggctctgacacccgagttct

SEQ ID NO: 145850 - DNA, 25 bp, Saccharomyces pastorianus
atgagcaggctctgacacccgagtt

SEQ ID NO: 145851 - DNA, 25 bp, Saccharomyces pastorianus
tctttttttcatattctggcattgt

SEQ ID NO: 145852 - DNA, 25 bp, Saccharomyces pastorianus
tttcttctttttttcatattctggc

SEQ ID NO: 145853 - DNA, 25 bp, Saccharomyces pastorianus
tttttttcatattctggcattgtcc

SEQ ID NO: 145854 - DNA, 25 bp, Saccharomyces pastorianus
ttctttttttcatattctggcattg

SEQ ID NO: 145855 - DNA, 25 bp, Saccharomyces pastorianus
ctttttttcatattctggcattgtc

SEQ ID NO: 145856 - DNA, 25 bp, Saccharomyces pastorianus
cttctttttttcatattctggcatt

SEQ ID NO: 145857 - DNA, 25 bp, Saccharomyces pastorianus
agtttcttctttttttcatattctg

SEQ ID NO: 145858 - DNA, 25 bp, Saccharomyces pastorianus
tcttctttttttcatattctggcat

SEQ ID NO: 145859 - DNA, 25 bp, Saccharomyces pastorianus
ttcttctttttttcatattctggca

SEQ ID NO: 145860 - DNA, 25 bp, Saccharomyces pastorianus
gtttcttctttttttcatattctgg

SEQ ID NO: 145861 - DNA, 25 bp, Saccharomyces pastorianus
gaacatcctcatccgctaaacaaag

SEQ ID NO: 145862 - DNA, 25 bp, Saccharomyces pastorianus
cctacggcagcgattcatggaacat

SEQ ID NO: 145863 - DNA, 25 bp, Saccharomyces pastorianus
agcacaacatatactgtcagcacgg

SEQ ID NO: 145864 - DNA, 25 bp, Saccharomyces pastorianus
attgtctcgggccaaaagtcgctat

SEQ ID NO: 145865 - DNA, 25 bp, Saccharomyces pastorianus
aggagctcgtcatcttttgtcgaaa

SEQ ID NO: 145866 - DNA, 25 bp, Saccharomyces pastorianus
atcttcaactgaaagtccgatcggg

SEQ ID NO: 145867 - DNA, 25 bp, Saccharomyces pastorianus
acatcaactgttgcgaaatcttcaa

SEQ ID NO: 145868 - DNA, 25 bp, Saccharomyces pastorianus
gcgaaactacccttgaaacgataat

SEQ ID NO: 145869 - DNA, 25 bp, Saccharomyces pastorianus
aataccggtgcatccttgaacatta

SEQ ID NO: 145870 - DNA, 25 bp, Saccharomyces pastorianus
aacaacaaaggcttctccgtcaact

SEQ ID NO: 145871 - DNA, 25 bp, Saccharomyces pastorianus
aagctgcaggaaatacatccgttgc

SEQ ID NO: 145872 - DNA, 25 bp, Saccharomyces pastorianus
taccacatcgcatagtagcacgact

SEQ ID NO: 145873 - DNA, 25 bp, Saccharomyces pastorianus
atcatcggagtcattggtttccatt

SEQ ID NO: 145874 - DNA, 25 bp, Saccharomyces pastorianus
gttgtacccgagtttacttctagct

SEQ ID NO: 145875 - DNA, 25 bp, Saccharomyces pastorianus
tgtccagctccactacagagactga

SEQ ID NO: 145876 - DNA, 25 bp, Saccharomyces pastorianus
attagtttcttctgttgtacccgag

SEQ ID NO: 145877 - DNA, 25 bp, Saccharomyces pastorianus
aattgcctcaattctatcatcggag

SEQ ID NO: 145878 - DNA, 25 bp, Saccharomyces pastorianus
acatcatccgatatttctagcacat

SEQ ID NO: 145879 - DNA, 25 bp, Saccharomyces pastorianus
tcaaactcatacagtgcgccttcct

SEQ ID NO: 145880 - DNA, 25 bp, Saccharomyces pastorianus
ttttcttctctttcttacacatcat

SEQ ID NO: 145881 - DNA, 25 bp, Saccharomyces pastorianus
tagcacgaccagtacaactacgcct

SEQ ID NO: 145882 - DNA, 25 bp, Saccharomyces pastorianus
acgatgtcgaatcatcaacccctgg

SEQ ID NO: 145883 - DNA, 25 bp, Saccharomyces pastorianus
acggcactgcctcagcggtttatac

SEQ ID NO: 145884 - DNA, 25 bp, Saccharomyces pastorianus
tatatgcgttataccacttttacac

SEQ ID NO: 145885 - DNA, 25 bp, Saccharomyces pastorianus
gatcccgcaccacatcattatgcac

SEQ ID NO: 145886 - DNA, 25 bp, Saccharomyces pastorianus
tgctcttaatatatgcgttatacca

SEQ ID NO: 145887 - DNA, 25 bp, Saccharomyces pastorianus
gaggatcccgcaccacatcattatg

SEQ ID NO: 145888 - DNA, 25 bp, Saccharomyces pastorianus
ggcactgcctcagcggtttataccc

SEQ ID NO: 145889 - DNA, 25 bp, Saccharomyces pastorianus
aggatcccgcaccacatcattatgc

SEQ ID NO: 145890 - DNA, 25 bp, Saccharomyces pastorianus
tatgcgttataccacttttacaccg

SEQ ID NO: 145891 - DNA, 25 bp, Saccharomyces pastorianus
cggcactgcctcagcggtttatacc

SEQ ID NO: 145892 - DNA, 25 bp, Saccharomyces pastorianus
cccataacgcccatgattatctaca

SEQ ID NO: 145893 - DNA, 25 bp, Saccharomyces pastorianus
ggatcccgcaccacatcattatgca

SEQ ID NO: 145894 - DNA, 25 bp, Saccharomyces pastorianus
ggatttgactgggactggctacatt

SEQ ID NO: 145895 - DNA, 25 bp, Saccharomyces pastorianus
agtaactgaggccatcattcgtcac

SEQ ID NO: 145896 - DNA, 25 bp, Saccharomyces pastorianus
gaaactgctaggcttgttcgggaat

SEQ ID NO: 145897 - DNA, 25 bp, Saccharomyces pastorianus
gttgttccgcctccaaacagtgaaa

SEQ ID NO: 145898 - DNA, 25 bp, Saccharomyces pastorianus
gttctaaaccactctttgcgtgttt

SEQ ID NO: 145899 - DNA, 25 bp, Saccharomyces pastorianus
gggctcattctgcagattgctacta

SEQ ID NO: 145900 - DNA, 25 bp, Saccharomyces pastorianus
agaaaaggccattccagtggtgaat

SEQ ID NO: 145901 - DNA, 25 bp, Saccharomyces pastorianus
aagactgcactggttatcatgtttt

SEQ ID NO: 145902 - DNA, 25 bp, Saccharomyces pastorianus
ttgctactacgcttgacaatgtcgg

SEQ ID NO: 145903 - DNA, 25 bp, Saccharomyces pastorianus
gagaccaatttccagcatgggactt

SEQ ID NO: 145904 - DNA, 25 bp, Saccharomyces pastorianus
gtcacctgcttacttcatgatattg

SEQ ID NO: 145905 - DNA, 25 bp, Saccharomyces pastorianus
gggcaacactgtcactgtgcaaact

SEQ ID NO: 145906 - DNA, 25 bp, Saccharomyces pastorianus
caaactacttttgtccagcgtttct

SEQ ID NO: 145907 - DNA, 25 bp, Saccharomyces pastorianus
accgttgttagacagggcaacactg

SEQ ID NO: 145908 - DNA, 25 bp, Saccharomyces pastorianus
tctaggtatgagttcgtttacttca

SEQ ID NO: 145909 - DNA, 25 bp, Saccharomyces pastorianus
gtttcgcataatgaggcccagcatc

SEQ ID NO: 145910 - DNA, 25 bp, Saccharomyces pastorianus
tgaggcccagcatctaggtatgagt

SEQ ID NO: 145911 - DNA, 25 bp, Saccharomyces pastorianus
gtactgtaggcgttattaaatctgc

SEQ ID NO: 145912 - DNA, 25 bp, Saccharomyces pastorianus
actgtcactgtgcaaactacttttg

SEQ ID NO: 145913 - DNA, 25 bp, Saccharomyces pastorianus
taacagtcgcttctccctccgtggg

SEQ ID NO: 145914 - DNA, 25 bp, Saccharomyces pastorianus
aaacagtttcgcataatgaggccca

SEQ ID NO: 145915 - DNA, 25 bp, Saccharomyces pastorianus
tcccagtacgtaacagtcgcttctc

SEQ ID NO: 145916 - DNA, 25 bp, Saccharomyces pastorianus
gtgcttatgctttacaggtttgtct

SEQ ID NO: 145917 - DNA, 25 bp, Saccharomyces pastorianus
gggttccatgttgatattactatat

SEQ ID NO: 145918 - DNA, 25 bp, Saccharomyces pastorianus
cacctatttgtatgctgagggtaaa

SEQ ID NO: 145919 - DNA, 25 bp, Saccharomyces pastorianus
catgttcacctatttgtatgctgag

SEQ ID NO: 145920 - DNA, 25 bp, Saccharomyces pastorianus
gaaatcggtagtgcttatgctttac

SEQ ID NO: 145921 - DNA, 25 bp, Saccharomyces pastorianus
tccattttctatacgtggaatgtta

SEQ ID NO: 145922 - DNA, 25 bp, Saccharomyces pastorianus
aatcccatccttagtcatttattcc

SEQ ID NO: 145923 - DNA, 25 bp, Saccharomyces pastorianus
gatgttcccattagtctttccccgt

SEQ ID NO: 145924 - DNA, 25 bp, Saccharomyces pastorianus
aacacagatgttcccattagtcttt

SEQ ID NO: 145925 - DNA, 25 bp, Saccharomyces pastorianus
caggtttgtcttttacaaatcccat

SEQ ID NO: 145926 - DNA, 25 bp, Saccharomyces pastorianus
gtcatttattccattttctatacgt

SEQ ID NO: 145927 - DNA, 25 bp, Saccharomyces pastorianus
gtgccgttctattattaccaggtct

SEQ ID NO: 145928 - DNA, 25 bp, Saccharomyces pastorianus
atggcggctactcggtaaactgtgc

SEQ ID NO: 145929 - DNA, 25 bp, Saccharomyces pastorianus
taacgaccgtgactgtactttctcg

SEQ ID NO: 145930 - DNA, 25 bp, Saccharomyces pastorianus
acctatgtccatatctgtccagtgt

SEQ ID NO: 145931 - DNA, 25 bp, Saccharomyces pastorianus
aaacttccatgggtgtcggtgctgt

SEQ ID NO: 145932 - DNA, 25 bp, Saccharomyces pastorianus
attggttccattctaggtgccgttc

SEQ ID NO: 145933 - DNA, 25 bp, Saccharomyces pastorianus
gtgtctcttccgcattgttaatatt

SEQ ID NO: 145934 - DNA, 25 bp, Saccharomyces pastorianus
gaaattttcttgtactgcgttgcat

SEQ ID NO: 145935 - DNA, 25 bp, Saccharomyces pastorianus
gtggttcacgtacgaatcctcaata

SEQ ID NO: 145936 - DNA, 25 bp, Saccharomyces pastorianus
aaagatacaaccctgctagcgctgg

SEQ ID NO: 145937 - DNA, 25 bp, Saccharomyces pastorianus
accatcccactagcattttacattg

SEQ ID NO: 145938 - DNA, 25 bp, Saccharomyces pastorianus
gaaacagctgcccaattgcataagg

SEQ ID NO: 145939 - DNA, 25 bp, Saccharomyces pastorianus
gaagacactggattaccacgggtta

SEQ ID NO: 145940 - DNA, 25 bp, Saccharomyces pastorianus
atcataatacactcacatccgcaag

SEQ ID NO: 145941 - DNA, 25 bp, Saccharomyces pastorianus
gaatgttacttaagctccatggcag

SEQ ID NO: 145942 - DNA, 25 bp, Saccharomyces pastorianus
actctagaccattccatttggacga

SEQ ID NO: 145943 - DNA, 25 bp, Saccharomyces pastorianus
gaaccaatgcattcggtcatcaacg

SEQ ID NO: 145944 - DNA, 25 bp, Saccharomyces pastorianus
tcgtcaagatgaccctggttctttg

SEQ ID NO: 145945 - DNA, 25 bp, Saccharomyces pastorianus
ggattgttcttccacatctgaatca

SEQ ID NO: 145946 - DNA, 25 bp, Saccharomyces pastorianus
gcgacaacattctgcatttagccat

SEQ ID NO: 145947 - DNA, 25 bp, Saccharomyces pastorianus
atcaacggccgattgcgacaacatt

SEQ ID NO: 145948 - DNA, 25 bp, Saccharomyces pastorianus
gcagaaaaatttccgcaggtcacct

SEQ ID NO: 145949 - DNA, 25 bp, Saccharomyces pastorianus
gatgaaactaccgtcagaaactgct

SEQ ID NO: 145950 - DNA, 25 bp, Saccharomyces pastorianus
tgttcccattccattgatctcgcaa

SEQ ID NO: 145951 - DNA, 25 bp, Saccharomyces pastorianus
ttgatctcgcaatccttgaatttgg

SEQ ID NO: 145952 - DNA, 25 bp, Saccharomyces pastorianus
gactgaccagggttttatctaccca

SEQ ID NO: 145953 - DNA, 25 bp, Saccharomyces pastorianus
gagtgcatccaacaacaatgggcaa

SEQ ID NO: 145954 - DNA, 25 bp, Saccharomyces pastorianus
tacgaccttgactgaccagggtttt

SEQ ID NO: 145955 - DNA, 25 bp, Saccharomyces pastorianus
ggctccagtccgttacaaagaattc

SEQ ID NO: 145956 - DNA, 25 bp, Saccharomyces pastorianus
aagacgctaattcattcgctgttcc

SEQ ID NO: 145957 - DNA, 25 bp, Saccharomyces pastorianus
agaaactgctgtacgaccttgactg

SEQ ID NO: 145958 - DNA, 25 bp, Saccharomyces pastorianus
gaaacaacctttggagagtgcatcc

SEQ ID NO: 145959 - DNA, 25 bp, Saccharomyces pastorianus
tgataacgatacatcttccggctcc

SEQ ID NO: 145960 - DNA, 25 bp, Saccharomyces pastorianus
gaattttccggacgaatctctcatg

SEQ ID NO: 145961 - DNA, 25 bp, Saccharomyces pastorianus
attgcatccacctagtaacgtacct

SEQ ID NO: 145962 - DNA, 25 bp, Saccharomyces pastorianus
tcttccaacacttctgcgatagcaa

SEQ ID NO: 145963 - DNA, 25 bp, Saccharomyces pastorianus
gattctctcatatcaaaccttcagc

SEQ ID NO: 145964 - DNA, 25 bp, Saccharomyces pastorianus
ggagcgtcaaacacgtcagcttcaa

SEQ ID NO: 145965 - DNA, 25 bp, Saccharomyces pastorianus
tacctaccacgccttcaagagaatt

SEQ ID NO: 145966 - DNA, 25 bp, Saccharomyces pastorianus
aattccttctgttccagcgatggtg

SEQ ID NO: 145967 - DNA, 25 bp, Saccharomyces pastorianus
aacgggatcccgctcattgtaggac

SEQ ID NO: 145968 - DNA, 25 bp, Saccharomyces pastorianus
tccgcagtccactttcaaatctaat

SEQ ID NO: 145969 - DNA, 25 bp, Saccharomyces pastorianus
atggattctccatcactatacttga

SEQ ID NO: 145970 - DNA, 25 bp, Saccharomyces pastorianus
tctgcataatcttttcagcccttca

SEQ ID NO: 145971 - DNA, 25 bp, Saccharomyces pastorianus
attatgaagtgcagaaggaaccaaa

SEQ ID NO: 145972 - DNA, 25 bp, Saccharomyces pastorianus
ggaaccaaaaatatcatcgaaagaa

SEQ ID NO: 145973 - DNA, 25 bp, Saccharomyces pastorianus
gaaggagtacgtagagcgttactat

SEQ ID NO: 145974 - DNA, 25 bp, Saccharomyces pastorianus
gcagaaggaaccaaaaatatcatcg

SEQ ID NO: 145975 - DNA, 25 bp, Saccharomyces pastorianus
tatgaagtgcagaaggaaccaaaaa

SEQ ID NO: 145976 - DNA, 25 bp, Saccharomyces pastorianus
gaaggaaccaaaaatatcatcgaaa

SEQ ID NO: 145977 - DNA, 25 bp, Saccharomyces pastorianus
aggagtacgtagagcgttactattt

SEQ ID NO: 145978 - DNA, 25 bp, Saccharomyces pastorianus
tatcatcgaaagaaggagtacgtag

SEQ ID NO: 145979 - DNA, 25 bp, Saccharomyces pastorianus
ggagtacgtagagcgttactatttt

SEQ ID NO: 145980 - DNA, 25 bp, Saccharomyces pastorianus
aagaaggagtacgtagagcgttact

SEQ ID NO: 145981 - DNA, 25 bp, Saccharomyces pastorianus
cgaaagaaggagtacgtagagcgtt

SEQ ID NO: 145982 - DNA, 25 bp, Saccharomyces pastorianus
gattgtcatcgaaaccagaagtact

SEQ ID NO: 145983 - DNA, 25 bp, Saccharomyces pastorianus
taacccattatgatgtggtgcaaat

SEQ ID NO: 145984 - DNA, 25 bp, Saccharomyces pastorianus
taaccggttttttaatgtcatactg

SEQ ID NO: 145985 - DNA, 25 bp, Saccharomyces pastorianus
catactgtgggacactgcgggacaa

SEQ ID NO: 145986 - DNA, 25 bp, Saccharomyces pastorianus
tgcgaagtccttccaaagctgtatg

SEQ ID NO: 145987 - DNA, 25 bp, Saccharomyces pastorianus
ttcggaaacccgaacatcggtgatg

SEQ ID NO: 145988 - DNA, 25 bp, Saccharomyces pastorianus
caaccacgaaatggcggatcctaat

SEQ ID NO: 145989 - DNA, 25 bp, Saccharomyces pastorianus
ggtaccaaaacgcaatcattccatc

SEQ ID NO: 145990 - DNA, 25 bp, Saccharomyces pastorianus
gaaaacggtacagctctaacgattt

SEQ ID NO: 145991 - DNA, 25 bp, Saccharomyces pastorianus
gcaatcattccatcactgtacaaga

SEQ ID NO: 145992 - DNA, 25 bp, Saccharomyces pastorianus
gcaagattttttctggtgggtaaca

SEQ ID NO: 145993 - DNA, 25 bp, Saccharomyces pastorianus
gggcggtagaagaatctctgaaaac

SEQ ID NO: 145994 - DNA, 25 bp, Saccharomyces pastorianus
ggttctatcaacagaaaggtcttgc

SEQ ID NO: 145995 - DNA, 25 bp, Saccharomyces pastorianus
atgccaccacaagacgctgaaggtt

SEQ ID NO: 145996 - DNA, 25 bp, Saccharomyces pastorianus
tgtcagaccatacaagcacattgat

SEQ ID NO: 145997 - DNA, 25 bp, Saccharomyces pastorianus
cggtagaagaatctctgaaaacggt

SEQ ID NO: 145998 - DNA, 25 bp, Saccharomyces pastorianus
tgctgcctccgttgctagacacatt

SEQ ID NO: 145999 - DNA, 25 bp, Saccharomyces pastorianus
cagaaaggtcttgcaagctttggaa

SEQ ID NO: 146000 - DNA, 25 bp, Saccharomyces pastorianus
tgcctccgttgctagacacatttac

SEQ ID NO: 146001 - DNA, 25 bp, Saccharomyces pastorianus
aatcggtattgtcgaaatctctcca

SEQ ID NO: 146002 - DNA, 25 bp, Saccharomyces pastorianus
atcaacagaaaggtcttgcaagctt

SEQ ID NO: 146003 - DNA, 25 bp, Saccharomyces pastorianus
gcttccggttctatcaacagaaagg

SEQ ID NO: 146004 - DNA, 25 bp, Saccharomyces pastorianus
ggtaaggctccaagaatcttgtcca

SEQ ID NO: 146005 - DNA, 25 bp, Saccharomyces pastorianus
aggctccaagaatcttgtccaccgg

SEQ ID NO: 146006 - DNA, 25 bp, Saccharomyces pastorianus
gggtaaggctccaagaatcttgtcc

SEQ ID NO: 146007 - DNA, 25 bp, Saccharomyces pastorianus
gctccaagaatcttgtccaccggta

SEQ ID NO: 146008 - DNA, 25 bp, Saccharomyces pastorianus
gtaaggctccaagaatcttgtccac

SEQ ID NO: 146009 - DNA, 25 bp, Saccharomyces pastorianus
agggtaaggctccaagaatcttgtc

SEQ ID NO: 146010 - DNA, 25 bp, Saccharomyces pastorianus
aaggctccaagaatcttgtccaccg

SEQ ID NO: 146011 - DNA, 25 bp, Saccharomyces pastorianus
aagggtaaggctccaagaatcttgt

SEQ ID NO: 146012 - DNA, 25 bp, Saccharomyces pastorianus
ctccaagaatcttgtccaccggtag

SEQ ID NO: 146013 - DNA, 25 bp, Saccharomyces pastorianus
ggctccaagaatcttgtccaccggt

SEQ ID NO: 146014 - DNA, 25 bp, Saccharomyces pastorianus
aagaatcttgtccaccggtagaaag

SEQ ID NO: 146015 - DNA, 25 bp, Saccharomyces pastorianus
tcatagaaccgctccaaaatccgat

SEQ ID NO: 146016 - DNA, 25 bp, Saccharomyces pastorianus
taacgtctatttgaaattattggtc

SEQ ID NO: 146017 - DNA, 25 bp, Saccharomyces pastorianus
atccggtcatagaaccgctccaaaa

SEQ ID NO: 146018 - DNA, 25 bp, Saccharomyces pastorianus
caaaatccgataacgtctatttgaa

SEQ ID NO: 146019 - DNA, 25 bp, Saccharomyces pastorianus
accgctccaaaatccgataacgtct

SEQ ID NO: 146020 - DNA, 25 bp, Saccharomyces pastorianus
tagaaccgctccaaaatccgataac

SEQ ID NO: 146021 - DNA, 25 bp, Saccharomyces pastorianus
atccgataacgtctatttgaaatta

SEQ ID NO: 146022 - DNA, 25 bp, Saccharomyces pastorianus
ccgctccaaaatccgataacgtcta

SEQ ID NO: 146023 - DNA, 25 bp, Saccharomyces pastorianus
gaaccgctccaaaatccgataacgt

SEQ ID NO: 146024 - DNA, 25 bp, Saccharomyces pastorianus
gctccaaaatccgataacgtctatt

SEQ ID NO: 146025 - DNA, 25 bp, Saccharomyces pastorianus
gtcatagaaccgctccaaaatccga

SEQ ID NO: 146026 - DNA, 25 bp, Saccharomyces pastorianus
taacgtctatttgaaattattggtc

SEQ ID NO: 146027 - DNA, 25 bp, Saccharomyces pastorianus
atccggtcatagaaccgctccaaaa

SEQ ID NO: 146028 - DNA, 25 bp, Saccharomyces pastorianus
gggtattgatcacacttccaagcaa

SEQ ID NO: 146029 - DNA, 25 bp, Saccharomyces pastorianus
caagcaacacaaaagatccggtcat

SEQ ID NO: 146030 - DNA, 25 bp, Saccharomyces pastorianus
caaaatccgataacgtctatttgaa

SEQ ID NO: 146031 - DNA, 25 bp, Saccharomyces pastorianus
tagaaccgctccaaaatccgataac

SEQ ID NO: 146032 - DNA, 25 bp, Saccharomyces pastorianus
atccgataacgtctatttgaaatta

SEQ ID NO: 146033 - DNA, 25 bp, Saccharomyces pastorianus
ccgctccaaaatccgataacgtcta

SEQ ID NO: 146034 - DNA, 25 bp, Saccharomyces pastorianus
gaaccgctccaaaatccgataacgt

SEQ ID NO: 146035 - DNA, 25 bp, Saccharomyces pastorianus
gctccaaaatccgataacgtctatt

SEQ ID NO: 146036 - DNA, 25 bp, Saccharomyces pastorianus
gtcatagaaccgctccaaaatccga

SEQ ID NO: 146037 - DNA, 25 bp, Saccharomyces pastorianus
gacgtatggtctttgggtatcatga

SEQ ID NO: 146038 - DNA, 25 bp, Saccharomyces pastorianus
taccgattttgggttttgcgccaga

SEQ ID NO: 146039 - DNA, 25 bp, Saccharomyces pastorianus
ggtacaccaaagctcaagcatccag

SEQ ID NO: 146040 - DNA, 25 bp, Saccharomyces pastorianus
atagggcatcaaccgaagagctttt

SEQ ID NO: 146041 - DNA, 25 bp, Saccharomyces pastorianus
aatgtcttgctggacactagagcta

SEQ ID NO: 146042 - DNA, 25 bp, Saccharomyces pastorianus
gaagatccactaaaggcgttgtact

SEQ ID NO: 146043 - DNA, 25 bp, Saccharomyces pastorianus
ctaagcgtttgcctttgcgtagatg

SEQ ID NO: 146044 - DNA, 25 bp, Saccharomyces pastorianus
gatggcacctgaagttgtcaaacaa

SEQ ID NO: 146045 - DNA, 25 bp, Saccharomyces pastorianus
gataattcacattcaccactaacag

SEQ ID NO: 146046 - DNA, 25 bp, Saccharomyces pastorianus
gccactatggttgggacaccttact

SEQ ID NO: 146047 - DNA, 25 bp, Saccharomyces pastorianus
gagaatagtcccaccaacgataatt

SEQ ID NO: 146048 - DNA, 25 bp, Saccharomyces pastorianus
caacgatttccaaactatcggaccg

SEQ ID NO: 146049 - DNA, 25 bp, Saccharomyces pastorianus
gcacctagacctcccagttcaaata

SEQ ID NO: 146050 - DNA, 25 bp, Saccharomyces pastorianus
acctagacctcccagttcaaatagc

SEQ ID NO: 146051 - DNA, 25 bp, Saccharomyces pastorianus
tttccaaactatcggaccggcacct

SEQ ID NO: 146052 - DNA, 25 bp, Saccharomyces pastorianus
agacctcccagttcaaatagccagg

SEQ ID NO: 146053 - DNA, 25 bp, Saccharomyces pastorianus
tagacctcccagttcaaatagccag

SEQ ID NO: 146054 - DNA, 25 bp, Saccharomyces pastorianus
gacctcccagttcaaatagccaggc

SEQ ID NO: 146055 - DNA, 25 bp, Saccharomyces pastorianus
gatttccaaactatcggaccggcac

SEQ ID NO: 146056 - DNA, 25 bp, Saccharomyces pastorianus
caaactatcggaccggcacctagac

SEQ ID NO: 146057 - DNA, 25 bp, Saccharomyces pastorianus
gacaacgatttccaaactatcggac

SEQ ID NO: 146058 - DNA, 25 bp, Saccharomyces pastorianus
cgatttccaaactatcggaccggca

SEQ ID NO: 146059 - DNA, 25 bp, Saccharomyces pastorianus
aacaaattggagttgaaaatctaca

SEQ ID NO: 146060 - DNA, 25 bp, Saccharomyces pastorianus
aaatggatggcctccaagataaagt

SEQ ID NO: 146061 - DNA, 25 bp, Saccharomyces pastorianus
ctagatcaaaattccacccttggca

SEQ ID NO: 146062 - DNA, 25 bp, Saccharomyces pastorianus
tacaaacattaagtccgttgatttt

SEQ ID NO: 146063 - DNA, 25 bp, Saccharomyces pastorianus
gttgattttaagaacgatcccagta

SEQ ID NO: 146064 - DNA, 25 bp, Saccharomyces pastorianus
atcaaaattccacccttggcaacaa

SEQ ID NO: 146065 - DNA, 25 bp, Saccharomyces pastorianus
ttccacccttggcaacaaacaaatt

SEQ ID NO: 146066 - DNA, 25 bp, Saccharomyces pastorianus
gaacgatcccagtatctcataaaat

SEQ ID NO: 146067 - DNA, 25 bp, Saccharomyces pastorianus
tttaagaacgatcccagtatctcat

SEQ ID NO: 146068 - DNA, 25 bp, Saccharomyces pastorianus
tctcataaaatggatggcctccaag

SEQ ID NO: 146069 - DNA, 25 bp, Saccharomyces pastorianus
gaaaatctacaaacattaagtccgt

SEQ ID NO: 146070 - DNA, 25 bp, Saccharomyces pastorianus
atgtacctaataaggcacccgtagt

SEQ ID NO: 146071 - DNA, 25 bp, Saccharomyces pastorianus
aagaagttgttgctgtgttgctcaa

SEQ ID NO: 146072 - DNA, 25 bp, Saccharomyces pastorianus
taaggcgattccattgcttctacgt

SEQ ID NO: 146073 - DNA, 25 bp, Saccharomyces pastorianus
gggaagttcatctatgggccgcttt

SEQ ID NO: 146074 - DNA, 25 bp, Saccharomyces pastorianus
gactatggcctggaaatccttgaat

SEQ ID NO: 146075 - DNA, 25 bp, Saccharomyces pastorianus
gttgcatatcttcttcgagacactt

SEQ ID NO: 146076 - DNA, 25 bp, Saccharomyces pastorianus
gtgttgctcaaatctgctgcatgta

SEQ ID NO: 146077 - DNA, 25 bp, Saccharomyces pastorianus
gtagttggtactgcgagtgccactt

SEQ ID NO: 146078 - DNA, 25 bp, Saccharomyces pastorianus
agaggtcatcttgtcactgttaatc

SEQ ID NO: 146079 - DNA, 25 bp, Saccharomyces pastorianus
gagtgccactttacagcagcttatc

SEQ ID NO: 146080 - DNA, 25 bp, Saccharomyces pastorianus
caccgctgtaaggagttgtcgttgt

SEQ ID NO: 146081 - DNA, 25 bp, Saccharomyces pastorianus
gattctttacgtttatacacagtga

SEQ ID NO: 146082 - DNA, 25 bp, Saccharomyces pastorianus
gaggatactgatttttccgtgaatg

SEQ ID NO: 146083 - DNA, 25 bp, Saccharomyces pastorianus
acgcttgtcaatttcgtaagtcaga

SEQ ID NO: 146084 - DNA, 25 bp, Saccharomyces pastorianus
aattcgttattgatacgcttgtcaa

SEQ ID NO: 146085 - DNA, 25 bp, Saccharomyces pastorianus
aacatcattaattcaccattcgagt

SEQ ID NO: 146086 - DNA, 25 bp, Saccharomyces pastorianus
gaactgttaatgaactcttggacca

SEQ ID NO: 146087 - DNA, 25 bp, Saccharomyces pastorianus
acagagtttacctatgagtgtcatt

SEQ ID NO: 146088 - DNA, 25 bp, Saccharomyces pastorianus
gatccaagtgtcatacgatgttttt

SEQ ID NO: 146089 - DNA, 25 bp, Saccharomyces pastorianus
aatgaggttggtaattccgatgagc

SEQ ID NO: 146090 - DNA, 25 bp, Saccharomyces pastorianus
gagtttgatttccacctatatgatc

SEQ ID NO: 146091 - DNA, 25 bp, Saccharomyces pastorianus
ggaaaacttagtcatcgatagcttg

SEQ ID NO: 146092 - DNA, 25 bp, Saccharomyces pastorianus
tttcatgtatatttggatccaccac

SEQ ID NO: 146093 - DNA, 25 bp, Saccharomyces pastorianus
gtggtacgttttctgaattgtccca

SEQ ID NO: 146094 - DNA, 25 bp, Saccharomyces pastorianus
gtcccaaaaactatcttcgttcgat

SEQ ID NO: 146095 - DNA, 25 bp, Saccharomyces pastorianus
cacaaatcctcgctttcagacaaaa

SEQ ID NO: 146096 - DNA, 25 bp, Saccharomyces pastorianus
gacactttcatttatgccgtctggg

SEQ ID NO: 146097 - DNA, 25 bp, Saccharomyces pastorianus
aacccagagctcgataatttaaccg

SEQ ID NO: 146098 - DNA, 25 bp, Saccharomyces pastorianus
gccgtctgggattgttcatttttat

SEQ ID NO: 146099 - DNA, 25 bp, Saccharomyces pastorianus
agtgctctttagagtgcttgcaaga

SEQ ID NO: 146100 - DNA, 25 bp, Saccharomyces pastorianus
ctttgatgcaagactgtggtacgtt

SEQ ID NO: 146101 - DNA, 25 bp, Saccharomyces pastorianus
caattgcttctgtgatttgtcgaac

SEQ ID NO: 146102 - DNA, 25 bp, Saccharomyces pastorianus
gaaaatcgcttattacagggtcaga

SEQ ID NO: 146103 - DNA, 25 bp, Saccharomyces pastorianus
tatgttgttactaggagcggcgtga

SEQ ID NO: 146104 - DNA, 25 bp, Saccharomyces pastorianus
aggacgttcaagtcagcttcaatga

SEQ ID NO: 146105 - DNA, 25 bp, Saccharomyces pastorianus
gatacaccaagaggcacaatacctt

SEQ ID NO: 146106 - DNA, 25 bp, Saccharomyces pastorianus
gtatacgaggtatcccactaatttg

SEQ ID NO: 146107 - DNA, 25 bp, Saccharomyces pastorianus
gtgaggtatacgaggtatcccacta

SEQ ID NO: 146108 - DNA, 25 bp, Saccharomyces pastorianus
cggcgtgaggtatacgaggtatccc

SEQ ID NO: 146109 - DNA, 25 bp, Saccharomyces pastorianus
tcagcttcaatgacaagtatgttgt

SEQ ID NO: 146110 - DNA, 25 bp, Saccharomyces pastorianus
aataaggacgttcaagtcagcttca

SEQ ID NO: 146111 - DNA, 25 bp, Saccharomyces pastorianus
accaagaggcacaataccttttggg

SEQ ID NO: 146112 - DNA, 25 bp, Saccharomyces pastorianus
gttcaagtcagcttcaatgacaagt

SEQ ID NO: 146113 - DNA, 25 bp, Saccharomyces pastorianus
gaggtatacgaggtatcccactaat

SEQ ID NO: 146114 - DNA, 25 bp, Saccharomyces pastorianus
tgacgatgaatatgaagttggcagt

SEQ ID NO: 146115 - DNA, 25 bp, Saccharomyces pastorianus
gggattagacaaaccaggcatatac

SEQ ID NO: 146116 - DNA, 25 bp, Saccharomyces pastorianus
gaatatgaagttggcagtgaaggca

SEQ ID NO: 146117 - DNA, 25 bp, Saccharomyces pastorianus
ccaggcatatacatttattcgacaa

SEQ ID NO: 146118 - DNA, 25 bp, Saccharomyces pastorianus
aaaggatgtcgttttcaattcagat

SEQ ID NO: 146119 - DNA, 25 bp, Saccharomyces pastorianus
gtgaaggcaataacaatagctctgc

SEQ ID NO: 146120 - DNA, 25 bp, Saccharomyces pastorianus
aaaccaggcatatacatttattcga

SEQ ID NO: 146121 - DNA, 25 bp, Saccharomyces pastorianus
gacaaaggatgtcgttttcaattca

SEQ ID NO: 146122 - DNA, 25 bp, Saccharomyces pastorianus
aggatgtcgttttcaattcagatga

SEQ ID NO: 146123 - DNA, 25 bp, Saccharomyces pastorianus
gacaaaccaggcatatacatttatt

SEQ ID NO: 146124 - DNA, 25 bp, Saccharomyces pastorianus
ggcatatacatttattcgacaaagg

SEQ ID NO: 146125 - DNA, 25 bp, Saccharomyces pastorianus
gaacttgtggagacatagtccagaa

SEQ ID NO: 146126 - DNA, 25 bp, Saccharomyces pastorianus
ttctgctgtgaaagagtgcccgttt

SEQ ID NO: 146127 - DNA, 25 bp, Saccharomyces pastorianus
aattgcctctttatgacaattcggc

SEQ ID NO: 146128 - DNA, 25 bp, Saccharomyces pastorianus
gcccgtttatgtatctacggtgcta

SEQ ID NO: 146129 - DNA, 25 bp, Saccharomyces pastorianus
gctgtcatccaatgaagctaggttc

SEQ ID NO: 146130 - DNA, 25 bp, Saccharomyces pastorianus
atctacggtgctaagaaactcttcc

SEQ ID NO: 146131 - DNA, 25 bp, Saccharomyces pastorianus
acatagtccagaagaattggctgct

SEQ ID NO: 146132 - DNA, 25 bp, Saccharomyces pastorianus
aaagagtgcccgtttatgtatctac

SEQ ID NO: 146133 - DNA, 25 bp, Saccharomyces pastorianus
gacaattcggcagtatatgcagaag

SEQ ID NO: 146134 - DNA, 25 bp, Saccharomyces pastorianus
ggctgcttacaatagctgtcatcca

SEQ ID NO: 146135 - DNA, 25 bp, Saccharomyces pastorianus
attacttttaggagtttctgctgtg

SEQ ID NO: 146136 - DNA, 25 bp, Saccharomyces pastorianus
gactattcttgtggtgcttctatta

SEQ ID NO: 146137 - DNA, 25 bp, Saccharomyces pastorianus
gaaattaggctatgcgcgtgataaa

SEQ ID NO: 146138 - DNA, 25 bp, Saccharomyces pastorianus
tatcggtttgccaagtacgccttaa

SEQ ID NO: 146139 - DNA, 25 bp, Saccharomyces pastorianus
acttcgaccgtgatcacatgggagt

SEQ ID NO: 146140 - DNA, 25 bp, Saccharomyces pastorianus
ggagggaatctcaggacgcatcaac

SEQ ID NO: 146141 - DNA, 25 bp, Saccharomyces pastorianus
aatcgtccagaaaagcgtaggccac

SEQ ID NO: 146142 - DNA, 25 bp, Saccharomyces pastorianus
gacgcatcaacggatcggcacgata

SEQ ID NO: 146143 - DNA, 25 bp, Saccharomyces pastorianus
atgggtttacttacgctattgacta

SEQ ID NO: 146144 - DNA, 25 bp, Saccharomyces pastorianus
atttacagaccatatcacgctacga

SEQ ID NO: 146145 - DNA, 25 bp, Saccharomyces pastorianus
ttccttgccgatgtgtcgaacttat

SEQ ID NO: 146146 - DNA, 25 bp, Saccharomyces pastorianus
gacatgctatgtcacttcgaccgtg

SEQ ID NO: 146147 - DNA, 25 bp, Saccharomyces pastorianus
ggaagatcttctttatcaaagttac

SEQ ID NO: 146148 - DNA, 25 bp, Saccharomyces pastorianus
tcaattttcctgtccgaatgatctt

SEQ ID NO: 146149 - DNA, 25 bp, Saccharomyces pastorianus
tatggacactgactactcaacctgt

SEQ ID NO: 146150 - DNA, 25 bp, Saccharomyces pastorianus
gttacaatttctatatggacactga

SEQ ID NO: 146151 - DNA, 25 bp, Saccharomyces pastorianus
tacattagtacgaaattgcccaagc

SEQ ID NO: 146152 - DNA, 25 bp, Saccharomyces pastorianus
agcgattttcaattttcctgtccga

SEQ ID NO: 146153 - DNA, 25 bp, Saccharomyces pastorianus
ctgtaattatataggtaactcatcc

SEQ ID NO: 146154 - DNA, 25 bp, Saccharomyces pastorianus
ttcctgtccgaatgatcttactacg

SEQ ID NO: 146155 - DNA, 25 bp, Saccharomyces pastorianus
acgaaattgcccaagcgattttcaa

SEQ ID NO: 146156 - DNA, 25 bp, Saccharomyces pastorianus
atcttactacggaagatcttcttta

SEQ ID NO: 146157 - DNA, 25 bp, Saccharomyces pastorianus
gacactgactactcaacctgtaatt

SEQ ID NO: 146158 - DNA, 25 bp, Saccharomyces pastorianus
gaatgtcaccgcagacgccaaagtt

SEQ ID NO: 146159 - DNA, 25 bp, Saccharomyces pastorianus
ggactgaatgcctcaacaacttatg

SEQ ID NO: 146160 - DNA, 25 bp, Saccharomyces pastorianus
tgggcggcattttattttcacatgt

SEQ ID NO: 146161 - DNA, 25 bp, Saccharomyces pastorianus
gagcgtactgacttggcgattcaaa

SEQ ID NO: 146162 - DNA, 25 bp, Saccharomyces pastorianus
taaaactctcatggcgcagacatat

SEQ ID NO: 146163 - DNA, 25 bp, Saccharomyces pastorianus
gaggtcctggacactgatatgaatt

SEQ ID NO: 146164 - DNA, 25 bp, Saccharomyces pastorianus
cctacatcctcattttctgtgggta

SEQ ID NO: 146165 - DNA, 25 bp, Saccharomyces pastorianus
agtgacgtcgcttactctgttccta

SEQ ID NO: 146166 - DNA, 25 bp, Saccharomyces pastorianus
gaagtaccgatgtctgctctttgat

SEQ ID NO: 146167 - DNA, 25 bp, Saccharomyces pastorianus
gatctttggtttggacttctgcagt

SEQ ID NO: 146168 - DNA, 25 bp, Saccharomyces pastorianus
ggaccatatttagtgtcttcccaaa

SEQ ID NO: 146169 - DNA, 25 bp, Saccharomyces pastorianus
caatgtttctgtagtctgtacccct

SEQ ID NO: 146170 - DNA, 25 bp, Saccharomyces pastorianus
gaacagtagctgcttaccggtggaa

SEQ ID NO: 146171 - DNA, 25 bp, Saccharomyces pastorianus
gagttctttcactggtaacttctcc

SEQ ID NO: 146172 - DNA, 25 bp, Saccharomyces pastorianus
aagtacccaatttgctccaagtgat

SEQ ID NO: 146173 - DNA, 25 bp, Saccharomyces pastorianus
aaccctgacactaatgagccatttg

SEQ ID NO: 146174 - DNA, 25 bp, Saccharomyces pastorianus
taacttctccgctacatttgatgag

SEQ ID NO: 146175 - DNA, 25 bp, Saccharomyces pastorianus
agtctgtacccctgaaatttctgat

SEQ ID NO: 146176 - DNA, 25 bp, Saccharomyces pastorianus
ttaccatccgaggaagcagcttgtt

SEQ ID NO: 146177 - DNA, 25 bp, Saccharomyces pastorianus
aagtgattcaaactcccacaccttg

SEQ ID NO: 146178 - DNA, 25 bp, Saccharomyces pastorianus
gcagcttgttacgttgcattcaaaa

SEQ ID NO: 146179 - DNA, 25 bp, Saccharomyces pastorianus
gaagagctattcaccctacaagtgg

SEQ ID NO: 146180 - DNA, 25 bp, Saccharomyces pastorianus
gcctgacgctattagatcgctgact

SEQ ID NO: 146181 - DNA, 25 bp, Saccharomyces pastorianus
aacggttccgatttgattaagcctg

SEQ ID NO: 146182 - DNA, 25 bp, Saccharomyces pastorianus
gttgatggcaacctcttcaatcatg

SEQ ID NO: 146183 - DNA, 25 bp, Saccharomyces pastorianus
agggcgaaaccttcccacagaatga

SEQ ID NO: 146184 - DNA, 25 bp, Saccharomyces pastorianus
gtttgaaaactcgacctcgggcgat

SEQ ID NO: 146185 - DNA, 25 bp, Saccharomyces pastorianus
gacctcgggcgatttacctgataaa

SEQ ID NO: 146186 - DNA, 25 bp, Saccharomyces pastorianus
aagcaactgcattatttttctctat

SEQ ID NO: 146187 - DNA, 25 bp, Saccharomyces pastorianus
tgaatctactgctttttccgctgaa

SEQ ID NO: 146188 - DNA, 25 bp, Saccharomyces pastorianus
cgtttattgatttctcgcttgctga

SEQ ID NO: 146189 - DNA, 25 bp, Saccharomyces pastorianus
gcaggctgtttatttggcaatcaag

SEQ ID NO: 146190 - DNA, 25 bp, Saccharomyces pastorianus
tagacatccttcaatatcctcagca

SEQ ID NO: 146191 - DNA, 25 bp, Saccharomyces pastorianus
aatcttctcagcatgtggacttgga

SEQ ID NO: 146192 - DNA, 25 bp, Saccharomyces pastorianus
aaaggttcagtgctacttcgctgcc

SEQ ID NO: 146193 - DNA, 25 bp, Saccharomyces pastorianus
aagaagtcactttccctcggtggtg

SEQ ID NO: 146194 - DNA, 25 bp, Saccharomyces pastorianus
tcctctactagttctctcttaaacg

SEQ ID NO: 146195 - DNA, 25 bp, Saccharomyces pastorianus
taactggcacataccctctaggaat

SEQ ID NO: 146196 - DNA, 25 bp, Saccharomyces pastorianus
gctctggcgttattctttttcgtat

SEQ ID NO: 146197 - DNA, 25 bp, Saccharomyces pastorianus
gaatacagcgtctacttttgccact

SEQ ID NO: 146198 - DNA, 25 bp, Saccharomyces pastorianus
ttttgccacttatgatctgccgaca

SEQ ID NO: 146199 - DNA, 25 bp, Saccharomyces pastorianus
cgccgggcggcagagattctattat

SEQ ID NO: 146200 - DNA, 25 bp, Saccharomyces pastorianus
actcactgggtgatgctgacgctaa

SEQ ID NO: 146201 - DNA, 25 bp, Saccharomyces pastorianus
tggcgccatcgcaggtgtcgtagta

SEQ ID NO: 146202 - DNA, 25 bp, Saccharomyces pastorianus
agtccttcatcttagtgtggctcat

SEQ ID NO: 146203 - DNA, 25 bp, Saccharomyces pastorianus
atacgagccgcgttggctgaccaat

SEQ ID NO: 146204 - DNA, 25 bp, Saccharomyces pastorianus
gcgttggctgaccaattcacatata

SEQ ID NO: 146205 - DNA, 25 bp, Saccharomyces pastorianus
tgcagctagatctcatacacaagtc

SEQ ID NO: 146206 - DNA, 25 bp, Saccharomyces pastorianus
agatctcatacacaagtccttcatc

SEQ ID NO: 146207 - DNA, 25 bp, Saccharomyces pastorianus
gctattcagctagtgatatacgaaa

SEQ ID NO: 146208 - DNA, 25 bp, Saccharomyces pastorianus
catatatatacgagccgcgttggct

SEQ ID NO: 146209 - DNA, 25 bp, Saccharomyces pastorianus
gacttaccagggtgtttacgagtat

SEQ ID NO: 146210 - DNA, 25 bp, Saccharomyces pastorianus
aaagcttgctattcagctagtgata

SEQ ID NO: 146211 - DNA, 25 bp, Saccharomyces pastorianus
cttagtgtggctcatatatatacga

SEQ ID NO: 146212 - DNA, 25 bp, Saccharomyces pastorianus
gaccaattcacatataaagcttgct

SEQ ID NO: 146213 - DNA, 25 bp, Saccharomyces pastorianus
aaaccgtggtcggatgtgccattga

SEQ ID NO: 146214 - DNA, 25 bp, Saccharomyces pastorianus
ggaacactgctatataacccaatga

SEQ ID NO: 146215 - DNA, 25 bp, Saccharomyces pastorianus
agtggccaccatgatttctgatata

SEQ ID NO: 146216 - DNA, 25 bp, Saccharomyces pastorianus
aaggctcagctgcatatcccgagaa

SEQ ID NO: 146217 - DNA, 25 bp, Saccharomyces pastorianus
taaaaattctccgagcttaccaccg

SEQ ID NO: 146218 - DNA, 25 bp, Saccharomyces pastorianus
gaagtctagcactgccgtcgatata

SEQ ID NO: 146219 - DNA, 25 bp, Saccharomyces pastorianus
ctgggagaactcacggtagccttgg

SEQ ID NO: 146220 - DNA, 25 bp, Saccharomyces pastorianus
gagcttaccaccgtataactctggg

SEQ ID NO: 146221 - DNA, 25 bp, Saccharomyces pastorianus
gacttctaatgatggtgacggcgtt

SEQ ID NO: 146222 - DNA, 25 bp, Saccharomyces pastorianus
gtagccttggtcattcttgcggtgt

SEQ ID NO: 146223 - DNA, 25 bp, Saccharomyces pastorianus
gtgtggctcgtacaattgcccatag

SEQ ID NO: 146224 - DNA, 25 bp, Saccharomyces pastorianus
aaggacctcagtgatgtcatctact

SEQ ID NO: 146225 - DNA, 25 bp, Saccharomyces pastorianus
atctactctgtctcttgccaaatcg

SEQ ID NO: 146226 - DNA, 25 bp, Saccharomyces pastorianus
tcagggatggttgttggatggtaga

SEQ ID NO: 146227 - DNA, 25 bp, Saccharomyces pastorianus
gtagaaaggacctcagtgatgtcat

SEQ ID NO: 146228 - DNA, 25 bp, Saccharomyces pastorianus
tctactctgtctcttgccaaatcgt

SEQ ID NO: 146229 - DNA, 25 bp, Saccharomyces pastorianus
gttggatggtagaaaggacctcagt

SEQ ID NO: 146230 - DNA, 25 bp, Saccharomyces pastorianus
acctcagtgatgtcatctactctgt

SEQ ID NO: 146231 - DNA, 25 bp, Saccharomyces pastorianus
gaaaggacctcagtgatgtcatcta

SEQ ID NO: 146232 - DNA, 25 bp, Saccharomyces pastorianus
tcagtgatgtcatctactctgtctc

SEQ ID NO: 146233 - DNA, 25 bp, Saccharomyces pastorianus
ggacctcagtgatgtcatctactct

SEQ ID NO: 146234 - DNA, 25 bp, Saccharomyces pastorianus
tactctgtctcttgccaaatcgtgc

SEQ ID NO: 146235 - DNA, 25 bp, Saccharomyces pastorianus
gagattcaatgtttcctaagtgcga

SEQ ID NO: 146236 - DNA, 25 bp, Saccharomyces pastorianus
tcctaagtgcgacttcggtatgtgc

SEQ ID NO: 146237 - DNA, 25 bp, Saccharomyces pastorianus
ccaagctcttggagcggcatcggta

SEQ ID NO: 146238 - DNA, 25 bp, Saccharomyces pastorianus
aactccaataggaaggcatcgtggc

SEQ ID NO: 146239 - DNA, 25 bp, Saccharomyces pastorianus
gtaatggccttgcagttggttttta

SEQ ID NO: 146240 - DNA, 25 bp, Saccharomyces pastorianus
ttcggcctcaccaaagacagacgtc

SEQ ID NO: 146241 - DNA, 25 bp, Saccharomyces pastorianus
gcatcgtggccttcgggagattcaa

SEQ ID NO: 146242 - DNA, 25 bp, Saccharomyces pastorianus
gacagacgtcttcgtttcatcgtta

SEQ ID NO: 146243 - DNA, 25 bp, Saccharomyces pastorianus
ttcgtttcatcgttaccaacgtcgc

SEQ ID NO: 146244 - DNA, 25 bp, Saccharomyces pastorianus
taccagttggtaacttcttcggcct

SEQ ID NO: 146245 - DNA, 25 bp, Saccharomyces pastorianus
gagcggcatcggtaatggccttgca

SEQ ID NO: 146246 - DNA, 25 bp, Saccharomyces pastorianus
ttctttggaagcgaatgcagccgat

SEQ ID NO: 146247 - DNA, 25 bp, Saccharomyces pastorianus
gaacttgtttggtggatccatacca

SEQ ID NO: 146248 - DNA, 25 bp, Saccharomyces pastorianus
aagccacgtggcatctgaaatgtct

SEQ ID NO: 146249 - DNA, 25 bp, Saccharomyces pastorianus
aagtagttcctttgcgccagataga

SEQ ID NO: 146250 - DNA, 25 bp, Saccharomyces pastorianus
tttgccaaatttgccgcggaaagga

SEQ ID NO: 146251 - DNA, 25 bp, Saccharomyces pastorianus
gatgatgaacgacctcagaccgtta

SEQ ID NO: 146252 - DNA, 25 bp, Saccharomyces pastorianus
gaccgttagagaacgccatggcgta

SEQ ID NO: 146253 - DNA, 25 bp, Saccharomyces pastorianus
tagtttgggctcatcacagccatca

SEQ ID NO: 146254 - DNA, 25 bp, Saccharomyces pastorianus
aagcctcatttctttagcaagccac

SEQ ID NO: 146255 - DNA, 25 bp, Saccharomyces pastorianus
ggccatccgcctttttggcaaaaag

SEQ ID NO: 146256 - DNA, 25 bp, Saccharomyces pastorianus
gatgacgatgtcaactcggaatcaa

SEQ ID NO: 146257 - DNA, 25 bp, Saccharomyces pastorianus
aatacggttatttcctcattccata

SEQ ID NO: 146258 - DNA, 25 bp, Saccharomyces pastorianus
ggatgacatctctttaaatacggtt

SEQ ID NO: 146259 - DNA, 25 bp, Saccharomyces pastorianus
agctgaatatcgcatcttgacggat

SEQ ID NO: 146260 - DNA, 25 bp, Saccharomyces pastorianus
gacggatgatctgttacctattctc

SEQ ID NO: 146261 - DNA, 25 bp, Saccharomyces pastorianus
aatgtcattgctatagaacccggtg

SEQ ID NO: 146262 - DNA, 25 bp, Saccharomyces pastorianus
acatctatcgatactttgccaccaa

SEQ ID NO: 146263 - DNA, 25 bp, Saccharomyces pastorianus
aattgtctacaactattggtcctta

SEQ ID NO: 146264 - DNA, 25 bp, Saccharomyces pastorianus
tttgccaccaaacgtctctatggat

SEQ ID NO: 146265 - DNA, 25 bp, Saccharomyces pastorianus
gaccgattatcaagaactcctaggg

SEQ ID NO: 146266 - DNA, 25 bp, Saccharomyces pastorianus
tggtccttatgacttggcctttaat

SEQ ID NO: 146267 - DNA, 25 bp, Saccharomyces pastorianus
acaaatgttctcttgcagcaaagct

SEQ ID NO: 146268 - DNA, 25 bp, Saccharomyces pastorianus
tgtactcaacaacgaccctattttt

SEQ ID NO: 146269 - DNA, 25 bp, Saccharomyces pastorianus
aacgatccctacattgttccagatg

SEQ ID NO: 146270 - DNA, 25 bp, Saccharomyces pastorianus
ctgacctgactgtttcttgtgaact

SEQ ID NO: 146271 - DNA, 25 bp, Saccharomyces pastorianus
ttaagtcgtggctaaccgtaaatgt

SEQ ID NO: 146272 - DNA, 25 bp, Saccharomyces pastorianus
gataggatactccattccacgtaaa

SEQ ID NO: 146273 - DNA, 25 bp, Saccharomyces pastorianus
ttcttcctatcttctacgagttcgt

SEQ ID NO: 146274 - DNA, 25 bp, Saccharomyces pastorianus
gactacagggctttattgttgctga

SEQ ID NO: 146275 - DNA, 25 bp, Saccharomyces pastorianus
ggactgttgaagtttctgacctgac

SEQ ID NO: 146276 - DNA, 25 bp, Saccharomyces pastorianus
gcgacgcagcatacttcaaggattt

SEQ ID NO: 146277 - DNA, 25 bp, Saccharomyces pastorianus
gaaacagttaatccacccaatgaat

SEQ ID NO: 146278 - DNA, 25 bp, Saccharomyces pastorianus
actgctcaagcatataacccacaca

SEQ ID NO: 146279 - DNA, 25 bp, Saccharomyces pastorianus
cctagaaaaattgagggcccgcaag

SEQ ID NO: 146280 - DNA, 25 bp, Saccharomyces pastorianus
tgcaagcttgctgcctgcggtccta

SEQ ID NO: 146281 - DNA, 25 bp, Saccharomyces pastorianus
tagaaaaattgagggcccgcaagga

SEQ ID NO: 146282 - DNA, 25 bp, Saccharomyces pastorianus
tgctgcctgcggtcctagaaaaatt

SEQ ID NO: 146283 - DNA, 25 bp, Saccharomyces pastorianus
ctgcctgcggtcctagaaaaattga

SEQ ID NO: 146284 - DNA, 25 bp, Saccharomyces pastorianus
caagcttgctgcctgcggtcctaga

SEQ ID NO: 146285 - DNA, 25 bp, Saccharomyces pastorianus
ctagaaaaattgagggcccgcaagg

SEQ ID NO: 146286 - DNA, 25 bp, Saccharomyces pastorianus
ttgctgcctgcggtcctagaaaaat

SEQ ID NO: 146287 - DNA, 25 bp, Saccharomyces pastorianus
aagcttgctgcctgcggtcctagaa

SEQ ID NO: 146288 - DNA, 25 bp, Saccharomyces pastorianus
agcttgctgcctgcggtcctagaaa

SEQ ID NO: 146289 - DNA, 25 bp, Saccharomyces pastorianus
gctgcctgcggtcctagaaaaattg

SEQ ID NO: 146290 - DNA, 25 bp, Saccharomyces pastorianus
tgaagatttaccatcgccatccaag

SEQ ID NO: 146291 - DNA, 25 bp, Saccharomyces pastorianus
gaagggtctattctttattctccag

SEQ ID NO: 146292 - DNA, 25 bp, Saccharomyces pastorianus
aagataggcgcgctgttatggataa

SEQ ID NO: 146293 - DNA, 25 bp, Saccharomyces pastorianus
agaacagcaattcgccttcatctga

SEQ ID NO: 146294 - DNA, 25 bp, Saccharomyces pastorianus
gtcctgctaaaagtgacccatcttc

SEQ ID NO: 146295 - DNA, 25 bp, Saccharomyces pastorianus
actgccgatacagtgattcacgctg

SEQ ID NO: 146296 - DNA, 25 bp, Saccharomyces pastorianus
gccatccaagacatctgcgctggaa

SEQ ID NO: 146297 - DNA, 25 bp, Saccharomyces pastorianus
ttccgccagaaagagagccctagtg

SEQ ID NO: 146298 - DNA, 25 bp, Saccharomyces pastorianus
aacgctccacaattactcaacgatt

SEQ ID NO: 146299 - DNA, 25 bp, Saccharomyces pastorianus
agaagctatggaccctactgccgat

SEQ ID NO: 146300 - DNA, 25 bp, Saccharomyces pastorianus
gcatacgtacggtgaagattctggt

SEQ ID NO: 146301 - DNA, 25 bp, Saccharomyces pastorianus
gatggcgcagaagatctctctactc

SEQ ID NO: 146302 - DNA, 25 bp, Saccharomyces pastorianus
gactcagaaaatccaccgtgtcttc

SEQ ID NO: 146303 - DNA, 25 bp, Saccharomyces pastorianus
gtgtcttctgctccatatttagagg

SEQ ID NO: 146304 - DNA, 25 bp, Saccharomyces pastorianus
tcttttctcgatgccttatctcaaa

SEQ ID NO: 146305 - DNA, 25 bp, Saccharomyces pastorianus
ttcgggtattggacctctacatagt

SEQ ID NO: 146306 - DNA, 25 bp, Saccharomyces pastorianus
gcatcggctgcttttggagagaaca

SEQ ID NO: 146307 - DNA, 25 bp, Saccharomyces pastorianus
tcaaaatgttactgcatcggctgct

SEQ ID NO: 146308 - DNA, 25 bp, Saccharomyces pastorianus
atcaggtcctgggtcttttctcgat

SEQ ID NO: 146309 - DNA, 25 bp, Saccharomyces pastorianus
atctctctactcaatcatctgtact

SEQ ID NO: 146310 - DNA, 25 bp, Saccharomyces pastorianus
agttcccgccaaattgttcggtgat

SEQ ID NO: 146311 - DNA, 25 bp, Saccharomyces pastorianus
gaacactcagagctatcttcaggat

SEQ ID NO: 146312 - DNA, 25 bp, Saccharomyces pastorianus
ttaagtgccgcttactctggaagct

SEQ ID NO: 146313 - DNA, 25 bp, Saccharomyces pastorianus
tgttctatctacatccgtgttcgga

SEQ ID NO: 146314 - DNA, 25 bp, Saccharomyces pastorianus
tgcatcttttttcatcgctctaatt

SEQ ID NO: 146315 - DNA, 25 bp, Saccharomyces pastorianus
cgctctaattgttctgatccagggc

SEQ ID NO: 146316 - DNA, 25 bp, Saccharomyces pastorianus
agcctatagactttgtcgctgcata

SEQ ID NO: 146317 - DNA, 25 bp, Saccharomyces pastorianus
tatcgatatcgattctgaccgccgg

SEQ ID NO: 146318 - DNA, 25 bp, Saccharomyces pastorianus
tggcgccaaggttcttgtctaacgt

SEQ ID NO: 146319 - DNA, 25 bp, Saccharomyces pastorianus
taatcaccattctttccgcaggtaa

SEQ ID NO: 146320 - DNA, 25 bp, Saccharomyces pastorianus
ctttgcctggcttttgatttcattt

SEQ ID NO: 146321 - DNA, 25 bp, Saccharomyces pastorianus
agcggcaaggcctttaactggttat

SEQ ID NO: 146322 - DNA, 25 bp, Saccharomyces pastorianus
aacataactggtgtggccggtttct

SEQ ID NO: 146323 - DNA, 25 bp, Saccharomyces pastorianus
attcacccggctcagtgggctttga

SEQ ID NO: 146324 - DNA, 25 bp, Saccharomyces pastorianus
aaggctctgagaaagtatgctgatc

SEQ ID NO: 146325 - DNA, 25 bp, Saccharomyces pastorianus
ttatgctatcaaattcacccggctc

SEQ ID NO: 146326 - DNA, 25 bp, Saccharomyces pastorianus
gaggccgcaccattcaaattaactt

SEQ ID NO: 146327 - DNA, 25 bp, Saccharomyces pastorianus
actaaaagttcgttcaaggctctga

SEQ ID NO: 146328 - DNA, 25 bp, Saccharomyces pastorianus
gaaggccatgtaagtcacatcgatt

SEQ ID NO: 146329 - DNA, 25 bp, Saccharomyces pastorianus
caatatgcagccttgtttcgatgct

SEQ ID NO: 146330 - DNA, 25 bp, Saccharomyces pastorianus
agacaactttgcttcttcgttagcc

SEQ ID NO: 146331 - DNA, 25 bp, Saccharomyces pastorianus
acaagggtggtattgcctctttgaa

SEQ ID NO: 146332 - DNA, 25 bp, Saccharomyces pastorianus
gtcatttgctatctcttgcaggtta

SEQ ID NO: 146333 - DNA, 25 bp, Saccharomyces pastorianus
ttcgttagccgcatattctgtcatt

SEQ ID NO: 146334 - DNA, 25 bp, Saccharomyces pastorianus
tagctcaaatcgcagttcaactccg

SEQ ID NO: 146335 - DNA, 25 bp, Saccharomyces pastorianus
ttcaactccgacttctccaatagat

SEQ ID NO: 146336 - DNA, 25 bp, Saccharomyces pastorianus
gatgcatcattcaggaaatccagac

SEQ ID NO: 146337 - DNA, 25 bp, Saccharomyces pastorianus
ggacgcggacgctttaaactctgat

SEQ ID NO: 146338 - DNA, 25 bp, Saccharomyces pastorianus
ataccgcaaaggctctcgatggaaa

SEQ ID NO: 146339 - DNA, 25 bp, Saccharomyces pastorianus
tgatcacttcaccagttctatgcca

SEQ ID NO: 146340 - DNA, 25 bp, Saccharomyces pastorianus
gaatctcatcttcaatcaaactccc

SEQ ID NO: 146341 - DNA, 25 bp, Saccharomyces pastorianus
gacggaagcatttcaaataccgcaa

SEQ ID NO: 146342 - DNA, 25 bp, Saccharomyces pastorianus
ggtgattatatttctccaaagggac

SEQ ID NO: 146343 - DNA, 25 bp, Saccharomyces pastorianus
taagcgaagtgaccaaaccattagt

SEQ ID NO: 146344 - DNA, 25 bp, Saccharomyces pastorianus
gaacatgaccttgaaaaatacccta

SEQ ID NO: 146345 - DNA, 25 bp, Saccharomyces pastorianus
ggaattctccagcttactatatggc

SEQ ID NO: 146346 - DNA, 25 bp, Saccharomyces pastorianus
gaagataaggaattctccagcttac

SEQ ID NO: 146347 - DNA, 25 bp, Saccharomyces pastorianus
aaggaattctccagcttactatatg

SEQ ID NO: 146348 - DNA, 25 bp, Saccharomyces pastorianus
gacgaagataaggaattctccagct

SEQ ID NO: 146349 - DNA, 25 bp, Saccharomyces pastorianus
agataaggaattctccagcttacta

SEQ ID NO: 146350 - DNA, 25 bp, Saccharomyces pastorianus
taaggaattctccagcttactatat

SEQ ID NO: 146351 - DNA, 25 bp, Saccharomyces pastorianus
aggaattctccagcttactatatgg

SEQ ID NO: 146352 - DNA, 25 bp, Saccharomyces pastorianus
aagataaggaattctccagcttact

SEQ ID NO: 146353 - DNA, 25 bp, Saccharomyces pastorianus
ataaggaattctccagcttactata

SEQ ID NO: 146354 - DNA, 25 bp, Saccharomyces pastorianus
gataaggaattctccagcttactat

SEQ ID NO: 146355 - DNA, 25 bp, Saccharomyces pastorianus
gacgacgaagataaggaattctcca

SEQ ID NO: 146356 - DNA, 25 bp, Saccharomyces pastorianus
gcagatcatatcgatgtccctgaaa

SEQ ID NO: 146357 - DNA, 25 bp, Saccharomyces pastorianus
gaagaaaagcctattttagccttag

SEQ ID NO: 146358 - DNA, 25 bp, Saccharomyces pastorianus
aatctatgcgattcttttcgttgat

SEQ ID NO: 146359 - DNA, 25 bp, Saccharomyces pastorianus
gctctccctcagttccaaaagaaga

SEQ ID NO: 146360 - DNA, 25 bp, Saccharomyces pastorianus
gaagctatcagatccctaatctatg

SEQ ID NO: 146361 - DNA, 25 bp, Saccharomyces pastorianus
tggagaattccttatcttcgtcgtc

SEQ ID NO: 146362 - DNA, 25 bp, Saccharomyces pastorianus
atttcttcagactttagtgacccct

SEQ ID NO: 146363 - DNA, 25 bp, Saccharomyces pastorianus
tttagtgacccctcgggagatatcg

SEQ ID NO: 146364 - DNA, 25 bp, Saccharomyces pastorianus
gaacgagctcaagattccgaaagat

SEQ ID NO: 146365 - DNA, 25 bp, Saccharomyces pastorianus
atctccaccgaagaacagcttgtca

SEQ ID NO: 146366 - DNA, 25 bp, Saccharomyces pastorianus
atcttcgtcgtcttctaacatttct

SEQ ID NO: 146367 - DNA, 25 bp, Saccharomyces pastorianus
ttgaccctgccactaaggcgaaggc

SEQ ID NO: 146368 - DNA, 25 bp, Saccharomyces pastorianus
gaatcttcctttagacaagtccaag

SEQ ID NO: 146369 - DNA, 25 bp, Saccharomyces pastorianus
tatcccatggtttgcgtgggctttt

SEQ ID NO: 146370 - DNA, 25 bp, Saccharomyces pastorianus
gaaggctatctttgacgaaccattt

SEQ ID NO: 146371 - DNA, 25 bp, Saccharomyces pastorianus
gtgtgtcctgatcaatatcccatgg

SEQ ID NO: 146372 - DNA, 25 bp, Saccharomyces pastorianus
tccacccatctctattgctaggatg

SEQ ID NO: 146373 - DNA, 25 bp, Saccharomyces pastorianus
actgtagctccccaaggtgtagaaa

SEQ ID NO: 146374 - DNA, 25 bp, Saccharomyces pastorianus
acgtcatgcaagatcattaccctga

SEQ ID NO: 146375 - DNA, 25 bp, Saccharomyces pastorianus
ttatcactgataaagctccacccat

SEQ ID NO: 146376 - DNA, 25 bp, Saccharomyces pastorianus
aagatgatgtatccgttccttgacc

SEQ ID NO: 146377 - DNA, 25 bp, Saccharomyces pastorianus
atggaaactgcgacaactgtagctc

SEQ ID NO: 146378 - DNA, 25 bp, Saccharomyces pastorianus
cccttgagtgattgggagaagtttt

SEQ ID NO: 146379 - DNA, 25 bp, Saccharomyces pastorianus
tgattgggagaagttttggctttct

SEQ ID NO: 146380 - DNA, 25 bp, Saccharomyces pastorianus
gacccttgagtgattgggagaagtt

SEQ ID NO: 146381 - DNA, 25 bp, Saccharomyces pastorianus
agacccttgagtgattgggagaagt

SEQ ID NO: 146382 - DNA, 25 bp, Saccharomyces pastorianus
cagacccttgagtgattgggagaag

SEQ ID NO: 146383 - DNA, 25 bp, Saccharomyces pastorianus
caatgacagacccttgagtgattgg

SEQ ID NO: 146384 - DNA, 25 bp, Saccharomyces pastorianus
gtgattgggagaagttttggctttc

SEQ ID NO: 146385 - DNA, 25 bp, Saccharomyces pastorianus
aatgacagacccttgagtgattggg

SEQ ID NO: 146386 - DNA, 25 bp, Saccharomyces pastorianus
gccaatgacagacccttgagtgatt

SEQ ID NO: 146387 - DNA, 25 bp, Saccharomyces pastorianus
gacagacccttgagtgattgggaga

SEQ ID NO: 146388 - DNA, 25 bp, Saccharomyces pastorianus
atgacagacccttgagtgattggga

SEQ ID NO: 146389 - DNA, 25 bp, Saccharomyces pastorianus
tattccatgtgataagatattcttg

SEQ ID NO: 146390 - DNA, 25 bp, Saccharomyces pastorianus
tctactggaacccatctccgaagat

SEQ ID NO: 146391 - DNA, 25 bp, Saccharomyces pastorianus
ataagatattcttggaccctcctgc

SEQ ID NO: 146392 - DNA, 25 bp, Saccharomyces pastorianus
ttggaccctcctgccaagtttggtt

SEQ ID NO: 146393 - DNA, 25 bp, Saccharomyces pastorianus
tttggttacgcacctctactggaac

SEQ ID NO: 146394 - DNA, 25 bp, Saccharomyces pastorianus
atacgcctgctgtgcctaaagagaa

SEQ ID NO: 146395 - DNA, 25 bp, Saccharomyces pastorianus
caagtttggttacgcacctctactg

SEQ ID NO: 146396 - DNA, 25 bp, Saccharomyces pastorianus
tgccaagtttggttacgcacctcta

SEQ ID NO: 146397 - DNA, 25 bp, Saccharomyces pastorianus
ggaccatacgcctgctgtgcctaaa

SEQ ID NO: 146398 - DNA, 25 bp, Saccharomyces pastorianus
ttcaagaaaacgggaccatacgcct

SEQ ID NO: 146399 - DNA, 25 bp, Saccharomyces pastorianus
gcctgctgtgcctaaagagaaactt

SEQ ID NO: 146400 - DNA, 25 bp, Saccharomyces pastorianus
gtttcaagggccattgccggagaaa

SEQ ID NO: 146401 - DNA, 25 bp, Saccharomyces pastorianus
ccaagaaggttttctggagggccag

SEQ ID NO: 146402 - DNA, 25 bp, Saccharomyces pastorianus
aagcagagctttctagaaggtaaac

SEQ ID NO: 146403 - DNA, 25 bp, Saccharomyces pastorianus
tatacataccattcgtactttaatg

SEQ ID NO: 146404 - DNA, 25 bp, Saccharomyces pastorianus
ccccaccgtgacatttgaagtcttt

SEQ ID NO: 146405 - DNA, 25 bp, Saccharomyces pastorianus
gccattgccggagaaattagaggtt

SEQ ID NO: 146406 - DNA, 25 bp, Saccharomyces pastorianus
gtctttgaagacgtttcaagggcca

SEQ ID NO: 146407 - DNA, 25 bp, Saccharomyces pastorianus
accattctaataactcttcatcgat

SEQ ID NO: 146408 - DNA, 25 bp, Saccharomyces pastorianus
ggattgcatagtccaacactagaaa

SEQ ID NO: 146409 - DNA, 25 bp, Saccharomyces pastorianus
gatttacgctcctgggacaaatgga

SEQ ID NO: 146410 - DNA, 25 bp, Saccharomyces pastorianus
agtgggattccaaagatttacgctc

SEQ ID NO: 146411 - DNA, 25 bp, Saccharomyces pastorianus
ggtggtcggattattagcatctatt

SEQ ID NO: 146412 - DNA, 25 bp, Saccharomyces pastorianus
gtgccgtcaaataaccccatttttg

SEQ ID NO: 146413 - DNA, 25 bp, Saccharomyces pastorianus
atgtgctgaaaagttctcacggatt

SEQ ID NO: 146414 - DNA, 25 bp, Saccharomyces pastorianus
aaaagcatcagtgccctactggtca

SEQ ID NO: 146415 - DNA, 25 bp, Saccharomyces pastorianus
tgaaaaactgttccacgaccgtctt

SEQ ID NO: 146416 - DNA, 25 bp, Saccharomyces pastorianus
agtagtcaactgtcagtgccgtcaa

SEQ ID NO: 146417 - DNA, 25 bp, Saccharomyces pastorianus
tcttgtactatccttttcctagtgt

SEQ ID NO: 146418 - DNA, 25 bp, Saccharomyces pastorianus
cacgaccgtcttggatcagataaat

SEQ ID NO: 146419 - DNA, 25 bp, Saccharomyces pastorianus
aataaatgctcgatggtgtctatag

SEQ ID NO: 146420 - DNA, 25 bp, Saccharomyces pastorianus
gatgactgatctttggtttaatgac

SEQ ID NO: 146421 - DNA, 25 bp, Saccharomyces pastorianus
aagttcagcgaggacaatttcaata

SEQ ID NO: 146422 - DNA, 25 bp, Saccharomyces pastorianus
acgaattacgccgtcaagtgacaca

SEQ ID NO: 146423 - DNA, 25 bp, Saccharomyces pastorianus
agtgcctccaaaatcgcccgaaaag

SEQ ID NO: 146424 - DNA, 25 bp, Saccharomyces pastorianus
tccctagacctcataagtgccatat

SEQ ID NO: 146425 - DNA, 25 bp, Saccharomyces pastorianus
aaccgcgctattagaacttatgact

SEQ ID NO: 146426 - DNA, 25 bp, Saccharomyces pastorianus
atgactactgcaattgaaccctaca

SEQ ID NO: 146427 - DNA, 25 bp, Saccharomyces pastorianus
aaaccagtttagagccatcttctat

SEQ ID NO: 146428 - DNA, 25 bp, Saccharomyces pastorianus
atacattcctcgaagctgctatcaa

SEQ ID NO: 146429 - DNA, 25 bp, Saccharomyces pastorianus
atagatttatctccttgcattaatg

SEQ ID NO: 146430 - DNA, 25 bp, Saccharomyces pastorianus
gcccgaaaagtctgggtggatttat

SEQ ID NO: 146431 - DNA, 25 bp, Saccharomyces pastorianus
tcaaaggatacgcaagtgcctccaa

SEQ ID NO: 146432 - DNA, 25 bp, Saccharomyces pastorianus
atgacagtatgctggcatcctacca

SEQ ID NO: 146433 - DNA, 25 bp, Saccharomyces pastorianus
catgtccagggactgtcaaaatgac

SEQ ID NO: 146434 - DNA, 25 bp, Saccharomyces pastorianus
cggaattagtggattgaaatgttac

SEQ ID NO: 146435 - DNA, 25 bp, Saccharomyces pastorianus
tggccacatgtccagggactgtcaa

SEQ ID NO: 146436 - DNA, 25 bp, Saccharomyces pastorianus
aagctggccacatgtccagggactg

SEQ ID NO: 146437 - DNA, 25 bp, Saccharomyces pastorianus
ttgtggtcaagctggccacatgtcc

SEQ ID NO: 146438 - DNA, 25 bp, Saccharomyces pastorianus
gtcaaaatgacaggctttgttacaa

SEQ ID NO: 146439 - DNA, 25 bp, Saccharomyces pastorianus
gtcaagctggccacatgtccaggga

SEQ ID NO: 146440 - DNA, 25 bp, Saccharomyces pastorianus
ggactgtatgaaagaggacggaatt

SEQ ID NO: 146441 - DNA, 25 bp, Saccharomyces pastorianus
agctggccacatgtccagggactgt

SEQ ID NO: 146442 - DNA, 25 bp, Saccharomyces pastorianus
gccacatgtccagggactgtcaaaa

SEQ ID NO: 146443 - DNA, 25 bp, Saccharomyces pastorianus
aagaggacggaattagtggattgaa

SEQ ID NO: 146444 - DNA, 25 bp, Saccharomyces pastorianus
tcaaaaagcttgttacgtttgcggt

SEQ ID NO: 146445 - DNA, 25 bp, Saccharomyces pastorianus
tttgcggtaagattggccatttggc

SEQ ID NO: 146446 - DNA, 25 bp, Saccharomyces pastorianus
gattggccatttggcagaagactgt

SEQ ID NO: 146447 - DNA, 25 bp, Saccharomyces pastorianus
aagattggccatttggcagaagact

SEQ ID NO: 146448 - DNA, 25 bp, Saccharomyces pastorianus
tctcaaaaagcttgttacgtttgcg

SEQ ID NO: 146449 - DNA, 25 bp, Saccharomyces pastorianus
ccatttggcagaagactgtgattct

SEQ ID NO: 146450 - DNA, 25 bp, Saccharomyces pastorianus
tgcggtaagattggccatttggcag

SEQ ID NO: 146451 - DNA, 25 bp, Saccharomyces pastorianus
agcttgttacgtttgcggtaagatt

SEQ ID NO: 146452 - DNA, 25 bp, Saccharomyces pastorianus
ggccatttggcagaagactgtgatt

SEQ ID NO: 146453 - DNA, 25 bp, Saccharomyces pastorianus
ggcagaagactgtgattctgaaaga

SEQ ID NO: 146454 - DNA, 25 bp, Saccharomyces pastorianus
cgtttgcggtaagattggccatttg

SEQ ID NO: 146455 - DNA, 25 bp, Saccharomyces pastorianus
gcgagtccaccgatacatcaatgtt

SEQ ID NO: 146456 - DNA, 25 bp, Saccharomyces pastorianus
ataggactccttttgcagatccacg

SEQ ID NO: 146457 - DNA, 25 bp, Saccharomyces pastorianus
gcttacgtgcttgctaagtctgcaa

SEQ ID NO: 146458 - DNA, 25 bp, Saccharomyces pastorianus
gggtatcaaaggtgcttacgtgctt

SEQ ID NO: 146459 - DNA, 25 bp, Saccharomyces pastorianus
tggtctctcaattcatattcttacg

SEQ ID NO: 146460 - DNA, 25 bp, Saccharomyces pastorianus
tctcttgctgaataccgacttggaa

SEQ ID NO: 146461 - DNA, 25 bp, Saccharomyces pastorianus
gaacaaaccattcgtgacattgaga

SEQ ID NO: 146462 - DNA, 25 bp, Saccharomyces pastorianus
gatttccttggtcaacaacggtgta

SEQ ID NO: 146463 - DNA, 25 bp, Saccharomyces pastorianus
aagggttctttcattggcgagtcca

SEQ ID NO: 146464 - DNA, 25 bp, Saccharomyces pastorianus
gatatgtttttctacggtgattacg

SEQ ID NO: 146465 - DNA, 25 bp, Saccharomyces pastorianus
aaggatatctggtagtcaagcgaaa

SEQ ID NO: 146466 - DNA, 25 bp, Saccharomyces pastorianus
tatgcaatgtccacaacagcttttg

SEQ ID NO: 146467 - DNA, 25 bp, Saccharomyces pastorianus
tgggcgtccccaaattgaagtactt

SEQ ID NO: 146468 - DNA, 25 bp, Saccharomyces pastorianus
ggctggtcatcttcattttacaaaa

SEQ ID NO: 146469 - DNA, 25 bp, Saccharomyces pastorianus
aaatggcgcaggaaccagtcccata

SEQ ID NO: 146470 - DNA, 25 bp, Saccharomyces pastorianus
attgcttatgaactgagccgcttgt

SEQ ID NO: 146471 - DNA, 25 bp, Saccharomyces pastorianus
agaggtatctggctggtcatcttca

SEQ ID NO: 146472 - DNA, 25 bp, Saccharomyces pastorianus
aaagcccttcaaaagtgtcttcaga

SEQ ID NO: 146473 - DNA, 25 bp, Saccharomyces pastorianus
aagtaacatgctgataccgtatcca

SEQ ID NO: 146474 - DNA, 25 bp, Saccharomyces pastorianus
ttggatggactcttctgccgtaaac

SEQ ID NO: 146475 - DNA, 25 bp, Saccharomyces pastorianus
aaagtcatgtggtgtttctgcaacg

SEQ ID NO: 146476 - DNA, 25 bp, Saccharomyces pastorianus
gtttctgcaacgtgttcattagcta

SEQ ID NO: 146477 - DNA, 25 bp, Saccharomyces pastorianus
gaaattgtcaagctaaacgaggaga

SEQ ID NO: 146478 - DNA, 25 bp, Saccharomyces pastorianus
ttgggacgagcaaggccttccaaca

SEQ ID NO: 146479 - DNA, 25 bp, Saccharomyces pastorianus
aagacggtaatgatatcaccaagag

SEQ ID NO: 146480 - DNA, 25 bp, Saccharomyces pastorianus
gcagaaagctcaaattaaaccacaa

SEQ ID NO: 146481 - DNA, 25 bp, Saccharomyces pastorianus
gaggagaaacatgccaacgaactag

SEQ ID NO: 146482 - DNA, 25 bp, Saccharomyces pastorianus
ccacaagatatgttcaaggatgtca

SEQ ID NO: 146483 - DNA, 25 bp, Saccharomyces pastorianus
aaggatgtcacattgtacagtgctt

SEQ ID NO: 146484 - DNA, 25 bp, Saccharomyces pastorianus
gaaacatgccaacgaactagcaaag

SEQ ID NO: 146485 - DNA, 25 bp, Saccharomyces pastorianus
tccaacaaaggacaaagacggtaat

SEQ ID NO: 146486 - DNA, 25 bp, Saccharomyces pastorianus
acattgtacagtgcttgggacgagc

SEQ ID NO: 146487 - DNA, 25 bp, Saccharomyces pastorianus
gatatcaccaagagtatgaccaaga

SEQ ID NO: 146488 - DNA, 25 bp, Saccharomyces pastorianus
cgactcgataaacccggacttgatc

SEQ ID NO: 146489 - DNA, 25 bp, Saccharomyces pastorianus
aatccgggttaagcgcagatggcga

SEQ ID NO: 146490 - DNA, 25 bp, Saccharomyces pastorianus
aatggctggcattggagtctgaaat

SEQ ID NO: 146491 - DNA, 25 bp, Saccharomyces pastorianus
tggttcagatggaccggcctaaaac

SEQ ID NO: 146492 - DNA, 25 bp, Saccharomyces pastorianus
agagatctaccctttttgtgtgaag

SEQ ID NO: 146493 - DNA, 25 bp, Saccharomyces pastorianus
gtgaagtactatgctgaggcccaga

SEQ ID NO: 146494 - DNA, 25 bp, Saccharomyces pastorianus
gttccaattgagtggccccagagtt

SEQ ID NO: 146495 - DNA, 25 bp, Saccharomyces pastorianus
atactgactagtgagcccgttccaa

SEQ ID NO: 146496 - DNA, 25 bp, Saccharomyces pastorianus
gactcattggcgtcattgttcagtg

SEQ ID NO: 146497 - DNA, 25 bp, Saccharomyces pastorianus
aagagcagcaagtcaccaaggtgtt

SEQ ID NO: 146498 - DNA, 25 bp, Saccharomyces pastorianus
agtctcggtgaggtggacttgccac

SEQ ID NO: 146499 - DNA, 25 bp, Saccharomyces pastorianus
aactccagactcaacacaaaaaaga

SEQ ID NO: 146500 - DNA, 25 bp, Saccharomyces pastorianus
agaagaactccagactcaacacaaa

SEQ ID NO: 146501 - DNA, 25 bp, Saccharomyces pastorianus
aaaagagcaatgtcgcaacgaggga

SEQ ID NO: 146502 - DNA, 25 bp, Saccharomyces pastorianus
gaactccagactcaacacaaaaaag

SEQ ID NO: 146503 - DNA, 25 bp, Saccharomyces pastorianus
aagaactccagactcaacacaaaaa

SEQ ID NO: 146504 - DNA, 25 bp, Saccharomyces pastorianus
gaagaactccagactcaacacaaaa

SEQ ID NO: 146505 - DNA, 25 bp, Saccharomyces pastorianus
aagaagaactccagactcaacacaa

SEQ ID NO: 146506 - DNA, 25 bp, Saccharomyces pastorianus
aaagagcaatgtcgcaacgagggaa

SEQ ID NO: 146507 - DNA, 25 bp, Saccharomyces pastorianus
agagcaatgtcgcaacgagggaaac

SEQ ID NO: 146508 - DNA, 25 bp, Saccharomyces pastorianus
agcaatgtcgcaacgagggaaaccg

SEQ ID NO: 146509 - DNA, 25 bp, Saccharomyces pastorianus
aaaaaagagcaatgtcgcaacgagg

SEQ ID NO: 146510 - DNA, 25 bp, Saccharomyces pastorianus
gtcgggcgatttgaatctgttgaaa

SEQ ID NO: 146511 - DNA, 25 bp, Saccharomyces pastorianus
tctaattaccgaacagcagaagctt

SEQ ID NO: 146512 - DNA, 25 bp, Saccharomyces pastorianus
aagtatgggagaccgaacaggatct

SEQ ID NO: 146513 - DNA, 25 bp, Saccharomyces pastorianus
gaacaggatctaattaccgaacagc

SEQ ID NO: 146514 - DNA, 25 bp, Saccharomyces pastorianus
atgggagaccgaacaggatctaatt

SEQ ID NO: 146515 - DNA, 25 bp, Saccharomyces pastorianus
gaccgaacaggatctaattaccgaa

SEQ ID NO: 146516 - DNA, 25 bp, Saccharomyces pastorianus
gaatcccaagcttatgaaaaataga

SEQ ID NO: 146517 - DNA, 25 bp, Saccharomyces pastorianus
tctgttgaaatcatggaatcccaag

SEQ ID NO: 146518 - DNA, 25 bp, Saccharomyces pastorianus
acaggatctaattaccgaacagcag

SEQ ID NO: 146519 - DNA, 25 bp, Saccharomyces pastorianus
aggatctaattaccgaacagcagaa

SEQ ID NO: 146520 - DNA, 25 bp, Saccharomyces pastorianus
gagaccgaacaggatctaattaccg

SEQ ID NO: 146521 - DNA, 25 bp, Saccharomyces pastorianus
ttaacttcagggacacaggcgatat

SEQ ID NO: 146522 - DNA, 25 bp, Saccharomyces pastorianus
atgcatcgaaatttggctccgctga

SEQ ID NO: 146523 - DNA, 25 bp, Saccharomyces pastorianus
agtgagtctgtacgcagatcagccc

SEQ ID NO: 146524 - DNA, 25 bp, Saccharomyces pastorianus
gctccgctgatggtgcagacagtga

SEQ ID NO: 146525 - DNA, 25 bp, Saccharomyces pastorianus
agcgccgcagcagtttatgttgcta

SEQ ID NO: 146526 - DNA, 25 bp, Saccharomyces pastorianus
gagcccacggcagtagtcatcgata

SEQ ID NO: 146527 - DNA, 25 bp, Saccharomyces pastorianus
ttgctagagctgcacctgtggcaat

SEQ ID NO: 146528 - DNA, 25 bp, Saccharomyces pastorianus
ctgtggcaattattcggccgttaat

SEQ ID NO: 146529 - DNA, 25 bp, Saccharomyces pastorianus
actattcggtggtgttggttccaat

SEQ ID NO: 146530 - DNA, 25 bp, Saccharomyces pastorianus
tagtcatcgatatgtcttcaccggg

SEQ ID NO: 146531 - DNA, 25 bp, Saccharomyces pastorianus
ataagagatcatgagcccacggcag

SEQ ID NO: 146532 - DNA, 25 bp, Saccharomyces pastorianus
gcggagatgccgtgatttacttaaa

SEQ ID NO: 146533 - DNA, 25 bp, Saccharomyces pastorianus
aattgtggaactatcctgccatcgg

SEQ ID NO: 146534 - DNA, 25 bp, Saccharomyces pastorianus
gactcatgctatgttgatcactggc

SEQ ID NO: 146535 - DNA, 25 bp, Saccharomyces pastorianus
tgccatcggctataatttacctcag

SEQ ID NO: 146536 - DNA, 25 bp, Saccharomyces pastorianus
ggctgccacgtcgatgaaacgtcta

SEQ ID NO: 146537 - DNA, 25 bp, Saccharomyces pastorianus
ttccacgccagtctcattgatcaat

SEQ ID NO: 146538 - DNA, 25 bp, Saccharomyces pastorianus
ttcgctaccgcgttgaaaattcctg

SEQ ID NO: 146539 - DNA, 25 bp, Saccharomyces pastorianus
gttcatggacatacctccagtgcaa

SEQ ID NO: 146540 - DNA, 25 bp, Saccharomyces pastorianus
atacgcaaaattggacccttccacg

SEQ ID NO: 146541 - DNA, 25 bp, Saccharomyces pastorianus
aagctgtcttttttggatctcacac

SEQ ID NO: 146542 - DNA, 25 bp, Saccharomyces pastorianus
gactccgttagaatttgcctccaaa

SEQ ID NO: 146543 - DNA, 25 bp, Saccharomyces pastorianus
attatatttcctgctcttgtgacgg

SEQ ID NO: 146544 - DNA, 25 bp, Saccharomyces pastorianus
acatcgtcgtacagtaatttgctaa

SEQ ID NO: 146545 - DNA, 25 bp, Saccharomyces pastorianus
gatacactcagtttgtcacaggtta

SEQ ID NO: 146546 - DNA, 25 bp, Saccharomyces pastorianus
gcacctactgcatctcttaagtttc

SEQ ID NO: 146547 - DNA, 25 bp, Saccharomyces pastorianus
cagtcttgtatacatggttggccat

SEQ ID NO: 146548 - DNA, 25 bp, Saccharomyces pastorianus
tcttgtgacggaaccgcacctactg

SEQ ID NO: 146549 - DNA, 25 bp, Saccharomyces pastorianus
tcccatcggatatttctgatacact

SEQ ID NO: 146550 - DNA, 25 bp, Saccharomyces pastorianus
gtcacaggttacatcgtcgtacagt

SEQ ID NO: 146551 - DNA, 25 bp, Saccharomyces pastorianus
gggtacaatagtcttatcactcgat

SEQ ID NO: 146552 - DNA, 25 bp, Saccharomyces pastorianus
tgcatctcttaagtttcccatcgga

SEQ ID NO: 146553 - DNA, 25 bp, Saccharomyces pastorianus
tttggtttggatgctagtgggtaca

SEQ ID NO: 146554 - DNA, 25 bp, Saccharomyces pastorianus
ctctcatttctttttattaagtcga

SEQ ID NO: 146555 - DNA, 25 bp, Saccharomyces pastorianus
attccagacactgtcactctcattt

SEQ ID NO: 146556 - DNA, 25 bp, Saccharomyces pastorianus
ctcatttctttttattaagtcgaga

SEQ ID NO: 146557 - DNA, 25 bp, Saccharomyces pastorianus
gcgtacccttggtattctagaagaa

SEQ ID NO: 146558 - DNA, 25 bp, Saccharomyces pastorianus
ccagacactgtcactctcatttctt

SEQ ID NO: 146559 - DNA, 25 bp, Saccharomyces pastorianus
gaaattccagacactgtcactctca

SEQ ID NO: 146560 - DNA, 25 bp, Saccharomyces pastorianus
atgcgtacccttggtattctagaag

SEQ ID NO: 146561 - DNA, 25 bp, Saccharomyces pastorianus
gaaagaaattccagacactgtcact

SEQ ID NO: 146562 - DNA, 25 bp, Saccharomyces pastorianus
gtacccttggtattctagaagaaag

SEQ ID NO: 146563 - DNA, 25 bp, Saccharomyces pastorianus
gaagaaagaaattccagacactgtc

SEQ ID NO: 146564 - DNA, 25 bp, Saccharomyces pastorianus
gtcgagaagtgaaatgtttaaaaca

SEQ ID NO: 146565 - DNA, 25 bp, Saccharomyces pastorianus
gtcttcttccaggtgattttccaga

SEQ ID NO: 146566 - DNA, 25 bp, Saccharomyces pastorianus
atgtgctgcattcatcgacggtgaa

SEQ ID NO: 146567 - DNA, 25 bp, Saccharomyces pastorianus
aatctggatttgatggtcttcttcc

SEQ ID NO: 146568 - DNA, 25 bp, Saccharomyces pastorianus
tttcaaccctctacatctgatggat

SEQ ID NO: 146569 - DNA, 25 bp, Saccharomyces pastorianus
ggagccaatcaaccgaatcatgcaa

SEQ ID NO: 146570 - DNA, 25 bp, Saccharomyces pastorianus
tgcaggccaggcaatgtcacggata

SEQ ID NO: 146571 - DNA, 25 bp, Saccharomyces pastorianus
agccgtctacgagcaattttcttca

SEQ ID NO: 146572 - DNA, 25 bp, Saccharomyces pastorianus
attacacagctcctatagccgtcta

SEQ ID NO: 146573 - DNA, 25 bp, Saccharomyces pastorianus
tattttattgacatcgtcgccccaa

SEQ ID NO: 146574 - DNA, 25 bp, Saccharomyces pastorianus
gagcattttacgtaccggagccaat

SEQ ID NO: 146575 - DNA, 25 bp, Saccharomyces pastorianus
aagttctttcctgctgccagataat

SEQ ID NO: 146576 - DNA, 25 bp, Saccharomyces pastorianus
gggcacgatgcatccatgggactaa

SEQ ID NO: 146577 - DNA, 25 bp, Saccharomyces pastorianus
agtcaagtgcgttttgggcaatcat

SEQ ID NO: 146578 - DNA, 25 bp, Saccharomyces pastorianus
gcgtgagctctctgtcaaacatgaa

SEQ ID NO: 146579 - DNA, 25 bp, Saccharomyces pastorianus
gacgccccaaattaatgacaccttt

SEQ ID NO: 146580 - DNA, 25 bp, Saccharomyces pastorianus
agtcagctagcggaacattgttcta

SEQ ID NO: 146581 - DNA, 25 bp, Saccharomyces pastorianus
gcacatggacggttagctcgcgaac

SEQ ID NO: 146582 - DNA, 25 bp, Saccharomyces pastorianus
tacggagaccactttagtaacgcca

SEQ ID NO: 146583 - DNA, 25 bp, Saccharomyces pastorianus
gacacctttaactttcagtacggag

SEQ ID NO: 146584 - DNA, 25 bp, Saccharomyces pastorianus
atatactctttggtgcacatgcagg

SEQ ID NO: 146585 - DNA, 25 bp, Saccharomyces pastorianus
tagctcgcgaacttgggttttccaa

SEQ ID NO: 146586 - DNA, 25 bp, Saccharomyces pastorianus
ttcatgaagcccaaccaaattccgg

SEQ ID NO: 146587 - DNA, 25 bp, Saccharomyces pastorianus
attgcctacaattagcaccttgaag

SEQ ID NO: 146588 - DNA, 25 bp, Saccharomyces pastorianus
gttcatggtaactatgatgagttca

SEQ ID NO: 146589 - DNA, 25 bp, Saccharomyces pastorianus
accagtttccttattgcctacaatt

SEQ ID NO: 146590 - DNA, 25 bp, Saccharomyces pastorianus
gtacgtttttgttggtgacgttcat

SEQ ID NO: 146591 - DNA, 25 bp, Saccharomyces pastorianus
gacaagattggaggactaggagaaa

SEQ ID NO: 146592 - DNA, 25 bp, Saccharomyces pastorianus
ggcatgctgcgtttatacactatat

SEQ ID NO: 146593 - DNA, 25 bp, Saccharomyces pastorianus
gttggtgacgttcatggtaactatg

SEQ ID NO: 146594 - DNA, 25 bp, Saccharomyces pastorianus
attcaagtttgataaccctcggttg

SEQ ID NO: 146595 - DNA, 25 bp, Saccharomyces pastorianus
gttgtctccaccagtttccttattg

SEQ ID NO: 146596 - DNA, 25 bp, Saccharomyces pastorianus
gtttgataaccctcggttgtctcca

SEQ ID NO: 146597 - DNA, 25 bp, Saccharomyces pastorianus
tgatattatttgtggcatgctgcgt

SEQ ID NO: 146598 - DNA, 25 bp, Saccharomyces pastorianus
ccaatccgatttacgaaggcttatt

SEQ ID NO: 146599 - DNA, 25 bp, Saccharomyces pastorianus
gaacattcggcatcaatcttaacgt

SEQ ID NO: 146600 - DNA, 25 bp, Saccharomyces pastorianus
ggtccttatgcgatttcttggtcat

SEQ ID NO: 146601 - DNA, 25 bp, Saccharomyces pastorianus
gtcgttcccagccagtgaaaatgtt

SEQ ID NO: 146602 - DNA, 25 bp, Saccharomyces pastorianus
actattgttacatcgacgggtcctt

SEQ ID NO: 146603 - DNA, 25 bp, Saccharomyces pastorianus
ttggatttctgaagtcgttcccagc

SEQ ID NO: 146604 - DNA, 25 bp, Saccharomyces pastorianus
aagtttattactacctctgctgacg

SEQ ID NO: 146605 - DNA, 25 bp, Saccharomyces pastorianus
tataccttcactaggccaagcaatc

SEQ ID NO: 146606 - DNA, 25 bp, Saccharomyces pastorianus
agacgatgtctctctatcgaaagtg

SEQ ID NO: 146607 - DNA, 25 bp, Saccharomyces pastorianus
tattggcgacttgcgagagtactct

SEQ ID NO: 146608 - DNA, 25 bp, Saccharomyces pastorianus
gagtactctgcttcttatggatttg

SEQ ID NO: 146609 - DNA, 25 bp, Saccharomyces pastorianus
gattcaagctcagatgactttcaag

SEQ ID NO: 146610 - DNA, 25 bp, Saccharomyces pastorianus
ccaaactgtttaccgatgccaattc

SEQ ID NO: 146611 - DNA, 25 bp, Saccharomyces pastorianus
cgctgatgtgtcgttttctgatgtt

SEQ ID NO: 146612 - DNA, 25 bp, Saccharomyces pastorianus
aagacacctcttttgagcacgagaa

SEQ ID NO: 146613 - DNA, 25 bp, Saccharomyces pastorianus
gttgtttagtgatgtctagcctata

SEQ ID NO: 146614 - DNA, 25 bp, Saccharomyces pastorianus
attttgaagacgacaccatcagtgt

SEQ ID NO: 146615 - DNA, 25 bp, Saccharomyces pastorianus
aatttattctgcaggagcccgtggt

SEQ ID NO: 146616 - DNA, 25 bp, Saccharomyces pastorianus
tctcactgcctcagcagatgactta

SEQ ID NO: 146617 - DNA, 25 bp, Saccharomyces pastorianus
caatttgttgttgccgctgatgtgt

SEQ ID NO: 146618 - DNA, 25 bp, Saccharomyces pastorianus
gatcaaccaggctctttgttcaaga

SEQ ID NO: 146619 - DNA, 25 bp, Saccharomyces pastorianus
aataaaaaatcctctctcactgcct

SEQ ID NO: 146620 - DNA, 25 bp, Saccharomyces pastorianus
tatggtagacagttacctcgctcca

SEQ ID NO: 146621 - DNA, 25 bp, Saccharomyces pastorianus
cagttttgcaaccagagcgttagct

SEQ ID NO: 146622 - DNA, 25 bp, Saccharomyces pastorianus
gaagaggaggcagtggtaacccaaa

SEQ ID NO: 146623 - DNA, 25 bp, Saccharomyces pastorianus
acctcgctccactgtgagcagtaag

SEQ ID NO: 146624 - DNA, 25 bp, Saccharomyces pastorianus
cagagcgttagctgaattgtatggt

SEQ ID NO: 146625 - DNA, 25 bp, Saccharomyces pastorianus
taatgtaaatatgctttccagttac

SEQ ID NO: 146626 - DNA, 25 bp, Saccharomyces pastorianus
gaggcagtggtaacccaaatcctaa

SEQ ID NO: 146627 - DNA, 25 bp, Saccharomyces pastorianus
gcaaccagagcgttagctgaattgt

SEQ ID NO: 146628 - DNA, 25 bp, Saccharomyces pastorianus
gatgtcagttttgcaaccagagcgt

SEQ ID NO: 146629 - DNA, 25 bp, Saccharomyces pastorianus
gagcagtaagggaggtatcagatta

SEQ ID NO: 146630 - DNA, 25 bp, Saccharomyces pastorianus
gaattcgatgatgtcagttttgcaa

SEQ ID NO: 146631 - DNA, 25 bp, Saccharomyces pastorianus
gattcctccattagttaaacttttg

SEQ ID NO: 146632 - DNA, 25 bp, Saccharomyces pastorianus
aaagaagcgtgttggaccatttcca

SEQ ID NO: 146633 - DNA, 25 bp, Saccharomyces pastorianus
actatggctccacaaaatgccggta

SEQ ID NO: 146634 - DNA, 25 bp, Saccharomyces pastorianus
gacgccgtagacgaaactatggctc

SEQ ID NO: 146635 - DNA, 25 bp, Saccharomyces pastorianus
tggaccatttccaatattacggctg

SEQ ID NO: 146636 - DNA, 25 bp, Saccharomyces pastorianus
gtatctcaaggctgtataaaaccat

SEQ ID NO: 146637 - DNA, 25 bp, Saccharomyces pastorianus
aaaccattgtgtgatttgctagaaa

SEQ ID NO: 146638 - DNA, 25 bp, Saccharomyces pastorianus
gcgttaagacttctgctaagctctc

SEQ ID NO: 146639 - DNA, 25 bp, Saccharomyces pastorianus
attgacgcgaacttgattcctccat

SEQ ID NO: 146640 - DNA, 25 bp, Saccharomyces pastorianus
gaagttaccttagatgctcttgaaa

SEQ ID NO: 146641 - DNA, 25 bp, Saccharomyces pastorianus
aatgacttacagactcaggtcgtta

SEQ ID NO: 146642 - DNA, 25 bp, Saccharomyces pastorianus
gttgttgatgctgacgctgtacctc

SEQ ID NO: 146643 - DNA, 25 bp, Saccharomyces pastorianus
ttcaagccggtgttgttccaagatt

SEQ ID NO: 146644 - DNA, 25 bp, Saccharomyces pastorianus
tgatgtcgtcattcaagccggtgtt

SEQ ID NO: 146645 - DNA, 25 bp, Saccharomyces pastorianus
gtttctgcggaccaacaattttaca

SEQ ID NO: 146646 - DNA, 25 bp, Saccharomyces pastorianus
caattttacagccagttgcagcaag

SEQ ID NO: 146647 - DNA, 25 bp, Saccharomyces pastorianus
atcgccctccaattgatgtcgtcat

SEQ ID NO: 146648 - DNA, 25 bp, Saccharomyces pastorianus
actgactacagagactacgttttac

SEQ ID NO: 146649 - DNA, 25 bp, Saccharomyces pastorianus
ttttgtctagagaacatcgccctcc

SEQ ID NO: 146650 - DNA, 25 bp, Saccharomyces pastorianus
gccatggagccaattttgggtcttt

SEQ ID NO: 146651 - DNA, 25 bp, Saccharomyces pastorianus
agattggtcagtggtctcaccagcg

SEQ ID NO: 146652 - DNA, 25 bp, Saccharomyces pastorianus
gaagatgagagctccgtttctgcgg

SEQ ID NO: 146653 - DNA, 25 bp, Saccharomyces pastorianus
gttacgtgtacgttgtcagacgcaa

SEQ ID NO: 146654 - DNA, 25 bp, Saccharomyces pastorianus
tttacgatcggcgaaacctgcagca

SEQ ID NO: 146655 - DNA, 25 bp, Saccharomyces pastorianus
atccttacaagcgataacgggcgtt

SEQ ID NO: 146656 - DNA, 25 bp, Saccharomyces pastorianus
gaggatctctattgtgtggcagtta

SEQ ID NO: 146657 - DNA, 25 bp, Saccharomyces pastorianus
aggtgttccctcacacaatagtgtt

SEQ ID NO: 146658 - DNA, 25 bp, Saccharomyces pastorianus
tgattctactattcctgccacggta

SEQ ID NO: 146659 - DNA, 25 bp, Saccharomyces pastorianus
agtggcgcactaaccttgattctac

SEQ ID NO: 146660 - DNA, 25 bp, Saccharomyces pastorianus
gcacgagcttaacgtattgcgccta

SEQ ID NO: 146661 - DNA, 25 bp, Saccharomyces pastorianus
gtttcaggtagactgccgtcatcaa

SEQ ID NO: 146662 - DNA, 25 bp, Saccharomyces pastorianus
tagagagactgaactacacccgcac

SEQ ID NO: 146663 - DNA, 25 bp, Saccharomyces pastorianus
gtctatcccgccagagtcagagtgg

SEQ ID NO: 146664 - DNA, 25 bp, Saccharomyces pastorianus
gatggtacatcgtttgtttctgtgc

SEQ ID NO: 146665 - DNA, 25 bp, Saccharomyces pastorianus
gatacgagtatccacgactaggaga

SEQ ID NO: 146666 - DNA, 25 bp, Saccharomyces pastorianus
agggcattatgagtccttgaataga

SEQ ID NO: 146667 - DNA, 25 bp, Saccharomyces pastorianus
aaaggactcaaagtgatcgaagtgg

SEQ ID NO: 146668 - DNA, 25 bp, Saccharomyces pastorianus
acatcgtttgtttctgtgcataatg

SEQ ID NO: 146669 - DNA, 25 bp, Saccharomyces pastorianus
atatcttttggtcatgtgatggtac

SEQ ID NO: 146670 - DNA, 25 bp, Saccharomyces pastorianus
atgacagaggacttcagaatggaaa

SEQ ID NO: 146671 - DNA, 25 bp, Saccharomyces pastorianus
gactaggagaatcaccatatatcaa

SEQ ID NO: 146672 - DNA, 25 bp, Saccharomyces pastorianus
caattccgtattgcgacactggcga

SEQ ID NO: 146673 - DNA, 25 bp, Saccharomyces pastorianus
gttcgaggctgagacgatagcgaat

SEQ ID NO: 146674 - DNA, 25 bp, Saccharomyces pastorianus
acactggcgaagtgttcgaggctga

SEQ ID NO: 146675 - DNA, 25 bp, Saccharomyces pastorianus
aaccacaccataataatagtacaga

SEQ ID NO: 146676 - DNA, 25 bp, Saccharomyces pastorianus
aggaagcttacagcaggagaaggaa

SEQ ID NO: 146677 - DNA, 25 bp, Saccharomyces pastorianus
aagacaaaattcacgagcatcaaaa

SEQ ID NO: 146678 - DNA, 25 bp, Saccharomyces pastorianus
gtactcttccgaaaggaagcttaca

SEQ ID NO: 146679 - DNA, 25 bp, Saccharomyces pastorianus
gtacagatagtactcttccgaaagg

SEQ ID NO: 146680 - DNA, 25 bp, Saccharomyces pastorianus
attcacgagcatcaaaaagcaaagg

SEQ ID NO: 146681 - DNA, 25 bp, Saccharomyces pastorianus
gcttacagcaggagaaggaagatct

SEQ ID NO: 146682 - DNA, 25 bp, Saccharomyces pastorianus
ggaagatctcaatatcaaacccaca

SEQ ID NO: 146683 - DNA, 25 bp, Saccharomyces pastorianus
acagcaaccacaccataataatagt

SEQ ID NO: 146684 - DNA, 25 bp, Saccharomyces pastorianus
acagatagtactcttccgaaaggaa

SEQ ID NO: 146685 - DNA, 25 bp, Saccharomyces pastorianus
gggacaaaagacaaaattcacgagc

SEQ ID NO: 146686 - DNA, 25 bp, Saccharomyces pastorianus
accaaagcaggtgtccgggaagtct

SEQ ID NO: 146687 - DNA, 25 bp, Saccharomyces pastorianus
tgacctaagagatgatccggcaact

SEQ ID NO: 146688 - DNA, 25 bp, Saccharomyces pastorianus
gaatcccctaaccaaaaatcagcaa

SEQ ID NO: 146689 - DNA, 25 bp, Saccharomyces pastorianus
ataccgaatgttcagctgctaccaa

SEQ ID NO: 146690 - DNA, 25 bp, Saccharomyces pastorianus
gcaaactccgattacgtgtctcaag

SEQ ID NO: 146691 - DNA, 25 bp, Saccharomyces pastorianus
gaaggtacctctctttatactaagt

SEQ ID NO: 146692 - DNA, 25 bp, Saccharomyces pastorianus
gaccgttatgttatccccaaacaga

SEQ ID NO: 146693 - DNA, 25 bp, Saccharomyces pastorianus
ggtgaggtacgctatctacgaacca

SEQ ID NO: 146694 - DNA, 25 bp, Saccharomyces pastorianus
attaacgactgcaacaaccaacacc

SEQ ID NO: 146695 - DNA, 25 bp, Saccharomyces pastorianus
gtttatgggctataccgaatgttca

SEQ ID NO: 146696 - DNA, 25 bp, Saccharomyces pastorianus
gtttctcagtaagcgaacatgctag

SEQ ID NO: 146697 - DNA, 25 bp, Saccharomyces pastorianus
agcctcttttaggaacgtagaagat

SEQ ID NO: 146698 - DNA, 25 bp, Saccharomyces pastorianus
taatttaggtttgctgtgttcagat

SEQ ID NO: 146699 - DNA, 25 bp, Saccharomyces pastorianus
ataccacctcttcgcaactggttga

SEQ ID NO: 146700 - DNA, 25 bp, Saccharomyces pastorianus
tttggattgccaactcgaattgtgg

SEQ ID NO: 146701 - DNA, 25 bp, Saccharomyces pastorianus
gacaatggtagaactcgatactctt

SEQ ID NO: 146702 - DNA, 25 bp, Saccharomyces pastorianus
aacaaggaaataccacctcttcgca

SEQ ID NO: 146703 - DNA, 25 bp, Saccharomyces pastorianus
agaagatattcatgtggcactcaaa

SEQ ID NO: 146704 - DNA, 25 bp, Saccharomyces pastorianus
aagtgttttcgagaacaaagcctct

SEQ ID NO: 146705 - DNA, 25 bp, Saccharomyces pastorianus
actaaggactactcagcttctgatt

SEQ ID NO: 146706 - DNA, 25 bp, Saccharomyces pastorianus
actcgatactcttttgagtgcagga

SEQ ID NO: 146707 - DNA, 25 bp, Saccharomyces pastorianus
gtggcactcaaaagaaaggcagcag

SEQ ID NO: 146708 - DNA, 25 bp, Saccharomyces pastorianus
tattgaattggtggtcgaggaagac

SEQ ID NO: 146709 - DNA, 25 bp, Saccharomyces pastorianus
ctcggtgccttgttataaaggacat

SEQ ID NO: 146710 - DNA, 25 bp, Saccharomyces pastorianus
aaaggacatttccactggtgacgca

SEQ ID NO: 146711 - DNA, 25 bp, Saccharomyces pastorianus
cctgtagagcctcggtgccttgtta

SEQ ID NO: 146712 - DNA, 25 bp, Saccharomyces pastorianus
ggtgacgcagtaaacaacgttccta

SEQ ID NO: 146713 - DNA, 25 bp, Saccharomyces pastorianus
tagagcctcggtgccttgttataaa

SEQ ID NO: 146714 - DNA, 25 bp, Saccharomyces pastorianus
gtaaacaacgttcctattgaattgg

SEQ ID NO: 146715 - DNA, 25 bp, Saccharomyces pastorianus
agcctcggtgccttgttataaagga

SEQ ID NO: 146716 - DNA, 25 bp, Saccharomyces pastorianus
gacgcagtaaacaacgttcctattg

SEQ ID NO: 146717 - DNA, 25 bp, Saccharomyces pastorianus
acgttcctattgaattggtggtcga

SEQ ID NO: 146718 - DNA, 25 bp, Saccharomyces pastorianus
gacatttccactggtgacgcagtaa

SEQ ID NO: 146719 - DNA, 25 bp, Saccharomyces pastorianus
gaccaaatcttgcactgggttttct

SEQ ID NO: 146720 - DNA, 25 bp, Saccharomyces pastorianus
gtaagtttatttcgaccaaatcttg

SEQ ID NO: 146721 - DNA, 25 bp, Saccharomyces pastorianus
tgcactgggttttcttttccttggg

SEQ ID NO: 146722 - DNA, 25 bp, Saccharomyces pastorianus
tatttcgaccaaatcttgcactggg

SEQ ID NO: 146723 - DNA, 25 bp, Saccharomyces pastorianus
tttcgaccaaatcttgcactgggtt

SEQ ID NO: 146724 - DNA, 25 bp, Saccharomyces pastorianus
atcttgcactgggttttcttttcct

SEQ ID NO: 146725 - DNA, 25 bp, Saccharomyces pastorianus
gtttatttcgaccaaatcttgcact

SEQ ID NO: 146726 - DNA, 25 bp, Saccharomyces pastorianus
cttgcactgggttttcttttccttg

SEQ ID NO: 146727 - DNA, 25 bp, Saccharomyces pastorianus
accaaatcttgcactgggttttctt

SEQ ID NO: 146728 - DNA, 25 bp, Saccharomyces pastorianus
caaatcttgcactgggttttctttt

SEQ ID NO: 146729 - DNA, 25 bp, Saccharomyces pastorianus
tcgaccaaatcttgcactgggtttt

SEQ ID NO: 146730 - DNA, 25 bp, Saccharomyces pastorianus
gctgcttctctcgatgacgaaaggt

SEQ ID NO: 146731 - DNA, 25 bp, Saccharomyces pastorianus
tgcctctttatcagtacccaggaaa

SEQ ID NO: 146732 - DNA, 25 bp, Saccharomyces pastorianus
ctctcgttgataagtttctgcctct

SEQ ID NO: 146733 - DNA, 25 bp, Saccharomyces pastorianus
ggaatatactactttctctcgttga

SEQ ID NO: 146734 - DNA, 25 bp, Saccharomyces pastorianus
aatgtcatcgttgtttctttgagca

SEQ ID NO: 146735 - DNA, 25 bp, Saccharomyces pastorianus
ggtccatattcagacttatttcaag

SEQ ID NO: 146736 - DNA, 25 bp, Saccharomyces pastorianus
gtgccagtggcgatttagaagtttt

SEQ ID NO: 146737 - DNA, 25 bp, Saccharomyces pastorianus
gggtaggatcttagccatgggtatt

SEQ ID NO: 146738 - DNA, 25 bp, Saccharomyces pastorianus
cgaaaggtcctcaaatggcagtgat

SEQ ID NO: 146739 - DNA, 25 bp, Saccharomyces pastorianus
aagggttgatgagaccgctgcttct

SEQ ID NO: 146740 - DNA, 25 bp, Saccharomyces pastorianus
gacttcaaacactaacacacctgga

SEQ ID NO: 146741 - DNA, 25 bp, Saccharomyces pastorianus
agtttctcgagacttgttgcaaccg

SEQ ID NO: 146742 - DNA, 25 bp, Saccharomyces pastorianus
gattaccaagtcgttatacagcata

SEQ ID NO: 146743 - DNA, 25 bp, Saccharomyces pastorianus
gatgaaccgccatcgattaccaagt

SEQ ID NO: 146744 - DNA, 25 bp, Saccharomyces pastorianus
ggtcgaattacgcattactccaaga

SEQ ID NO: 146745 - DNA, 25 bp, Saccharomyces pastorianus
gttgcaaccgatacacaggtcgaat

SEQ ID NO: 146746 - DNA, 25 bp, Saccharomyces pastorianus
tatgaactcgtacactctccaaatt

SEQ ID NO: 146747 - DNA, 25 bp, Saccharomyces pastorianus
gagttacaaacatatcccttaggca

SEQ ID NO: 146748 - DNA, 25 bp, Saccharomyces pastorianus
gaagctctttgtctaagaagcccag

SEQ ID NO: 146749 - DNA, 25 bp, Saccharomyces pastorianus
tttaggcatcctttccagctttaaa

SEQ ID NO: 146750 - DNA, 25 bp, Saccharomyces pastorianus
aaaatcttgggcttgtatgaactcg

SEQ ID NO: 146751 - DNA, 25 bp, Saccharomyces pastorianus
acaaagtgccactcgccaagaatag

SEQ ID NO: 146752 - DNA, 25 bp, Saccharomyces pastorianus
gctactctgttactaatccattggt

SEQ ID NO: 146753 - DNA, 25 bp, Saccharomyces pastorianus
aacccaagggacgacatggatggcc

SEQ ID NO: 146754 - DNA, 25 bp, Saccharomyces pastorianus
ggacactaacgttgtcaaaagcgaa

SEQ ID NO: 146755 - DNA, 25 bp, Saccharomyces pastorianus
ggctgtccttccgttaattcaagac

SEQ ID NO: 146756 - DNA, 25 bp, Saccharomyces pastorianus
tccgatacccatgatactaataagc

SEQ ID NO: 146757 - DNA, 25 bp, Saccharomyces pastorianus
aaaagcgaaaatgcgggctgtcctt

SEQ ID NO: 146758 - DNA, 25 bp, Saccharomyces pastorianus
atggatggccaagaagacagcttca

SEQ ID NO: 146759 - DNA, 25 bp, Saccharomyces pastorianus
tgcaaattccgatacccatgatact

SEQ ID NO: 146760 - DNA, 25 bp, Saccharomyces pastorianus
aatcaattcatgctactctgttact

SEQ ID NO: 146761 - DNA, 25 bp, Saccharomyces pastorianus
gtccttccgttaattcaagaccaat

SEQ ID NO: 146762 - DNA, 25 bp, Saccharomyces pastorianus
aatactcactgaactctggagcaaa

SEQ ID NO: 146763 - DNA, 25 bp, Saccharomyces pastorianus
gcagagttcaatgccatcgagcact

SEQ ID NO: 146764 - DNA, 25 bp, Saccharomyces pastorianus
acgccgggattgagttctctgctaa

SEQ ID NO: 146765 - DNA, 25 bp, Saccharomyces pastorianus
gtccaaatctgggttgacacctaat

SEQ ID NO: 146766 - DNA, 25 bp, Saccharomyces pastorianus
ggatgtctagcacaagttctacttc

SEQ ID NO: 146767 - DNA, 25 bp, Saccharomyces pastorianus
gagcactccgctcataatcacaagg

SEQ ID NO: 146768 - DNA, 25 bp, Saccharomyces pastorianus
aatggtacaccacttacgccgggat

SEQ ID NO: 146769 - DNA, 25 bp, Saccharomyces pastorianus
tctctgctaaacttaccatctactg

SEQ ID NO: 146770 - DNA, 25 bp, Saccharomyces pastorianus
acaattatcccgtattgccgtcaat

SEQ ID NO: 146771 - DNA, 25 bp, Saccharomyces pastorianus
gaagtattgaaaaccaccctcatgt

SEQ ID NO: 146772 - DNA, 25 bp, Saccharomyces pastorianus
atacttcaacgaaagcggctgtcaa

SEQ ID NO: 146773 - DNA, 25 bp, Saccharomyces pastorianus
ttgacacccggtattcttacgcaat

SEQ ID NO: 146774 - DNA, 25 bp, Saccharomyces pastorianus
ctcagaacttaacttggatggcgaa

SEQ ID NO: 146775 - DNA, 25 bp, Saccharomyces pastorianus
gacgcagctcgtttgcatggagacg

SEQ ID NO: 146776 - DNA, 25 bp, Saccharomyces pastorianus
ggaaaaccgtgttccagatttctct

SEQ ID NO: 146777 - DNA, 25 bp, Saccharomyces pastorianus
tggtgaaccaccacgtaacatgata

SEQ ID NO: 146778 - DNA, 25 bp, Saccharomyces pastorianus
ccataaaagttgttgcccgcatcat

SEQ ID NO: 146779 - DNA, 25 bp, Saccharomyces pastorianus
agttaacgaatcaagtcccatgtgt

SEQ ID NO: 146780 - DNA, 25 bp, Saccharomyces pastorianus
gttacaatcgtatgccgaatccacc

SEQ ID NO: 146781 - DNA, 25 bp, Saccharomyces pastorianus
gtcccatgtgtttattttgcgagta

SEQ ID NO: 146782 - DNA, 25 bp, Saccharomyces pastorianus
cagatttctctgtcctagttaacga

SEQ ID NO: 146783 - DNA, 25 bp, Saccharomyces pastorianus
acggtcaacattccatatcttctag

SEQ ID NO: 146784 - DNA, 25 bp, Saccharomyces pastorianus
gatcatgataccgttgacgcagctc

SEQ ID NO: 146785 - DNA, 25 bp, Saccharomyces pastorianus
attctgttccgaaactccacaggaa

SEQ ID NO: 146786 - DNA, 25 bp, Saccharomyces pastorianus
gtttaatggcatattctaccgtagg

SEQ ID NO: 146787 - DNA, 25 bp, Saccharomyces pastorianus
ttttattggctacacttactccaga

SEQ ID NO: 146788 - DNA, 25 bp, Saccharomyces pastorianus
acgagtgtctgattggttggcctcc

SEQ ID NO: 146789 - DNA, 25 bp, Saccharomyces pastorianus
aaagttgagctccatcaccgatact

SEQ ID NO: 146790 - DNA, 25 bp, Saccharomyces pastorianus
aagtcatccattttttcgcggtgtt

SEQ ID NO: 146791 - DNA, 25 bp, Saccharomyces pastorianus
gagcaaactctacaatttcctgatg

SEQ ID NO: 146792 - DNA, 25 bp, Saccharomyces pastorianus
ggagaatgttccagattccccagct

SEQ ID NO: 146793 - DNA, 25 bp, Saccharomyces pastorianus
taggttcttcccaaccgatgagttg

SEQ ID NO: 146794 - DNA, 25 bp, Saccharomyces pastorianus
atccgtcgactattaactcatgcag

SEQ ID NO: 146795 - DNA, 25 bp, Saccharomyces pastorianus
gaagccgaagatctaatccgtcgac

SEQ ID NO: 146796 - DNA, 25 bp, Saccharomyces pastorianus
ttatcaccgggccaatattctatag

SEQ ID NO: 146797 - DNA, 25 bp, Saccharomyces pastorianus
ggcagcggttttacagacgttccag

SEQ ID NO: 146798 - DNA, 25 bp, Saccharomyces pastorianus
atgagggtgcacctacttcaggaca

SEQ ID NO: 146799 - DNA, 25 bp, Saccharomyces pastorianus
gccgtcgatgggtggtctttataga

SEQ ID NO: 146800 - DNA, 25 bp, Saccharomyces pastorianus
agacaggtaaccttggcagcggttt

SEQ ID NO: 146801 - DNA, 25 bp, Saccharomyces pastorianus
aatcagatgatcaataccccaccgc

SEQ ID NO: 146802 - DNA, 25 bp, Saccharomyces pastorianus
gtatcagcaaattcctagaccgcct

SEQ ID NO: 146803 - DNA, 25 bp, Saccharomyces pastorianus
gggaatgcacaattaccccaattat

SEQ ID NO: 146804 - DNA, 25 bp, Saccharomyces pastorianus
gacgttccagccctgaattatccag

SEQ ID NO: 146805 - DNA, 25 bp, Saccharomyces pastorianus
accaccaccgcataataattacgca

SEQ ID NO: 146806 - DNA, 25 bp, Saccharomyces pastorianus
atggcagttcttctagtagtccgtt

SEQ ID NO: 146807 - DNA, 25 bp, Saccharomyces pastorianus
gccgtggttgggatttgtcgataaa

SEQ ID NO: 146808 - DNA, 25 bp, Saccharomyces pastorianus
acaggtgccaatggtcaaactaaca

SEQ ID NO: 146809 - DNA, 25 bp, Saccharomyces pastorianus
atcaatattcatcacccgatcatca

SEQ ID NO: 146810 - DNA, 25 bp, Saccharomyces pastorianus
gcaacaggccaatcgttatcaatta

SEQ ID NO: 146811 - DNA, 25 bp, Saccharomyces pastorianus
gagaggcgtcgaagcttgatccaac

SEQ ID NO: 146812 - DNA, 25 bp, Saccharomyces pastorianus
gaagcttgatccaacttcgtatgaa

SEQ ID NO: 146813 - DNA, 25 bp, Saccharomyces pastorianus
acccgatcatcaccatcattacaat

SEQ ID NO: 146814 - DNA, 25 bp, Saccharomyces pastorianus
taatgcgcaaccaacggcgaacgac

SEQ ID NO: 146815 - DNA, 25 bp, Saccharomyces pastorianus
attacaaccatatgactcgcactat

SEQ ID NO: 146816 - DNA, 25 bp, Saccharomyces pastorianus
aacagtttgccaatacaggtgccaa

SEQ ID NO: 146817 - DNA, 25 bp, Saccharomyces pastorianus
aacaattgcaacaagcccaggccca

SEQ ID NO: 146818 - DNA, 25 bp, Saccharomyces pastorianus
tggttattgatctgcttggtccttc

SEQ ID NO: 146819 - DNA, 25 bp, Saccharomyces pastorianus
ctaaacaacatattccgtacaggga

SEQ ID NO: 146820 - DNA, 25 bp, Saccharomyces pastorianus
gatctgcttggtccttctttagaag

SEQ ID NO: 146821 - DNA, 25 bp, Saccharomyces pastorianus
agcgggaacacctggtataccacaa

SEQ ID NO: 146822 - DNA, 25 bp, Saccharomyces pastorianus
gaagccccacagctaaaggacgaat

SEQ ID NO: 146823 - DNA, 25 bp, Saccharomyces pastorianus
taccagttgctatcaagtttgaacc

SEQ ID NO: 146824 - DNA, 25 bp, Saccharomyces pastorianus
ttcttttatttcttgagaggccact

SEQ ID NO: 146825 - DNA, 25 bp, Saccharomyces pastorianus
gaagaccgggtcaaccagatgctaa

SEQ ID NO: 146826 - DNA, 25 bp, Saccharomyces pastorianus
atatggaagctatgggtcatgtctt

SEQ ID NO: 146827 - DNA, 25 bp, Saccharomyces pastorianus
agatttgcacgctcatgatttgata

SEQ ID NO: 146828 - DNA, 25 bp, Saccharomyces pastorianus
agaggccacttaccctggcagggtt

SEQ ID NO: 146829 - DNA, 25 bp, Saccharomyces pastorianus
gtttgaccgtcataagaggtactat

SEQ ID NO: 146830 - DNA, 25 bp, Saccharomyces pastorianus
gaaagctaggtttgaccgtcataag

SEQ ID NO: 146831 - DNA, 25 bp, Saccharomyces pastorianus
aactgatgaacttggtacttgatga

SEQ ID NO: 146832 - DNA, 25 bp, Saccharomyces pastorianus
tgaactgatttctaaaaacgcaaga

SEQ ID NO: 146833 - DNA, 25 bp, Saccharomyces pastorianus
acttggtacttgatgatacagtaga

SEQ ID NO: 146834 - DNA, 25 bp, Saccharomyces pastorianus
aatcctgatgatgaaaacaacactg

SEQ ID NO: 146835 - DNA, 25 bp, Saccharomyces pastorianus
acgcaagaaagctaggtttgaccgt

SEQ ID NO: 146836 - DNA, 25 bp, Saccharomyces pastorianus
gatgaaaacaacactgaactgattt

SEQ ID NO: 146837 - DNA, 25 bp, Saccharomyces pastorianus
gaatatatgtctaatcctgatgatg

SEQ ID NO: 146838 - DNA, 25 bp, Saccharomyces pastorianus
gatgaacttggtacttgatgataca

SEQ ID NO: 146839 - DNA, 25 bp, Saccharomyces pastorianus
gaggtactattttggtctctttaag

SEQ ID NO: 146840 - DNA, 25 bp, Saccharomyces pastorianus
gatggccgacatgaattacgtcgtt

SEQ ID NO: 146841 - DNA, 25 bp, Saccharomyces pastorianus
gtcgtttccaagaacagaagcttaa

SEQ ID NO: 146842 - DNA, 25 bp, Saccharomyces pastorianus
atttcgatggccgacatgaattacg

SEQ ID NO: 146843 - DNA, 25 bp, Saccharomyces pastorianus
ctattacaaagccaggaatgatttc

SEQ ID NO: 146844 - DNA, 25 bp, Saccharomyces pastorianus
ggaatgatttcgatggccgacatga

SEQ ID NO: 146845 - DNA, 25 bp, Saccharomyces pastorianus
ttcgatggccgacatgaattacgtc

SEQ ID NO: 146846 - DNA, 25 bp, Saccharomyces pastorianus
gacatgaattacgtcgtttccaaga

SEQ ID NO: 146847 - DNA, 25 bp, Saccharomyces pastorianus
tacaaagccaggaatgatttcgatg

SEQ ID NO: 146848 - DNA, 25 bp, Saccharomyces pastorianus
aatgatttcgatggccgacatgaat

SEQ ID NO: 146849 - DNA, 25 bp, Saccharomyces pastorianus
ccaggaatgatttcgatggccgaca

SEQ ID NO: 146850 - DNA, 25 bp, Saccharomyces pastorianus
ggccgacatgaattacgtcgtttcc

SEQ ID NO: 146851 - DNA, 25 bp, Saccharomyces pastorianus
agatgtcttatcttatctttcttat

SEQ ID NO: 146852 - DNA, 25 bp, Saccharomyces pastorianus
ttatcttaaagacctaccatttgtt

SEQ ID NO: 146853 - DNA, 25 bp, Saccharomyces pastorianus
tgttccttttctattttggcagccc

SEQ ID NO: 146854 - DNA, 25 bp, Saccharomyces pastorianus
tccttttctattttggcagcccggg

SEQ ID NO: 146855 - DNA, 25 bp, Saccharomyces pastorianus
atcttatctttcttatcttaaagac

SEQ ID NO: 146856 - DNA, 25 bp, Saccharomyces pastorianus
tctattttggcagcccgggtattcg

SEQ ID NO: 146857 - DNA, 25 bp, Saccharomyces pastorianus
tcttaaagacctaccatttgttcct

SEQ ID NO: 146858 - DNA, 25 bp, Saccharomyces pastorianus
ttccttttctattttggcagcccgg

SEQ ID NO: 146859 - DNA, 25 bp, Saccharomyces pastorianus
tttctattttggcagcccgggtatt

SEQ ID NO: 146860 - DNA, 25 bp, Saccharomyces pastorianus
gttccttttctattttggcagcccg

SEQ ID NO: 146861 - DNA, 25 bp, Saccharomyces pastorianus
ttctattttggcagcccgggtattc

SEQ ID NO: 146862 - DNA, 25 bp, Saccharomyces pastorianus
tggtttgtgttcaggtatcatcgct

SEQ ID NO: 146863 - DNA, 25 bp, Saccharomyces pastorianus
gcactagcctggactgttactgtca

SEQ ID NO: 146864 - DNA, 25 bp, Saccharomyces pastorianus
ggtggctggatcaatcatcactata

SEQ ID NO: 146865 - DNA, 25 bp, Saccharomyces pastorianus
gaaaagaattctacgccttccgacg

SEQ ID NO: 146866 - DNA, 25 bp, Saccharomyces pastorianus
gttcgtgccaatctggtcagccgtt

SEQ ID NO: 146867 - DNA, 25 bp, Saccharomyces pastorianus
atcatcgctggcctagtgggtatca

SEQ ID NO: 146868 - DNA, 25 bp, Saccharomyces pastorianus
cagccgttgtcattggtgtggttac

SEQ ID NO: 146869 - DNA, 25 bp, Saccharomyces pastorianus
taaagagtctattgcgcatcgatga

SEQ ID NO: 146870 - DNA, 25 bp, Saccharomyces pastorianus
ggatgtaaccttgctgttgacttaa

SEQ ID NO: 146871 - DNA, 25 bp, Saccharomyces pastorianus
ctgcaggctcttacattagtccaat

SEQ ID NO: 146872 - DNA, 25 bp, Saccharomyces pastorianus
ggaagaattaggtaccgacgctgct

SEQ ID NO: 146873 - DNA, 25 bp, Saccharomyces pastorianus
acgactagctcatattctgaagctt

SEQ ID NO: 146874 - DNA, 25 bp, Saccharomyces pastorianus
atcaagtaggtacagcggaaatgct

SEQ ID NO: 146875 - DNA, 25 bp, Saccharomyces pastorianus
attctgaagcttctgctcctgaata

SEQ ID NO: 146876 - DNA, 25 bp, Saccharomyces pastorianus
aagcttctgctcctgaatataccaa

SEQ ID NO: 146877 - DNA, 25 bp, Saccharomyces pastorianus
tgaagcttctgctcctgaatatacc

SEQ ID NO: 146878 - DNA, 25 bp, Saccharomyces pastorianus
ctgctcctgaatataccaaaagatc

SEQ ID NO: 146879 - DNA, 25 bp, Saccharomyces pastorianus
caaaagatcaagtaggtacagcgga

SEQ ID NO: 146880 - DNA, 25 bp, Saccharomyces pastorianus
gcttctgctcctgaatataccaaaa

SEQ ID NO: 146881 - DNA, 25 bp, Saccharomyces pastorianus
gtacagcggaaatgctggaggcaaa

SEQ ID NO: 146882 - DNA, 25 bp, Saccharomyces pastorianus
atattctgaagcttctgctcctgaa

SEQ ID NO: 146883 - DNA, 25 bp, Saccharomyces pastorianus
gctcatattctgaagcttctgctcc

SEQ ID NO: 146884 - DNA, 25 bp, Saccharomyces pastorianus
ctgagcttgttgtttacaccacgaa

SEQ ID NO: 146885 - DNA, 25 bp, Saccharomyces pastorianus
aatctctacaaatccattggcctca

SEQ ID NO: 146886 - DNA, 25 bp, Saccharomyces pastorianus
tggcctcactggtaccagcagttaa

SEQ ID NO: 146887 - DNA, 25 bp, Saccharomyces pastorianus
gagtctctgcatgttacgattgata

SEQ ID NO: 146888 - DNA, 25 bp, Saccharomyces pastorianus
agaaccacggttctgagtctctgca

SEQ ID NO: 146889 - DNA, 25 bp, Saccharomyces pastorianus
aaattcatttttccagctacctcgc

SEQ ID NO: 146890 - DNA, 25 bp, Saccharomyces pastorianus
tacgcttaacttataacaggcctgc

SEQ ID NO: 146891 - DNA, 25 bp, Saccharomyces pastorianus
agaattcctacgcttttgagtaaga

SEQ ID NO: 146892 - DNA, 25 bp, Saccharomyces pastorianus
agctacctcgctattgcagaacaat

SEQ ID NO: 146893 - DNA, 25 bp, Saccharomyces pastorianus
attctaccgcttaaggtgagcttca

SEQ ID NO: 146894 - DNA, 25 bp, Saccharomyces pastorianus
ggccatttggcccagagattatcaa

SEQ ID NO: 146895 - DNA, 25 bp, Saccharomyces pastorianus
atccaacaagtttggcattcaagtt

SEQ ID NO: 146896 - DNA, 25 bp, Saccharomyces pastorianus
gaaatctacacttcgtgctcaactg

SEQ ID NO: 146897 - DNA, 25 bp, Saccharomyces pastorianus
attacgtagaattcccaatccctga

SEQ ID NO: 146898 - DNA, 25 bp, Saccharomyces pastorianus
gaatccttgaatactgaaatctaca

SEQ ID NO: 146899 - DNA, 25 bp, Saccharomyces pastorianus
aatcggcgaggacgatgattacgta

SEQ ID NO: 146900 - DNA, 25 bp, Saccharomyces pastorianus
cattgataaatctgacggcggtaac

SEQ ID NO: 146901 - DNA, 25 bp, Saccharomyces pastorianus
ttccctacctcaaatctccattgat

SEQ ID NO: 146902 - DNA, 25 bp, Saccharomyces pastorianus
gtgctcaactgctattaacgtcaac

SEQ ID NO: 146903 - DNA, 25 bp, Saccharomyces pastorianus
taacgtcaacttaccaatcggcgag

SEQ ID NO: 146904 - DNA, 25 bp, Saccharomyces pastorianus
gaagcatagcttcgctgatggtaag

SEQ ID NO: 146905 - DNA, 25 bp, Saccharomyces pastorianus
agaattcccaatccctgaacagatg

SEQ ID NO: 146906 - DNA, 25 bp, Saccharomyces pastorianus
aaggacgcagcacagttttggacta

SEQ ID NO: 146907 - DNA, 25 bp, Saccharomyces pastorianus
caaaggcggtattggcgcggtcttc

SEQ ID NO: 146908 - DNA, 25 bp, Saccharomyces pastorianus
acggtatggattttgctgacgcgat

SEQ ID NO: 146909 - DNA, 25 bp, Saccharomyces pastorianus
ttgttctcctgggttgcagtggaca

SEQ ID NO: 146910 - DNA, 25 bp, Saccharomyces pastorianus
gagagtctgatcctaatgctgttga

SEQ ID NO: 146911 - DNA, 25 bp, Saccharomyces pastorianus
agaatacgggtgctacttcatctcc

SEQ ID NO: 146912 - DNA, 25 bp, Saccharomyces pastorianus
aatacttcgcatatttgagcgcttt

SEQ ID NO: 146913 - DNA, 25 bp, Saccharomyces pastorianus
gattattcttctcaaactttcgctg

SEQ ID NO: 146914 - DNA, 25 bp, Saccharomyces pastorianus
gaaatttttggcctctttcgataat

SEQ ID NO: 146915 - DNA, 25 bp, Saccharomyces pastorianus
actcccgtgtctatggtcacagatt

SEQ ID NO: 146916 - DNA, 25 bp, Saccharomyces pastorianus
ggtcttcgccgaactaaatcagggt

SEQ ID NO: 146917 - DNA, 25 bp, Saccharomyces pastorianus
gagcgtgaaaaatccacctcttatg

SEQ ID NO: 146918 - DNA, 25 bp, Saccharomyces pastorianus
ggcattcatcatccacaggtaatac

SEQ ID NO: 146919 - DNA, 25 bp, Saccharomyces pastorianus
tctcgtaaaaatagccctcctgcca

SEQ ID NO: 146920 - DNA, 25 bp, Saccharomyces pastorianus
gtacaaataaaacagcagctccagt

SEQ ID NO: 146921 - DNA, 25 bp, Saccharomyces pastorianus
aaggcggaaggcaggctctcgtaaa

SEQ ID NO: 146922 - DNA, 25 bp, Saccharomyces pastorianus
tgaaccattagcaaagagaaccagg

SEQ ID NO: 146923 - DNA, 25 bp, Saccharomyces pastorianus
ggagccaaaaataacccacaatgaa

SEQ ID NO: 146924 - DNA, 25 bp, Saccharomyces pastorianus
aataccaatggctctgaaagcgaag

SEQ ID NO: 146925 - DNA, 25 bp, Saccharomyces pastorianus
aactgggatacgagtctgaacgtga

SEQ ID NO: 146926 - DNA, 25 bp, Saccharomyces pastorianus
agagaaccaggcattcatcatccac

SEQ ID NO: 146927 - DNA, 25 bp, Saccharomyces pastorianus
agcagctccagtaagaaaatctcaa

SEQ ID NO: 146928 - DNA, 25 bp, Saccharomyces pastorianus
tgggcatctgaattcaaaccgggcg

SEQ ID NO: 146929 - DNA, 25 bp, Saccharomyces pastorianus
gcatctgaattcaaaccgggcggaa

SEQ ID NO: 146930 - DNA, 25 bp, Saccharomyces pastorianus
ttggacaattgtggatgaaatacga

SEQ ID NO: 146931 - DNA, 25 bp, Saccharomyces pastorianus
aatacgacttcttagatgggcatct

SEQ ID NO: 146932 - DNA, 25 bp, Saccharomyces pastorianus
atctgaattcaaaccgggcggaatc

SEQ ID NO: 146933 - DNA, 25 bp, Saccharomyces pastorianus
gggcatctgaattcaaaccgggcgg

SEQ ID NO: 146934 - DNA, 25 bp, Saccharomyces pastorianus
atgggcatctgaattcaaaccgggc

SEQ ID NO: 146935 - DNA, 25 bp, Saccharomyces pastorianus
ggcatctgaattcaaaccgggcgga

SEQ ID NO: 146936 - DNA, 25 bp, Saccharomyces pastorianus
tctgaattcaaaccgggcggaatca

SEQ ID NO: 146937 - DNA, 25 bp, Saccharomyces pastorianus
gatgggcatctgaattcaaaccggg

SEQ ID NO: 146938 - DNA, 25 bp, Saccharomyces pastorianus
ggtagtacattggacaattgtggat

SEQ ID NO: 146939 - DNA, 25 bp, Saccharomyces pastorianus
gccttcgtagttggtcggatgatta

SEQ ID NO: 146940 - DNA, 25 bp, Saccharomyces pastorianus
aaagtagcgcaattctcctggcaag

SEQ ID NO: 146941 - DNA, 25 bp, Saccharomyces pastorianus
atttaaccatgcaaccattcccaat

SEQ ID NO: 146942 - DNA, 25 bp, Saccharomyces pastorianus
atgacatcactacctttctggatat

SEQ ID NO: 146943 - DNA, 25 bp, Saccharomyces pastorianus
gaatttacggacctcaaaccatctg

SEQ ID NO: 146944 - DNA, 25 bp, Saccharomyces pastorianus
tttggatgggactcggcttgacact

SEQ ID NO: 146945 - DNA, 25 bp, Saccharomyces pastorianus
gaatcccaatcgaccaaatctgcaa

SEQ ID NO: 146946 - DNA, 25 bp, Saccharomyces pastorianus
tatcgattggtttttcggttgcctt

SEQ ID NO: 146947 - DNA, 25 bp, Saccharomyces pastorianus
gcttgacacttgctatccatggaat

SEQ ID NO: 146948 - DNA, 25 bp, Saccharomyces pastorianus
gaaaccgttcatctaatgtatgcat

SEQ ID NO: 146949 - DNA, 25 bp, Saccharomyces pastorianus
tcccatttttaatcccaactatcca

SEQ ID NO: 146950 - DNA, 25 bp, Saccharomyces pastorianus
ggtttacctttatgaaaagctggag

SEQ ID NO: 146951 - DNA, 25 bp, Saccharomyces pastorianus
ggaccttggatatggacactgtaat

SEQ ID NO: 146952 - DNA, 25 bp, Saccharomyces pastorianus
ctgtaatagttccagccaagatctg

SEQ ID NO: 146953 - DNA, 25 bp, Saccharomyces pastorianus
gttgagcgatgcttgtggtcaagaa

SEQ ID NO: 146954 - DNA, 25 bp, Saccharomyces pastorianus
ggacactgtaatagttccagccaag

SEQ ID NO: 146955 - DNA, 25 bp, Saccharomyces pastorianus
agaaattgcactccgggccttgctt

SEQ ID NO: 146956 - DNA, 25 bp, Saccharomyces pastorianus
tatggaggaccttggatatggacac

SEQ ID NO: 146957 - DNA, 25 bp, Saccharomyces pastorianus
caacactatgaaatatctatggagg

SEQ ID NO: 146958 - DNA, 25 bp, Saccharomyces pastorianus
ggtcaagaaattgcactccgggcct

SEQ ID NO: 146959 - DNA, 25 bp, Saccharomyces pastorianus
ctggagttaactgataattgggtaa

SEQ ID NO: 146960 - DNA, 25 bp, Saccharomyces pastorianus
gccttgcttcaattttacaattttc

SEQ ID NO: 146961 - DNA, 25 bp, Saccharomyces pastorianus
ctctccatcggcattctatttaaac

SEQ ID NO: 146962 - DNA, 25 bp, Saccharomyces pastorianus
taaacgctattatcggctcttcaac

SEQ ID NO: 146963 - DNA, 25 bp, Saccharomyces pastorianus
tgccttcgtttgcatatctgttaag

SEQ ID NO: 146964 - DNA, 25 bp, Saccharomyces pastorianus
gaaggagtgttctctctctaacgag

SEQ ID NO: 146965 - DNA, 25 bp, Saccharomyces pastorianus
caaaggttaaaggagctgcccctct

SEQ ID NO: 146966 - DNA, 25 bp, Saccharomyces pastorianus
gtcgacacggagattatgccttcgt

SEQ ID NO: 146967 - DNA, 25 bp, Saccharomyces pastorianus
aactctcttgtttttgtcttactgc

SEQ ID NO: 146968 - DNA, 25 bp, Saccharomyces pastorianus
gcgatacatcaacacatgcgcatct

SEQ ID NO: 146969 - DNA, 25 bp, Saccharomyces pastorianus
aacacttggcggtagttattcacga

SEQ ID NO: 146970 - DNA, 25 bp, Saccharomyces pastorianus
ggaattgtccctaaagtcagcagcg

SEQ ID NO: 146971 - DNA, 25 bp, Saccharomyces pastorianus
aatatgctgacaccccaattggaga

SEQ ID NO: 146972 - DNA, 25 bp, Saccharomyces pastorianus
gatcacgaagcatctaacggattat

SEQ ID NO: 146973 - DNA, 25 bp, Saccharomyces pastorianus
tcaattccagcaattcaactcgaag

SEQ ID NO: 146974 - DNA, 25 bp, Saccharomyces pastorianus
gtgtacataacacgttcttgacgaa

SEQ ID NO: 146975 - DNA, 25 bp, Saccharomyces pastorianus
gttcttgacgaatattctttctcat

SEQ ID NO: 146976 - DNA, 25 bp, Saccharomyces pastorianus
taagcgttggtgattattctgggca

SEQ ID NO: 146977 - DNA, 25 bp, Saccharomyces pastorianus
agacagactgtatatttttagggca

SEQ ID NO: 146978 - DNA, 25 bp, Saccharomyces pastorianus
gaaatgacccggaaactgcaacgca

SEQ ID NO: 146979 - DNA, 25 bp, Saccharomyces pastorianus
ggcaaccatacccaacttcattggt

SEQ ID NO: 146980 - DNA, 25 bp, Saccharomyces pastorianus
aaagtcttcaagcagtaaacctcaa

SEQ ID NO: 146981 - DNA, 25 bp, Saccharomyces pastorianus
gtaaacctcaaaaacacgcaatcga

SEQ ID NO: 146982 - DNA, 25 bp, Saccharomyces pastorianus
tctttctcataagctttttgcaact

SEQ ID NO: 146983 - DNA, 25 bp, Saccharomyces pastorianus
tatacattattagctacgacatcgg

SEQ ID NO: 146984 - DNA, 25 bp, Saccharomyces pastorianus
gtgcgggctccaagtatatatacag

SEQ ID NO: 146985 - DNA, 25 bp, Saccharomyces pastorianus
tccgtctaagatacccaattttgag

SEQ ID NO: 146986 - DNA, 25 bp, Saccharomyces pastorianus
aacatggaccgattttctgaaagaa

SEQ ID NO: 146987 - DNA, 25 bp, Saccharomyces pastorianus
gtatcttcgcctaatcgttacgttc

SEQ ID NO: 146988 - DNA, 25 bp, Saccharomyces pastorianus
catttgtgaacaatctggtctcttc

SEQ ID NO: 146989 - DNA, 25 bp, Saccharomyces pastorianus
aatattttcaaatcccacggagatc

SEQ ID NO: 146990 - DNA, 25 bp, Saccharomyces pastorianus
cctacagttctgttactttgagaca

SEQ ID NO: 146991 - DNA, 25 bp, Saccharomyces pastorianus
gaaggtccatggtatcttcgcctaa

SEQ ID NO: 146992 - DNA, 25 bp, Saccharomyces pastorianus
gacatcggcactatttccgtttgat

SEQ ID NO: 146993 - DNA, 25 bp, Saccharomyces pastorianus
gagacagttgtcaaatccttattat

SEQ ID NO: 146994 - DNA, 25 bp, Saccharomyces pastorianus
gcagcaccaaaacagccctataatg

SEQ ID NO: 146995 - DNA, 25 bp, Saccharomyces pastorianus
gacggatattccttggcatctgata

SEQ ID NO: 146996 - DNA, 25 bp, Saccharomyces pastorianus
ctacttaaagcccaagcctcttaat

SEQ ID NO: 146997 - DNA, 25 bp, Saccharomyces pastorianus
gcgaatgcaagcgaacttttgggaa

SEQ ID NO: 146998 - DNA, 25 bp, Saccharomyces pastorianus
ataaatgagcccaacttcgacgtcc

SEQ ID NO: 146999 - DNA, 25 bp, Saccharomyces pastorianus
tcgcactgagggtggaccgtcaagt

SEQ ID NO: 147000 - DNA, 25 bp, Saccharomyces pastorianus
ggaattctgtgtcaaaacctcaaaa

SEQ ID NO: 147001 - DNA, 25 bp, Saccharomyces pastorianus
taatgttgactcatactcgcagaaa

SEQ ID NO: 147002 - DNA, 25 bp, Saccharomyces pastorianus
aacagcagcgccttcaataataatg

SEQ ID NO: 147003 - DNA, 25 bp, Saccharomyces pastorianus
ttcgacgtccgttcgaatggaactt

SEQ ID NO: 147004 - DNA, 25 bp, Saccharomyces pastorianus
gagaattcctcaaacaaactactaa

SEQ ID NO: 147005 - DNA, 25 bp, Saccharomyces pastorianus
ggaccagcagtatctcaaccgtttt

SEQ ID NO: 147006 - DNA, 25 bp, Saccharomyces pastorianus
tcccctgggcagttgttagatatac

SEQ ID NO: 147007 - DNA, 25 bp, Saccharomyces pastorianus
caacaaccttcaatatttccatctc

SEQ ID NO: 147008 - DNA, 25 bp, Saccharomyces pastorianus
taattttaatgctcctccgaatccg

SEQ ID NO: 147009 - DNA, 25 bp, Saccharomyces pastorianus
taatgcggtctccaacggacaggta

SEQ ID NO: 147010 - DNA, 25 bp, Saccharomyces pastorianus
atgttataccacctactatgccaat

SEQ ID NO: 147011 - DNA, 25 bp, Saccharomyces pastorianus
gagggactctggttacagcagctcc

SEQ ID NO: 147012 - DNA, 25 bp, Saccharomyces pastorianus
gaatccgatggcttttggtgttcca

SEQ ID NO: 147013 - DNA, 25 bp, Saccharomyces pastorianus
atctctttctgaaccgtttgctaac

SEQ ID NO: 147014 - DNA, 25 bp, Saccharomyces pastorianus
atgcataacctttctggaccagcag

SEQ ID NO: 147015 - DNA, 25 bp, Saccharomyces pastorianus
tcagcagtcatcgttttcttctcaa

SEQ ID NO: 147016 - DNA, 25 bp, Saccharomyces pastorianus
gaaagcgtgacgagttcaattctaa

SEQ ID NO: 147017 - DNA, 25 bp, Saccharomyces pastorianus
ggatggctgcaaccatgataagact

SEQ ID NO: 147018 - DNA, 25 bp, Saccharomyces pastorianus
gataagacttggttaccttcggaga

SEQ ID NO: 147019 - DNA, 25 bp, Saccharomyces pastorianus
atcaagggcgtttcttgcgttccaa

SEQ ID NO: 147020 - DNA, 25 bp, Saccharomyces pastorianus
attcaaagattactacctccaggcc

SEQ ID NO: 147021 - DNA, 25 bp, Saccharomyces pastorianus
gacaagcatcgttagctctaaggaa

SEQ ID NO: 147022 - DNA, 25 bp, Saccharomyces pastorianus
ggagattacagacttcatggttact

SEQ ID NO: 147023 - DNA, 25 bp, Saccharomyces pastorianus
tacctccaggccgtggtgatggcga

SEQ ID NO: 147024 - DNA, 25 bp, Saccharomyces pastorianus
acgatggcgacgatggcaatggtaa

SEQ ID NO: 147025 - DNA, 25 bp, Saccharomyces pastorianus
tatggtctgggcaaacaacaaactc

SEQ ID NO: 147026 - DNA, 25 bp, Saccharomyces pastorianus
atggttactagctcatcatgggtct

SEQ ID NO: 147027 - DNA, 25 bp, Saccharomyces pastorianus
atctctattgcgatggttgcggaat

SEQ ID NO: 147028 - DNA, 25 bp, Saccharomyces pastorianus
aatgggtatccattgggttcaggaa

SEQ ID NO: 147029 - DNA, 25 bp, Saccharomyces pastorianus
tgagccattggaggaacgcagaatt

SEQ ID NO: 147030 - DNA, 25 bp, Saccharomyces pastorianus
tttctgccacctggattgaggaact

SEQ ID NO: 147031 - DNA, 25 bp, Saccharomyces pastorianus
attcaccctgaatacacttttaacg

SEQ ID NO: 147032 - DNA, 25 bp, Saccharomyces pastorianus
gcgttccattacgtagatgccgcta

SEQ ID NO: 147033 - DNA, 25 bp, Saccharomyces pastorianus
aatattcttcgctttattcaccctg

SEQ ID NO: 147034 - DNA, 25 bp, Saccharomyces pastorianus
atgatactggttacctttctgccac

SEQ ID NO: 147035 - DNA, 25 bp, Saccharomyces pastorianus
aagccaatatggctctgggtcgcca

SEQ ID NO: 147036 - DNA, 25 bp, Saccharomyces pastorianus
gatgccgctaaaacctatcagttgc

SEQ ID NO: 147037 - DNA, 25 bp, Saccharomyces pastorianus
gctcgcagctggtccaaaacaaaca

SEQ ID NO: 147038 - DNA, 25 bp, Saccharomyces pastorianus
gtttaggtgctaaattaatctctat

SEQ ID NO: 147039 - DNA, 25 bp, Saccharomyces pastorianus
actggcactgctatatctttcttca

SEQ ID NO: 147040 - DNA, 25 bp, Saccharomyces pastorianus
ttatggtggcggtcacccaagatac

SEQ ID NO: 147041 - DNA, 25 bp, Saccharomyces pastorianus
gagatcttatggtggcggtcaccca

SEQ ID NO: 147042 - DNA, 25 bp, Saccharomyces pastorianus
gcaggtgctactggcactgctatat

SEQ ID NO: 147043 - DNA, 25 bp, Saccharomyces pastorianus
gctatatctttcttcaccgaacaaa

SEQ ID NO: 147044 - DNA, 25 bp, Saccharomyces pastorianus
tggctatggccgtagaggtggttac

SEQ ID NO: 147045 - DNA, 25 bp, Saccharomyces pastorianus
gctaatcaaaatattcctcccgaat

SEQ ID NO: 147046 - DNA, 25 bp, Saccharomyces pastorianus
aatattcctcccgaattattgaaat

SEQ ID NO: 147047 - DNA, 25 bp, Saccharomyces pastorianus
atacgacaggagatcttatggtggc

SEQ ID NO: 147048 - DNA, 25 bp, Saccharomyces pastorianus
cactgctatatctttcttcaccgaa

SEQ ID NO: 147049 - DNA, 25 bp, Saccharomyces pastorianus
gaaacagcctctcaagacaacgaat

SEQ ID NO: 147050 - DNA, 25 bp, Saccharomyces pastorianus
ccgccttggctattcatggtgacaa

SEQ ID NO: 147051 - DNA, 25 bp, Saccharomyces pastorianus
gctactccaggtcgactaattgata

SEQ ID NO: 147052 - DNA, 25 bp, Saccharomyces pastorianus
gacattaatctttgcttctacgaaa

SEQ ID NO: 147053 - DNA, 25 bp, Saccharomyces pastorianus
aagagaagatggatggcccgccttg

SEQ ID NO: 147054 - DNA, 25 bp, Saccharomyces pastorianus
gaactatctgcctcccataatatta

SEQ ID NO: 147055 - DNA, 25 bp, Saccharomyces pastorianus
acaaaccttgatgtggtctgccact

SEQ ID NO: 147056 - DNA, 25 bp, Saccharomyces pastorianus
aactagccgctgattacttgaatga

SEQ ID NO: 147057 - DNA, 25 bp, Saccharomyces pastorianus
gagagtcacttacctggttcttgat

SEQ ID NO: 147058 - DNA, 25 bp, Saccharomyces pastorianus
gagatttatctcgtggctctgaaat

SEQ ID NO: 147059 - DNA, 25 bp, Saccharomyces pastorianus
gaaattgttattgctactccaggtc

SEQ ID NO: 147060 - DNA, 25 bp, Saccharomyces pastorianus
ggtgtgtccactacagaagatcctg

SEQ ID NO: 147061 - DNA, 25 bp, Saccharomyces pastorianus
ggacgaaatctctacatctaccaaa

SEQ ID NO: 147062 - DNA, 25 bp, Saccharomyces pastorianus
aataagctcaatgtgcttcctccgc

SEQ ID NO: 147063 - DNA, 25 bp, Saccharomyces pastorianus
aacctgagaagccaccagttgtcaa

SEQ ID NO: 147064 - DNA, 25 bp, Saccharomyces pastorianus
tgctgctaacaagcttaacacctct

SEQ ID NO: 147065 - DNA, 25 bp, Saccharomyces pastorianus
gaaaattgttcctcgaccttgtcct

SEQ ID NO: 147066 - DNA, 25 bp, Saccharomyces pastorianus
tttcccctaccaaagagatttccat

SEQ ID NO: 147067 - DNA, 25 bp, Saccharomyces pastorianus
agatttccattgtcagcgtatcgcc

SEQ ID NO: 147068 - DNA, 25 bp, Saccharomyces pastorianus
agtgcccgctttatctttatctaag

SEQ ID NO: 147069 - DNA, 25 bp, Saccharomyces pastorianus
gtttccccgtcgaattcaaaatctg

SEQ ID NO: 147070 - DNA, 25 bp, Saccharomyces pastorianus
gagcaatcttcctgccttagagaga

SEQ ID NO: 147071 - DNA, 25 bp, Saccharomyces pastorianus
aaggcgagaactccgtcttggactg

SEQ ID NO: 147072 - DNA, 25 bp, Saccharomyces pastorianus
cctataaacatgattatggcacaga

SEQ ID NO: 147073 - DNA, 25 bp, Saccharomyces pastorianus
gtccgacctataaacatgattatgg

SEQ ID NO: 147074 - DNA, 25 bp, Saccharomyces pastorianus
tccgtccgacctataaacatgatta

SEQ ID NO: 147075 - DNA, 25 bp, Saccharomyces pastorianus
ttctgaaaaggcgagaactccgtct

SEQ ID NO: 147076 - DNA, 25 bp, Saccharomyces pastorianus
aaaggcgagaactccgtcttggact

SEQ ID NO: 147077 - DNA, 25 bp, Saccharomyces pastorianus
gagaactccgtcttggactgataga

SEQ ID NO: 147078 - DNA, 25 bp, Saccharomyces pastorianus
atggcacagataattatgatacttc

SEQ ID NO: 147079 - DNA, 25 bp, Saccharomyces pastorianus
gcgagaactccgtcttggactgata

SEQ ID NO: 147080 - DNA, 25 bp, Saccharomyces pastorianus
attccgtccgacctataaacatgat

SEQ ID NO: 147081 - DNA, 25 bp, Saccharomyces pastorianus
gaaaaggcgagaactccgtcttgga

SEQ ID NO: 147082 - DNA, 25 bp, Saccharomyces pastorianus
acgttaatacgcatttatcagcagg

SEQ ID NO: 147083 - DNA, 25 bp, Saccharomyces pastorianus
ggaaaaattcaccactcattctaac

SEQ ID NO: 147084 - DNA, 25 bp, Saccharomyces pastorianus
attcaaacctgatgtcgttgtgtta

SEQ ID NO: 147085 - DNA, 25 bp, Saccharomyces pastorianus
gaccgcagggtctatcttgaatgca

SEQ ID NO: 147086 - DNA, 25 bp, Saccharomyces pastorianus
actaccgcaccagcaagttgttgaa

SEQ ID NO: 147087 - DNA, 25 bp, Saccharomyces pastorianus
gggcaacttcatactgttacgttaa

SEQ ID NO: 147088 - DNA, 25 bp, Saccharomyces pastorianus
ataaaggtgccgtagccattagata

SEQ ID NO: 147089 - DNA, 25 bp, Saccharomyces pastorianus
gaactttatgatccaatctgcgaat

SEQ ID NO: 147090 - DNA, 25 bp, Saccharomyces pastorianus
tgacacacttttgggcaaactaccg

SEQ ID NO: 147091 - DNA, 25 bp, Saccharomyces pastorianus
gaacagatgtcctctcttttgatac

SEQ ID NO: 147092 - DNA, 25 bp, Saccharomyces pastorianus
aagttatagagttgaccgcagggtc

SEQ ID NO: 147093 - DNA, 25 bp, Saccharomyces pastorianus
gcattgtgagcaactttttactcct

SEQ ID NO: 147094 - DNA, 25 bp, Saccharomyces pastorianus
gcacacatttccttatattacgcag

SEQ ID NO: 147095 - DNA, 25 bp, Saccharomyces pastorianus
cgattgtggacgtcgctacgttgat

SEQ ID NO: 147096 - DNA, 25 bp, Saccharomyces pastorianus
atatctacccgatgatctcgactac

SEQ ID NO: 147097 - DNA, 25 bp, Saccharomyces pastorianus
aattaagttgcccatcatgcgataa

SEQ ID NO: 147098 - DNA, 25 bp, Saccharomyces pastorianus
cggccggagcgttgttcaaaaatat

SEQ ID NO: 147099 - DNA, 25 bp, Saccharomyces pastorianus
ttgaatgacggctgcacgggtgtca

SEQ ID NO: 147100 - DNA, 25 bp, Saccharomyces pastorianus
actcctcttcaattaactagccaaa

SEQ ID NO: 147101 - DNA, 25 bp, Saccharomyces pastorianus
gacaagtctccgtttttggtaagcg

SEQ ID NO: 147102 - DNA, 25 bp, Saccharomyces pastorianus
gactaccccaaggaacagctgacag

SEQ ID NO: 147103 - DNA, 25 bp, Saccharomyces pastorianus
atcttcaaattactatcgcgtgtca

SEQ ID NO: 147104 - DNA, 25 bp, Saccharomyces pastorianus
gtaagtcttcgcagagcaacaccga

SEQ ID NO: 147105 - DNA, 25 bp, Saccharomyces pastorianus
cggaacgcccatcggtcttacagga

SEQ ID NO: 147106 - DNA, 25 bp, Saccharomyces pastorianus
gtcttcgcagagcaacaccgatgtt

SEQ ID NO: 147107 - DNA, 25 bp, Saccharomyces pastorianus
catcggtcttacaggactaactcca

SEQ ID NO: 147108 - DNA, 25 bp, Saccharomyces pastorianus
gactcaagaagtaacccttcaactt

SEQ ID NO: 147109 - DNA, 25 bp, Saccharomyces pastorianus
gaagtgtgacaacaactagacgcgt

SEQ ID NO: 147110 - DNA, 25 bp, Saccharomyces pastorianus
agacgcgtgaatatagactcaagaa

SEQ ID NO: 147111 - DNA, 25 bp, Saccharomyces pastorianus
ttcaacttcaccgtttgtcacagca

SEQ ID NO: 147112 - DNA, 25 bp, Saccharomyces pastorianus
actaactccaagtaagtcttcgcag

SEQ ID NO: 147113 - DNA, 25 bp, Saccharomyces pastorianus
accgtttgtcacagcacccggaacg

SEQ ID NO: 147114 - DNA, 25 bp, Saccharomyces pastorianus
gtgacaacaactagacgcgtgaata

SEQ ID NO: 147115 - DNA, 25 bp, Saccharomyces pastorianus
ctgaaattgtcggtaaaagagttag

SEQ ID NO: 147116 - DNA, 25 bp, Saccharomyces pastorianus
atgttcaacaaatcgactacaagtt

SEQ ID NO: 147117 - DNA, 25 bp, Saccharomyces pastorianus
ccaactgaaattgtcggtaaaagag

SEQ ID NO: 147118 - DNA, 25 bp, Saccharomyces pastorianus
aaggttttgttagactccaaggatg

SEQ ID NO: 147119 - DNA, 25 bp, Saccharomyces pastorianus
ggatgttcaacaaatcgactacaag

SEQ ID NO: 147120 - DNA, 25 bp, Saccharomyces pastorianus
tcccaactgaaattgtcggtaaaag

SEQ ID NO: 147121 - DNA, 25 bp, Saccharomyces pastorianus
gatgttcaacaaatcgactacaagt

SEQ ID NO: 147122 - DNA, 25 bp, Saccharomyces pastorianus
tgttcaacaaatcgactacaagttg

SEQ ID NO: 147123 - DNA, 25 bp, Saccharomyces pastorianus
ggttttgttagactccaaggatgtt

SEQ ID NO: 147124 - DNA, 25 bp, Saccharomyces pastorianus
gctgtctacaacaagttgactggca

SEQ ID NO: 147125 - DNA, 25 bp, Saccharomyces pastorianus
tttgttagactccaaggatgttcaa

SEQ ID NO: 147126 - DNA, 25 bp, Saccharomyces pastorianus
gctcctctccagaactaaaggctga

SEQ ID NO: 147127 - DNA, 25 bp, Saccharomyces pastorianus
ttcatcgatctagaaagctcctctc

SEQ ID NO: 147128 - DNA, 25 bp, Saccharomyces pastorianus
gtccaatccaagatcttatcccaag

SEQ ID NO: 147129 - DNA, 25 bp, Saccharomyces pastorianus
caatccaagatcttatcccaagctc

SEQ ID NO: 147130 - DNA, 25 bp, Saccharomyces pastorianus
atcgatctagaaagctcctctccag

SEQ ID NO: 147131 - DNA, 25 bp, Saccharomyces pastorianus
ccaagatcttatcccaagctccaag

SEQ ID NO: 147132 - DNA, 25 bp, Saccharomyces pastorianus
tccagaactaaaggctgacttgaga

SEQ ID NO: 147133 - DNA, 25 bp, Saccharomyces pastorianus
gccaagaccttcatcgatctagaaa

SEQ ID NO: 147134 - DNA, 25 bp, Saccharomyces pastorianus
agaaagctcctctccagaactaaag

SEQ ID NO: 147135 - DNA, 25 bp, Saccharomyces pastorianus
tctgtccaatccaagatcttatccc

SEQ ID NO: 147136 - DNA, 25 bp, Saccharomyces pastorianus
gatctagaaagctcctctccagaac

SEQ ID NO: 147137 - DNA, 25 bp, Saccharomyces pastorianus
tgcaatacccgctaatggttgttag

SEQ ID NO: 147138 - DNA, 25 bp, Saccharomyces pastorianus
ctaccatatatatttaccgcagttt

SEQ ID NO: 147139 - DNA, 25 bp, Saccharomyces pastorianus
ggttgttagcttgccatttttagtg

SEQ ID NO: 147140 - DNA, 25 bp, Saccharomyces pastorianus
taccgcagttttacgccgccagaaa

SEQ ID NO: 147141 - DNA, 25 bp, Saccharomyces pastorianus
atggagtgtgtttcatttttcttaa

SEQ ID NO: 147142 - DNA, 25 bp, Saccharomyces pastorianus
tatatttaccgcagttttacgccgc

SEQ ID NO: 147143 - DNA, 25 bp, Saccharomyces pastorianus
tatttaccgcagttttacgccgcca

SEQ ID NO: 147144 - DNA, 25 bp, Saccharomyces pastorianus
aatgctgcaatacccgctaatggtt

SEQ ID NO: 147145 - DNA, 25 bp, Saccharomyces pastorianus
cttaatgctgcaatacccgctaatg

SEQ ID NO: 147146 - DNA, 25 bp, Saccharomyces pastorianus
acccgctaatggttgttagcttgcc

SEQ ID NO: 147147 - DNA, 25 bp, Saccharomyces pastorianus
gtgtttcatttttcttaatgctgca

SEQ ID NO: 147148 - DNA, 25 bp, Saccharomyces pastorianus
gatttgcgagacaaactcccgctgg

SEQ ID NO: 147149 - DNA, 25 bp, Saccharomyces pastorianus
atcgaacttctatctgggacagcag

SEQ ID NO: 147150 - DNA, 25 bp, Saccharomyces pastorianus
aataaatccgagctttccggtcgca

SEQ ID NO: 147151 - DNA, 25 bp, Saccharomyces pastorianus
tacttatttagctatttccccacaa

SEQ ID NO: 147152 - DNA, 25 bp, Saccharomyces pastorianus
tacaccatttacgtcaaggcctcat

SEQ ID NO: 147153 - DNA, 25 bp, Saccharomyces pastorianus
tagccctgcgttcatggcatcaaat

SEQ ID NO: 147154 - DNA, 25 bp, Saccharomyces pastorianus
ggacttaacttggattactcgacgt

SEQ ID NO: 147155 - DNA, 25 bp, Saccharomyces pastorianus
aatggatccattacccacgttcgat

SEQ ID NO: 147156 - DNA, 25 bp, Saccharomyces pastorianus
atgctgctcgcacctacattaggaa

SEQ ID NO: 147157 - DNA, 25 bp, Saccharomyces pastorianus
gattgaacgatccaactgctacacc

SEQ ID NO: 147158 - DNA, 25 bp, Saccharomyces pastorianus
agcagcaccactccgatgatgaata

SEQ ID NO: 147159 - DNA, 25 bp, Saccharomyces pastorianus
ttctcactgggaatcattatcgcca

SEQ ID NO: 147160 - DNA, 25 bp, Saccharomyces pastorianus
ggacgatcatagttgtagttgctct

SEQ ID NO: 147161 - DNA, 25 bp, Saccharomyces pastorianus
acggcggataatacctcattacttg

SEQ ID NO: 147162 - DNA, 25 bp, Saccharomyces pastorianus
gaacgtacggcgaatttgactcata

SEQ ID NO: 147163 - DNA, 25 bp, Saccharomyces pastorianus
tggacgccgccatttagcaatggat

SEQ ID NO: 147164 - DNA, 25 bp, Saccharomyces pastorianus
attctgcttcttccttagcttttac

SEQ ID NO: 147165 - DNA, 25 bp, Saccharomyces pastorianus
aagaccctgaaaccaatcctatcaa

SEQ ID NO: 147166 - DNA, 25 bp, Saccharomyces pastorianus
agcttttactctagattctcactgg

SEQ ID NO: 147167 - DNA, 25 bp, Saccharomyces pastorianus
ctttcgtcaagtacagttggctctt

SEQ ID NO: 147168 - DNA, 25 bp, Saccharomyces pastorianus
atacaatacactttatgccatggat

SEQ ID NO: 147169 - DNA, 25 bp, Saccharomyces pastorianus
tagttgctctgtttgtggacgccgc

SEQ ID NO: 147170 - DNA, 25 bp, Saccharomyces pastorianus
aatggcccttgcaacttgtttcgca

SEQ ID NO: 147171 - DNA, 25 bp, Saccharomyces pastorianus
ccatttcgtccttgcgttaattagt

SEQ ID NO: 147172 - DNA, 25 bp, Saccharomyces pastorianus
gacaatatcgtaatgcctcatccgc

SEQ ID NO: 147173 - DNA, 25 bp, Saccharomyces pastorianus
accagtcagtgcactacattccatg

SEQ ID NO: 147174 - DNA, 25 bp, Saccharomyces pastorianus
aaactggttcttgtagctacttcaa

SEQ ID NO: 147175 - DNA, 25 bp, Saccharomyces pastorianus
gtaaacgttcatattcctcttgtcc

SEQ ID NO: 147176 - DNA, 25 bp, Saccharomyces pastorianus
catttcatcggtagcattctcttta

SEQ ID NO: 147177 - DNA, 25 bp, Saccharomyces pastorianus
cctggttccttcttcataagcaaac

SEQ ID NO: 147178 - DNA, 25 bp, Saccharomyces pastorianus
gcttcttgcctcaaatcttttttca

SEQ ID NO: 147179 - DNA, 25 bp, Saccharomyces pastorianus
aacttgtttcgcatcttcaatggga

SEQ ID NO: 147180 - DNA, 25 bp, Saccharomyces pastorianus
attccatgtatttcttggccccaat

SEQ ID NO: 147181 - DNA, 25 bp, Saccharomyces pastorianus
aagagaatgctccttcttccacgag

SEQ ID NO: 147182 - DNA, 25 bp, Saccharomyces pastorianus
aaaatgggttcaacttccgctacat

SEQ ID NO: 147183 - DNA, 25 bp, Saccharomyces pastorianus
gaacaggacgatgtagccactaaaa

SEQ ID NO: 147184 - DNA, 25 bp, Saccharomyces pastorianus
gctgcgtcggttcctaagaaatctt

SEQ ID NO: 147185 - DNA, 25 bp, Saccharomyces pastorianus
gagaaaacgccttctgtttcagaaa

SEQ ID NO: 147186 - DNA, 25 bp, Saccharomyces pastorianus
ttccacgagttcttcttctattttc

SEQ ID NO: 147187 - DNA, 25 bp, Saccharomyces pastorianus
ggaactatctggtgaaagcgaccta

SEQ ID NO: 147188 - DNA, 25 bp, Saccharomyces pastorianus
gaagatgatgctataccacaacgat

SEQ ID NO: 147189 - DNA, 25 bp, Saccharomyces pastorianus
gtaaccaaaagcaaggcgcctacaa

SEQ ID NO: 147190 - DNA, 25 bp, Saccharomyces pastorianus
aagatcgtcgagagctgcgtcggtt

SEQ ID NO: 147191 - DNA, 25 bp, Saccharomyces pastorianus
acagctgtgaaacctaaattggcca

SEQ ID NO: 147192 - DNA, 25 bp, Saccharomyces pastorianus
tcaccctgctgatgatccattatac

SEQ ID NO: 147193 - DNA, 25 bp, Saccharomyces pastorianus
taacggtgctttcggtaccagagcc

SEQ ID NO: 147194 - DNA, 25 bp, Saccharomyces pastorianus
gtggtatttaccaattcttcctatg

SEQ ID NO: 147195 - DNA, 25 bp, Saccharomyces pastorianus
tattggcactggctggagtacttac

SEQ ID NO: 147196 - DNA, 25 bp, Saccharomyces pastorianus
actcgtaagatatttcaccctgctg

SEQ ID NO: 147197 - DNA, 25 bp, Saccharomyces pastorianus
gtagctcaacttgcaccatacgtga

SEQ ID NO: 147198 - DNA, 25 bp, Saccharomyces pastorianus
gcagcggcagcgagatatatctaca

SEQ ID NO: 147199 - DNA, 25 bp, Saccharomyces pastorianus
tatacggtcgattcccaatgtttta

SEQ ID NO: 147200 - DNA, 25 bp, Saccharomyces pastorianus
ggagtacttacattcctccattcaa

SEQ ID NO: 147201 - DNA, 25 bp, Saccharomyces pastorianus
tttacttgctattacctaacggtgc

SEQ ID NO: 147202 - DNA, 25 bp, Saccharomyces pastorianus
gaatgtacggcatatcaccatggtg

SEQ ID NO: 147203 - DNA, 25 bp, Saccharomyces pastorianus
aaagaccctgaacctaccacaagat

SEQ ID NO: 147204 - DNA, 25 bp, Saccharomyces pastorianus
cctggttgtacttccaatgggtgca

SEQ ID NO: 147205 - DNA, 25 bp, Saccharomyces pastorianus
tgtacttccaatgggtgcattcagt

SEQ ID NO: 147206 - DNA, 25 bp, Saccharomyces pastorianus
gagcttctgttgtttatccaatcaa

SEQ ID NO: 147207 - DNA, 25 bp, Saccharomyces pastorianus
cctaccacaagatcaggtcactcta

SEQ ID NO: 147208 - DNA, 25 bp, Saccharomyces pastorianus
ggtcactctaagcaacctggttgta

SEQ ID NO: 147209 - DNA, 25 bp, Saccharomyces pastorianus
agcaacctggttgtacttccaatgg

SEQ ID NO: 147210 - DNA, 25 bp, Saccharomyces pastorianus
gttgtttatccaatcaatcttttaa

SEQ ID NO: 147211 - DNA, 25 bp, Saccharomyces pastorianus
caatgggtgcattcagtggaactgt

SEQ ID NO: 147212 - DNA, 25 bp, Saccharomyces pastorianus
actgtaggagcttctgttgtttatc

SEQ ID NO: 147213 - DNA, 25 bp, Saccharomyces pastorianus
tcagtggaactgtaggagcttctgt

SEQ ID NO: 147214 - DNA, 25 bp, Saccharomyces pastorianus
tgaccaaattagaaggctgccgcga

SEQ ID NO: 147215 - DNA, 25 bp, Saccharomyces pastorianus
ggaataatttgctttttcagactgc

SEQ ID NO: 147216 - DNA, 25 bp, Saccharomyces pastorianus
gagggtgggctcagattattttaca

SEQ ID NO: 147217 - DNA, 25 bp, Saccharomyces pastorianus
aaagttctctacttacattgctggt

SEQ ID NO: 147218 - DNA, 25 bp, Saccharomyces pastorianus
gtttggttctttcgaggtcaccaag

SEQ ID NO: 147219 - DNA, 25 bp, Saccharomyces pastorianus
tatggcagctcagttttccgtttat

SEQ ID NO: 147220 - DNA, 25 bp, Saccharomyces pastorianus
ggtatagtgggcatatttccctatg

SEQ ID NO: 147221 - DNA, 25 bp, Saccharomyces pastorianus
tttacagaggtgtcacagtcggtat

SEQ ID NO: 147222 - DNA, 25 bp, Saccharomyces pastorianus
gcagtgcgctcctttggacacaaag

SEQ ID NO: 147223 - DNA, 25 bp, Saccharomyces pastorianus
ttgaaattcagggtgcagtgcgctc

SEQ ID NO: 147224 - DNA, 25 bp, Saccharomyces pastorianus
tatcatctccattagcaaaggctgt

SEQ ID NO: 147225 - DNA, 25 bp, Saccharomyces pastorianus
atttcgaaacactgcaggccgtgac

SEQ ID NO: 147226 - DNA, 25 bp, Saccharomyces pastorianus
aggccgtgacagtttttaaatcgca

SEQ ID NO: 147227 - DNA, 25 bp, Saccharomyces pastorianus
tgtccccatggacgtccaacaatga

SEQ ID NO: 147228 - DNA, 25 bp, Saccharomyces pastorianus
gaccagagtcgttcataatctcagt

SEQ ID NO: 147229 - DNA, 25 bp, Saccharomyces pastorianus
agattcgttctatgtttgctatgag

SEQ ID NO: 147230 - DNA, 25 bp, Saccharomyces pastorianus
gctgttaagcttacctacgtccaaa

SEQ ID NO: 147231 - DNA, 25 bp, Saccharomyces pastorianus
gtttggctccagagttaggctgtta

SEQ ID NO: 147232 - DNA, 25 bp, Saccharomyces pastorianus
atcagatgttccaagattcgttcta

SEQ ID NO: 147233 - DNA, 25 bp, Saccharomyces pastorianus
acctcagccggtagaattaagtgtc

SEQ ID NO: 147234 - DNA, 25 bp, Saccharomyces pastorianus
cattgatgaacttgtggtgctggac

SEQ ID NO: 147235 - DNA, 25 bp, Saccharomyces pastorianus
gataagccttggaattgtccccatg

SEQ ID NO: 147236 - DNA, 25 bp, Saccharomyces pastorianus
atatacagcaataggcaagcccatg

SEQ ID NO: 147237 - DNA, 25 bp, Saccharomyces pastorianus
gaattagcaacccagacgcctttat

SEQ ID NO: 147238 - DNA, 25 bp, Saccharomyces pastorianus
gttatcctccgatcatgagttaaga

SEQ ID NO: 147239 - DNA, 25 bp, Saccharomyces pastorianus
cagacgcctttatcgacatcttcgt

SEQ ID NO: 147240 - DNA, 25 bp, Saccharomyces pastorianus
taagttcgtctttgcgttcaagtgc

SEQ ID NO: 147241 - DNA, 25 bp, Saccharomyces pastorianus
gacatcttcgtcatatacagcaata

SEQ ID NO: 147242 - DNA, 25 bp, Saccharomyces pastorianus
atgctagatccttcctttccgttaa

SEQ ID NO: 147243 - DNA, 25 bp, Saccharomyces pastorianus
gtcttcttctaatacgttatcctcc

SEQ ID NO: 147244 - DNA, 25 bp, Saccharomyces pastorianus
acttggcaagtaatcccgaattagc

SEQ ID NO: 147245 - DNA, 25 bp, Saccharomyces pastorianus
aacagatccttcttacgtgtcttct

SEQ ID NO: 147246 - DNA, 25 bp, Saccharomyces pastorianus
gcccatgcctttatcaacagatcct

SEQ ID NO: 147247 - DNA, 25 bp, Saccharomyces pastorianus
aagaaggccttcctctgctgtgagc

SEQ ID NO: 147248 - DNA, 25 bp, Saccharomyces pastorianus
agagtacatcttgaaccccatttgc

SEQ ID NO: 147249 - DNA, 25 bp, Saccharomyces pastorianus
ttagaaaactcggtggctccagctt

SEQ ID NO: 147250 - DNA, 25 bp, Saccharomyces pastorianus
agattctactcttacgtcgatatgt

SEQ ID NO: 147251 - DNA, 25 bp, Saccharomyces pastorianus
tttcgagatctcattcgcattctgc

SEQ ID NO: 147252 - DNA, 25 bp, Saccharomyces pastorianus
gggatgaccaccacaacttcaaatg

SEQ ID NO: 147253 - DNA, 25 bp, Saccharomyces pastorianus
aagcctattcttcatcgtcagcaac

SEQ ID NO: 147254 - DNA, 25 bp, Saccharomyces pastorianus
gaacactgacctgagcgatgtcgat

SEQ ID NO: 147255 - DNA, 25 bp, Saccharomyces pastorianus
agaccacctatgaaatcccaagcgt

SEQ ID NO: 147256 - DNA, 25 bp, Saccharomyces pastorianus
aacatggccctgttggctagaacga

SEQ ID NO: 147257 - DNA, 25 bp, Saccharomyces pastorianus
cagcatcgccagatcttaaactttc

SEQ ID NO: 147258 - DNA, 25 bp, Saccharomyces pastorianus
gagaaaggtcagatccgccgaatat

SEQ ID NO: 147259 - DNA, 25 bp, Saccharomyces pastorianus
acaagagaaaggtcagatccgccga

SEQ ID NO: 147260 - DNA, 25 bp, Saccharomyces pastorianus
gaaaggtcagatccgccgaatatta

SEQ ID NO: 147261 - DNA, 25 bp, Saccharomyces pastorianus
cgaatattacgccaagaagagagct

SEQ ID NO: 147262 - DNA, 25 bp, Saccharomyces pastorianus
gatccgccgaatattacgccaagaa

SEQ ID NO: 147263 - DNA, 25 bp, Saccharomyces pastorianus
gtcagatccgccgaatattacgcca

SEQ ID NO: 147264 - DNA, 25 bp, Saccharomyces pastorianus
ttcaccaagaaggtctcctctgctt

SEQ ID NO: 147265 - DNA, 25 bp, Saccharomyces pastorianus
accaagaaggtctcctctgcttctg

SEQ ID NO: 147266 - DNA, 25 bp, Saccharomyces pastorianus
aagagaaaggtcagatccgccgaat

SEQ ID NO: 147267 - DNA, 25 bp, Saccharomyces pastorianus
cagatccgccgaatattacgccaag

SEQ ID NO: 147268 - DNA, 25 bp, Saccharomyces pastorianus
tccgccgaatattacgccaagaaga

SEQ ID NO: 147269 - DNA, 25 bp, Saccharomyces pastorianus
agaaaggtcagatccgccgaatatt

SEQ ID NO: 147270 - DNA, 25 bp, Saccharomyces pastorianus
tgctgctgcttctgaatccgatgtt

SEQ ID NO: 147271 - DNA, 25 bp, Saccharomyces pastorianus
cgaatattacgccaagaagagagct

SEQ ID NO: 147272 - DNA, 25 bp, Saccharomyces pastorianus
agatccgccgaatattacgccaaga

SEQ ID NO: 147273 - DNA, 25 bp, Saccharomyces pastorianus
agatcttcgaaggtattccacctcc

SEQ ID NO: 147274 - DNA, 25 bp, Saccharomyces pastorianus
gtcagatccgccgaatattacgcca

SEQ ID NO: 147275 - DNA, 25 bp, Saccharomyces pastorianus
ttcaccaagaaggtctcctctgctt

SEQ ID NO: 147276 - DNA, 25 bp, Saccharomyces pastorianus
accaagaaggtctcctctgcttctg

SEQ ID NO: 147277 - DNA, 25 bp, Saccharomyces pastorianus
agagttgtcgttcctcaagctttga

SEQ ID NO: 147278 - DNA, 25 bp, Saccharomyces pastorianus
atccgccgaatattacgccaagaag

SEQ ID NO: 147279 - DNA, 25 bp, Saccharomyces pastorianus
aagagaaaggtcagatccgccgaat

SEQ ID NO: 147280 - DNA, 25 bp, Saccharomyces pastorianus
gtttctgagagaccacacaagagtt

SEQ ID NO: 147281 - DNA, 25 bp, Saccharomyces pastorianus
taaaggtcggtattgttccaggtga

SEQ ID NO: 147282 - DNA, 25 bp, Saccharomyces pastorianus
aaggtgaagctgaccaagccccaga

SEQ ID NO: 147283 - DNA, 25 bp, Saccharomyces pastorianus
aatacaacagaacacgggcctccag

SEQ ID NO: 147284 - DNA, 25 bp, Saccharomyces pastorianus
gtggtgcaaactatgattccgatga

SEQ ID NO: 147285 - DNA, 25 bp, Saccharomyces pastorianus
gaagatcctagaagtccatgtcgaa

SEQ ID NO: 147286 - DNA, 25 bp, Saccharomyces pastorianus
aattgtcccagccattccaaagaaa

SEQ ID NO: 147287 - DNA, 25 bp, Saccharomyces pastorianus
gaagtccatgtcgaaccaggtatga

SEQ ID NO: 147288 - DNA, 25 bp, Saccharomyces pastorianus
attttgcctccaagaattgtcccag

SEQ ID NO: 147289 - DNA, 25 bp, Saccharomyces pastorianus
agctactgtggacgaatgtgtactc

SEQ ID NO: 147290 - DNA, 25 bp, Saccharomyces pastorianus
gatgttgtcttcatagtttctgaga

SEQ ID NO: 147291 - DNA, 25 bp, Saccharomyces pastorianus
cgatattctaggtgtttcagtcact

SEQ ID NO: 147292 - DNA, 25 bp, Saccharomyces pastorianus
agtcactgccactgatgtcgaaatt

SEQ ID NO: 147293 - DNA, 25 bp, Saccharomyces pastorianus
gaagcttcagcagcctatgaaattt

SEQ ID NO: 147294 - DNA, 25 bp, Saccharomyces pastorianus
ctgccactgatgtcgaaattaagaa

SEQ ID NO: 147295 - DNA, 25 bp, Saccharomyces pastorianus
gcagcctatgaaattttatcagatt

SEQ ID NO: 147296 - DNA, 25 bp, Saccharomyces pastorianus
gaatccaagtgaggaagctgcagaa

SEQ ID NO: 147297 - DNA, 25 bp, Saccharomyces pastorianus
gaaagcttatagaaaatgcgcctta

SEQ ID NO: 147298 - DNA, 25 bp, Saccharomyces pastorianus
aaggtctaagtggtgctggtggcgc

SEQ ID NO: 147299 - DNA, 25 bp, Saccharomyces pastorianus
gttcaaagaagcttcagcagcctat

SEQ ID NO: 147300 - DNA, 25 bp, Saccharomyces pastorianus
aaaatgcgccttaaaataccatcca

SEQ ID NO: 147301 - DNA, 25 bp, Saccharomyces pastorianus
taggtgtttcagtcactgccactga

SEQ ID NO: 147302 - DNA, 25 bp, Saccharomyces pastorianus
gacctcatgatagcgaaaatataca

SEQ ID NO: 147303 - DNA, 25 bp, Saccharomyces pastorianus
acatcgtggaactggagggactact

SEQ ID NO: 147304 - DNA, 25 bp, Saccharomyces pastorianus
gtttttaagaggacctagacctcat

SEQ ID NO: 147305 - DNA, 25 bp, Saccharomyces pastorianus
gaacacgatccaaactttactgaag

SEQ ID NO: 147306 - DNA, 25 bp, Saccharomyces pastorianus
gatacgctggaagcacagtacgatt

SEQ ID NO: 147307 - DNA, 25 bp, Saccharomyces pastorianus
ttctatcctccacctgtttttaaga

SEQ ID NO: 147308 - DNA, 25 bp, Saccharomyces pastorianus
gtgatatttcaaccgacaatgggcg

SEQ ID NO: 147309 - DNA, 25 bp, Saccharomyces pastorianus
gaagaagcattagagtacgagtaca

SEQ ID NO: 147310 - DNA, 25 bp, Saccharomyces pastorianus
acgtataagggtaccagaagtgata

SEQ ID NO: 147311 - DNA, 25 bp, Saccharomyces pastorianus
ggagaaattctatcctccacctgtt

SEQ ID NO: 147312 - DNA, 25 bp, Saccharomyces pastorianus
gagggactacttttagaacacgatc

SEQ ID NO: 147313 - DNA, 25 bp, Saccharomyces pastorianus
agaagcccctttgacggaccatttg

SEQ ID NO: 147314 - DNA, 25 bp, Saccharomyces pastorianus
gcaggattcgttaaccatgctaccc

SEQ ID NO: 147315 - DNA, 25 bp, Saccharomyces pastorianus
gactggcaactgttcaatcacaacg

SEQ ID NO: 147316 - DNA, 25 bp, Saccharomyces pastorianus
tgaacagtcagcttacaatccccag

SEQ ID NO: 147317 - DNA, 25 bp, Saccharomyces pastorianus
gcagtagtgatagacgaccctccat

SEQ ID NO: 147318 - DNA, 25 bp, Saccharomyces pastorianus
ctctttgactcctcttaaggcagta

SEQ ID NO: 147319 - DNA, 25 bp, Saccharomyces pastorianus
gtcgcccattgccattgattttgga

SEQ ID NO: 147320 - DNA, 25 bp, Saccharomyces pastorianus
ggactacacttttcatcatttggga

SEQ ID NO: 147321 - DNA, 25 bp, Saccharomyces pastorianus
tacccctacacatatttttccgaat

SEQ ID NO: 147322 - DNA, 25 bp, Saccharomyces pastorianus
gttggatcaagctgtgcgttcgcaa

SEQ ID NO: 147323 - DNA, 25 bp, Saccharomyces pastorianus
atgtaccaggcgttactttcggaat

SEQ ID NO: 147324 - DNA, 25 bp, Saccharomyces pastorianus
agatccttcattggatgcctggaag

SEQ ID NO: 147325 - DNA, 25 bp, Saccharomyces pastorianus
atatgtcttcagatccttcattgga

SEQ ID NO: 147326 - DNA, 25 bp, Saccharomyces pastorianus
gattccttcctaccggtaccaatat

SEQ ID NO: 147327 - DNA, 25 bp, Saccharomyces pastorianus
atatcactgtaaatatgtcttcaga

SEQ ID NO: 147328 - DNA, 25 bp, Saccharomyces pastorianus
ttattaccggcggtaatgctaaggt

SEQ ID NO: 147329 - DNA, 25 bp, Saccharomyces pastorianus
ccaggattgaaagaacgtattgtga

SEQ ID NO: 147330 - DNA, 25 bp, Saccharomyces pastorianus
atgcctggaagggtatggcagctct

SEQ ID NO: 147331 - DNA, 25 bp, Saccharomyces pastorianus
ggcagctctagcacgaaacgaagaa

SEQ ID NO: 147332 - DNA, 25 bp, Saccharomyces pastorianus
ggaattcactggattccttcctacc

SEQ ID NO: 147333 - DNA, 25 bp, Saccharomyces pastorianus
gaagggtatggcagctctagcacga

SEQ ID NO: 147334 - DNA, 25 bp, Saccharomyces pastorianus
tcctaccggtaccaatatcactgta

SEQ ID NO: 147335 - DNA, 25 bp, Saccharomyces pastorianus
gtgccctttttcaatacgcaaaaat

SEQ ID NO: 147336 - DNA, 25 bp, Saccharomyces pastorianus
tacgcaaaaatctacggctattcaa

SEQ ID NO: 147337 - DNA, 25 bp, Saccharomyces pastorianus
tgaggtgccctttttcaatacgcaa

SEQ ID NO: 147338 - DNA, 25 bp, Saccharomyces pastorianus
gtatgaggtgccctttttcaatacg

SEQ ID NO: 147339 - DNA, 25 bp, Saccharomyces pastorianus
gaagtatgaggtgccctttttcaat

SEQ ID NO: 147340 - DNA, 25 bp, Saccharomyces pastorianus
atgaggtgccctttttcaatacgca

SEQ ID NO: 147341 - DNA, 25 bp, Saccharomyces pastorianus
tcaatacgcaaaaatctacggctat

SEQ ID NO: 147342 - DNA, 25 bp, Saccharomyces pastorianus
tttcaatacgcaaaaatctacggct

SEQ ID NO: 147343 - DNA, 25 bp, Saccharomyces pastorianus
atgaagtatgaggtgccctttttca

SEQ ID NO: 147344 - DNA, 25 bp, Saccharomyces pastorianus
gaggtgccctttttcaatacgcaaa

SEQ ID NO: 147345 - DNA, 25 bp, Saccharomyces pastorianus
tatgaggtgccctttttcaatacgc

SEQ ID NO: 147346 - DNA, 25 bp, Saccharomyces pastorianus
gtgattctaatggtgactgtacagt

SEQ ID NO: 147347 - DNA, 25 bp, Saccharomyces pastorianus
agttcttacctgaagtgtgattcta

SEQ ID NO: 147348 - DNA, 25 bp, Saccharomyces pastorianus
caaggaagtccccatttgtgaaagt

SEQ ID NO: 147349 - DNA, 25 bp, Saccharomyces pastorianus
gtaagtgcttttaatccaggattct

SEQ ID NO: 147350 - DNA, 25 bp, Saccharomyces pastorianus
gtataagcgtttcccaagtcgattt

SEQ ID NO: 147351 - DNA, 25 bp, Saccharomyces pastorianus
actacgattttatggttggcaacaa

SEQ ID NO: 147352 - DNA, 25 bp, Saccharomyces pastorianus
tcaccgcacaacttttactcaagga

SEQ ID NO: 147353 - DNA, 25 bp, Saccharomyces pastorianus
gatgacgttacccattccaatatca

SEQ ID NO: 147354 - DNA, 25 bp, Saccharomyces pastorianus
atgtgatttcaagttcggacgagtt

SEQ ID NO: 147355 - DNA, 25 bp, Saccharomyces pastorianus
gacgagttgatcttcgacatcacag

SEQ ID NO: 147356 - DNA, 25 bp, Saccharomyces pastorianus
gatattgttggttactcaccgcaca

SEQ ID NO: 147357 - DNA, 25 bp, Saccharomyces pastorianus
gagacctggtcaaaagcaacgtgca

SEQ ID NO: 147358 - DNA, 25 bp, Saccharomyces pastorianus
gagctctatcgactctgatgtgata

SEQ ID NO: 147359 - DNA, 25 bp, Saccharomyces pastorianus
attctggaggatgatctacgtattc

SEQ ID NO: 147360 - DNA, 25 bp, Saccharomyces pastorianus
actactttgcaagctattctgcaga

SEQ ID NO: 147361 - DNA, 25 bp, Saccharomyces pastorianus
tacctttgaacccactggcaaaagc

SEQ ID NO: 147362 - DNA, 25 bp, Saccharomyces pastorianus
gaaaggcccaaagactactactttg

SEQ ID NO: 147363 - DNA, 25 bp, Saccharomyces pastorianus
gctgcaattccaacagagctctatc

SEQ ID NO: 147364 - DNA, 25 bp, Saccharomyces pastorianus
gtgcagccaaaaaactggcacttga

SEQ ID NO: 147365 - DNA, 25 bp, Saccharomyces pastorianus
ctacgtattcgtgataaatggccat

SEQ ID NO: 147366 - DNA, 25 bp, Saccharomyces pastorianus
tagatctgtataagcacaatgcgag

SEQ ID NO: 147367 - DNA, 25 bp, Saccharomyces pastorianus
ggccatattgccagggtcgaataat

SEQ ID NO: 147368 - DNA, 25 bp, Saccharomyces pastorianus
aagatgacggtgaaactactggttt

SEQ ID NO: 147369 - DNA, 25 bp, Saccharomyces pastorianus
gttactccatgggatgccaacggga

SEQ ID NO: 147370 - DNA, 25 bp, Saccharomyces pastorianus
agatcctctgagataccccaatttg

SEQ ID NO: 147371 - DNA, 25 bp, Saccharomyces pastorianus
gggtccactagatccaagcaagatg

SEQ ID NO: 147372 - DNA, 25 bp, Saccharomyces pastorianus
atctactttcggtgttaatgccatg

SEQ ID NO: 147373 - DNA, 25 bp, Saccharomyces pastorianus
ggtttgatccccatagttcatgcct

SEQ ID NO: 147374 - DNA, 25 bp, Saccharomyces pastorianus
tcggaaaagctccaccacaatggga

SEQ ID NO: 147375 - DNA, 25 bp, Saccharomyces pastorianus
aactggactatgactgcctaagggt

SEQ ID NO: 147376 - DNA, 25 bp, Saccharomyces pastorianus
taaagagccgagtgatcctgattat

SEQ ID NO: 147377 - DNA, 25 bp, Saccharomyces pastorianus
tcggcgggcccattgttagatatag

SEQ ID NO: 147378 - DNA, 25 bp, Saccharomyces pastorianus
gggcgcaagaaaccagcagtattca

SEQ ID NO: 147379 - DNA, 25 bp, Saccharomyces pastorianus
aatccgttctccaaaaaatcttcat

SEQ ID NO: 147380 - DNA, 25 bp, Saccharomyces pastorianus
gatacttggtggattcttcaacatg

SEQ ID NO: 147381 - DNA, 25 bp, Saccharomyces pastorianus
gttcgattacgacttggattcggat

SEQ ID NO: 147382 - DNA, 25 bp, Saccharomyces pastorianus
ggagaattcctatcgtcacatatac

SEQ ID NO: 147383 - DNA, 25 bp, Saccharomyces pastorianus
gtaccctttcagctatcctattata

SEQ ID NO: 147384 - DNA, 25 bp, Saccharomyces pastorianus
tgaatccattattcagtgtccacct

SEQ ID NO: 147385 - DNA, 25 bp, Saccharomyces pastorianus
gaagcatttcacgttgattggacaa

SEQ ID NO: 147386 - DNA, 25 bp, Saccharomyces pastorianus
ttaaggttctcacgtggatcttccg

SEQ ID NO: 147387 - DNA, 25 bp, Saccharomyces pastorianus
agagcagttgcctcctgtggtgaga

SEQ ID NO: 147388 - DNA, 25 bp, Saccharomyces pastorianus
gtgtattccagcttgaatccgttct

SEQ ID NO: 147389 - DNA, 25 bp, Saccharomyces pastorianus
ggatcaatgattctcgcatttgaat

SEQ ID NO: 147390 - DNA, 25 bp, Saccharomyces pastorianus
aaagccttatcaagtttgcccaact

SEQ ID NO: 147391 - DNA, 25 bp, Saccharomyces pastorianus
aaatccaactcagagcagggcaaga

SEQ ID NO: 147392 - DNA, 25 bp, Saccharomyces pastorianus
ttatgtcctcactccaagcttttta

SEQ ID NO: 147393 - DNA, 25 bp, Saccharomyces pastorianus
atactcacgtgggttttatgtcctc

SEQ ID NO: 147394 - DNA, 25 bp, Saccharomyces pastorianus
atagggttcctgaattttacataga

SEQ ID NO: 147395 - DNA, 25 bp, Saccharomyces pastorianus
taacaccacgtcatcgataccggaa

SEQ ID NO: 147396 - DNA, 25 bp, Saccharomyces pastorianus
caattttcccttgaattccattcca

SEQ ID NO: 147397 - DNA, 25 bp, Saccharomyces pastorianus
atgtgagtagtagcaattttccctt

SEQ ID NO: 147398 - DNA, 25 bp, Saccharomyces pastorianus
gcataaattttccacaccgttaatg

SEQ ID NO: 147399 - DNA, 25 bp, Saccharomyces pastorianus
attgcgtacgaattctaacggacta

SEQ ID NO: 147400 - DNA, 25 bp, Saccharomyces pastorianus
atgtactgtcactgagcattccaaa

SEQ ID NO: 147401 - DNA, 25 bp, Saccharomyces pastorianus
actgaacctttcatgctaacgctgg

SEQ ID NO: 147402 - DNA, 25 bp, Saccharomyces pastorianus
aggacattttaatcccgcctatcaa

SEQ ID NO: 147403 - DNA, 25 bp, Saccharomyces pastorianus
gctaacgctggccaaaatgtcttta

SEQ ID NO: 147404 - DNA, 25 bp, Saccharomyces pastorianus
ttgcgcaacgcaatcctatacctta

SEQ ID NO: 147405 - DNA, 25 bp, Saccharomyces pastorianus
ctatcccggctcagttgaacgtata

SEQ ID NO: 147406 - DNA, 25 bp, Saccharomyces pastorianus
tacgacgcactctttgaactctaat

SEQ ID NO: 147407 - DNA, 25 bp, Saccharomyces pastorianus
ataccttaccctatcgacgctgtga

SEQ ID NO: 147408 - DNA, 25 bp, Saccharomyces pastorianus
aattcgatggtcgatgctgcggctg

SEQ ID NO: 147409 - DNA, 25 bp, Saccharomyces pastorianus
acggaacagtgcaagagcctctctt

SEQ ID NO: 147410 - DNA, 25 bp, Saccharomyces pastorianus
aagagcctctcttgacctcagaagt

SEQ ID NO: 147411 - DNA, 25 bp, Saccharomyces pastorianus
caataatgttggttccttcactgaa

SEQ ID NO: 147412 - DNA, 25 bp, Saccharomyces pastorianus
tgccaccaaggcctcattttattac

SEQ ID NO: 147413 - DNA, 25 bp, Saccharomyces pastorianus
tactttgtatgagttctatcccgaa

SEQ ID NO: 147414 - DNA, 25 bp, Saccharomyces pastorianus
gcatttggccgattggttgggaact

SEQ ID NO: 147415 - DNA, 25 bp, Saccharomyces pastorianus
caagtttcccgtggcatctagggca

SEQ ID NO: 147416 - DNA, 25 bp, Saccharomyces pastorianus
gattggcacttgcaactttcgacaa

SEQ ID NO: 147417 - DNA, 25 bp, Saccharomyces pastorianus
tacggctttggctgataatgtttat

SEQ ID NO: 147418 - DNA, 25 bp, Saccharomyces pastorianus
ggatttccggtctgaatttaacgct

SEQ ID NO: 147419 - DNA, 25 bp, Saccharomyces pastorianus
aatttcagatctttgccaagctgca

SEQ ID NO: 147420 - DNA, 25 bp, Saccharomyces pastorianus
aaactctgtagaccgtcgattggca

SEQ ID NO: 147421 - DNA, 25 bp, Saccharomyces pastorianus
tagaatgaagtttgtccgtcccggt

SEQ ID NO: 147422 - DNA, 25 bp, Saccharomyces pastorianus
gacaagtgggtcgaaatggctcaac

SEQ ID NO: 147423 - DNA, 25 bp, Saccharomyces pastorianus
gagctcgtaactccatttggttctt

SEQ ID NO: 147424 - DNA, 25 bp, Saccharomyces pastorianus
acttgttgctactctttgttattgt

SEQ ID NO: 147425 - DNA, 25 bp, Saccharomyces pastorianus
agcgttttcggacatgcatcattga

SEQ ID NO: 147426 - DNA, 25 bp, Saccharomyces pastorianus
actggtttgtgttgctgtgccaata

SEQ ID NO: 147427 - DNA, 25 bp, Saccharomyces pastorianus
ttagcttcgccaatctcaactttgc

SEQ ID NO: 147428 - DNA, 25 bp, Saccharomyces pastorianus
gaccaaccaactatacaccggactg

SEQ ID NO: 147429 - DNA, 25 bp, Saccharomyces pastorianus
tgtgccaataggtttcttagcttcg

SEQ ID NO: 147430 - DNA, 25 bp, Saccharomyces pastorianus
gttattgttctagtcgtagctggta

SEQ ID NO: 147431 - DNA, 25 bp, Saccharomyces pastorianus
gagtggcgtataacctgaagtactt

SEQ ID NO: 147432 - DNA, 25 bp, Saccharomyces pastorianus
atctaaattagcaacccttcgcacc

SEQ ID NO: 147433 - DNA, 25 bp, Saccharomyces pastorianus
aagagcgagttccaatccttgcaat

SEQ ID NO: 147434 - DNA, 25 bp, Saccharomyces pastorianus
aattacatccatttcgaatgccgag

SEQ ID NO: 147435 - DNA, 25 bp, Saccharomyces pastorianus
tacggaacattggaactgttgctac

SEQ ID NO: 147436 - DNA, 25 bp, Saccharomyces pastorianus
gctgctaacttaggttcgatactac

SEQ ID NO: 147437 - DNA, 25 bp, Saccharomyces pastorianus
agacaaacgaacactggctcactgc

SEQ ID NO: 147438 - DNA, 25 bp, Saccharomyces pastorianus
actgttgctacagatccacaaggaa

SEQ ID NO: 147439 - DNA, 25 bp, Saccharomyces pastorianus
tgccaatttggctgctaacttaggt

SEQ ID NO: 147440 - DNA, 25 bp, Saccharomyces pastorianus
tggctcactgctaattctttcggaa

SEQ ID NO: 147441 - DNA, 25 bp, Saccharomyces pastorianus
atttcgaatgccgagtttgccgccc

SEQ ID NO: 147442 - DNA, 25 bp, Saccharomyces pastorianus
tgctaattctttcggaatcgggtga

SEQ ID NO: 147443 - DNA, 25 bp, Saccharomyces pastorianus
tcgatactacaaaacctaaaaggcg

SEQ ID NO: 147444 - DNA, 25 bp, Saccharomyces pastorianus
ggttacgaaattatcctatgcggtt

SEQ ID NO: 147445 - DNA, 25 bp, Saccharomyces pastorianus
gtgccattctggaacgcaactacaa

SEQ ID NO: 147446 - DNA, 25 bp, Saccharomyces pastorianus
cacgtttctcgtttcggtttacatg

SEQ ID NO: 147447 - DNA, 25 bp, Saccharomyces pastorianus
aaacctgttctagagcctagcgact

SEQ ID NO: 147448 - DNA, 25 bp, Saccharomyces pastorianus
ctcaaggctctatttcatgtgtggg

SEQ ID NO: 147449 - DNA, 25 bp, Saccharomyces pastorianus
aagtaggcactgtatcttggtcgat

SEQ ID NO: 147450 - DNA, 25 bp, Saccharomyces pastorianus
ttccactttaattcttcccaatcaa

SEQ ID NO: 147451 - DNA, 25 bp, Saccharomyces pastorianus
aaggtgttctacgtactatccacat

SEQ ID NO: 147452 - DNA, 25 bp, Saccharomyces pastorianus
aatgactacattgagcccggaacaa

SEQ ID NO: 147453 - DNA, 25 bp, Saccharomyces pastorianus
aaattccagacgattacgacctctc

SEQ ID NO: 147454 - DNA, 25 bp, Saccharomyces pastorianus
gttgatcatcaactttcctcaggaa

SEQ ID NO: 147455 - DNA, 25 bp, Saccharomyces pastorianus
gaagcgggtttctctgtatgcaaaa

SEQ ID NO: 147456 - DNA, 25 bp, Saccharomyces pastorianus
acacactttttggagattatacgat

SEQ ID NO: 147457 - DNA, 25 bp, Saccharomyces pastorianus
gagagaccggcctaaccagacgtta

SEQ ID NO: 147458 - DNA, 25 bp, Saccharomyces pastorianus
aactcttaacagagaggactggcag

SEQ ID NO: 147459 - DNA, 25 bp, Saccharomyces pastorianus
gcatcactaaactggcttcaactct

SEQ ID NO: 147460 - DNA, 25 bp, Saccharomyces pastorianus
aactggcttcaactcttaacagaga

SEQ ID NO: 147461 - DNA, 25 bp, Saccharomyces pastorianus
gtaagcgaactatacacactttttg

SEQ ID NO: 147462 - DNA, 25 bp, Saccharomyces pastorianus
ttttatcgagagaccggcctaacca

SEQ ID NO: 147463 - DNA, 25 bp, Saccharomyces pastorianus
ggttcgcggttttatcgagagaccg

SEQ ID NO: 147464 - DNA, 25 bp, Saccharomyces pastorianus
agtactgggcggcatcactaaactg

SEQ ID NO: 147465 - DNA, 25 bp, Saccharomyces pastorianus
gcgaactatacacactttttggaga

SEQ ID NO: 147466 - DNA, 25 bp, Saccharomyces pastorianus
ggcggcatcactaaactggcttcaa

SEQ ID NO: 147467 - DNA, 25 bp, Saccharomyces pastorianus
aagactgttacttctttggatgtcg

SEQ ID NO: 147468 - DNA, 25 bp, Saccharomyces pastorianus
cttctttggatgtcgtttatgcttt

SEQ ID NO: 147469 - DNA, 25 bp, Saccharomyces pastorianus
acttctttggatgtcgtttatgctt

SEQ ID NO: 147470 - DNA, 25 bp, Saccharomyces pastorianus
ttacttctttggatgtcgtttatgc

SEQ ID NO: 147471 - DNA, 25 bp, Saccharomyces pastorianus
ctgttacttctttggatgtcgttta

SEQ ID NO: 147472 - DNA, 25 bp, Saccharomyces pastorianus
ctttggatgtcgtttatgctttgaa

SEQ ID NO: 147473 - DNA, 25 bp, Saccharomyces pastorianus
actgttacttctttggatgtcgttt

SEQ ID NO: 147474 - DNA, 25 bp, Saccharomyces pastorianus
agactgttacttctttggatgtcgt

SEQ ID NO: 147475 - DNA, 25 bp, Saccharomyces pastorianus
tctttggatgtcgtttatgctttga

SEQ ID NO: 147476 - DNA, 25 bp, Saccharomyces pastorianus
tttggatgtcgtttatgctttgaag

SEQ ID NO: 147477 - DNA, 25 bp, Saccharomyces pastorianus
tacttctttggatgtcgtttatgct

SEQ ID NO: 147478 - DNA, 25 bp, Saccharomyces pastorianus
aacgccacgtcgaagtactcaacgg

SEQ ID NO: 147479 - DNA, 25 bp, Saccharomyces pastorianus
gtcgaagtactcaacggcaatgaaa

SEQ ID NO: 147480 - DNA, 25 bp, Saccharomyces pastorianus
tgcttaatcaacagagaggacacga

SEQ ID NO: 147481 - DNA, 25 bp, Saccharomyces pastorianus
ttctgcgtgaatatttgggtaaatc

SEQ ID NO: 147482 - DNA, 25 bp, Saccharomyces pastorianus
atgggtttctgcgtgaatatttggg

SEQ ID NO: 147483 - DNA, 25 bp, Saccharomyces pastorianus
aacggcaatgaaatggaggagcaca

SEQ ID NO: 147484 - DNA, 25 bp, Saccharomyces pastorianus
gccacgtcgaagtactcaacggcaa

SEQ ID NO: 147485 - DNA, 25 bp, Saccharomyces pastorianus
gagaggacacgaacgccacgtcgaa

SEQ ID NO: 147486 - DNA, 25 bp, Saccharomyces pastorianus
acgaacgccacgtcgaagtactcaa

SEQ ID NO: 147487 - DNA, 25 bp, Saccharomyces pastorianus
atttgggtaaatctgcttaatcaac

SEQ ID NO: 147488 - DNA, 25 bp, Saccharomyces pastorianus
ggacacgaacgccacgtcgaagtac

SEQ ID NO: 147489 - DNA, 25 bp, Saccharomyces pastorianus
gtagaagatgcatcactcccttgta

SEQ ID NO: 147490 - DNA, 25 bp, Saccharomyces pastorianus
tagaagatgcatcactcccttgtac

SEQ ID NO: 147491 - DNA, 25 bp, Saccharomyces pastorianus
agtggtagaagatgcatcactccct

SEQ ID NO: 147492 - DNA, 25 bp, Saccharomyces pastorianus
aagatgcatcactcccttgtacgaa

SEQ ID NO: 147493 - DNA, 25 bp, Saccharomyces pastorianus
gaagatgcatcactcccttgtacga

SEQ ID NO: 147494 - DNA, 25 bp, Saccharomyces pastorianus
tggtagaagatgcatcactcccttg

SEQ ID NO: 147495 - DNA, 25 bp, Saccharomyces pastorianus
agaagatgcatcactcccttgtacg

SEQ ID NO: 147496 - DNA, 25 bp, Saccharomyces pastorianus
ggtagaagatgcatcactcccttgt

SEQ ID NO: 147497 - DNA, 25 bp, Saccharomyces pastorianus
aagtggtagaagatgcatcactccc

SEQ ID NO: 147498 - DNA, 25 bp, Saccharomyces pastorianus
aactgaaagtggtagaagatgcatc

SEQ ID NO: 147499 - DNA, 25 bp, Saccharomyces pastorianus
gtggtagaagatgcatcactccctt

SEQ ID NO: 147500 - DNA, 25 bp, Saccharomyces pastorianus
aggaaaaatcctgcgaatttcgctt

SEQ ID NO: 147501 - DNA, 25 bp, Saccharomyces pastorianus
gatcttggcatacttctagacatag

SEQ ID NO: 147502 - DNA, 25 bp, Saccharomyces pastorianus
agtgatgctcttggtaggcatttta

SEQ ID NO: 147503 - DNA, 25 bp, Saccharomyces pastorianus
actgaatcgggcattgtcaatatta

SEQ ID NO: 147504 - DNA, 25 bp, Saccharomyces pastorianus
gatgacactagcaaagatcttggca

SEQ ID NO: 147505 - DNA, 25 bp, Saccharomyces pastorianus
gtcacacttaagaacgcatacaaat

SEQ ID NO: 147506 - DNA, 25 bp, Saccharomyces pastorianus
tataacaccattaacagtagcaatt

SEQ ID NO: 147507 - DNA, 25 bp, Saccharomyces pastorianus
gcttgggccaatttgagcagaaagt

SEQ ID NO: 147508 - DNA, 25 bp, Saccharomyces pastorianus
gtaaaccaaaaactgaatcgggcat

SEQ ID NO: 147509 - DNA, 25 bp, Saccharomyces pastorianus
ctagacatagatagcttgggccaat

SEQ ID NO: 147510 - DNA, 25 bp, Saccharomyces pastorianus
aatttcgcttgtgatgtatgtggta

SEQ ID NO: 147511 - DNA, 25 bp, Saccharomyces pastorianus
agcagaagcttacccactatatgaa

SEQ ID NO: 147512 - DNA, 25 bp, Saccharomyces pastorianus
ggagcttttggttggacacttcgat

SEQ ID NO: 147513 - DNA, 25 bp, Saccharomyces pastorianus
aagaggcatttttggccgattccat

SEQ ID NO: 147514 - DNA, 25 bp, Saccharomyces pastorianus
ggacacttcgattttatggccaaag

SEQ ID NO: 147515 - DNA, 25 bp, Saccharomyces pastorianus
gccgattccatttcgttgtgttcaa

SEQ ID NO: 147516 - DNA, 25 bp, Saccharomyces pastorianus
tttggttgctggaaatactgccgaa

SEQ ID NO: 147517 - DNA, 25 bp, Saccharomyces pastorianus
agtgaatcctcaatacctaatcctt

SEQ ID NO: 147518 - DNA, 25 bp, Saccharomyces pastorianus
ataccgaacgtgacatggagctttt

SEQ ID NO: 147519 - DNA, 25 bp, Saccharomyces pastorianus
ttcatccgtgaactagccaaagctt

SEQ ID NO: 147520 - DNA, 25 bp, Saccharomyces pastorianus
tttcaaacctatgaggcctcctcaa

SEQ ID NO: 147521 - DNA, 25 bp, Saccharomyces pastorianus
acggcctatattccgagtctcagga

SEQ ID NO: 147522 - DNA, 25 bp, Saccharomyces pastorianus
gtgggataccactctcttactgtta

SEQ ID NO: 147523 - DNA, 25 bp, Saccharomyces pastorianus
gtggcgaatctacgtgtggtcataa

SEQ ID NO: 147524 - DNA, 25 bp, Saccharomyces pastorianus
aatgtcacccaggaaagtgtccgcc

SEQ ID NO: 147525 - DNA, 25 bp, Saccharomyces pastorianus
atacctgtcattccttggatgtgtc

SEQ ID NO: 147526 - DNA, 25 bp, Saccharomyces pastorianus
ttgtggcacgaagctaccaacatgt

SEQ ID NO: 147527 - DNA, 25 bp, Saccharomyces pastorianus
tgattcgaacgatctggtctgccca

SEQ ID NO: 147528 - DNA, 25 bp, Saccharomyces pastorianus
gtgtccgccctgtttagagagtgat

SEQ ID NO: 147529 - DNA, 25 bp, Saccharomyces pastorianus
gatttaccttgtgccacgctagtga

SEQ ID NO: 147530 - DNA, 25 bp, Saccharomyces pastorianus
gaatgtcctaaaccgtgccatggta

SEQ ID NO: 147531 - DNA, 25 bp, Saccharomyces pastorianus
ctcttactgttatcatacctgccaa

SEQ ID NO: 147532 - DNA, 25 bp, Saccharomyces pastorianus
aaaccgtgtaatttgaccctatcat

SEQ ID NO: 147533 - DNA, 25 bp, Saccharomyces pastorianus
gagatggagtcacctatgaccctca

SEQ ID NO: 147534 - DNA, 25 bp, Saccharomyces pastorianus
gaaagtagcgccaaaaagagaagtt

SEQ ID NO: 147535 - DNA, 25 bp, Saccharomyces pastorianus
gaacgagtcgtcatagaccttcttt

SEQ ID NO: 147536 - DNA, 25 bp, Saccharomyces pastorianus
agagaagttattccttcttggccta

SEQ ID NO: 147537 - DNA, 25 bp, Saccharomyces pastorianus
agaccttcttttagataagtcagtt

SEQ ID NO: 147538 - DNA, 25 bp, Saccharomyces pastorianus
tgcaatgagtttcccagcggctaaa

SEQ ID NO: 147539 - DNA, 25 bp, Saccharomyces pastorianus
aacagcttgccgagggttgtatcag

SEQ ID NO: 147540 - DNA, 25 bp, Saccharomyces pastorianus
tatgaccctcaacagcttgccgagg

SEQ ID NO: 147541 - DNA, 25 bp, Saccharomyces pastorianus
aagcatgcaatgagtttcccagcgg

SEQ ID NO: 147542 - DNA, 25 bp, Saccharomyces pastorianus
gagggttgtatcagggcactaccaa

SEQ ID NO: 147543 - DNA, 25 bp, Saccharomyces pastorianus
ggcactaccaaaaagtgacggtggt

SEQ ID NO: 147544 - DNA, 25 bp, Saccharomyces pastorianus
atgatacttctgatatctgggcaaa

SEQ ID NO: 147545 - DNA, 25 bp, Saccharomyces pastorianus
gggacttgacaggaaatacggcatc

SEQ ID NO: 147546 - DNA, 25 bp, Saccharomyces pastorianus
agtattttccttctgttgccaaaat

SEQ ID NO: 147547 - DNA, 25 bp, Saccharomyces pastorianus
acctctaactctgtttgaacctgac

SEQ ID NO: 147548 - DNA, 25 bp, Saccharomyces pastorianus
aggtatcgtacatctgcttggtcac

SEQ ID NO: 147549 - DNA, 25 bp, Saccharomyces pastorianus
ggtacaattgacttatcctcatcag

SEQ ID NO: 147550 - DNA, 25 bp, Saccharomyces pastorianus
gaatggtacttcaaaaactcactta

SEQ ID NO: 147551 - DNA, 25 bp, Saccharomyces pastorianus
agaggctacagactttatactggat

SEQ ID NO: 147552 - DNA, 25 bp, Saccharomyces pastorianus
gcagttaaagccactagttcctcta

SEQ ID NO: 147553 - DNA, 25 bp, Saccharomyces pastorianus
tgcttggtcacagggatactagggc

SEQ ID NO: 147554 - DNA, 25 bp, Saccharomyces pastorianus
taggagactcatactcaggtatcgt

SEQ ID NO: 147555 - DNA, 25 bp, Saccharomyces pastorianus
agtactggaaaatccagaccatgat

SEQ ID NO: 147556 - DNA, 25 bp, Saccharomyces pastorianus
aatccagaccatgatttaaaaagaa

SEQ ID NO: 147557 - DNA, 25 bp, Saccharomyces pastorianus
gaaaatccagaccatgatttaaaaa

SEQ ID NO: 147558 - DNA, 25 bp, Saccharomyces pastorianus
tggaaaatccagaccatgatttaaa

SEQ ID NO: 147559 - DNA, 25 bp, Saccharomyces pastorianus
gtactggaaaatccagaccatgatt

SEQ ID NO: 147560 - DNA, 25 bp, Saccharomyces pastorianus
actggaaaatccagaccatgattta

SEQ ID NO: 147561 - DNA, 25 bp, Saccharomyces pastorianus
ctggaaaatccagaccatgatttaa

SEQ ID NO: 147562 - DNA, 25 bp, Saccharomyces pastorianus
tccagaccatgatttaaaaagaaag

SEQ ID NO: 147563 - DNA, 25 bp, Saccharomyces pastorianus
gaagtactggaaaatccagaccatg

SEQ ID NO: 147564 - DNA, 25 bp, Saccharomyces pastorianus
gaccatgatttaaaaagaaagctag

SEQ ID NO: 147565 - DNA, 25 bp, Saccharomyces pastorianus
taatggttaagaaagaagtactgga

SEQ ID NO: 147566 - DNA, 25 bp, Saccharomyces pastorianus
ttgagagggcgtttcaggcactgat

SEQ ID NO: 147567 - DNA, 25 bp, Saccharomyces pastorianus
gaaaaggaaacatcactctcgatac

SEQ ID NO: 147568 - DNA, 25 bp, Saccharomyces pastorianus
atctggttcttgatcacattcattt

SEQ ID NO: 147569 - DNA, 25 bp, Saccharomyces pastorianus
gatgtcggcgagaagaagtctttaa

SEQ ID NO: 147570 - DNA, 25 bp, Saccharomyces pastorianus
aagccgtatcagatttttccgtcca

SEQ ID NO: 147571 - DNA, 25 bp, Saccharomyces pastorianus
tcctaacattcagatcaagccgtat

SEQ ID NO: 147572 - DNA, 25 bp, Saccharomyces pastorianus
tagacagtaaggtcgatcctaacat

SEQ ID NO: 147573 - DNA, 25 bp, Saccharomyces pastorianus
tttccgtccaacaacctagtatacg

SEQ ID NO: 147574 - DNA, 25 bp, Saccharomyces pastorianus
gaagtgaccgtaccaatgcatcctt

SEQ ID NO: 147575 - DNA, 25 bp, Saccharomyces pastorianus
ttgttcgtgagtctcgcacagcaac

SEQ ID NO: 147576 - DNA, 25 bp, Saccharomyces pastorianus
attcatttttctctcgatgtcggcg

SEQ ID NO: 147577 - DNA, 25 bp, Saccharomyces pastorianus
aacaaccggttatgtctgagcaaca

SEQ ID NO: 147578 - DNA, 25 bp, Saccharomyces pastorianus
gggcggtcagccacttataatgaat

SEQ ID NO: 147579 - DNA, 25 bp, Saccharomyces pastorianus
tatgacactcatgaacaggccgctg

SEQ ID NO: 147580 - DNA, 25 bp, Saccharomyces pastorianus
aaatcctcaagctgttgaccacatc

SEQ ID NO: 147581 - DNA, 25 bp, Saccharomyces pastorianus
aaattttatgccacagcagcagcaa

SEQ ID NO: 147582 - DNA, 25 bp, Saccharomyces pastorianus
ggaatgccaattggcgccatgccat

SEQ ID NO: 147583 - DNA, 25 bp, Saccharomyces pastorianus
ggcaaacttcccatttcaaggcaga

SEQ ID NO: 147584 - DNA, 25 bp, Saccharomyces pastorianus
agagttactactgcctatatcggta

SEQ ID NO: 147585 - DNA, 25 bp, Saccharomyces pastorianus
ttatcaacagcgtcgtaactacggt

SEQ ID NO: 147586 - DNA, 25 bp, Saccharomyces pastorianus
taatattccgcactttgccactgaa

SEQ ID NO: 147587 - DNA, 25 bp, Saccharomyces pastorianus
agaagtgccccaccaagagttacta

SEQ ID NO: 147588 - DNA, 25 bp, Saccharomyces pastorianus
tgctattaccggtggtagggaaact

SEQ ID NO: 147589 - DNA, 25 bp, Saccharomyces pastorianus
gtcgaaactccctcggcagttgaag

SEQ ID NO: 147590 - DNA, 25 bp, Saccharomyces pastorianus
cgtcgctgtcgaaggcaattctgaa

SEQ ID NO: 147591 - DNA, 25 bp, Saccharomyces pastorianus
gcaatatttccaagttggcggacca

SEQ ID NO: 147592 - DNA, 25 bp, Saccharomyces pastorianus
agcatcagcagatccttcttctgaa

SEQ ID NO: 147593 - DNA, 25 bp, Saccharomyces pastorianus
gttggcggaccaattgctaacatca

SEQ ID NO: 147594 - DNA, 25 bp, Saccharomyces pastorianus
gggtgaaaatgatccttccgtagtt

SEQ ID NO: 147595 - DNA, 25 bp, Saccharomyces pastorianus
gttggtaacctagacaaagctatca

SEQ ID NO: 147596 - DNA, 25 bp, Saccharomyces pastorianus
ttcttctgaacagagcgtcgctgtc

SEQ ID NO: 147597 - DNA, 25 bp, Saccharomyces pastorianus
ggcagttgaagctccagcatcagca

SEQ ID NO: 147598 - DNA, 25 bp, Saccharomyces pastorianus
aacagcaacctgttgccgtcgaaac

SEQ ID NO: 147599 - DNA, 25 bp, Saccharomyces pastorianus
ggaaacgcatctaatacgtcgacat

SEQ ID NO: 147600 - DNA, 25 bp, Saccharomyces pastorianus
ggacatgattcatttttgccaatta

SEQ ID NO: 147601 - DNA, 25 bp, Saccharomyces pastorianus
tgacaactatccaaacggctccaag

SEQ ID NO: 147602 - DNA, 25 bp, Saccharomyces pastorianus
tgtaaaaacattcactcaccccatt

SEQ ID NO: 147603 - DNA, 25 bp, Saccharomyces pastorianus
ttttgttctggattctagttcggat

SEQ ID NO: 147604 - DNA, 25 bp, Saccharomyces pastorianus
actcaccccattgttataggatgca

SEQ ID NO: 147605 - DNA, 25 bp, Saccharomyces pastorianus
atttataccttgtagacggcggaga

SEQ ID NO: 147606 - DNA, 25 bp, Saccharomyces pastorianus
gacggcgagaatattccactcagaa

SEQ ID NO: 147607 - DNA, 25 bp, Saccharomyces pastorianus
gagaacgttcattaccaatttccga

SEQ ID NO: 147608 - DNA, 25 bp, Saccharomyces pastorianus
acagactatgccgtatatcaaccca

SEQ ID NO: 147609 - DNA, 25 bp, Saccharomyces pastorianus
tcaacccaatcccttttatctttat

SEQ ID NO: 147610 - DNA, 25 bp, Saccharomyces pastorianus
tggtgacggtgtttctgatctaagt

SEQ ID NO: 147611 - DNA, 25 bp, Saccharomyces pastorianus
caaagacatcttggctagcatgaaa

SEQ ID NO: 147612 - DNA, 25 bp, Saccharomyces pastorianus
gtggaaatcgatgcacatgatcaat

SEQ ID NO: 147613 - DNA, 25 bp, Saccharomyces pastorianus
aagaatgtgatttgctatttgccaa

SEQ ID NO: 147614 - DNA, 25 bp, Saccharomyces pastorianus
tctaccttgaaagctggtgaacaaa

SEQ ID NO: 147615 - DNA, 25 bp, Saccharomyces pastorianus
gctggtgaacaaagacccgtttact

SEQ ID NO: 147616 - DNA, 25 bp, Saccharomyces pastorianus
ataaggatgaaagtcccttcggaca

SEQ ID NO: 147617 - DNA, 25 bp, Saccharomyces pastorianus
aaacgtcccatttcatgaattcgat

SEQ ID NO: 147618 - DNA, 25 bp, Saccharomyces pastorianus
gcatgaaacaagttctggctggtga

SEQ ID NO: 147619 - DNA, 25 bp, Saccharomyces pastorianus
gtcccttcggacatgacaaatccag

SEQ ID NO: 147620 - DNA, 25 bp, Saccharomyces pastorianus
gtgtttctgatctaagtgctgcaaa

SEQ ID NO: 147621 - DNA, 25 bp, Saccharomyces pastorianus
cgttactttggaagattctaacgat

SEQ ID NO: 147622 - DNA, 25 bp, Saccharomyces pastorianus
tctgaccgatactttaggtttcggt

SEQ ID NO: 147623 - DNA, 25 bp, Saccharomyces pastorianus
gtcttttaggcaaggtttcatggaa

SEQ ID NO: 147624 - DNA, 25 bp, Saccharomyces pastorianus
ttatctgaccgatactttaggtttc

SEQ ID NO: 147625 - DNA, 25 bp, Saccharomyces pastorianus
ttcgaaggcgtgttagatgatacta

SEQ ID NO: 147626 - DNA, 25 bp, Saccharomyces pastorianus
tttccctgagtgtatcaagatctta

SEQ ID NO: 147627 - DNA, 25 bp, Saccharomyces pastorianus
gatgatactaagtcttttaggcaag

SEQ ID NO: 147628 - DNA, 25 bp, Saccharomyces pastorianus
aaaggtcttcgaaggcgtgttagat

SEQ ID NO: 147629 - DNA, 25 bp, Saccharomyces pastorianus
ccctttccctgagtgtatcaagatc

SEQ ID NO: 147630 - DNA, 25 bp, Saccharomyces pastorianus
acccctttccctgagtgtatcaaga

SEQ ID NO: 147631 - DNA, 25 bp, Saccharomyces pastorianus
ctaagtcttttaggcaaggtttcat

SEQ ID NO: 147632 - DNA, 25 bp, Saccharomyces pastorianus
atagatcatcatatgtaaccacaga

SEQ ID NO: 147633 - DNA, 25 bp, Saccharomyces pastorianus
gaggcttcaaaacatgacgctcagc

SEQ ID NO: 147634 - DNA, 25 bp, Saccharomyces pastorianus
catcatatgtaaccacagaagagtt

SEQ ID NO: 147635 - DNA, 25 bp, Saccharomyces pastorianus
agaaaaggctactttggacacagtt

SEQ ID NO: 147636 - DNA, 25 bp, Saccharomyces pastorianus
ttcaaaacatgacgctcagctccaa

SEQ ID NO: 147637 - DNA, 25 bp, Saccharomyces pastorianus
tgcttggaaagactaatagatcatc

SEQ ID NO: 147638 - DNA, 25 bp, Saccharomyces pastorianus
tgggcggaaaaatgaccaaggattt

SEQ ID NO: 147639 - DNA, 25 bp, Saccharomyces pastorianus
agcattgatgcttggaaagactaat

SEQ ID NO: 147640 - DNA, 25 bp, Saccharomyces pastorianus
cagaagagtttattgatgaggttgc

SEQ ID NO: 147641 - DNA, 25 bp, Saccharomyces pastorianus
gatgaggttgctaagaggcttcaaa

SEQ ID NO: 147642 - DNA, 25 bp, Saccharomyces pastorianus
tggacacagttcaagtgggcggaaa

SEQ ID NO: 147643 - DNA, 25 bp, Saccharomyces pastorianus
aaagcaggcaaactaaggttacagt

SEQ ID NO: 147644 - DNA, 25 bp, Saccharomyces pastorianus
atttcctaaaagtggtgggatcgca

SEQ ID NO: 147645 - DNA, 25 bp, Saccharomyces pastorianus
aacatcgatttaaaggtttatgaat

SEQ ID NO: 147646 - DNA, 25 bp, Saccharomyces pastorianus
gaaggtacagaaaacatcgatttaa

SEQ ID NO: 147647 - DNA, 25 bp, Saccharomyces pastorianus
gttacagtttagctcagatgaaggt

SEQ ID NO: 147648 - DNA, 25 bp, Saccharomyces pastorianus
gtgggatcgcaatggcaatgtttaa

SEQ ID NO: 147649 - DNA, 25 bp, Saccharomyces pastorianus
gatcgcaatggcaatgtttaataca

SEQ ID NO: 147650 - DNA, 25 bp, Saccharomyces pastorianus
taaggttacagtttagctcagatga

SEQ ID NO: 147651 - DNA, 25 bp, Saccharomyces pastorianus
gtttagctcagatgaaggtacagaa

SEQ ID NO: 147652 - DNA, 25 bp, Saccharomyces pastorianus
aaagtggtgggatcgcaatggcaat

SEQ ID NO: 147653 - DNA, 25 bp, Saccharomyces pastorianus
ttatgaatttcctaaaagtggtggg

SEQ ID NO: 147654 - DNA, 25 bp, Saccharomyces pastorianus
catggtacggtgaccaggcatttta

SEQ ID NO: 147655 - DNA, 25 bp, Saccharomyces pastorianus
taaagggttcgcaaaggcatccttc

SEQ ID NO: 147656 - DNA, 25 bp, Saccharomyces pastorianus
gatgctaaaatcaaagggcgggttt

SEQ ID NO: 147657 - DNA, 25 bp, Saccharomyces pastorianus
taaaacgtttgaaagcgaggctgcc

SEQ ID NO: 147658 - DNA, 25 bp, Saccharomyces pastorianus
acattgtggcacaaggatttgggtc

SEQ ID NO: 147659 - DNA, 25 bp, Saccharomyces pastorianus
gtccagtctgacattgtggcacaag

SEQ ID NO: 147660 - DNA, 25 bp, Saccharomyces pastorianus
gggtctcttggtttaatgacgtcca

SEQ ID NO: 147661 - DNA, 25 bp, Saccharomyces pastorianus
aatgattccattaaagggttcgcaa

SEQ ID NO: 147662 - DNA, 25 bp, Saccharomyces pastorianus
atgacgtccatattgattacacctg

SEQ ID NO: 147663 - DNA, 25 bp, Saccharomyces pastorianus
gattacacctgatggtaaaacgttt

SEQ ID NO: 147664 - DNA, 25 bp, Saccharomyces pastorianus
ttatgatggcgatgtccagtctgac

SEQ ID NO: 147665 - DNA, 25 bp, Saccharomyces pastorianus
gatttgctacatgcgtcagctgtga

SEQ ID NO: 147666 - DNA, 25 bp, Saccharomyces pastorianus
ctggaacatttccatgtggtctatt

SEQ ID NO: 147667 - DNA, 25 bp, Saccharomyces pastorianus
gttaatggaccgttgactagatcac

SEQ ID NO: 147668 - DNA, 25 bp, Saccharomyces pastorianus
gtcgatgttgttattgaacgccttc

SEQ ID NO: 147669 - DNA, 25 bp, Saccharomyces pastorianus
aaacccacaaggtgtactagtcgat

SEQ ID NO: 147670 - DNA, 25 bp, Saccharomyces pastorianus
ttgaacgccttctgcatcatacaaa

SEQ ID NO: 147671 - DNA, 25 bp, Saccharomyces pastorianus
gaggaaatggatctctcctgcctaa

SEQ ID NO: 147672 - DNA, 25 bp, Saccharomyces pastorianus
gattgtaggatatctctgggttata

SEQ ID NO: 147673 - DNA, 25 bp, Saccharomyces pastorianus
caagtaatgctgtcgattctgatga

SEQ ID NO: 147674 - DNA, 25 bp, Saccharomyces pastorianus
ttggccctgtagatgccttgcatta

SEQ ID NO: 147675 - DNA, 25 bp, Saccharomyces pastorianus
ctctcctgcctaatctgcaaagtta

SEQ ID NO: 147676 - DNA, 25 bp, Saccharomyces pastorianus
gataacacaactcagaaaccggaag

SEQ ID NO: 147677 - DNA, 25 bp, Saccharomyces pastorianus
gatgtatttagcttttttcacaaca

SEQ ID NO: 147678 - DNA, 25 bp, Saccharomyces pastorianus
tctcctattcggtaagtaagtatgc

SEQ ID NO: 147679 - DNA, 25 bp, Saccharomyces pastorianus
gactcttttcaagcattgatggaga

SEQ ID NO: 147680 - DNA, 25 bp, Saccharomyces pastorianus
tagtaccgccattattttgaatagg

SEQ ID NO: 147681 - DNA, 25 bp, Saccharomyces pastorianus
ggtaacttcaccactttgcaactag

SEQ ID NO: 147682 - DNA, 25 bp, Saccharomyces pastorianus
aggttgactgtaatgtcttcattga

SEQ ID NO: 147683 - DNA, 25 bp, Saccharomyces pastorianus
tctatgttttagtaccgccattatt

SEQ ID NO: 147684 - DNA, 25 bp, Saccharomyces pastorianus
cccaactttggactcttttcaagca

SEQ ID NO: 147685 - DNA, 25 bp, Saccharomyces pastorianus
tctacaatagtttcagccccaactt

SEQ ID NO: 147686 - DNA, 25 bp, Saccharomyces pastorianus
gaatgtttttctcctattcggtaag

SEQ ID NO: 147687 - DNA, 25 bp, Saccharomyces pastorianus
tactaggagcggtttttcacaggtt

SEQ ID NO: 147688 - DNA, 25 bp, Saccharomyces pastorianus
tcactaggacctatttgaacggatt

SEQ ID NO: 147689 - DNA, 25 bp, Saccharomyces pastorianus
gggcagcagcatattggcgataatg

SEQ ID NO: 147690 - DNA, 25 bp, Saccharomyces pastorianus
ctcattcacaattatttccctggct

SEQ ID NO: 147691 - DNA, 25 bp, Saccharomyces pastorianus
atatttccaccatattactggcgtc

SEQ ID NO: 147692 - DNA, 25 bp, Saccharomyces pastorianus
atatcatatccaaaatgcccgcggg

SEQ ID NO: 147693 - DNA, 25 bp, Saccharomyces pastorianus
tatttgtagctctgtctgactgcat

SEQ ID NO: 147694 - DNA, 25 bp, Saccharomyces pastorianus
catattactggcgtctataggcatt

SEQ ID NO: 147695 - DNA, 25 bp, Saccharomyces pastorianus
tttttaccgcattcgtcactaggac

SEQ ID NO: 147696 - DNA, 25 bp, Saccharomyces pastorianus
acgttccttcattaatatgctctga

SEQ ID NO: 147697 - DNA, 25 bp, Saccharomyces pastorianus
ttcttcaacgacgaacgttccttca

SEQ ID NO: 147698 - DNA, 25 bp, Saccharomyces pastorianus
cttttaccgtcgaatgactatgtaa

SEQ ID NO: 147699 - DNA, 25 bp, Saccharomyces pastorianus
gcaatagctctttcattgtgtctac

SEQ ID NO: 147700 - DNA, 25 bp, Saccharomyces pastorianus
tgtaatatttcaccaatcagacaac

SEQ ID NO: 147701 - DNA, 25 bp, Saccharomyces pastorianus
tgtgtctacttttaccgtcgaatga

SEQ ID NO: 147702 - DNA, 25 bp, Saccharomyces pastorianus
cattgtgtctacttttaccgtcgaa

SEQ ID NO: 147703 - DNA, 25 bp, Saccharomyces pastorianus
tagcgcaatagctctttcattgtgt

SEQ ID NO: 147704 - DNA, 25 bp, Saccharomyces pastorianus
tctacttttaccgtcgaatgactat

SEQ ID NO: 147705 - DNA, 25 bp, Saccharomyces pastorianus
gactatgtaatatttcaccaatcag

SEQ ID NO: 147706 - DNA, 25 bp, Saccharomyces pastorianus
aatggagaagaggagtttagcgcaa

SEQ ID NO: 147707 - DNA, 25 bp, Saccharomyces pastorianus
agctctttcattgtgtctactttta

SEQ ID NO: 147708 - DNA, 25 bp, Saccharomyces pastorianus
gagtttagcgcaatagctctttcat

SEQ ID NO: 147709 - DNA, 25 bp, Saccharomyces pastorianus
gctgtcgttgaatacgataacgtcg

SEQ ID NO: 147710 - DNA, 25 bp, Saccharomyces pastorianus
gaagtagctgtcgttgaatacgata

SEQ ID NO: 147711 - DNA, 25 bp, Saccharomyces pastorianus
cgataacgtcgatgatgcagatgtt

SEQ ID NO: 147712 - DNA, 25 bp, Saccharomyces pastorianus
accaactggaagtagctgtcgttga

SEQ ID NO: 147713 - DNA, 25 bp, Saccharomyces pastorianus
ggcaccaactggaagtagctgtcgt

SEQ ID NO: 147714 - DNA, 25 bp, Saccharomyces pastorianus
cgatgatgcagatgtttgtattgaa

SEQ ID NO: 147715 - DNA, 25 bp, Saccharomyces pastorianus
gaatacgataacgtcgatgatgcag

SEQ ID NO: 147716 - DNA, 25 bp, Saccharomyces pastorianus
acgtcgatgatgcagatgtttgtat

SEQ ID NO: 147717 - DNA, 25 bp, Saccharomyces pastorianus
gatgcagatgtttgtattgaaagat

SEQ ID NO: 147718 - DNA, 25 bp, Saccharomyces pastorianus
actggaagtagctgtcgttgaatac

SEQ ID NO: 147719 - DNA, 25 bp, Saccharomyces pastorianus
gcaccaactggaagtagctgtcgtt

SEQ ID NO: 147720 - DNA, 25 bp, Saccharomyces pastorianus
gtactcgttcggctattccaagaat

SEQ ID NO: 147721 - DNA, 25 bp, Saccharomyces pastorianus
aaagcaagcaacctgtattcctcac

SEQ ID NO: 147722 - DNA, 25 bp, Saccharomyces pastorianus
gaaacaccagccagatcgatttgat

SEQ ID NO: 147723 - DNA, 25 bp, Saccharomyces pastorianus
agcggtaatggcgatctcgtcgagc

SEQ ID NO: 147724 - DNA, 25 bp, Saccharomyces pastorianus
gaagctccccacatgaaaatctatt

SEQ ID NO: 147725 - DNA, 25 bp, Saccharomyces pastorianus
aggatgactcctctgctctgaattt

SEQ ID NO: 147726 - DNA, 25 bp, Saccharomyces pastorianus
gaacacgtagacatcctcggcagcg

SEQ ID NO: 147727 - DNA, 25 bp, Saccharomyces pastorianus
ctcgtggcgcattcaatgtgtcaca

SEQ ID NO: 147728 - DNA, 25 bp, Saccharomyces pastorianus
atcgatatcacctgaatggctccaa

SEQ ID NO: 147729 - DNA, 25 bp, Saccharomyces pastorianus
gctctgaatttgaccatcgactacg

SEQ ID NO: 147730 - DNA, 25 bp, Saccharomyces pastorianus
tcgagccacgccaattgtctaattt

SEQ ID NO: 147731 - DNA, 25 bp, Saccharomyces pastorianus
aagcgagagagcagaaaccacattc

SEQ ID NO: 147732 - DNA, 25 bp, Saccharomyces pastorianus
atcaacagggattaggccataagag

SEQ ID NO: 147733 - DNA, 25 bp, Saccharomyces pastorianus
gggttctgttcataacaagcgagag

SEQ ID NO: 147734 - DNA, 25 bp, Saccharomyces pastorianus
tcatcatcaacagggattaggccat

SEQ ID NO: 147735 - DNA, 25 bp, Saccharomyces pastorianus
gcgtggcaaagatttcgacaggaaa

SEQ ID NO: 147736 - DNA, 25 bp, Saccharomyces pastorianus
gagagcagaaaccacattcatcatc

SEQ ID NO: 147737 - DNA, 25 bp, Saccharomyces pastorianus
aatgagcgtggcaaagatttcgaca

SEQ ID NO: 147738 - DNA, 25 bp, Saccharomyces pastorianus
cagggattaggccataagagaagaa

SEQ ID NO: 147739 - DNA, 25 bp, Saccharomyces pastorianus
ggtattagtggcagtgcaaaaagaa

SEQ ID NO: 147740 - DNA, 25 bp, Saccharomyces pastorianus
tcgacaggaaaagagatcgggatac

SEQ ID NO: 147741 - DNA, 25 bp, Saccharomyces pastorianus
aaaccacattcatcatcaacaggga

SEQ ID NO: 147742 - DNA, 25 bp, Saccharomyces pastorianus
aattcgatcaagttacagctgttaa

SEQ ID NO: 147743 - DNA, 25 bp, Saccharomyces pastorianus
attagcgtggtggtttatttggcca

SEQ ID NO: 147744 - DNA, 25 bp, Saccharomyces pastorianus
taaattgcgcggactttgttttcta

SEQ ID NO: 147745 - DNA, 25 bp, Saccharomyces pastorianus
acgaacataattacacctggtgagc

SEQ ID NO: 147746 - DNA, 25 bp, Saccharomyces pastorianus
gagaaagacgatccccaatatcaca

SEQ ID NO: 147747 - DNA, 25 bp, Saccharomyces pastorianus
gacattcctgtagcacatacgaaca

SEQ ID NO: 147748 - DNA, 25 bp, Saccharomyces pastorianus
tgggcacttgatgacattcctgtag

SEQ ID NO: 147749 - DNA, 25 bp, Saccharomyces pastorianus
catttttgctggtatgatcatctcc

SEQ ID NO: 147750 - DNA, 25 bp, Saccharomyces pastorianus
aacgttgttgcctgtcaattcgatc

SEQ ID NO: 147751 - DNA, 25 bp, Saccharomyces pastorianus
cactgaagttggtatccgacgtata

SEQ ID NO: 147752 - DNA, 25 bp, Saccharomyces pastorianus
gccatccaggtgcttttagatcatg

SEQ ID NO: 147753 - DNA, 25 bp, Saccharomyces pastorianus
ttttacaatccattaggcccagagg

SEQ ID NO: 147754 - DNA, 25 bp, Saccharomyces pastorianus
gtggtgcttcaggttcaggcaagac

SEQ ID NO: 147755 - DNA, 25 bp, Saccharomyces pastorianus
tacgatcgtcgattgctggatttga

SEQ ID NO: 147756 - DNA, 25 bp, Saccharomyces pastorianus
cgaagggatctacgccctttacgat

SEQ ID NO: 147757 - DNA, 25 bp, Saccharomyces pastorianus
cgttgctgctaagattgtgtcgtca

SEQ ID NO: 147758 - DNA, 25 bp, Saccharomyces pastorianus
ggacagagccagagcctttaaaaat

SEQ ID NO: 147759 - DNA, 25 bp, Saccharomyces pastorianus
ttgtgtcgtcaattaatgttccctg

SEQ ID NO: 147760 - DNA, 25 bp, Saccharomyces pastorianus
cgatttcgacgagccaaatgccatc

SEQ ID NO: 147761 - DNA, 25 bp, Saccharomyces pastorianus
tcgtccaccacaatagagttcctga

SEQ ID NO: 147762 - DNA, 25 bp, Saccharomyces pastorianus
atatcccagtttatagcttcgtcca

SEQ ID NO: 147763 - DNA, 25 bp, Saccharomyces pastorianus
gacgctgatttggatgtctgcttag

SEQ ID NO: 147764 - DNA, 25 bp, Saccharomyces pastorianus
gactattgatcgttatagccgccct

SEQ ID NO: 147765 - DNA, 25 bp, Saccharomyces pastorianus
aaatctccggtatctttggtgaaat

SEQ ID NO: 147766 - DNA, 25 bp, Saccharomyces pastorianus
gagaggtgtaccagccagtttgtta

SEQ ID NO: 147767 - DNA, 25 bp, Saccharomyces pastorianus
gtgagatcggttccaatctaccttc

SEQ ID NO: 147768 - DNA, 25 bp, Saccharomyces pastorianus
ggtgtctttcaaaccaaatctccgg

SEQ ID NO: 147769 - DNA, 25 bp, Saccharomyces pastorianus
ttgtaatggccacttttgtctccca

SEQ ID NO: 147770 - DNA, 25 bp, Saccharomyces pastorianus
atagccgccctattatgctctagtg

SEQ ID NO: 147771 - DNA, 25 bp, Saccharomyces pastorianus
agtagtcttcttcggtacaggtctt

SEQ ID NO: 147772 - DNA, 25 bp, Saccharomyces pastorianus
tgctctagtgctatgggtcttccaa

SEQ ID NO: 147773 - DNA, 25 bp, Saccharomyces pastorianus
attgtgttgatcttcggtctagtga

SEQ ID NO: 147774 - DNA, 25 bp, Saccharomyces pastorianus
gacaatcgttgttttggccatggga

SEQ ID NO: 147775 - DNA, 25 bp, Saccharomyces pastorianus
agcgtgaattatcctctcatttgag

SEQ ID NO: 147776 - DNA, 25 bp, Saccharomyces pastorianus
cgggttctccaagatctgcaagaaa

SEQ ID NO: 147777 - DNA, 25 bp, Saccharomyces pastorianus
ttgaacaagggcacgcgtcgaccat

SEQ ID NO: 147778 - DNA, 25 bp, Saccharomyces pastorianus
agttgagttccagtcaattgcgccc

SEQ ID NO: 147779 - DNA, 25 bp, Saccharomyces pastorianus
gaagtcctcgatttccaggatgctg

SEQ ID NO: 147780 - DNA, 25 bp, Saccharomyces pastorianus
aattccattcgcatgtcttcaatcc

SEQ ID NO: 147781 - DNA, 25 bp, Saccharomyces pastorianus
ggtattatcgctccatcaacggact

SEQ ID NO: 147782 - DNA, 25 bp, Saccharomyces pastorianus
tgaactcatgcatttaccacccaag

SEQ ID NO: 147783 - DNA, 25 bp, Saccharomyces pastorianus
cgtttaatttggacgctgaccgaat

SEQ ID NO: 147784 - DNA, 25 bp, Saccharomyces pastorianus
gattcagcatcacattaccgagacc

SEQ ID NO: 147785 - DNA, 25 bp, Saccharomyces pastorianus
tcctcacttacgctagcttgaacaa

SEQ ID NO: 147786 - DNA, 25 bp, Saccharomyces pastorianus
gttcttcttccaaatgctgcaaatg

SEQ ID NO: 147787 - DNA, 25 bp, Saccharomyces pastorianus
gttagttgggcagacttcagtagaa

SEQ ID NO: 147788 - DNA, 25 bp, Saccharomyces pastorianus
caatgagagcattggctgtgcgcaa

SEQ ID NO: 147789 - DNA, 25 bp, Saccharomyces pastorianus
tggattgctcgttgatatcgtccca

SEQ ID NO: 147790 - DNA, 25 bp, Saccharomyces pastorianus
ttctggcttggtatctgcatgggac

SEQ ID NO: 147791 - DNA, 25 bp, Saccharomyces pastorianus
tggctgtgcgcaattctgaatggac

SEQ ID NO: 147792 - DNA, 25 bp, Saccharomyces pastorianus
tttttcttaagttccgtcgttcatg

SEQ ID NO: 147793 - DNA, 25 bp, Saccharomyces pastorianus
caaatcttgatgtatcctgtagcaa

SEQ ID NO: 147794 - DNA, 25 bp, Saccharomyces pastorianus
agcaactttgatgacctttttctta

SEQ ID NO: 147795 - DNA, 25 bp, Saccharomyces pastorianus
tcgtcccagggtttatcgtgatgta

SEQ ID NO: 147796 - DNA, 25 bp, Saccharomyces pastorianus
ttagaaaagatctgcgccatcttcg

SEQ ID NO: 147797 - DNA, 25 bp, Saccharomyces pastorianus
attgggaatcctattgtgccagaac

SEQ ID NO: 147798 - DNA, 25 bp, Saccharomyces pastorianus
gaagcatcatgcatgttctgaaatc

SEQ ID NO: 147799 - DNA, 25 bp, Saccharomyces pastorianus
aatcagagcctcttcgttaagtggg

SEQ ID NO: 147800 - DNA, 25 bp, Saccharomyces pastorianus
gcatttagaggatacgctttcgcat

SEQ ID NO: 147801 - DNA, 25 bp, Saccharomyces pastorianus
gacgattcgaagatcatctgcgatt

SEQ ID NO: 147802 - DNA, 25 bp, Saccharomyces pastorianus
aagtttgggacagttgcttcgccga

SEQ ID NO: 147803 - DNA, 25 bp, Saccharomyces pastorianus
attactgtcccgactggaagggcgg

SEQ ID NO: 147804 - DNA, 25 bp, Saccharomyces pastorianus
tagtgtttcagggaaccccaactgc

SEQ ID NO: 147805 - DNA, 25 bp, Saccharomyces pastorianus
aagggcggtggctttcatcctgaat

SEQ ID NO: 147806 - DNA, 25 bp, Saccharomyces pastorianus
tcccacagttcgctttatggtacaa

SEQ ID NO: 147807 - DNA, 25 bp, Saccharomyces pastorianus
gatgcttaaatactctcccacagtt

SEQ ID NO: 147808 - DNA, 25 bp, Saccharomyces pastorianus
gcagccaacactatccacataataa

SEQ ID NO: 147809 - DNA, 25 bp, Saccharomyces pastorianus
tctccggactctacatatgtggcga

SEQ ID NO: 147810 - DNA, 25 bp, Saccharomyces pastorianus
gcattccatgcttttcaattacgcg

SEQ ID NO: 147811 - DNA, 25 bp, Saccharomyces pastorianus
atgacaattccatagctcttgtgaa

SEQ ID NO: 147812 - DNA, 25 bp, Saccharomyces pastorianus
aacttcatccttattgtgctgcttt

SEQ ID NO: 147813 - DNA, 25 bp, Saccharomyces pastorianus
tctgtacctagcgtagattccataa

SEQ ID NO: 147814 - DNA, 25 bp, Saccharomyces pastorianus
gtggcgagtgtttcggcagccaaca

SEQ ID NO: 147815 - DNA, 25 bp, Saccharomyces pastorianus
ctcttcgccctacgtagttgatgaa

SEQ ID NO: 147816 - DNA, 25 bp, Saccharomyces pastorianus
ttacagaggtcactatctctccgga

SEQ ID NO: 147817 - DNA, 25 bp, Saccharomyces pastorianus
tttacagttctcctataagcacaat

SEQ ID NO: 147818 - DNA, 25 bp, Saccharomyces pastorianus
gtgctgctttcttacattttacagt

SEQ ID NO: 147819 - DNA, 25 bp, Saccharomyces pastorianus
ggagaccagtgagacgccacttgaa

SEQ ID NO: 147820 - DNA, 25 bp, Saccharomyces pastorianus
ataggttacatttcatcccaggaac

SEQ ID NO: 147821 - DNA, 25 bp, Saccharomyces pastorianus
tgttggctccaaaactcccggaaga

SEQ ID NO: 147822 - DNA, 25 bp, Saccharomyces pastorianus
taggccaggcagagtttccatgatt

SEQ ID NO: 147823 - DNA, 25 bp, Saccharomyces pastorianus
gattatgcttggtatttcggtattg

SEQ ID NO: 147824 - DNA, 25 bp, Saccharomyces pastorianus
atagaaggtagctccgtttcttcct

SEQ ID NO: 147825 - DNA, 25 bp, Saccharomyces pastorianus
gttactcgccagaacgcgattttga

SEQ ID NO: 147826 - DNA, 25 bp, Saccharomyces pastorianus
ttttctacgttttggccaagtacag

SEQ ID NO: 147827 - DNA, 25 bp, Saccharomyces pastorianus
atataatcagcttcaccatccttta

SEQ ID NO: 147828 - DNA, 25 bp, Saccharomyces pastorianus
aggcttcaagattaccaaaacggcg

SEQ ID NO: 147829 - DNA, 25 bp, Saccharomyces pastorianus
gtgtttggccaagttaccgccggat

SEQ ID NO: 147830 - DNA, 25 bp, Saccharomyces pastorianus
tgcataacggctctgccattacctg

SEQ ID NO: 147831 - DNA, 25 bp, Saccharomyces pastorianus
taacggctctgccattacctgtgga

SEQ ID NO: 147832 - DNA, 25 bp, Saccharomyces pastorianus
tatgtggcattcatgtttagttgca

SEQ ID NO: 147833 - DNA, 25 bp, Saccharomyces pastorianus
gtggcattcatgtttagttgcataa

SEQ ID NO: 147834 - DNA, 25 bp, Saccharomyces pastorianus
atctttatgtggcattcatgtttag

SEQ ID NO: 147835 - DNA, 25 bp, Saccharomyces pastorianus
ttagttgcataacggctctgccatt

SEQ ID NO: 147836 - DNA, 25 bp, Saccharomyces pastorianus
tttctttatctttatgtggcattca

SEQ ID NO: 147837 - DNA, 25 bp, Saccharomyces pastorianus
gttgcataacggctctgccattacc

SEQ ID NO: 147838 - DNA, 25 bp, Saccharomyces pastorianus
cttttttctttatctttatgtggca

SEQ ID NO: 147839 - DNA, 25 bp, Saccharomyces pastorianus
gtttagttgcataacggctctgcca

SEQ ID NO: 147840 - DNA, 25 bp, Saccharomyces pastorianus
tcatgtttagttgcataacggctct

SEQ ID NO: 147841 - DNA, 25 bp, Saccharomyces pastorianus
taaacccgaaaacatcctactagat

SEQ ID NO: 147842 - DNA, 25 bp, Saccharomyces pastorianus
cataccccacaatttcctactaagg

SEQ ID NO: 147843 - DNA, 25 bp, Saccharomyces pastorianus
atcactggtagacggccatgggcta

SEQ ID NO: 147844 - DNA, 25 bp, Saccharomyces pastorianus
atggctccagaatccatcactggat

SEQ ID NO: 147845 - DNA, 25 bp, Saccharomyces pastorianus
gaactcctatgtacatggctccaga

SEQ ID NO: 147846 - DNA, 25 bp, Saccharomyces pastorianus
gatgttacccatgtttctgattcaa

SEQ ID NO: 147847 - DNA, 25 bp, Saccharomyces pastorianus
gtatgttgattttggtgctgctaaa

SEQ ID NO: 147848 - DNA, 25 bp, Saccharomyces pastorianus
atttgcatgaatccggcattgttca

SEQ ID NO: 147849 - DNA, 25 bp, Saccharomyces pastorianus
atgaagtgtcgtctgctggtatgaa

SEQ ID NO: 147850 - DNA, 25 bp, Saccharomyces pastorianus
tcatgtaccatgttgctgcaggaca

SEQ ID NO: 147851 - DNA, 25 bp, Saccharomyces pastorianus
atcactggatctaccaccaaagaca

SEQ ID NO: 147852 - DNA, 25 bp, Saccharomyces pastorianus
ataatactaattcgcctatcttacg

SEQ ID NO: 147853 - DNA, 25 bp, Saccharomyces pastorianus
atacagaatccaaccttgatgatga

SEQ ID NO: 147854 - DNA, 25 bp, Saccharomyces pastorianus
aaagatataatactaattcgcctat

SEQ ID NO: 147855 - DNA, 25 bp, Saccharomyces pastorianus
ctaattcgcctatcttacgcgaaga

SEQ ID NO: 147856 - DNA, 25 bp, Saccharomyces pastorianus
actaattcgcctatcttacgcgaag

SEQ ID NO: 147857 - DNA, 25 bp, Saccharomyces pastorianus
atactaattcgcctatcttacgcga

SEQ ID NO: 147858 - DNA, 25 bp, Saccharomyces pastorianus
tcgcctatcttacgcgaagaaaata

SEQ ID NO: 147859 - DNA, 25 bp, Saccharomyces pastorianus
aatacagaatccaaccttgatgatg

SEQ ID NO: 147860 - DNA, 25 bp, Saccharomyces pastorianus
attcgcctatcttacgcgaagaaaa

SEQ ID NO: 147861 - DNA, 25 bp, Saccharomyces pastorianus
cttacgcgaagaaaatacagaatcc

SEQ ID NO: 147862 - DNA, 25 bp, Saccharomyces pastorianus
aattcgcctatcttacgcgaagaaa

SEQ ID NO: 147863 - DNA, 25 bp, Saccharomyces pastorianus
ctctgaggatttttagggattctac

SEQ ID NO: 147864 - DNA, 25 bp, Saccharomyces pastorianus
gataacaccaccgtgaatttggatg

SEQ ID NO: 147865 - DNA, 25 bp, Saccharomyces pastorianus
gaggctgcagagactatcaaatcac

SEQ ID NO: 147866 - DNA, 25 bp, Saccharomyces pastorianus
agaaatcatggcctttaaactagaa

SEQ ID NO: 147867 - DNA, 25 bp, Saccharomyces pastorianus
gagtcttaaatctatggcctaacat

SEQ ID NO: 147868 - DNA, 25 bp, Saccharomyces pastorianus
tttcgccactaattgtaaacgcttt

SEQ ID NO: 147869 - DNA, 25 bp, Saccharomyces pastorianus
tattctttccattagcaccatggat

SEQ ID NO: 147870 - DNA, 25 bp, Saccharomyces pastorianus
aagagctagaaagcactaccgaagt

SEQ ID NO: 147871 - DNA, 25 bp, Saccharomyces pastorianus
atttggatgatccagccgttttcgc

SEQ ID NO: 147872 - DNA, 25 bp, Saccharomyces pastorianus
atatgagtgctgacgaggctgcaga

SEQ ID NO: 147873 - DNA, 25 bp, Saccharomyces pastorianus
ggattctactgactccgtatttcaa

SEQ ID NO: 147874 - DNA, 25 bp, Saccharomyces pastorianus
gacctttacgagttggttcctgacg

SEQ ID NO: 147875 - DNA, 25 bp, Saccharomyces pastorianus
gaaccagctggcaactcggtgcagg

SEQ ID NO: 147876 - DNA, 25 bp, Saccharomyces pastorianus
aagaatatgccaccgtttaccaact

SEQ ID NO: 147877 - DNA, 25 bp, Saccharomyces pastorianus
gcttcctccgggatctatgacggga

SEQ ID NO: 147878 - DNA, 25 bp, Saccharomyces pastorianus
attgatgtccttaaacactcgcttc

SEQ ID NO: 147879 - DNA, 25 bp, Saccharomyces pastorianus
cacgtggtgtttacagcggtgtcac

SEQ ID NO: 147880 - DNA, 25 bp, Saccharomyces pastorianus
gcacatggattgacctctgccagta

SEQ ID NO: 147881 - DNA, 25 bp, Saccharomyces pastorianus
atgtatgtattcctacaacggcgga

SEQ ID NO: 147882 - DNA, 25 bp, Saccharomyces pastorianus
gggcataacagtcttaagcacacta

SEQ ID NO: 147883 - DNA, 25 bp, Saccharomyces pastorianus
aactcgttagcgtcgtaaaggcaca

SEQ ID NO: 147884 - DNA, 25 bp, Saccharomyces pastorianus
ggcaaaagccacacgaatcctgaag

SEQ ID NO: 147885 - DNA, 25 bp, Saccharomyces pastorianus
tggtacaaagaaacccggctccatt

SEQ ID NO: 147886 - DNA, 25 bp, Saccharomyces pastorianus
tgcccgataaacttgactacgctaa

SEQ ID NO: 147887 - DNA, 25 bp, Saccharomyces pastorianus
ggcccaagtatcttccagaggagat

SEQ ID NO: 147888 - DNA, 25 bp, Saccharomyces pastorianus
gcctggctcccttgaggtaatacat

SEQ ID NO: 147889 - DNA, 25 bp, Saccharomyces pastorianus
atgatgagaattcccttgttcccga

SEQ ID NO: 147890 - DNA, 25 bp, Saccharomyces pastorianus
caaagttgtaccatctgcggtgata

SEQ ID NO: 147891 - DNA, 25 bp, Saccharomyces pastorianus
aggtcagtacattgcatgcggccgt

SEQ ID NO: 147892 - DNA, 25 bp, Saccharomyces pastorianus
gtcaagattcggatttgcctggctc

SEQ ID NO: 147893 - DNA, 25 bp, Saccharomyces pastorianus
atgtgtctcacaacgcaaaccaaag

SEQ ID NO: 147894 - DNA, 25 bp, Saccharomyces pastorianus
gatattaagcaatccctgtcctggc

SEQ ID NO: 147895 - DNA, 25 bp, Saccharomyces pastorianus
ggaggatttccagaccttggtacaa

SEQ ID NO: 147896 - DNA, 25 bp, Saccharomyces pastorianus
catgctttgtagacgacgatgcttt

SEQ ID NO: 147897 - DNA, 25 bp, Saccharomyces pastorianus
gtgtttcatgctttgtagacgacga

SEQ ID NO: 147898 - DNA, 25 bp, Saccharomyces pastorianus
cgatgctttgaaagatgtctttgta

SEQ ID NO: 147899 - DNA, 25 bp, Saccharomyces pastorianus
gccggtcgtgtttcatgctttgtag

SEQ ID NO: 147900 - DNA, 25 bp, Saccharomyces pastorianus
gaaagatgtctttgtaattaagaag

SEQ ID NO: 147901 - DNA, 25 bp, Saccharomyces pastorianus
cggtcgtgtttcatgctttgtagac

SEQ ID NO: 147902 - DNA, 25 bp, Saccharomyces pastorianus
cgccggtcgtgtttcatgctttgta

SEQ ID NO: 147903 - DNA, 25 bp, Saccharomyces pastorianus
ctttgtagacgacgatgctttgaaa

SEQ ID NO: 147904 - DNA, 25 bp, Saccharomyces pastorianus
ccgccggtcgtgtttcatgctttgt

SEQ ID NO: 147905 - DNA, 25 bp, Saccharomyces pastorianus
gccgccggtcgtgtttcatgctttg

SEQ ID NO: 147906 - DNA, 25 bp, Saccharomyces pastorianus
ccggtcgtgtttcatgctttgtaga

SEQ ID NO: 147907 - DNA, 25 bp, Saccharomyces pastorianus
atctacctctgtggaatcgactgtt

SEQ ID NO: 147908 - DNA, 25 bp, Saccharomyces pastorianus
ggtacctcaaccatttcaactagtg

SEQ ID NO: 147909 - DNA, 25 bp, Saccharomyces pastorianus
gaatcttcatcattgactccgacgg

SEQ ID NO: 147910 - DNA, 25 bp, Saccharomyces pastorianus
tgactccgacggtatcttctatttc

SEQ ID NO: 147911 - DNA, 25 bp, Saccharomyces pastorianus
catcagagattttgcaacccacttc

SEQ ID NO: 147912 - DNA, 25 bp, Saccharomyces pastorianus
cacttcttccacagttattgctaca

SEQ ID NO: 147913 - DNA, 25 bp, Saccharomyces pastorianus
atgggcagtggatcgcaaacgcgtt

SEQ ID NO: 147914 - DNA, 25 bp, Saccharomyces pastorianus
gcacgctaccggtaagtatcatgta

SEQ ID NO: 147915 - DNA, 25 bp, Saccharomyces pastorianus
gtgtcgaacagtcaccagttaccac

SEQ ID NO: 147916 - DNA, 25 bp, Saccharomyces pastorianus
ttattatcgacatcggtcccttcat

SEQ ID NO: 147917 - DNA, 25 bp, Saccharomyces pastorianus
aagtttccactacttcaatctccat

SEQ ID NO: 147918 - DNA, 25 bp, Saccharomyces pastorianus
tgccgccgaaataactccttcaata

SEQ ID NO: 147919 - DNA, 25 bp, Saccharomyces pastorianus
acatccactatcgttcaagctgaca

SEQ ID NO: 147920 - DNA, 25 bp, Saccharomyces pastorianus
tgtccattgacggtatccacttcat

SEQ ID NO: 147921 - DNA, 25 bp, Saccharomyces pastorianus
tgttacaactacagtttcacccgcg

SEQ ID NO: 147922 - DNA, 25 bp, Saccharomyces pastorianus
tacgctactaccctatccagattta

SEQ ID NO: 147923 - DNA, 25 bp, Saccharomyces pastorianus
gttcaagctgacactacgacattgt

SEQ ID NO: 147924 - DNA, 25 bp, Saccharomyces pastorianus
actccttcaatatcgtacgctacta

SEQ ID NO: 147925 - DNA, 25 bp, Saccharomyces pastorianus
tattgccttggcatctgatccagaa

SEQ ID NO: 147926 - DNA, 25 bp, Saccharomyces pastorianus
gaaacgattctagtgacgataacca

SEQ ID NO: 147927 - DNA, 25 bp, Saccharomyces pastorianus
gacattatctttcgctcattttacc

SEQ ID NO: 147928 - DNA, 25 bp, Saccharomyces pastorianus
ctcattttacctacctgttcacaat

SEQ ID NO: 147929 - DNA, 25 bp, Saccharomyces pastorianus
ttctgccaattgagcaagctgtcta

SEQ ID NO: 147930 - DNA, 25 bp, Saccharomyces pastorianus
ggaccagcagcttgccgatgagtta

SEQ ID NO: 147931 - DNA, 25 bp, Saccharomyces pastorianus
tacggatttcgccaagtaccaaggt

SEQ ID NO: 147932 - DNA, 25 bp, Saccharomyces pastorianus
cacaagcagggacggcagcagcaat

SEQ ID NO: 147933 - DNA, 25 bp, Saccharomyces pastorianus
gataatccaggagttgcagaaccgt

SEQ ID NO: 147934 - DNA, 25 bp, Saccharomyces pastorianus
gttgtacgacttagacctggtgtat

SEQ ID NO: 147935 - DNA, 25 bp, Saccharomyces pastorianus
gaatggcggacaatcttgcacaagc

SEQ ID NO: 147936 - DNA, 25 bp, Saccharomyces pastorianus
gcagcaatagttcagcggaccagca

SEQ ID NO: 147937 - DNA, 25 bp, Saccharomyces pastorianus
agtagcatgcgcaagttgtacgact

SEQ ID NO: 147938 - DNA, 25 bp, Saccharomyces pastorianus
agctgtctatgcataagttcccaaa

SEQ ID NO: 147939 - DNA, 25 bp, Saccharomyces pastorianus
gtgggtccatcgagtagcatgcgca

SEQ ID NO: 147940 - DNA, 25 bp, Saccharomyces pastorianus
tttccttgagtgacgccaacggcaa

SEQ ID NO: 147941 - DNA, 25 bp, Saccharomyces pastorianus
atacatgcccaatttctacgactta

SEQ ID NO: 147942 - DNA, 25 bp, Saccharomyces pastorianus
gtccctcaacgtggcagttcaattt

SEQ ID NO: 147943 - DNA, 25 bp, Saccharomyces pastorianus
aatacaacttggtctttccttgagt

SEQ ID NO: 147944 - DNA, 25 bp, Saccharomyces pastorianus
ggtcgattaccactatcagacaatg

SEQ ID NO: 147945 - DNA, 25 bp, Saccharomyces pastorianus
gaattttcgcagcttctaatggact

SEQ ID NO: 147946 - DNA, 25 bp, Saccharomyces pastorianus
gcagcaatattcactaaccacactt

SEQ ID NO: 147947 - DNA, 25 bp, Saccharomyces pastorianus
atgagggccaacgtagacttcttaa

SEQ ID NO: 147948 - DNA, 25 bp, Saccharomyces pastorianus
acttggatcacataccatgcggcat

SEQ ID NO: 147949 - DNA, 25 bp, Saccharomyces pastorianus
ggccgatcggcactttcaggtcgaa

SEQ ID NO: 147950 - DNA, 25 bp, Saccharomyces pastorianus
gcggcatatgatctaggtttcctga

SEQ ID NO: 147951 - DNA, 25 bp, Saccharomyces pastorianus
ttggttcgtccttccacctgaaaag

SEQ ID NO: 147952 - DNA, 25 bp, Saccharomyces pastorianus
gtaaagactccgaagaagacatttt

SEQ ID NO: 147953 - DNA, 25 bp, Saccharomyces pastorianus
cattttattcagaggtgttgtcaga

SEQ ID NO: 147954 - DNA, 25 bp, Saccharomyces pastorianus
ggaaagaacttacgagatctcagga

SEQ ID NO: 147955 - DNA, 25 bp, Saccharomyces pastorianus
gatgccacggagtttattgaaattc

SEQ ID NO: 147956 - DNA, 25 bp, Saccharomyces pastorianus
gagtctggtgtttctaagcaaatat

SEQ ID NO: 147957 - DNA, 25 bp, Saccharomyces pastorianus
acgtcacacacccagaacaatatat

SEQ ID NO: 147958 - DNA, 25 bp, Saccharomyces pastorianus
ttgattgtccaggtattgtgccgcc

SEQ ID NO: 147959 - DNA, 25 bp, Saccharomyces pastorianus
gttgtcagagtcgaacacgtcacac

SEQ ID NO: 147960 - DNA, 25 bp, Saccharomyces pastorianus
ttgtgccgccttctagtaaagactc

SEQ ID NO: 147961 - DNA, 25 bp, Saccharomyces pastorianus
gagcctgatgagtctggtgtttcta

SEQ ID NO: 147962 - DNA, 25 bp, Saccharomyces pastorianus
gatgaatccccaaaagccagaattt

SEQ ID NO: 147963 - DNA, 25 bp, Saccharomyces pastorianus
attcgtctgacgtggtaatacatgt

SEQ ID NO: 147964 - DNA, 25 bp, Saccharomyces pastorianus
cagatcgtcgttggttcggtaacac

SEQ ID NO: 147965 - DNA, 25 bp, Saccharomyces pastorianus
gatatctcaggacgcactgcagcat

SEQ ID NO: 147966 - DNA, 25 bp, Saccharomyces pastorianus
gcaagggatccattgggtacccgtt

SEQ ID NO: 147967 - DNA, 25 bp, Saccharomyces pastorianus
ataccggatgcgagggtccaaccag

SEQ ID NO: 147968 - DNA, 25 bp, Saccharomyces pastorianus
gaaagagaccacgtcttgctgcatc

SEQ ID NO: 147969 - DNA, 25 bp, Saccharomyces pastorianus
tacccgttgtaagtccgtggaagag

SEQ ID NO: 147970 - DNA, 25 bp, Saccharomyces pastorianus
tatgctgatgcgtttgggcccaaag

SEQ ID NO: 147971 - DNA, 25 bp, Saccharomyces pastorianus
aaatgggtggacctccgcagcaaaa

SEQ ID NO: 147972 - DNA, 25 bp, Saccharomyces pastorianus
aaataagcttcccatgtcattgttg

SEQ ID NO: 147973 - DNA, 25 bp, Saccharomyces pastorianus
aatgtactacggcacatgatcagga

SEQ ID NO: 147974 - DNA, 25 bp, Saccharomyces pastorianus
caggatatggcgttgcatgaactgc

SEQ ID NO: 147975 - DNA, 25 bp, Saccharomyces pastorianus
ggttgcacaatgtactacggcacat

SEQ ID NO: 147976 - DNA, 25 bp, Saccharomyces pastorianus
gtactacggcacatgatcaggatat

SEQ ID NO: 147977 - DNA, 25 bp, Saccharomyces pastorianus
cggcacatgatcaggatatggcgtt

SEQ ID NO: 147978 - DNA, 25 bp, Saccharomyces pastorianus
tgcacaatgtactacggcacatgat

SEQ ID NO: 147979 - DNA, 25 bp, Saccharomyces pastorianus
ctacggcacatgatcaggatatggc

SEQ ID NO: 147980 - DNA, 25 bp, Saccharomyces pastorianus
ggatatggcgttgcatgaactgcca

SEQ ID NO: 147981 - DNA, 25 bp, Saccharomyces pastorianus
ggcgttgcatgaactgccatcggtg

SEQ ID NO: 147982 - DNA, 25 bp, Saccharomyces pastorianus
acaggttgcacaatgtactacggca

SEQ ID NO: 147983 - DNA, 25 bp, Saccharomyces pastorianus
acatgatcaggatatggcgttgcat

SEQ ID NO: 147984 - DNA, 25 bp, Saccharomyces pastorianus
tatctccgctccaggccatggagta

SEQ ID NO: 147985 - DNA, 25 bp, Saccharomyces pastorianus
cgtagttcctgaagagtggagcgca

SEQ ID NO: 147986 - DNA, 25 bp, Saccharomyces pastorianus
acttatgcgctgcagaagcctctat

SEQ ID NO: 147987 - DNA, 25 bp, Saccharomyces pastorianus
tggaaacccgtacaaactggaattg

SEQ ID NO: 147988 - DNA, 25 bp, Saccharomyces pastorianus
gtacgaacctaatgtcgacatcagg

SEQ ID NO: 147989 - DNA, 25 bp, Saccharomyces pastorianus
gtcgacatcaggttgttggatttcg

SEQ ID NO: 147990 - DNA, 25 bp, Saccharomyces pastorianus
gtatcaacattattggtacacaaat

SEQ ID NO: 147991 - DNA, 25 bp, Saccharomyces pastorianus
ttggatttcgtagttcctgaagagt

SEQ ID NO: 147992 - DNA, 25 bp, Saccharomyces pastorianus
gatgttggtaaaacctttgtatcaa

SEQ ID NO: 147993 - DNA, 25 bp, Saccharomyces pastorianus
caggccatggagtacgaacctaatg

SEQ ID NO: 147994 - DNA, 25 bp, Saccharomyces pastorianus
accggtacagacactgatgttggta

SEQ ID NO: 147995 - DNA, 25 bp, Saccharomyces pastorianus
tagagtttacagattctcaaaagaa

SEQ ID NO: 147996 - DNA, 25 bp, Saccharomyces pastorianus
tataggaagggacagtacggaaaat

SEQ ID NO: 147997 - DNA, 25 bp, Saccharomyces pastorianus
tacagctattgcacacattatagga

SEQ ID NO: 147998 - DNA, 25 bp, Saccharomyces pastorianus
ttgcacacattataggaagggacag

SEQ ID NO: 147999 - DNA, 25 bp, Saccharomyces pastorianus
gaagggacagtacggaaaattgata

SEQ ID NO: 148000 - DNA, 25 bp, Saccharomyces pastorianus
gacagtacggaaaattgatagagtt

SEQ ID NO: 148001 - DNA, 25 bp, Saccharomyces pastorianus
cagctattgcacacattataggaag

SEQ ID NO: 148002 - DNA, 25 bp, Saccharomyces pastorianus
gatagagtttacagattctcaaaag

SEQ ID NO: 148003 - DNA, 25 bp, Saccharomyces pastorianus
cacacattataggaagggacagtac

SEQ ID NO: 148004 - DNA, 25 bp, Saccharomyces pastorianus
acattataggaagggacagtacgga

SEQ ID NO: 148005 - DNA, 25 bp, Saccharomyces pastorianus
tattgcacacattataggaagggac

SEQ ID NO: 148006 - DNA, 25 bp, Saccharomyces pastorianus
tgacgctccgcgttaactgggacac

SEQ ID NO: 148007 - DNA, 25 bp, Saccharomyces pastorianus
ggtacaactttttggcttcgagcat

SEQ ID NO: 148008 - DNA, 25 bp, Saccharomyces pastorianus
gaagctatttcgctccaaagttaat

SEQ ID NO: 148009 - DNA, 25 bp, Saccharomyces pastorianus
attggagcatccgaagccttgaagc

SEQ ID NO: 148010 - DNA, 25 bp, Saccharomyces pastorianus
attttatgccactattcctgacgct

SEQ ID NO: 148011 - DNA, 25 bp, Saccharomyces pastorianus
ggcaccgattgtattagcagctctt

SEQ ID NO: 148012 - DNA, 25 bp, Saccharomyces pastorianus
tatggtcgcatctatacttggtgtg

SEQ ID NO: 148013 - DNA, 25 bp, Saccharomyces pastorianus
aggtccagttgatgccttcaattgg

SEQ ID NO: 148014 - DNA, 25 bp, Saccharomyces pastorianus
agcccttttttccatgtacatcgac

SEQ ID NO: 148015 - DNA, 25 bp, Saccharomyces pastorianus
aataaacgtcgggtgctcctgcggc

SEQ ID NO: 148016 - DNA, 25 bp, Saccharomyces pastorianus
agcggtcaagtttttctgtccatct

SEQ ID NO: 148017 - DNA, 25 bp, Saccharomyces pastorianus
agaccagcctgccactagcaatatt

SEQ ID NO: 148018 - DNA, 25 bp, Saccharomyces pastorianus
gaaaaggtcctacttactcttcgct

SEQ ID NO: 148019 - DNA, 25 bp, Saccharomyces pastorianus
aagaagatgcttacagacccgaaca

SEQ ID NO: 148020 - DNA, 25 bp, Saccharomyces pastorianus
taccaagtctgcatttcaacgcacg

SEQ ID NO: 148021 - DNA, 25 bp, Saccharomyces pastorianus
tatccagtttcacaagtcaagacag

SEQ ID NO: 148022 - DNA, 25 bp, Saccharomyces pastorianus
gcaggtgtagcacgcttttcttcaa

SEQ ID NO: 148023 - DNA, 25 bp, Saccharomyces pastorianus
gacgcattgccagcacgtagtgcta

SEQ ID NO: 148024 - DNA, 25 bp, Saccharomyces pastorianus
gctgcttcagggtcagttttcagat

SEQ ID NO: 148025 - DNA, 25 bp, Saccharomyces pastorianus
gaacaagagcacacgtcacagatag

SEQ ID NO: 148026 - DNA, 25 bp, Saccharomyces pastorianus
agcacgtagtgctattcacaagcct

SEQ ID NO: 148027 - DNA, 25 bp, Saccharomyces pastorianus
atttcaacgcacgaaggcaggtgta

SEQ ID NO: 148028 - DNA, 25 bp, Saccharomyces pastorianus
actcttcgacccagtagattcgtat

SEQ ID NO: 148029 - DNA, 25 bp, Saccharomyces pastorianus
tcatatgctacctatcacaccagtt

SEQ ID NO: 148030 - DNA, 25 bp, Saccharomyces pastorianus
tatatccacggtattcatatgctac

SEQ ID NO: 148031 - DNA, 25 bp, Saccharomyces pastorianus
gacaacacagttgagcctgaagaaa

SEQ ID NO: 148032 - DNA, 25 bp, Saccharomyces pastorianus
gtgattcaacttttgattcatccac

SEQ ID NO: 148033 - DNA, 25 bp, Saccharomyces pastorianus
aagctgaatcaagcactcttcgacc

SEQ ID NO: 148034 - DNA, 25 bp, Saccharomyces pastorianus
gattcgtatgcatttttcagtgatt

SEQ ID NO: 148035 - DNA, 25 bp, Saccharomyces pastorianus
gaaagcggctggacaggcatattga

SEQ ID NO: 148036 - DNA, 25 bp, Saccharomyces pastorianus
agtttcttctaatattcgttctgag

SEQ ID NO: 148037 - DNA, 25 bp, Saccharomyces pastorianus
ggatgcaatgaacgactatttctat

SEQ ID NO: 148038 - DNA, 25 bp, Saccharomyces pastorianus
tcgttctgagactttcgtcgaagaa

SEQ ID NO: 148039 - DNA, 25 bp, Saccharomyces pastorianus
aatcggcctttgatattctgctaca

SEQ ID NO: 148040 - DNA, 25 bp, Saccharomyces pastorianus
ttagctgaagttgccaattccgaat

SEQ ID NO: 148041 - DNA, 25 bp, Saccharomyces pastorianus
tgaatggtacttgggctgccgacaa

SEQ ID NO: 148042 - DNA, 25 bp, Saccharomyces pastorianus
atgggcagctggactttatgaaaac

SEQ ID NO: 148043 - DNA, 25 bp, Saccharomyces pastorianus
tccaccagcacgcaatacgattttg

SEQ ID NO: 148044 - DNA, 25 bp, Saccharomyces pastorianus
aacggtctccgaaatcatccaagat

SEQ ID NO: 148045 - DNA, 25 bp, Saccharomyces pastorianus
gctgtcatcggctatgttgactcta

SEQ ID NO: 148046 - DNA, 25 bp, Saccharomyces pastorianus
aagttcaacggtttggtcagttcag

SEQ ID NO: 148047 - DNA, 25 bp, Saccharomyces pastorianus
cttacattctattaacggtctccga

SEQ ID NO: 148048 - DNA, 25 bp, Saccharomyces pastorianus
gttcaacggtcattcatgggcagct

SEQ ID NO: 148049 - DNA, 25 bp, Saccharomyces pastorianus
atgaacagacgtatccactaattta

SEQ ID NO: 148050 - DNA, 25 bp, Saccharomyces pastorianus
taaacttacttcttgccgatgacgc

SEQ ID NO: 148051 - DNA, 25 bp, Saccharomyces pastorianus
tatgctcgaggtcatatttcctccg

SEQ ID NO: 148052 - DNA, 25 bp, Saccharomyces pastorianus
aaaagtgtgcctgttacttcttctc

SEQ ID NO: 148053 - DNA, 25 bp, Saccharomyces pastorianus
atccagcataattcctcgaacttct

SEQ ID NO: 148054 - DNA, 25 bp, Saccharomyces pastorianus
tatttcctccgcgtaaaacttcatt

SEQ ID NO: 148055 - DNA, 25 bp, Saccharomyces pastorianus
tacttcttctcctatatccagcata

SEQ ID NO: 148056 - DNA, 25 bp, Saccharomyces pastorianus
accattcggtactttcacatcggaa

SEQ ID NO: 148057 - DNA, 25 bp, Saccharomyces pastorianus
gaagcatatcgcgatgagttcacta

SEQ ID NO: 148058 - DNA, 25 bp, Saccharomyces pastorianus
agatcgctcgatttttctgatttaa

SEQ ID NO: 148059 - DNA, 25 bp, Saccharomyces pastorianus
aagctaccatagtgccaagttttga

SEQ ID NO: 148060 - DNA, 25 bp, Saccharomyces pastorianus
taaggacgtacaggttttagccaat

SEQ ID NO: 148061 - DNA, 25 bp, Saccharomyces pastorianus
atgtggaaactatccccttacacgt

SEQ ID NO: 148062 - DNA, 25 bp, Saccharomyces pastorianus
ggtgatgaatacttggcgcgcataa

SEQ ID NO: 148063 - DNA, 25 bp, Saccharomyces pastorianus
atgccatactttttcaactttacta

SEQ ID NO: 148064 - DNA, 25 bp, Saccharomyces pastorianus
tgggtgtctttaccgaagcctctag

SEQ ID NO: 148065 - DNA, 25 bp, Saccharomyces pastorianus
gcagattgcgcctattgtcagtaca

SEQ ID NO: 148066 - DNA, 25 bp, Saccharomyces pastorianus
ctctttaatgcctggtttctggaca

SEQ ID NO: 148067 - DNA, 25 bp, Saccharomyces pastorianus
gtctccaaatctacaatctgccaat

SEQ ID NO: 148068 - DNA, 25 bp, Saccharomyces pastorianus
aatgattctgtacatgtctccaaat

SEQ ID NO: 148069 - DNA, 25 bp, Saccharomyces pastorianus
gaagttcgtgagtccaaatctaata

SEQ ID NO: 148070 - DNA, 25 bp, Saccharomyces pastorianus
gaagcctctaggtcaagtgtttttt

SEQ ID NO: 148071 - DNA, 25 bp, Saccharomyces pastorianus
gtttcattatatttccctctgggtg

SEQ ID NO: 148072 - DNA, 25 bp, Saccharomyces pastorianus
acttcagctctgattcgatcgactt

SEQ ID NO: 148073 - DNA, 25 bp, Saccharomyces pastorianus
aagaagtgaagttgatgcgtcttcc

SEQ ID NO: 148074 - DNA, 25 bp, Saccharomyces pastorianus
aacgctgaagacgaatccaaggacc

SEQ ID NO: 148075 - DNA, 25 bp, Saccharomyces pastorianus
ctcatcgtttaagttggaattcgga

SEQ ID NO: 148076 - DNA, 25 bp, Saccharomyces pastorianus
gaagacgaatccaaggaccccaact

SEQ ID NO: 148077 - DNA, 25 bp, Saccharomyces pastorianus
gattcgatcgacttcacgattccaa

SEQ ID NO: 148078 - DNA, 25 bp, Saccharomyces pastorianus
tcgacttcacgattccaaacaatag

SEQ ID NO: 148079 - DNA, 25 bp, Saccharomyces pastorianus
tggaattcggaaactacccaagaag

SEQ ID NO: 148080 - DNA, 25 bp, Saccharomyces pastorianus
gattccaaacaatagctcatcgttt

SEQ ID NO: 148081 - DNA, 25 bp, Saccharomyces pastorianus
ctgctttgaacttcagctctgattc

SEQ ID NO: 148082 - DNA, 25 bp, Saccharomyces pastorianus
gaaactgttcagcttcacaaagaaa

SEQ ID NO: 148083 - DNA, 25 bp, Saccharomyces pastorianus
ttccaagggtgccatgctcatgaga

SEQ ID NO: 148084 - DNA, 25 bp, Saccharomyces pastorianus
ggcttgtgtgcagctaatccaaact

SEQ ID NO: 148085 - DNA, 25 bp, Saccharomyces pastorianus
tattacgctggtcatcaccgtcaat

SEQ ID NO: 148086 - DNA, 25 bp, Saccharomyces pastorianus
gtcaatctgctccagctgaaactgt

SEQ ID NO: 148087 - DNA, 25 bp, Saccharomyces pastorianus
atgttacatcgttacttgcacgtcc

SEQ ID NO: 148088 - DNA, 25 bp, Saccharomyces pastorianus
ggtactattgtcgatgtcggtccaa

SEQ ID NO: 148089 - DNA, 25 bp, Saccharomyces pastorianus
gaagttgtggactacgcccagaaca

SEQ ID NO: 148090 - DNA, 25 bp, Saccharomyces pastorianus
tgcacgtccctaccatgagtatgga

SEQ ID NO: 148091 - DNA, 25 bp, Saccharomyces pastorianus
gacaactatctttactatctcgctg

SEQ ID NO: 148092 - DNA, 25 bp, Saccharomyces pastorianus
ggtgtcgatgacgtttactacaaaa

SEQ ID NO: 148093 - DNA, 25 bp, Saccharomyces pastorianus
aggataccgctgaaatcaccgctta

SEQ ID NO: 148094 - DNA, 25 bp, Saccharomyces pastorianus
gtgctcctgtcacttacgacaccaa

SEQ ID NO: 148095 - DNA, 25 bp, Saccharomyces pastorianus
gcaactattgcttctctagctttga

SEQ ID NO: 148096 - DNA, 25 bp, Saccharomyces pastorianus
ctcttccggcaaatctatcatcttt

SEQ ID NO: 148097 - DNA, 25 bp, Saccharomyces pastorianus
tctctagctttgagtgctcctgtca

SEQ ID NO: 148098 - DNA, 25 bp, Saccharomyces pastorianus
atctttgcaactattgcttctctag

SEQ ID NO: 148099 - DNA, 25 bp, Saccharomyces pastorianus
aatctatcatctttgcaactattgc

SEQ ID NO: 148100 - DNA, 25 bp, Saccharomyces pastorianus
attgcttctctagctttgagtgctc

SEQ ID NO: 148101 - DNA, 25 bp, Saccharomyces pastorianus
tgaagttctcttccggcaaatctat

SEQ ID NO: 148102 - DNA, 25 bp, Saccharomyces pastorianus
gttctcttccggcaaatctatcatc

SEQ ID NO: 148103 - DNA, 25 bp, Saccharomyces pastorianus
ttgagtgctcctgtcacttacgaca

SEQ ID NO: 148104 - DNA, 25 bp, Saccharomyces pastorianus
tagctttgagtgctcctgtcactta

SEQ ID NO: 148105 - DNA, 25 bp, Saccharomyces pastorianus
caattgtaggtggtgacgacgctct

SEQ ID NO: 148106 - DNA, 25 bp, Saccharomyces pastorianus
gccgccagacatgttttctacgagg

SEQ ID NO: 148107 - DNA, 25 bp, Saccharomyces pastorianus
tgaagagcccatgccctttgttgaa

SEQ ID NO: 148108 - DNA, 25 bp, Saccharomyces pastorianus
tttgttgaacttttgccgccagaca

SEQ ID NO: 148109 - DNA, 25 bp, Saccharomyces pastorianus
cgaagctaaatctaccactgtggtt

SEQ ID NO: 148110 - DNA, 25 bp, Saccharomyces pastorianus
tgtggtcagcgagttgcttctacaa

SEQ ID NO: 148111 - DNA, 25 bp, Saccharomyces pastorianus
acgggcgcaggaactcaatcatcat

SEQ ID NO: 148112 - DNA, 25 bp, Saccharomyces pastorianus
aattcgcattttttcagtttggcca

SEQ ID NO: 148113 - DNA, 25 bp, Saccharomyces pastorianus
atgtgctggcagacgcgacggactt

SEQ ID NO: 148114 - DNA, 25 bp, Saccharomyces pastorianus
atgatatcccgggtttaggctacct

SEQ ID NO: 148115 - DNA, 25 bp, Saccharomyces pastorianus
gacattaatgctgattccgttggga

SEQ ID NO: 148116 - DNA, 25 bp, Saccharomyces pastorianus
tccaggagcgagaagccatggccat

SEQ ID NO: 148117 - DNA, 25 bp, Saccharomyces pastorianus
gaggcacaaaagttaatccaggagc

SEQ ID NO: 148118 - DNA, 25 bp, Saccharomyces pastorianus
ctcaaatgagcggttcggaacaaaa

SEQ ID NO: 148119 - DNA, 25 bp, Saccharomyces pastorianus
gtatacaattgggtgaaactactat

SEQ ID NO: 148120 - DNA, 25 bp, Saccharomyces pastorianus
gaagccaggcgtttgaagttagaaa

SEQ ID NO: 148121 - DNA, 25 bp, Saccharomyces pastorianus
gaagccatggccataagtgaacata

SEQ ID NO: 148122 - DNA, 25 bp, Saccharomyces pastorianus
gggcaaaaaatctcaactatcgaat

SEQ ID NO: 148123 - DNA, 25 bp, Saccharomyces pastorianus
gatgatgtggtgaaaaagccttctc

SEQ ID NO: 148124 - DNA, 25 bp, Saccharomyces pastorianus
aaagccttctcacaataagggcaaa

SEQ ID NO: 148125 - DNA, 25 bp, Saccharomyces pastorianus
attagaacgttccttgaatgagcaa

SEQ ID NO: 148126 - DNA, 25 bp, Saccharomyces pastorianus
aaaactctttccgacagcgacgagg

SEQ ID NO: 148127 - DNA, 25 bp, Saccharomyces pastorianus
ctttaaagttctctgccactggaga

SEQ ID NO: 148128 - DNA, 25 bp, Saccharomyces pastorianus
ctctgccactggagaaagacattta

SEQ ID NO: 148129 - DNA, 25 bp, Saccharomyces pastorianus
gtagcaaccaacattgcacatattg

SEQ ID NO: 148130 - DNA, 25 bp, Saccharomyces pastorianus
ttctctttaaagttctctgccactg

SEQ ID NO: 148131 - DNA, 25 bp, Saccharomyces pastorianus
agacatttagtagcaaccaacattg

SEQ ID NO: 148132 - DNA, 25 bp, Saccharomyces pastorianus
gtctattgtgggtttcatcttctcc

SEQ ID NO: 148133 - DNA, 25 bp, Saccharomyces pastorianus
attgcacatattgaagcccatacgt

SEQ ID NO: 148134 - DNA, 25 bp, Saccharomyces pastorianus
ttgtgggtttcatcttctccctctt

SEQ ID NO: 148135 - DNA, 25 bp, Saccharomyces pastorianus
tctccctcttcacacctttaaaaga

SEQ ID NO: 148136 - DNA, 25 bp, Saccharomyces pastorianus
tattgaagcccatacgtctattgtg

SEQ ID NO: 148137 - DNA, 25 bp, Saccharomyces pastorianus
catacgtctattgtgggtttcatct

SEQ ID NO: 148138 - DNA, 25 bp, Saccharomyces pastorianus
caacagctatatcccatgaccaaaa

SEQ ID NO: 148139 - DNA, 25 bp, Saccharomyces pastorianus
gcctttggctggcattcaatgcatg

SEQ ID NO: 148140 - DNA, 25 bp, Saccharomyces pastorianus
ggcattcaatgcatggttccattat

SEQ ID NO: 148141 - DNA, 25 bp, Saccharomyces pastorianus
gccactgcggtccatttcttaattt

SEQ ID NO: 148142 - DNA, 25 bp, Saccharomyces pastorianus
actgcggtccatttcttaatttcaa

SEQ ID NO: 148143 - DNA, 25 bp, Saccharomyces pastorianus
tggttccattatatggttcctgcaa

SEQ ID NO: 148144 - DNA, 25 bp, Saccharomyces pastorianus
atatcccatgaccaaaacgccactg

SEQ ID NO: 148145 - DNA, 25 bp, Saccharomyces pastorianus
gcggtccatttcttaatttcaaatc

SEQ ID NO: 148146 - DNA, 25 bp, Saccharomyces pastorianus
tgaccaaaacgccactgcggtccat

SEQ ID NO: 148147 - DNA, 25 bp, Saccharomyces pastorianus
atggttcctgcaaatagcacagttg

SEQ ID NO: 148148 - DNA, 25 bp, Saccharomyces pastorianus
agctatatcccatgaccaaaacgcc

SEQ ID NO: 148149 - DNA, 25 bp, Saccharomyces pastorianus
agctaaactattaggccgctttcct

SEQ ID NO: 148150 - DNA, 25 bp, Saccharomyces pastorianus
gtttatgcattggtttccctctata

SEQ ID NO: 148151 - DNA, 25 bp, Saccharomyces pastorianus
aggccagccactttttaaaggcgat

SEQ ID NO: 148152 - DNA, 25 bp, Saccharomyces pastorianus
gcgatagcgctaactcacaactgga

SEQ ID NO: 148153 - DNA, 25 bp, Saccharomyces pastorianus
atatgccatggcgatctgaaaccga

SEQ ID NO: 148154 - DNA, 25 bp, Saccharomyces pastorianus
gctcggcacagcgactggatgataa

SEQ ID NO: 148155 - DNA, 25 bp, Saccharomyces pastorianus
aaatacttcgagcacttctgacctt

SEQ ID NO: 148156 - DNA, 25 bp, Saccharomyces pastorianus
aagtatgtgactttggctcggcaca

SEQ ID NO: 148157 - DNA, 25 bp, Saccharomyces pastorianus
gcacctgaacttctcctaaattcga

SEQ ID NO: 148158 - DNA, 25 bp, Saccharomyces pastorianus
gaattgaagacctatttttgctcga

SEQ ID NO: 148159 - DNA, 25 bp, Saccharomyces pastorianus
acttctgaccttacattccatgagt

SEQ ID NO: 148160 - DNA, 25 bp, Saccharomyces pastorianus
gatgaccacaatagcggttatggct

SEQ ID NO: 148161 - DNA, 25 bp, Saccharomyces pastorianus
atggctacaactgtgatcgcggtga

SEQ ID NO: 148162 - DNA, 25 bp, Saccharomyces pastorianus
gactttaaaccaaccacagcaagat

SEQ ID NO: 148163 - DNA, 25 bp, Saccharomyces pastorianus
tacatcaaacactgactctggttcc

SEQ ID NO: 148164 - DNA, 25 bp, Saccharomyces pastorianus
catgccacctaatgcaatgacttta

SEQ ID NO: 148165 - DNA, 25 bp, Saccharomyces pastorianus
ttccccgccattgaatttacctaat

SEQ ID NO: 148166 - DNA, 25 bp, Saccharomyces pastorianus
tgatcgcggtgatcgtgatcgtaac

SEQ ID NO: 148167 - DNA, 25 bp, Saccharomyces pastorianus
cagcaccttctgattccgataataa

SEQ ID NO: 148168 - DNA, 25 bp, Saccharomyces pastorianus
gattcaaatgccactcaaggttccc

SEQ ID NO: 148169 - DNA, 25 bp, Saccharomyces pastorianus
cgtgaccgcgattacaatcaccgta

SEQ ID NO: 148170 - DNA, 25 bp, Saccharomyces pastorianus
gatcgtaacgatcgtgaccgcgatt

SEQ ID NO: 148171 - DNA, 25 bp, Saccharomyces pastorianus
gaaacaacatgaatcgtcgtggcgg

SEQ ID NO: 148172 - DNA, 25 bp, Saccharomyces pastorianus
gtaagtatggtaccgtcactgattt

SEQ ID NO: 148173 - DNA, 25 bp, Saccharomyces pastorianus
ttgttggtggtattggtcctgatat

SEQ ID NO: 148174 - DNA, 25 bp, Saccharomyces pastorianus
aaatcatgaaagaccctgcaacagg

SEQ ID NO: 148175 - DNA, 25 bp, Saccharomyces pastorianus
cgctgacgccgttgacagagtttgt

SEQ ID NO: 148176 - DNA, 25 bp, Saccharomyces pastorianus
tcgacccaaaaagagctatcccaag

SEQ ID NO: 148177 - DNA, 25 bp, Saccharomyces pastorianus
gaacgttcgaaagcagatttgtcta

SEQ ID NO: 148178 - DNA, 25 bp, Saccharomyces pastorianus
ttggtggtctgaattgggacactac

SEQ ID NO: 148179 - DNA, 25 bp, Saccharomyces pastorianus
gtacgattatcgatgctcaactgat

SEQ ID NO: 148180 - DNA, 25 bp, Saccharomyces pastorianus
gatctagagggttcggtttcttatc

SEQ ID NO: 148181 - DNA, 25 bp, Saccharomyces pastorianus
ttttgtgacgtatgactccgctgac

SEQ ID NO: 148182 - DNA, 25 bp, Saccharomyces pastorianus
aattggattatcactgttattgcta

SEQ ID NO: 148183 - DNA, 25 bp, Saccharomyces pastorianus
aaataacaacgatagacctgcaggt

SEQ ID NO: 148184 - DNA, 25 bp, Saccharomyces pastorianus
ctttactgaacgtttatgccattgt

SEQ ID NO: 148185 - DNA, 25 bp, Saccharomyces pastorianus
agatggttctagtggcatggagata

SEQ ID NO: 148186 - DNA, 25 bp, Saccharomyces pastorianus
accgaaattaccgtcgaccatactg

SEQ ID NO: 148187 - DNA, 25 bp, Saccharomyces pastorianus
ttgctataattgtgtggcttttctt

SEQ ID NO: 148188 - DNA, 25 bp, Saccharomyces pastorianus
gtgtggcttttcttatctttactga

SEQ ID NO: 148189 - DNA, 25 bp, Saccharomyces pastorianus
taccgtcgaccatactgaagaagat

SEQ ID NO: 148190 - DNA, 25 bp, Saccharomyces pastorianus
gaagaagatagccataaccatcaaa

SEQ ID NO: 148191 - DNA, 25 bp, Saccharomyces pastorianus
agcgtaatccagcaagatggttcta

SEQ ID NO: 148192 - DNA, 25 bp, Saccharomyces pastorianus
gacctgcaggtagcgtaatccagca

SEQ ID NO: 148193 - DNA, 25 bp, Saccharomyces pastorianus
aattaagcataactctcttcaccct

SEQ ID NO: 148194 - DNA, 25 bp, Saccharomyces pastorianus
tagcgcttttcgtcaattgtgccat

SEQ ID NO: 148195 - DNA, 25 bp, Saccharomyces pastorianus
agaggatttgttccatctgcccaaa

SEQ ID NO: 148196 - DNA, 25 bp, Saccharomyces pastorianus
aggtacaattttcatgctcgcactt

SEQ ID NO: 148197 - DNA, 25 bp, Saccharomyces pastorianus
tatcccgaagagtacgtccgtcaaa

SEQ ID NO: 148198 - DNA, 25 bp, Saccharomyces pastorianus
tttgggttccgcattagtgcagcca

SEQ ID NO: 148199 - DNA, 25 bp, Saccharomyces pastorianus
ataccgctatttccatcttaggtgc

SEQ ID NO: 148200 - DNA, 25 bp, Saccharomyces pastorianus
ggtgctactgttatgccacattcgt

SEQ ID NO: 148201 - DNA, 25 bp, Saccharomyces pastorianus
taattatagacccacgaacgctgct

SEQ ID NO: 148202 - DNA, 25 bp, Saccharomyces pastorianus
attgtgccatcctagttgttgcagg

SEQ ID NO: 148203 - DNA, 25 bp, Saccharomyces pastorianus
attaagtggtcaatccgcaggtgta

SEQ ID NO: 148204 - DNA, 25 bp, Saccharomyces pastorianus
tagaccatacaaacacattgacgct

SEQ ID NO: 148205 - DNA, 25 bp, Saccharomyces pastorianus
tacaaacacattgacgcttccggtt

SEQ ID NO: 148206 - DNA, 25 bp, Saccharomyces pastorianus
ccaccacaagatgccgaaggttggt

SEQ ID NO: 148207 - DNA, 25 bp, Saccharomyces pastorianus
ttagaccatacaaacacattgacgc

SEQ ID NO: 148208 - DNA, 25 bp, Saccharomyces pastorianus
acgcttccggttctatcaacagaaa

SEQ ID NO: 148209 - DNA, 25 bp, Saccharomyces pastorianus
aacacattgacgcttccggttctat

SEQ ID NO: 148210 - DNA, 25 bp, Saccharomyces pastorianus
gattggtatcgtcgaaatctctcca

SEQ ID NO: 148211 - DNA, 25 bp, Saccharomyces pastorianus
acaagatgccgaaggttggttctac

SEQ ID NO: 148212 - DNA, 25 bp, Saccharomyces pastorianus
ctatcaacagaaaggttttgcaagc

SEQ ID NO: 148213 - DNA, 25 bp, Saccharomyces pastorianus
gttagaccatacaaacacattgacg

SEQ ID NO: 148214 - DNA, 25 bp, Saccharomyces pastorianus
tgcctctgttgccagacacatttac

SEQ ID NO: 148215 - DNA, 25 bp, Saccharomyces pastorianus
ggtaaggctccaagaatcttgtcca

SEQ ID NO: 148216 - DNA, 25 bp, Saccharomyces pastorianus
aggctccaagaatcttgtccaccgg

SEQ ID NO: 148217 - DNA, 25 bp, Saccharomyces pastorianus
gggtaaggctccaagaatcttgtcc

SEQ ID NO: 148218 - DNA, 25 bp, Saccharomyces pastorianus
gctccaagaatcttgtccaccggta

SEQ ID NO: 148219 - DNA, 25 bp, Saccharomyces pastorianus
gtaaggctccaagaatcttgtccac

SEQ ID NO: 148220 - DNA, 25 bp, Saccharomyces pastorianus
agggtaaggctccaagaatcttgtc

SEQ ID NO: 148221 - DNA, 25 bp, Saccharomyces pastorianus
aaggctccaagaatcttgtccaccg

SEQ ID NO: 148222 - DNA, 25 bp, Saccharomyces pastorianus
aagggtaaggctccaagaatcttgt

SEQ ID NO: 148223 - DNA, 25 bp, Saccharomyces pastorianus
ctccaagaatcttgtccaccggtag

SEQ ID NO: 148224 - DNA, 25 bp, Saccharomyces pastorianus
ggctccaagaatcttgtccaccggt

SEQ ID NO: 148225 - DNA, 25 bp, Saccharomyces pastorianus
aagaatcttgtccaccggtagaaag

SEQ ID NO: 148226 - DNA, 25 bp, Saccharomyces pastorianus
aggtgcggcatgttatataatatca

SEQ ID NO: 148227 - DNA, 25 bp, Saccharomyces pastorianus
cggcatgttatataatatcaaggca

SEQ ID NO: 148228 - DNA, 25 bp, Saccharomyces pastorianus
ggtgcggcatgttatataatatcaa

SEQ ID NO: 148229 - DNA, 25 bp, Saccharomyces pastorianus
gcatgttatataatatcaaggcata

SEQ ID NO: 148230 - DNA, 25 bp, Saccharomyces pastorianus
ggcaggtgcggcatgttatataata

SEQ ID NO: 148231 - DNA, 25 bp, Saccharomyces pastorianus
gcaggtgcggcatgttatataatat

SEQ ID NO: 148232 - DNA, 25 bp, Saccharomyces pastorianus
gtgcggcatgttatataatatcaag

SEQ ID NO: 148233 - DNA, 25 bp, Saccharomyces pastorianus
gcggcatgttatataatatcaaggc

SEQ ID NO: 148234 - DNA, 25 bp, Saccharomyces pastorianus
ggcatgttatataatatcaaggcat

SEQ ID NO: 148235 - DNA, 25 bp, Saccharomyces pastorianus
caggtgcggcatgttatataatatc

SEQ ID NO: 148236 - DNA, 25 bp, Saccharomyces pastorianus
cggcaggtgcggcatgttatataat

SEQ ID NO: 148237 - DNA, 25 bp, Saccharomyces pastorianus
taattttgtcatgtggctgccattt

SEQ ID NO: 148238 - DNA, 25 bp, Saccharomyces pastorianus
tactttgggcgtacgtttgtttgtg

SEQ ID NO: 148239 - DNA, 25 bp, Saccharomyces pastorianus
gacacccgtttgcatcgggcagata

SEQ ID NO: 148240 - DNA, 25 bp, Saccharomyces pastorianus
gttttcgacgggttctatcctatca

SEQ ID NO: 148241 - DNA, 25 bp, Saccharomyces pastorianus
ggcgcttcttttgcagaaagctccc

SEQ ID NO: 148242 - DNA, 25 bp, Saccharomyces pastorianus
cagtcgttcaaccattcaaatccaa

SEQ ID NO: 148243 - DNA, 25 bp, Saccharomyces pastorianus
cactgcttcgaatgctgttggtata

SEQ ID NO: 148244 - DNA, 25 bp, Saccharomyces pastorianus
gtatataccaggctattttgcggat

SEQ ID NO: 148245 - DNA, 25 bp, Saccharomyces pastorianus
aatggctgccttatttaattttgtc

SEQ ID NO: 148246 - DNA, 25 bp, Saccharomyces pastorianus
taacatgcctcatttgtgcttcagt

SEQ ID NO: 148247 - DNA, 25 bp, Saccharomyces pastorianus
aattcttgttcgtcgcaataggcgc

SEQ ID NO: 148248 - DNA, 25 bp, Saccharomyces pastorianus
tttcgagaacgatcaggctgcggtt

SEQ ID NO: 148249 - DNA, 25 bp, Saccharomyces pastorianus
gaacccgaagccgagaaatccacta

SEQ ID NO: 148250 - DNA, 25 bp, Saccharomyces pastorianus
gagcatgatattcagcccatcagat

SEQ ID NO: 148251 - DNA, 25 bp, Saccharomyces pastorianus
agaaaattcaagctcccagttctcc

SEQ ID NO: 148252 - DNA, 25 bp, Saccharomyces pastorianus
taagccgaatccgactatatctaag

SEQ ID NO: 148253 - DNA, 25 bp, Saccharomyces pastorianus
tgaagggcaaagtcctccacgataa

SEQ ID NO: 148254 - DNA, 25 bp, Saccharomyces pastorianus
ggatttgaaggtcacgcctgccaat

SEQ ID NO: 148255 - DNA, 25 bp, Saccharomyces pastorianus
gggatgacatcgaggctcttctgaa

SEQ ID NO: 148256 - DNA, 25 bp, Saccharomyces pastorianus
gaaaaggcctcccacataagcgaga

SEQ ID NO: 148257 - DNA, 25 bp, Saccharomyces pastorianus
aggacctcactgtgccctgggatga

SEQ ID NO: 148258 - DNA, 25 bp, Saccharomyces pastorianus
tgccaattccacaatcacagtcatg

SEQ ID NO: 148259 - DNA, 25 bp, Saccharomyces pastorianus
gagttcgttagtaaattcttgacct

SEQ ID NO: 148260 - DNA, 25 bp, Saccharomyces pastorianus
acctctgaaagatgttaccaattct

SEQ ID NO: 148261 - DNA, 25 bp, Saccharomyces pastorianus
agtaaattcttgaccttagccactt

SEQ ID NO: 148262 - DNA, 25 bp, Saccharomyces pastorianus
aaaagctatactaaacctctgaaag

SEQ ID NO: 148263 - DNA, 25 bp, Saccharomyces pastorianus
ttagccactttaactgaaccgaagc

SEQ ID NO: 148264 - DNA, 25 bp, Saccharomyces pastorianus
gttagtaaattcttgaccttagcca

SEQ ID NO: 148265 - DNA, 25 bp, Saccharomyces pastorianus
taactgaaccgaagctaccaaaaag

SEQ ID NO: 148266 - DNA, 25 bp, Saccharomyces pastorianus
gaccttagccactttaactgaaccg

SEQ ID NO: 148267 - DNA, 25 bp, Saccharomyces pastorianus
gccactttaactgaaccgaagctac

SEQ ID NO: 148268 - DNA, 25 bp, Saccharomyces pastorianus
gaaccgaagctaccaaaaagctata

SEQ ID NO: 148269 - DNA, 25 bp, Saccharomyces pastorianus
gctatactaaacctctgaaagatgt

SEQ ID NO: 148270 - DNA, 25 bp, Saccharomyces pastorianus
atctatatttctatgtaccaatatt

SEQ ID NO: 148271 - DNA, 25 bp, Saccharomyces pastorianus
tatatttctatgtaccaatattacg

SEQ ID NO: 148272 - DNA, 25 bp, Saccharomyces pastorianus
acagcttctataataacttatgtca

SEQ ID NO: 148273 - DNA, 25 bp, Saccharomyces pastorianus
cggtgacagcttctataataactta

SEQ ID NO: 148274 - DNA, 25 bp, Saccharomyces pastorianus
ttcggtgacagcttctataataact

SEQ ID NO: 148275 - DNA, 25 bp, Saccharomyces pastorianus
gtgacagcttctataataacttatg

SEQ ID NO: 148276 - DNA, 25 bp, Saccharomyces pastorianus
tgacagcttctataataacttatgt

SEQ ID NO: 148277 - DNA, 25 bp, Saccharomyces pastorianus
gacagcttctataataacttatgtc

SEQ ID NO: 148278 - DNA, 25 bp, Saccharomyces pastorianus
cagcttctataataacttatgtcac

SEQ ID NO: 148279 - DNA, 25 bp, Saccharomyces pastorianus
tcggtgacagcttctataataactt

SEQ ID NO: 148280 - DNA, 25 bp, Saccharomyces pastorianus
ggtgacagcttctataataacttat

SEQ ID NO: 148281 - DNA, 25 bp, Saccharomyces pastorianus
atgtttttcactttttcggcgatat

SEQ ID NO: 148282 - DNA, 25 bp, Saccharomyces pastorianus
acggtccatcagaacattccgaatg

SEQ ID NO: 148283 - DNA, 25 bp, Saccharomyces pastorianus
gagcttattttacatgacctgttgg

SEQ ID NO: 148284 - DNA, 25 bp, Saccharomyces pastorianus
ttgagtctcttggacgttttcagaa

SEQ ID NO: 148285 - DNA, 25 bp, Saccharomyces pastorianus
ggtattttacattccaaccttcata

SEQ ID NO: 148286 - DNA, 25 bp, Saccharomyces pastorianus
aattaactcagccaaatgccacggt

SEQ ID NO: 148287 - DNA, 25 bp, Saccharomyces pastorianus
ttccgaatgttctcagggaactcgt

SEQ ID NO: 148288 - DNA, 25 bp, Saccharomyces pastorianus
ttacgctaactggtcaaaactcatt

SEQ ID NO: 148289 - DNA, 25 bp, Saccharomyces pastorianus
aggccagcacatctcttggtattgg

SEQ ID NO: 148290 - DNA, 25 bp, Saccharomyces pastorianus
atacctagaatttgttcctttgaca

SEQ ID NO: 148291 - DNA, 25 bp, Saccharomyces pastorianus
gtgaaatcctttgtcaggccagcac

SEQ ID NO: 148292 - DNA, 25 bp, Saccharomyces pastorianus
tatattttcatcgactgccattctc

SEQ ID NO: 148293 - DNA, 25 bp, Saccharomyces pastorianus
tgaagcgtcgcagttaccacaggaa

SEQ ID NO: 148294 - DNA, 25 bp, Saccharomyces pastorianus
aaatcatgtccatttatcgccaggg

SEQ ID NO: 148295 - DNA, 25 bp, Saccharomyces pastorianus
gaggttctcgtaccaattactgaag

SEQ ID NO: 148296 - DNA, 25 bp, Saccharomyces pastorianus
ttaagcagcagtattcccgttgaat

SEQ ID NO: 148297 - DNA, 25 bp, Saccharomyces pastorianus
aatcgattcagccatcagatgaggt

SEQ ID NO: 148298 - DNA, 25 bp, Saccharomyces pastorianus
gaaaatgttcaggtcgctcaataat

SEQ ID NO: 148299 - DNA, 25 bp, Saccharomyces pastorianus
tatcgccagggatgttgcacgcgaa

SEQ ID NO: 148300 - DNA, 25 bp, Saccharomyces pastorianus
ggatctgtgctactcagggacattc

SEQ ID NO: 148301 - DNA, 25 bp, Saccharomyces pastorianus
tgccattctccattattctttcata

SEQ ID NO: 148302 - DNA, 25 bp, Saccharomyces pastorianus
gaatccggagcaatatcaccaatga

SEQ ID NO: 148303 - DNA, 25 bp, Saccharomyces pastorianus
tactccttgtatctaatattctgac

SEQ ID NO: 148304 - DNA, 25 bp, Saccharomyces pastorianus
aatccaatcagaattccagcactcc

SEQ ID NO: 148305 - DNA, 25 bp, Saccharomyces pastorianus
attctgacatgttatcggttcttac

SEQ ID NO: 148306 - DNA, 25 bp, Saccharomyces pastorianus
atcggttcttactgccaagtgatac

SEQ ID NO: 148307 - DNA, 25 bp, Saccharomyces pastorianus
actgttgattgagtgtcatggttca

SEQ ID NO: 148308 - DNA, 25 bp, Saccharomyces pastorianus
gaaccatgtgtcttcttctgacgag

SEQ ID NO: 148309 - DNA, 25 bp, Saccharomyces pastorianus
gaattccagcactccgtataaacaa

SEQ ID NO: 148310 - DNA, 25 bp, Saccharomyces pastorianus
gagcctccagcggagtactcgaaaa

SEQ ID NO: 148311 - DNA, 25 bp, Saccharomyces pastorianus
gaataattcactttcgaaccatgtg

SEQ ID NO: 148312 - DNA, 25 bp, Saccharomyces pastorianus
tggttcatattctctactccttgta

SEQ ID NO: 148313 - DNA, 25 bp, Saccharomyces pastorianus
tactgaattgaatacctctacgaaa

SEQ ID NO: 148314 - DNA, 25 bp, Saccharomyces pastorianus
aacaatgacagttacctcgcgtagt

SEQ ID NO: 148315 - DNA, 25 bp, Saccharomyces pastorianus
acctcgcgtagttctgaagactcta

SEQ ID NO: 148316 - DNA, 25 bp, Saccharomyces pastorianus
gatacacataaggacggcgacacaa

SEQ ID NO: 148317 - DNA, 25 bp, Saccharomyces pastorianus
gaagactctagttgtatctcaaatc

SEQ ID NO: 148318 - DNA, 25 bp, Saccharomyces pastorianus
gaaaagtaaccagagcctcgtttca

SEQ ID NO: 148319 - DNA, 25 bp, Saccharomyces pastorianus
acgttcttctacaacatctcagaca

SEQ ID NO: 148320 - DNA, 25 bp, Saccharomyces pastorianus
tttcaaactttccaaatctccagct

SEQ ID NO: 148321 - DNA, 25 bp, Saccharomyces pastorianus
aatgattactcttctatctgtggta

SEQ ID NO: 148322 - DNA, 25 bp, Saccharomyces pastorianus
tgtggtaacagccttccatctgcag

SEQ ID NO: 148323 - DNA, 25 bp, Saccharomyces pastorianus
catctgcaggcttgagtcgttcgaa

SEQ ID NO: 148324 - DNA, 25 bp, Saccharomyces pastorianus
gttgccatattagcacgttcttcta

SEQ ID NO: 148325 - DNA, 25 bp, Saccharomyces pastorianus
tcatgccatggtcttctgttggtgg

SEQ ID NO: 148326 - DNA, 25 bp, Saccharomyces pastorianus
aatctcagggtgacatagttctaga

SEQ ID NO: 148327 - DNA, 25 bp, Saccharomyces pastorianus
ggtaatgaagccgtttccccatcaa

SEQ ID NO: 148328 - DNA, 25 bp, Saccharomyces pastorianus
acctagtctttggttggatctacta

SEQ ID NO: 148329 - DNA, 25 bp, Saccharomyces pastorianus
gatagtagcgatagcagccttggaa

SEQ ID NO: 148330 - DNA, 25 bp, Saccharomyces pastorianus
ctctgaggcgaatgtcaagctggtt

SEQ ID NO: 148331 - DNA, 25 bp, Saccharomyces pastorianus
accagcgagcaggagttaaacccca

SEQ ID NO: 148332 - DNA, 25 bp, Saccharomyces pastorianus
tatgctaaagtttggccgtccgaag

SEQ ID NO: 148333 - DNA, 25 bp, Saccharomyces pastorianus
aaattaaactttacgtcgctgacag

SEQ ID NO: 148334 - DNA, 25 bp, Saccharomyces pastorianus
taaaccccacagatttaccgagaat

SEQ ID NO: 148335 - DNA, 25 bp, Saccharomyces pastorianus
gccctactggtttgcaaaagcctta

SEQ ID NO: 148336 - DNA, 25 bp, Saccharomyces pastorianus
ggattcttccatatggtgtgtccaa

SEQ ID NO: 148337 - DNA, 25 bp, Saccharomyces pastorianus
gggatatcgtttcatgtgagctttt

SEQ ID NO: 148338 - DNA, 25 bp, Saccharomyces pastorianus
gaagctcactgctaaccaacaggag

SEQ ID NO: 148339 - DNA, 25 bp, Saccharomyces pastorianus
gttaaggtcggtatgctgttcgtaa

SEQ ID NO: 148340 - DNA, 25 bp, Saccharomyces pastorianus
aaactgaaatttatggatccgcgct

SEQ ID NO: 148341 - DNA, 25 bp, Saccharomyces pastorianus
gtggtatccttgatattgccctttt

SEQ ID NO: 148342 - DNA, 25 bp, Saccharomyces pastorianus
gaattttcaagcctgatcatcacca

SEQ ID NO: 148343 - DNA, 25 bp, Saccharomyces pastorianus
gtattttggtgactctcagggcaat

SEQ ID NO: 148344 - DNA, 25 bp, Saccharomyces pastorianus
ggaaattctatctcattggtgtact

SEQ ID NO: 148345 - DNA, 25 bp, Saccharomyces pastorianus
ctcattggtgtactgtttccgttaa

SEQ ID NO: 148346 - DNA, 25 bp, Saccharomyces pastorianus
aggtgggttcgcactgaccagaagc

SEQ ID NO: 148347 - DNA, 25 bp, Saccharomyces pastorianus
aagatcccattgtgtggtgctgtaa

SEQ ID NO: 148348 - DNA, 25 bp, Saccharomyces pastorianus
acgaatctacttttgttccagaggg

SEQ ID NO: 148349 - DNA, 25 bp, Saccharomyces pastorianus
aaggtgccgtgccagtaaacgctga

SEQ ID NO: 148350 - DNA, 25 bp, Saccharomyces pastorianus
gaatatttgagctctgcctataccg

SEQ ID NO: 148351 - DNA, 25 bp, Saccharomyces pastorianus
gacgcgggagtcatttacagtgatc

SEQ ID NO: 148352 - DNA, 25 bp, Saccharomyces pastorianus
gaattctgcaattcttcaacccaag

SEQ ID NO: 148353 - DNA, 25 bp, Saccharomyces pastorianus
gtcaggatgagattcccacttgttt

SEQ ID NO: 148354 - DNA, 25 bp, Saccharomyces pastorianus
gcctataccgatccatgtgtcagag

SEQ ID NO: 148355 - DNA, 25 bp, Saccharomyces pastorianus
gcaagtttcactacagcgatgttga

SEQ ID NO: 148356 - DNA, 25 bp, Saccharomyces pastorianus
cagtgatccggcagctgtcatgaaa

SEQ ID NO: 148357 - DNA, 25 bp, Saccharomyces pastorianus
caggcatttcctccggatgttgtgg

SEQ ID NO: 148358 - DNA, 25 bp, Saccharomyces pastorianus
atgacggactgctgtcttctaggac

SEQ ID NO: 148359 - DNA, 25 bp, Saccharomyces pastorianus
tcgtggatcttttttggcctgttca

SEQ ID NO: 148360 - DNA, 25 bp, Saccharomyces pastorianus
ggcctgttcatctatgtcatctaca

SEQ ID NO: 148361 - DNA, 25 bp, Saccharomyces pastorianus
cagcgttcatttcaaccctgattat

SEQ ID NO: 148362 - DNA, 25 bp, Saccharomyces pastorianus
tacgagccacggtctcttaaggaca

SEQ ID NO: 148363 - DNA, 25 bp, Saccharomyces pastorianus
acagttcttcgacttcagcgttcat

SEQ ID NO: 148364 - DNA, 25 bp, Saccharomyces pastorianus
ctttttgctattgcggcccaagaat

SEQ ID NO: 148365 - DNA, 25 bp, Saccharomyces pastorianus
tgaatatctactctcgaaaccgcac

SEQ ID NO: 148366 - DNA, 25 bp, Saccharomyces pastorianus
tgggctgtttgcttcttttaccgat

SEQ ID NO: 148367 - DNA, 25 bp, Saccharomyces pastorianus
gcgtggacggctattttctgttaag

SEQ ID NO: 148368 - DNA, 25 bp, Saccharomyces pastorianus
ttttaccgatattgcttcccgtgaa

SEQ ID NO: 148369 - DNA, 25 bp, Saccharomyces pastorianus
gttccacttgctttcgatattttaa

SEQ ID NO: 148370 - DNA, 25 bp, Saccharomyces pastorianus
gtgcattgcgtttttacagtgttat

SEQ ID NO: 148371 - DNA, 25 bp, Saccharomyces pastorianus
gaatccattgaacgtctgaccaaaa

SEQ ID NO: 148372 - DNA, 25 bp, Saccharomyces pastorianus
aaagaaacccatttgtgcattgcgt

SEQ ID NO: 148373 - DNA, 25 bp, Saccharomyces pastorianus
gaggtttatcaattgtgacttcttc

SEQ ID NO: 148374 - DNA, 25 bp, Saccharomyces pastorianus
aatgcaaacattaccctctatcaag

SEQ ID NO: 148375 - DNA, 25 bp, Saccharomyces pastorianus
atcaaggtgcttttctgttcaaatg

SEQ ID NO: 148376 - DNA, 25 bp, Saccharomyces pastorianus
gtgacttcttctggtatatttgcga

SEQ ID NO: 148377 - DNA, 25 bp, Saccharomyces pastorianus
aaacttcggattgtgttccacttgc

SEQ ID NO: 148378 - DNA, 25 bp, Saccharomyces pastorianus
gacgcattcagagtctaattcctta

SEQ ID NO: 148379 - DNA, 25 bp, Saccharomyces pastorianus
gaattccgacatgatgataccgtta

SEQ ID NO: 148380 - DNA, 25 bp, Saccharomyces pastorianus
gagtacgatggagcacacgcctgac

SEQ ID NO: 148381 - DNA, 25 bp, Saccharomyces pastorianus
ggcaaagcagcattcgtcatcaagt

SEQ ID NO: 148382 - DNA, 25 bp, Saccharomyces pastorianus
gagtgtactgagatcgtgacgcgat

SEQ ID NO: 148383 - DNA, 25 bp, Saccharomyces pastorianus
acacgcctgacactccaaatggagt

SEQ ID NO: 148384 - DNA, 25 bp, Saccharomyces pastorianus
tagtggaagtgtttcaacggctggc

SEQ ID NO: 148385 - DNA, 25 bp, Saccharomyces pastorianus
gcatgggacactgcagtttcataat

SEQ ID NO: 148386 - DNA, 25 bp, Saccharomyces pastorianus
gctgccattcctgaaaacacgaaag

SEQ ID NO: 148387 - DNA, 25 bp, Saccharomyces pastorianus
aaatcctctttgcatgggacactgc

SEQ ID NO: 148388 - DNA, 25 bp, Saccharomyces pastorianus
aagatctttttaccggagcgtatca

SEQ ID NO: 148389 - DNA, 25 bp, Saccharomyces pastorianus
aagcagtttcaggtcaagagtgtac

SEQ ID NO: 148390 - DNA, 25 bp, Saccharomyces pastorianus
cccggagggacgtatacattggcat

SEQ ID NO: 148391 - DNA, 25 bp, Saccharomyces pastorianus
tgttgcctgaactagagtctccacc

SEQ ID NO: 148392 - DNA, 25 bp, Saccharomyces pastorianus
tatatgaactcagacggcgtaagcc

SEQ ID NO: 148393 - DNA, 25 bp, Saccharomyces pastorianus
gcgtaagcctgttgcctgaactaga

SEQ ID NO: 148394 - DNA, 25 bp, Saccharomyces pastorianus
gcagtgcttagattcttctatccgt

SEQ ID NO: 148395 - DNA, 25 bp, Saccharomyces pastorianus
gagtgtgtccggagaaagaccaaat

SEQ ID NO: 148396 - DNA, 25 bp, Saccharomyces pastorianus
actgcgggctcagtttctacgagtg

SEQ ID NO: 148397 - DNA, 25 bp, Saccharomyces pastorianus
gatgaattcaacacagagcagtgct

SEQ ID NO: 148398 - DNA, 25 bp, Saccharomyces pastorianus
cagtttctacgagtgtgtccggaga

SEQ ID NO: 148399 - DNA, 25 bp, Saccharomyces pastorianus
gagtctccaccggtatctaaggatt

SEQ ID NO: 148400 - DNA, 25 bp, Saccharomyces pastorianus
aaaccgtacatacccgtagatgaat

SEQ ID NO: 148401 - DNA, 25 bp, Saccharomyces pastorianus
gacggtattaaatgaactgcgggct

SEQ ID NO: 148402 - DNA, 25 bp, Saccharomyces pastorianus
ggcaaccttaaaaacactagacagt

SEQ ID NO: 148403 - DNA, 25 bp, Saccharomyces pastorianus
actaatcaaaaactccctgaaggag

SEQ ID NO: 148404 - DNA, 25 bp, Saccharomyces pastorianus
aaacggaacaaataagtgcgctctt

SEQ ID NO: 148405 - DNA, 25 bp, Saccharomyces pastorianus
aactggatggtatcccatacttacc

SEQ ID NO: 148406 - DNA, 25 bp, Saccharomyces pastorianus
atagagacttttccatattagatga

SEQ ID NO: 148407 - DNA, 25 bp, Saccharomyces pastorianus
aaacttccatcaactaaccttgaag

SEQ ID NO: 148408 - DNA, 25 bp, Saccharomyces pastorianus
tatcccatacttacctcactaaaat

SEQ ID NO: 148409 - DNA, 25 bp, Saccharomyces pastorianus
ttctaggttgatgaaagtcccaata

SEQ ID NO: 148410 - DNA, 25 bp, Saccharomyces pastorianus
gtggagtcagcgtcatttctgattt

SEQ ID NO: 148411 - DNA, 25 bp, Saccharomyces pastorianus
gaacttattattgaagctttgccaa

SEQ ID NO: 148412 - DNA, 25 bp, Saccharomyces pastorianus
ttacctcactaaaatggcaacctta

SEQ ID NO: 148413 - DNA, 25 bp, Saccharomyces pastorianus
ctggcaagttcgactacaataagct

SEQ ID NO: 148414 - DNA, 25 bp, Saccharomyces pastorianus
ttagacttgaaaccattccaaaatg

SEQ ID NO: 148415 - DNA, 25 bp, Saccharomyces pastorianus
aaaattttgcttctccaggctagcg

SEQ ID NO: 148416 - DNA, 25 bp, Saccharomyces pastorianus
gatcccaagaaaattttgcttctcc

SEQ ID NO: 148417 - DNA, 25 bp, Saccharomyces pastorianus
aagaaaattttgcttctccaggcta

SEQ ID NO: 148418 - DNA, 25 bp, Saccharomyces pastorianus
gaaaattttgcttctccaggctagc

SEQ ID NO: 148419 - DNA, 25 bp, Saccharomyces pastorianus
acctggcaagttcgactacaataag

SEQ ID NO: 148420 - DNA, 25 bp, Saccharomyces pastorianus
aaattttgcttctccaggctagcgc

SEQ ID NO: 148421 - DNA, 25 bp, Saccharomyces pastorianus
tcagatcccaagaaaattttgcttc

SEQ ID NO: 148422 - DNA, 25 bp, Saccharomyces pastorianus
caagttcgactacaataagctgcta

SEQ ID NO: 148423 - DNA, 25 bp, Saccharomyces pastorianus
gacttgaaaccattccaaaatgttc

SEQ ID NO: 148424 - DNA, 25 bp, Saccharomyces pastorianus
acttgtgaatttgcgaatggccatg

SEQ ID NO: 148425 - DNA, 25 bp, Saccharomyces pastorianus
gtgcgtagccataatttatcgcctt

SEQ ID NO: 148426 - DNA, 25 bp, Saccharomyces pastorianus
aaaatccagacggtacttgtgaatt

SEQ ID NO: 148427 - DNA, 25 bp, Saccharomyces pastorianus
atgtcagggttaatgtcactaggca

SEQ ID NO: 148428 - DNA, 25 bp, Saccharomyces pastorianus
aattaacctgcgaagatggcgggaa

SEQ ID NO: 148429 - DNA, 25 bp, Saccharomyces pastorianus
aaggccaggctttgtcgttaactgc

SEQ ID NO: 148430 - DNA, 25 bp, Saccharomyces pastorianus
ggctttgtcgttaactgcatttcca

SEQ ID NO: 148431 - DNA, 25 bp, Saccharomyces pastorianus
tcatcattaatttcgcattcccaga

SEQ ID NO: 148432 - DNA, 25 bp, Saccharomyces pastorianus
gtagggtatacatctatgatcatca

SEQ ID NO: 148433 - DNA, 25 bp, Saccharomyces pastorianus
acctgggaatcattgtgtgcgtagc

SEQ ID NO: 148434 - DNA, 25 bp, Saccharomyces pastorianus
atggccatgatgtgttggtttctta

SEQ ID NO: 148435 - DNA, 25 bp, Saccharomyces pastorianus
gaacgctagctacgaagggagttat

SEQ ID NO: 148436 - DNA, 25 bp, Saccharomyces pastorianus
gaagatgtcctctagacttcggtaa

SEQ ID NO: 148437 - DNA, 25 bp, Saccharomyces pastorianus
tgtcctctagacttcggtaacggta

SEQ ID NO: 148438 - DNA, 25 bp, Saccharomyces pastorianus
agctacgaagggagttatagcgtca

SEQ ID NO: 148439 - DNA, 25 bp, Saccharomyces pastorianus
tatagcgtcaagtggccctcgcgag

SEQ ID NO: 148440 - DNA, 25 bp, Saccharomyces pastorianus
atccccgaagatgtcctctagactt

SEQ ID NO: 148441 - DNA, 25 bp, Saccharomyces pastorianus
ttcggtaacggtagaacgctagcta

SEQ ID NO: 148442 - DNA, 25 bp, Saccharomyces pastorianus
gtaacggtagaacgctagctacgaa

SEQ ID NO: 148443 - DNA, 25 bp, Saccharomyces pastorianus
gatgtcctctagacttcggtaacgg

SEQ ID NO: 148444 - DNA, 25 bp, Saccharomyces pastorianus
tagacttcggtaacggtagaacgct

SEQ ID NO: 148445 - DNA, 25 bp, Saccharomyces pastorianus
aggatccccgaagatgtcctctaga

SEQ ID NO: 148446 - DNA, 25 bp, Saccharomyces pastorianus
aattcccattattcgaggcagtcta

SEQ ID NO: 148447 - DNA, 25 bp, Saccharomyces pastorianus
gaagttcacgagtggctacgaacat

SEQ ID NO: 148448 - DNA, 25 bp, Saccharomyces pastorianus
agttgacccaagaattcccattatt

SEQ ID NO: 148449 - DNA, 25 bp, Saccharomyces pastorianus
gggtaacaatgcctccgcagccatt

SEQ ID NO: 148450 - DNA, 25 bp, Saccharomyces pastorianus
gaccggtaagtcagccttggaagca

SEQ ID NO: 148451 - DNA, 25 bp, Saccharomyces pastorianus
gtttttcccagaatccaaagtcgag

SEQ ID NO: 148452 - DNA, 25 bp, Saccharomyces pastorianus
ttaacggtcaatccgcccaagggat

SEQ ID NO: 148453 - DNA, 25 bp, Saccharomyces pastorianus
gaggcagtctaccagatagtctaca

SEQ ID NO: 148454 - DNA, 25 bp, Saccharomyces pastorianus
gctacgaacatgtgagttgacccaa

SEQ ID NO: 148455 - DNA, 25 bp, Saccharomyces pastorianus
aaacgtcaaggttgccacatacatg

SEQ ID NO: 148456 - DNA, 25 bp, Saccharomyces pastorianus
atccgctggtgttgcagatctgatc

SEQ ID NO: 148457 - DNA, 25 bp, Saccharomyces pastorianus
tgccatccaggccattagaattaaa

SEQ ID NO: 148458 - DNA, 25 bp, Saccharomyces pastorianus
tgagttgaccggattcttacctacc

SEQ ID NO: 148459 - DNA, 25 bp, Saccharomyces pastorianus
ataccaccggtttcattgccatcca

SEQ ID NO: 148460 - DNA, 25 bp, Saccharomyces pastorianus
atccaaccatcccaaaatagcgtta

SEQ ID NO: 148461 - DNA, 25 bp, Saccharomyces pastorianus
aagggtaacgtcatcattctgggca

SEQ ID NO: 148462 - DNA, 25 bp, Saccharomyces pastorianus
cattctgggcagatctacaaagact

SEQ ID NO: 148463 - DNA, 25 bp, Saccharomyces pastorianus
ggtactgtcagggttagactgtata

SEQ ID NO: 148464 - DNA, 25 bp, Saccharomyces pastorianus
atcctctatggatgagttgaccgga

SEQ ID NO: 148465 - DNA, 25 bp, Saccharomyces pastorianus
gtatgatccaacagaatcctctatg

SEQ ID NO: 148466 - DNA, 25 bp, Saccharomyces pastorianus
atagcgttaacggtactgtcagggt

SEQ ID NO: 148467 - DNA, 25 bp, Saccharomyces pastorianus
gattcttacctaccgataccaccgg

SEQ ID NO: 148468 - DNA, 25 bp, Saccharomyces pastorianus
attctatttccagctgtacaggtca

SEQ ID NO: 148469 - DNA, 25 bp, Saccharomyces pastorianus
gaacgtggtcttccagtccagttga

SEQ ID NO: 148470 - DNA, 25 bp, Saccharomyces pastorianus
cctttggatgttttcttggccgcat

SEQ ID NO: 148471 - DNA, 25 bp, Saccharomyces pastorianus
gggtacctctttggcaagacctgtt

SEQ ID NO: 148472 - DNA, 25 bp, Saccharomyces pastorianus
gacgtttatctgttgggtacctctt

SEQ ID NO: 148473 - DNA, 25 bp, Saccharomyces pastorianus
acaggagggctgtttcgcggtctct

SEQ ID NO: 148474 - DNA, 25 bp, Saccharomyces pastorianus
ggtctctcatggttgtaccggtaaa

SEQ ID NO: 148475 - DNA, 25 bp, Saccharomyces pastorianus
aaccaagcccacatttcttacgagg

SEQ ID NO: 148476 - DNA, 25 bp, Saccharomyces pastorianus
aagacctgttattgccaaagcccaa

SEQ ID NO: 148477 - DNA, 25 bp, Saccharomyces pastorianus
gtttccgttaccaagcctttggatg

SEQ ID NO: 148478 - DNA, 25 bp, Saccharomyces pastorianus
gaattgtcattttacgctctgaagc

SEQ ID NO: 148479 - DNA, 25 bp, Saccharomyces pastorianus
tgtccactttggttcattcatcatc

SEQ ID NO: 148480 - DNA, 25 bp, Saccharomyces pastorianus
ttctcctgatgacccattcatgaca

SEQ ID NO: 148481 - DNA, 25 bp, Saccharomyces pastorianus
aagcccgcaagattcgatagcctcg

SEQ ID NO: 148482 - DNA, 25 bp, Saccharomyces pastorianus
tgatcacatcaacggctctggcaaa

SEQ ID NO: 148483 - DNA, 25 bp, Saccharomyces pastorianus
ggtcgtattcgatagcgttgtccaa

SEQ ID NO: 148484 - DNA, 25 bp, Saccharomyces pastorianus
atgcactatcccaaaggctgtggtt

SEQ ID NO: 148485 - DNA, 25 bp, Saccharomyces pastorianus
cgttgtccaatgtagctgctatatt

SEQ ID NO: 148486 - DNA, 25 bp, Saccharomyces pastorianus
gagatgcttacgtcatgcactatcc

SEQ ID NO: 148487 - DNA, 25 bp, Saccharomyces pastorianus
agggctcgcgatcaagattccattg

SEQ ID NO: 148488 - DNA, 25 bp, Saccharomyces pastorianus
tcgccgtccacatcttctaatatgg

SEQ ID NO: 148489 - DNA, 25 bp, Saccharomyces pastorianus
tacgctgggtgattgcttaggtatc

SEQ ID NO: 148490 - DNA, 25 bp, Saccharomyces pastorianus
aaggtcacatcgtttgggtggcctc

SEQ ID NO: 148491 - DNA, 25 bp, Saccharomyces pastorianus
taccgatttcgttcttttcacacgt

SEQ ID NO: 148492 - DNA, 25 bp, Saccharomyces pastorianus
cgcagtaggtgcttcgctttggata

SEQ ID NO: 148493 - DNA, 25 bp, Saccharomyces pastorianus
acgataattttcacgccctttgtct

SEQ ID NO: 148494 - DNA, 25 bp, Saccharomyces pastorianus
ttctggtacatcttcatagccttta

SEQ ID NO: 148495 - DNA, 25 bp, Saccharomyces pastorianus
aagtggctcctttactcgatatcca

SEQ ID NO: 148496 - DNA, 25 bp, Saccharomyces pastorianus
gacgtgctacatttggattcgcgca

SEQ ID NO: 148497 - DNA, 25 bp, Saccharomyces pastorianus
ttttgagccctattttgttgacgtg

SEQ ID NO: 148498 - DNA, 25 bp, Saccharomyces pastorianus
attagagtctattcccattctgggt

SEQ ID NO: 148499 - DNA, 25 bp, Saccharomyces pastorianus
aatatgctaccatttagccccggaa

SEQ ID NO: 148500 - DNA, 25 bp, Saccharomyces pastorianus
gtttcttttattgttgctcgttcca

SEQ ID NO: 148501 - DNA, 25 bp, Saccharomyces pastorianus
agaatgctatgcttgttaaagacaa

SEQ ID NO: 148502 - DNA, 25 bp, Saccharomyces pastorianus
atgtcgactagaccccaacctgatt

SEQ ID NO: 148503 - DNA, 25 bp, Saccharomyces pastorianus
caagaccaagggaaccataagaaat

SEQ ID NO: 148504 - DNA, 25 bp, Saccharomyces pastorianus
accatagacatccatatgcctctac

SEQ ID NO: 148505 - DNA, 25 bp, Saccharomyces pastorianus
caatttttggaaagacctagagtcg

SEQ ID NO: 148506 - DNA, 25 bp, Saccharomyces pastorianus
atgcctctacgccactggcagaagg

SEQ ID NO: 148507 - DNA, 25 bp, Saccharomyces pastorianus
gcatacaaggctccgatagttcgat

SEQ ID NO: 148508 - DNA, 25 bp, Saccharomyces pastorianus
gaccccaacctgattggtattacca

SEQ ID NO: 148509 - DNA, 25 bp, Saccharomyces pastorianus
gactagaccccaacctgattggtat

SEQ ID NO: 148510 - DNA, 25 bp, Saccharomyces pastorianus
tcgatggtacaagaatgctatgctt

SEQ ID NO: 148511 - DNA, 25 bp, Saccharomyces pastorianus
aggctccgatagttcgatggtacaa

SEQ ID NO: 148512 - DNA, 25 bp, Saccharomyces pastorianus
gggcgctttgcaaaacattacctaa

SEQ ID NO: 148513 - DNA, 25 bp, Saccharomyces pastorianus
ggctgtcctgaagcatcatttcaca

SEQ ID NO: 148514 - DNA, 25 bp, Saccharomyces pastorianus
aaatacaccattttcacgagcctat

SEQ ID NO: 148515 - DNA, 25 bp, Saccharomyces pastorianus
gatattactgttctggctggttcat

SEQ ID NO: 148516 - DNA, 25 bp, Saccharomyces pastorianus
gtttaatcaacgcacctctactgat

SEQ ID NO: 148517 - DNA, 25 bp, Saccharomyces pastorianus
cattacctaagttatctccaaccct

SEQ ID NO: 148518 - DNA, 25 bp, Saccharomyces pastorianus
aaccctcaccgaatatgtattgggc

SEQ ID NO: 148519 - DNA, 25 bp, Saccharomyces pastorianus
gctggttcattttgggctgtcctga

SEQ ID NO: 148520 - DNA, 25 bp, Saccharomyces pastorianus
ggtctgctgctactcttatgtttga

SEQ ID NO: 148521 - DNA, 25 bp, Saccharomyces pastorianus
attttcaaacatgttccagcggcct

SEQ ID NO: 148522 - DNA, 25 bp, Saccharomyces pastorianus
caaaaacggacttctgctcacaggt

SEQ ID NO: 148523 - DNA, 25 bp, Saccharomyces pastorianus
tgatattaccgttttcaagtccaac

SEQ ID NO: 148524 - DNA, 25 bp, Saccharomyces pastorianus
gtcagcgcctgtgatattatgccca

SEQ ID NO: 148525 - DNA, 25 bp, Saccharomyces pastorianus
tgaacaatctgcctatgcattccct

SEQ ID NO: 148526 - DNA, 25 bp, Saccharomyces pastorianus
tattttcacgttagatacccctcaa

SEQ ID NO: 148527 - DNA, 25 bp, Saccharomyces pastorianus
caagaatgtgtgaaccttttcataa

SEQ ID NO: 148528 - DNA, 25 bp, Saccharomyces pastorianus
gaccaagtcggtaaatgatcagagg

SEQ ID NO: 148529 - DNA, 25 bp, Saccharomyces pastorianus
ctcgattcttctctaagggatttac

SEQ ID NO: 148530 - DNA, 25 bp, Saccharomyces pastorianus
gttttcaagtccaaccctatgatat

SEQ ID NO: 148531 - DNA, 25 bp, Saccharomyces pastorianus
ttatgcccagctttaccaaattagg

SEQ ID NO: 148532 - DNA, 25 bp, Saccharomyces pastorianus
caaattaggtttaacactgcagagt

SEQ ID NO: 148533 - DNA, 25 bp, Saccharomyces pastorianus
ttagatttatttgtcagcgcctgtg

SEQ ID NO: 148534 - DNA, 25 bp, Saccharomyces pastorianus
ttggattccaaacccttctgaggat

SEQ ID NO: 148535 - DNA, 25 bp, Saccharomyces pastorianus
cggttcctcagcagtcgaaagactt

SEQ ID NO: 148536 - DNA, 25 bp, Saccharomyces pastorianus
agatcacgcagttttggagcccaaa

SEQ ID NO: 148537 - DNA, 25 bp, Saccharomyces pastorianus
atacactgtgtcatggctggttctt

SEQ ID NO: 148538 - DNA, 25 bp, Saccharomyces pastorianus
agagtttacctctgcaccatttaga

SEQ ID NO: 148539 - DNA, 25 bp, Saccharomyces pastorianus
attttggatcaagtcacagccgaac

SEQ ID NO: 148540 - DNA, 25 bp, Saccharomyces pastorianus
gatttgcgcgcttattcaacaatgt

SEQ ID NO: 148541 - DNA, 25 bp, Saccharomyces pastorianus
attgactggcttgcattatcatgaa

SEQ ID NO: 148542 - DNA, 25 bp, Saccharomyces pastorianus
gagagttggagcacacggttcctca

SEQ ID NO: 148543 - DNA, 25 bp, Saccharomyces pastorianus
gtgctggtgcggttcgtctagaaaa

SEQ ID NO: 148544 - DNA, 25 bp, Saccharomyces pastorianus
aacgcgtgtgccgaaaacacttctc

SEQ ID NO: 148545 - DNA, 25 bp, Saccharomyces pastorianus
agaccaaatcccttacaacaactga

SEQ ID NO: 148546 - DNA, 25 bp, Saccharomyces pastorianus
gtgtctgccattaacgctcaatttg

SEQ ID NO: 148547 - DNA, 25 bp, Saccharomyces pastorianus
aaaaccgatgagttcctgaaagcaa

SEQ ID NO: 148548 - DNA, 25 bp, Saccharomyces pastorianus
gaaggcgaacgctattaatcatgag

SEQ ID NO: 148549 - DNA, 25 bp, Saccharomyces pastorianus
gaaccgccaataatgaccgtgtctg

SEQ ID NO: 148550 - DNA, 25 bp, Saccharomyces pastorianus
gtccgtgatgctgtgttgatggtta

SEQ ID NO: 148551 - DNA, 25 bp, Saccharomyces pastorianus
acaggccaccattattagtacaaag

SEQ ID NO: 148552 - DNA, 25 bp, Saccharomyces pastorianus
aagccttgactgttgtagattctga

SEQ ID NO: 148553 - DNA, 25 bp, Saccharomyces pastorianus
attagcacaaacacatcttcctgag

SEQ ID NO: 148554 - DNA, 25 bp, Saccharomyces pastorianus
cggtatcttaaatcaggaccaggat

SEQ ID NO: 148555 - DNA, 25 bp, Saccharomyces pastorianus
gattctgattcttacaagctatttg

SEQ ID NO: 148556 - DNA, 25 bp, Saccharomyces pastorianus
gaacaactcattgatcttgtcaaga

SEQ ID NO: 148557 - DNA, 25 bp, Saccharomyces pastorianus
attggccgccaaaatcgttcagcat

SEQ ID NO: 148558 - DNA, 25 bp, Saccharomyces pastorianus
gatgctcagggaaacgtgcccatca

SEQ ID NO: 148559 - DNA, 25 bp, Saccharomyces pastorianus
ggcacaagtttacccttcattgaca

SEQ ID NO: 148560 - DNA, 25 bp, Saccharomyces pastorianus
gaaggccagcatgaatgccgaagca

SEQ ID NO: 148561 - DNA, 25 bp, Saccharomyces pastorianus
aattcgaaatattaccacggcaggg

SEQ ID NO: 148562 - DNA, 25 bp, Saccharomyces pastorianus
cacggcagggcagttggcacaagtt

SEQ ID NO: 148563 - DNA, 25 bp, Saccharomyces pastorianus
ctgatccgtttactgacaccaatgg

SEQ ID NO: 148564 - DNA, 25 bp, Saccharomyces pastorianus
gatcttgtcaagacctaacttagga

SEQ ID NO: 148565 - DNA, 25 bp, Saccharomyces pastorianus
ttatcagggttcctagatgctcagg

SEQ ID NO: 148566 - DNA, 25 bp, Saccharomyces pastorianus
gaaacgtgcccatcaagaggtttga

SEQ ID NO: 148567 - DNA, 25 bp, Saccharomyces pastorianus
gcaactatcggtagaagtccccaat

SEQ ID NO: 148568 - DNA, 25 bp, Saccharomyces pastorianus
atcggtagaagtccccaattcaaat

SEQ ID NO: 148569 - DNA, 25 bp, Saccharomyces pastorianus
tcaggaaatccattgcaactatcgg

SEQ ID NO: 148570 - DNA, 25 bp, Saccharomyces pastorianus
ggaaatccattgcaactatcggtag

SEQ ID NO: 148571 - DNA, 25 bp, Saccharomyces pastorianus
gtagaagtccccaattcaaatgggt

SEQ ID NO: 148572 - DNA, 25 bp, Saccharomyces pastorianus
tatcggtagaagtccccaattcaaa

SEQ ID NO: 148573 - DNA, 25 bp, Saccharomyces pastorianus
agtccccaattcaaatgggttacag

SEQ ID NO: 148574 - DNA, 25 bp, Saccharomyces pastorianus
actatcggtagaagtccccaattca

SEQ ID NO: 148575 - DNA, 25 bp, Saccharomyces pastorianus
gaaatccattgcaactatcggtaga

SEQ ID NO: 148576 - DNA, 25 bp, Saccharomyces pastorianus
aatccattgcaactatcggtagaag

SEQ ID NO: 148577 - DNA, 25 bp, Saccharomyces pastorianus
caattcaaatgggttacagcataca

SEQ ID NO: 148578 - DNA, 25 bp, Saccharomyces pastorianus
gtatccaagaacaactaaatcctga

SEQ ID NO: 148579 - DNA, 25 bp, Saccharomyces pastorianus
caaaaaatccgtcaacatacgcaaa

SEQ ID NO: 148580 - DNA, 25 bp, Saccharomyces pastorianus
gcgttagagaacattgcatctggat

SEQ ID NO: 148581 - DNA, 25 bp, Saccharomyces pastorianus
gcatctggattgcacgttcgtggac

SEQ ID NO: 148582 - DNA, 25 bp, Saccharomyces pastorianus
tctgccgatcagttacacatatcaa

SEQ ID NO: 148583 - DNA, 25 bp, Saccharomyces pastorianus
tgcacgttcgtggacagaaagtaga

SEQ ID NO: 148584 - DNA, 25 bp, Saccharomyces pastorianus
atgaatgcggcttccgatgcaaaga

SEQ ID NO: 148585 - DNA, 25 bp, Saccharomyces pastorianus
gattcaacttcgatctcatcagcgt

SEQ ID NO: 148586 - DNA, 25 bp, Saccharomyces pastorianus
ggcttccgatgcaaagaggtatctg

SEQ ID NO: 148587 - DNA, 25 bp, Saccharomyces pastorianus
aacttcgatctcatcagcgttagag

SEQ ID NO: 148588 - DNA, 25 bp, Saccharomyces pastorianus
gaggtatctgccgatcagttacaca

SEQ ID NO: 148589 - DNA, 25 bp, Saccharomyces pastorianus
acagtgcgttgtcaccggatctaaa

SEQ ID NO: 148590 - DNA, 25 bp, Saccharomyces pastorianus
atgtagttcaagctctttctcttcc

SEQ ID NO: 148591 - DNA, 25 bp, Saccharomyces pastorianus
caatatcgaaatgctgtggagacaa

SEQ ID NO: 148592 - DNA, 25 bp, Saccharomyces pastorianus
gaaaccagtaacatgttgcaaccaa

SEQ ID NO: 148593 - DNA, 25 bp, Saccharomyces pastorianus
tggatacctggaagctgcaagcaat

SEQ ID NO: 148594 - DNA, 25 bp, Saccharomyces pastorianus
gataacgagaatagaccgatcacta

SEQ ID NO: 148595 - DNA, 25 bp, Saccharomyces pastorianus
tagtccccgtttgctgttcagaaaa

SEQ ID NO: 148596 - DNA, 25 bp, Saccharomyces pastorianus
taacataatgccatccttagtcccc

SEQ ID NO: 148597 - DNA, 25 bp, Saccharomyces pastorianus
gaacaacaaactgacgcgaattaca

SEQ ID NO: 148598 - DNA, 25 bp, Saccharomyces pastorianus
tttctcttccaacagtgcgttgtca

SEQ ID NO: 148599 - DNA, 25 bp, Saccharomyces pastorianus
ggaatttttgtcaatcactttcgaa

SEQ ID NO: 148600 - DNA, 25 bp, Saccharomyces pastorianus
acaacagaattacccactcacaatg

SEQ ID NO: 148601 - DNA, 25 bp, Saccharomyces pastorianus
gtgagagatctgtccttccaattgc

SEQ ID NO: 148602 - DNA, 25 bp, Saccharomyces pastorianus
attcccactggattactctatgcta

SEQ ID NO: 148603 - DNA, 25 bp, Saccharomyces pastorianus
atactttgtcgttgcaatccggttc

SEQ ID NO: 148604 - DNA, 25 bp, Saccharomyces pastorianus
ggttccgaattgtctgttctacagc

SEQ ID NO: 148605 - DNA, 25 bp, Saccharomyces pastorianus
tttctctactactacaactattccc

SEQ ID NO: 148606 - DNA, 25 bp, Saccharomyces pastorianus
gaggttattgatcatctgctggtta

SEQ ID NO: 148607 - DNA, 25 bp, Saccharomyces pastorianus
actcgtggcgagcaatttcaattga

SEQ ID NO: 148608 - DNA, 25 bp, Saccharomyces pastorianus
gctggaccaaattctacgcacatac

SEQ ID NO: 148609 - DNA, 25 bp, Saccharomyces pastorianus
gattttacccactattgcgcgatat

SEQ ID NO: 148610 - DNA, 25 bp, Saccharomyces pastorianus
gtacgttagcgcatactttgtcgtt

SEQ ID NO: 148611 - DNA, 25 bp, Saccharomyces pastorianus
acctagtatcgtttcaagtgctccc

SEQ ID NO: 148612 - DNA, 25 bp, Saccharomyces pastorianus
tcccggtattggtcgaagaacaaga

SEQ ID NO: 148613 - DNA, 25 bp, Saccharomyces pastorianus
ctcttgttaacgaattgctgctccc

SEQ ID NO: 148614 - DNA, 25 bp, Saccharomyces pastorianus
ttgcacattagtaaactgattgagc

SEQ ID NO: 148615 - DNA, 25 bp, Saccharomyces pastorianus
gctgctcccggtattggtcgaagaa

SEQ ID NO: 148616 - DNA, 25 bp, Saccharomyces pastorianus
ggacaatgaccttaaatatatgctt

SEQ ID NO: 148617 - DNA, 25 bp, Saccharomyces pastorianus
atcgttccactaaggacaatgacct

SEQ ID NO: 148618 - DNA, 25 bp, Saccharomyces pastorianus
gtttcaagtgctccccgatttagtt

SEQ ID NO: 148619 - DNA, 25 bp, Saccharomyces pastorianus
atggaaattctcaacctagtatcgt

SEQ ID NO: 148620 - DNA, 25 bp, Saccharomyces pastorianus
ttaacgaattgctgctcccggtatt

SEQ ID NO: 148621 - DNA, 25 bp, Saccharomyces pastorianus
gattgagcaatatcgttccactaag

SEQ ID NO: 148622 - DNA, 25 bp, Saccharomyces pastorianus
gagcttattcttatcctgactttag

SEQ ID NO: 148623 - DNA, 25 bp, Saccharomyces pastorianus
tacacacatttcacatcacctatta

SEQ ID NO: 148624 - DNA, 25 bp, Saccharomyces pastorianus
catgtcgactcgctgtatgatggca

SEQ ID NO: 148625 - DNA, 25 bp, Saccharomyces pastorianus
ggtatagtcgtactggttcccaagt

SEQ ID NO: 148626 - DNA, 25 bp, Saccharomyces pastorianus
attggttcgtatcatgtcgactcgc

SEQ ID NO: 148627 - DNA, 25 bp, Saccharomyces pastorianus
acagaaacgcccaattcgccggtag

SEQ ID NO: 148628 - DNA, 25 bp, Saccharomyces pastorianus
cagccgcttttgatgaggtggaata

SEQ ID NO: 148629 - DNA, 25 bp, Saccharomyces pastorianus
gatggcagcccagtatttttattct

SEQ ID NO: 148630 - DNA, 25 bp, Saccharomyces pastorianus
tactgtgatgttgtggcccatagac

SEQ ID NO: 148631 - DNA, 25 bp, Saccharomyces pastorianus
tgaggatcctaactcagccgctttt

SEQ ID NO: 148632 - DNA, 25 bp, Saccharomyces pastorianus
gaacccctaagtttgactcatcgtg

SEQ ID NO: 148633 - DNA, 25 bp, Saccharomyces pastorianus
aatacccattaggtcactttgtgag

SEQ ID NO: 148634 - DNA, 25 bp, Saccharomyces pastorianus
gtacaattgaatctgctcaagctga

SEQ ID NO: 148635 - DNA, 25 bp, Saccharomyces pastorianus
gataagaggattgtcatttccattg

SEQ ID NO: 148636 - DNA, 25 bp, Saccharomyces pastorianus
cagaggccttattgttggagcatga

SEQ ID NO: 148637 - DNA, 25 bp, Saccharomyces pastorianus
tcatttccattgattcgtggcccac

SEQ ID NO: 148638 - DNA, 25 bp, Saccharomyces pastorianus
gctgctgaattattggataagagga

SEQ ID NO: 148639 - DNA, 25 bp, Saccharomyces pastorianus
attcgtggcccaccactcataaata

SEQ ID NO: 148640 - DNA, 25 bp, Saccharomyces pastorianus
ggccttattgttggagcatgatgtt

SEQ ID NO: 148641 - DNA, 25 bp, Saccharomyces pastorianus
ctgctcaagctgaaacagaggcctt

SEQ ID NO: 148642 - DNA, 25 bp, Saccharomyces pastorianus
gtcactttgtgagagacctcggtac

SEQ ID NO: 148643 - DNA, 25 bp, Saccharomyces pastorianus
gacctcggtacaattgaatctgctc

SEQ ID NO: 148644 - DNA, 25 bp, Saccharomyces pastorianus
tagagcattcaacggtgaccaggtt

SEQ ID NO: 148645 - DNA, 25 bp, Saccharomyces pastorianus
gcaccctcatccattgtcttggatt

SEQ ID NO: 148646 - DNA, 25 bp, Saccharomyces pastorianus
cttggattctgaacatttcgacgtt

SEQ ID NO: 148647 - DNA, 25 bp, Saccharomyces pastorianus
caatcagaatggaaggcaccctcat

SEQ ID NO: 148648 - DNA, 25 bp, Saccharomyces pastorianus
attttcagatttcacgttcccggag

SEQ ID NO: 148649 - DNA, 25 bp, Saccharomyces pastorianus
ggttatcgtggaactgctactcaat

SEQ ID NO: 148650 - DNA, 25 bp, Saccharomyces pastorianus
aatggcgttttgtaccagggcaata

SEQ ID NO: 148651 - DNA, 25 bp, Saccharomyces pastorianus
gttcccggagtactattctacagca

SEQ ID NO: 148652 - DNA, 25 bp, Saccharomyces pastorianus
agcttggtacagtatatcgagttac

SEQ ID NO: 148653 - DNA, 25 bp, Saccharomyces pastorianus
atcgagttactaccaaatgcagacg

SEQ ID NO: 148654 - DNA, 25 bp, Saccharomyces pastorianus
gataaccccgatattgaggctggcg

SEQ ID NO: 148655 - DNA, 25 bp, Saccharomyces pastorianus
atacggatcacatttcgcagaaaac

SEQ ID NO: 148656 - DNA, 25 bp, Saccharomyces pastorianus
aaatgcgaccacatcacttttttgt

SEQ ID NO: 148657 - DNA, 25 bp, Saccharomyces pastorianus
gaatcagattttgcaacgttgacta

SEQ ID NO: 148658 - DNA, 25 bp, Saccharomyces pastorianus
aaactgctgggcatgcggtacagaa

SEQ ID NO: 148659 - DNA, 25 bp, Saccharomyces pastorianus
ggctattcctcttcaattaacgtgg

SEQ ID NO: 148660 - DNA, 25 bp, Saccharomyces pastorianus
atgaccatgtctgaatacggatcac

SEQ ID NO: 148661 - DNA, 25 bp, Saccharomyces pastorianus
aaaggttccagggaccacattctca

SEQ ID NO: 148662 - DNA, 25 bp, Saccharomyces pastorianus
acatctacttggtatagtgtcctgg

SEQ ID NO: 148663 - DNA, 25 bp, Saccharomyces pastorianus
cacaaccacattttctacttcatta

SEQ ID NO: 148664 - DNA, 25 bp, Saccharomyces pastorianus
atagtgtcctggattgcggctattc

SEQ ID NO: 148665 - DNA, 25 bp, Saccharomyces pastorianus
gaccacattctcagctaatatgcca

SEQ ID NO: 148666 - DNA, 25 bp, Saccharomyces pastorianus
agctctactgcaagtgtactgcctg

SEQ ID NO: 148667 - DNA, 25 bp, Saccharomyces pastorianus
gaaggcattccgcacgagaaactga

SEQ ID NO: 148668 - DNA, 25 bp, Saccharomyces pastorianus
atgtaacatcgtatgctctgccaca

SEQ ID NO: 148669 - DNA, 25 bp, Saccharomyces pastorianus
tagtaaagacgagtgctggcaacca

SEQ ID NO: 148670 - DNA, 25 bp, Saccharomyces pastorianus
gaaggcatctctgtatcgacattga

SEQ ID NO: 148671 - DNA, 25 bp, Saccharomyces pastorianus
aagtgtactgcctgcatccattact

SEQ ID NO: 148672 - DNA, 25 bp, Saccharomyces pastorianus
atgctctgccacatccaacagaagg

SEQ ID NO: 148673 - DNA, 25 bp, Saccharomyces pastorianus
gcctataacctaccaactgcatatt

SEQ ID NO: 148674 - DNA, 25 bp, Saccharomyces pastorianus
ttaagatccagcctataacctacca

SEQ ID NO: 148675 - DNA, 25 bp, Saccharomyces pastorianus
gcatccattactactgtaccacaag

SEQ ID NO: 148676 - DNA, 25 bp, Saccharomyces pastorianus
cggataatttggacagctctactgc

SEQ ID NO: 148677 - DNA, 25 bp, Saccharomyces pastorianus
gcgagcagctaataaggaccagact

SEQ ID NO: 148678 - DNA, 25 bp, Saccharomyces pastorianus
acttccctggccaccagatggaggt

SEQ ID NO: 148679 - DNA, 25 bp, Saccharomyces pastorianus
cgtcttcaatcatggcagctcaaca

SEQ ID NO: 148680 - DNA, 25 bp, Saccharomyces pastorianus
acaaacaccgtcttcaatcatggca

SEQ ID NO: 148681 - DNA, 25 bp, Saccharomyces pastorianus
attggaagaccacatcctttcactt

SEQ ID NO: 148682 - DNA, 25 bp, Saccharomyces pastorianus
ggcagctcaacaatagagatgcgta

SEQ ID NO: 148683 - DNA, 25 bp, Saccharomyces pastorianus
atggcagacatgcttctcgtgagaa

SEQ ID NO: 148684 - DNA, 25 bp, Saccharomyces pastorianus
aggctaactcctcattggaagacca

SEQ ID NO: 148685 - DNA, 25 bp, Saccharomyces pastorianus
ggaccagacttcctcaaaatggcag

SEQ ID NO: 148686 - DNA, 25 bp, Saccharomyces pastorianus
gcgtaatgaaagtggcgagcagcta

SEQ ID NO: 148687 - DNA, 25 bp, Saccharomyces pastorianus
ccatatggtgttcctaagggagatg

SEQ ID NO: 148688 - DNA, 25 bp, Saccharomyces pastorianus
atccaggaaggcctttgcccaacta

SEQ ID NO: 148689 - DNA, 25 bp, Saccharomyces pastorianus
acgatgaattgcgtcggctttgcaa

SEQ ID NO: 148690 - DNA, 25 bp, Saccharomyces pastorianus
taaattcttttgtcctactaacgat

SEQ ID NO: 148691 - DNA, 25 bp, Saccharomyces pastorianus
gacgactagtgttttattttgcata

SEQ ID NO: 148692 - DNA, 25 bp, Saccharomyces pastorianus
cttgcctggctacttcttcaaaaaa

SEQ ID NO: 148693 - DNA, 25 bp, Saccharomyces pastorianus
atatatccagagtcgaggtcgtttc

SEQ ID NO: 148694 - DNA, 25 bp, Saccharomyces pastorianus
actatccgcatttccttagattctt

SEQ ID NO: 148695 - DNA, 25 bp, Saccharomyces pastorianus
cccctgatatctggcggaatttctg

SEQ ID NO: 148696 - DNA, 25 bp, Saccharomyces pastorianus
tgatatggctctcctattacttggc

SEQ ID NO: 148697 - DNA, 25 bp, Saccharomyces pastorianus
gtcggctttgcaaactatccgcatt

SEQ ID NO: 148698 - DNA, 25 bp, Saccharomyces pastorianus
gctagaatctttgttcaactccgga

SEQ ID NO: 148699 - DNA, 25 bp, Saccharomyces pastorianus
atttggacccaaattcagctctttt

SEQ ID NO: 148700 - DNA, 25 bp, Saccharomyces pastorianus
gagtcactccttaagaattgctacc

SEQ ID NO: 148701 - DNA, 25 bp, Saccharomyces pastorianus
ctgagtagctcctttcattgtctaa

SEQ ID NO: 148702 - DNA, 25 bp, Saccharomyces pastorianus
tggtaatcgacctcttttattcggg

SEQ ID NO: 148703 - DNA, 25 bp, Saccharomyces pastorianus
gttattgcggcattgtgccacttga

SEQ ID NO: 148704 - DNA, 25 bp, Saccharomyces pastorianus
ttctcaccaacttttccattttcta

SEQ ID NO: 148705 - DNA, 25 bp, Saccharomyces pastorianus
attttccctattttgcctatttgcg

SEQ ID NO: 148706 - DNA, 25 bp, Saccharomyces pastorianus
tattccaatattcagcggcctttac

SEQ ID NO: 148707 - DNA, 25 bp, Saccharomyces pastorianus
attggcgctgttctttatggaatgc

SEQ ID NO: 148708 - DNA, 25 bp, Saccharomyces pastorianus
gcggcctttactgctatagtttttc

SEQ ID NO: 148709 - DNA, 25 bp, Saccharomyces pastorianus
gagaccttacagagctgggctattt

SEQ ID NO: 148710 - DNA, 25 bp, Saccharomyces pastorianus
cgcagaggtcgctaaagctaaaaaa

SEQ ID NO: 148711 - DNA, 25 bp, Saccharomyces pastorianus
ctaagagtgtgcaagagctgaagaa

SEQ ID NO: 148712 - DNA, 25 bp, Saccharomyces pastorianus
aaatcccgcagaggtcgctaaagct

SEQ ID NO: 148713 - DNA, 25 bp, Saccharomyces pastorianus
atcccgcagaggtcgctaaagctaa

SEQ ID NO: 148714 - DNA, 25 bp, Saccharomyces pastorianus
aggactaagagtgtgcaagagctga

SEQ ID NO: 148715 - DNA, 25 bp, Saccharomyces pastorianus
gcaaatcccgcagaggtcgctaaag

SEQ ID NO: 148716 - DNA, 25 bp, Saccharomyces pastorianus
gtcaactttattagaaaggactaag

SEQ ID NO: 148717 - DNA, 25 bp, Saccharomyces pastorianus
cgcaaatcccgcagaggtcgctaaa

SEQ ID NO: 148718 - DNA, 25 bp, Saccharomyces pastorianus
gcaagagctgaagaagagagctgca

SEQ ID NO: 148719 - DNA, 25 bp, Saccharomyces pastorianus
tcccgcagaggtcgctaaagctaaa

SEQ ID NO: 148720 - DNA, 25 bp, Saccharomyces pastorianus
gctaaaaaagtactaagaaggctat

SEQ ID NO: 148721 - DNA, 25 bp, Saccharomyces pastorianus
agtagaccctgtgagcgcacctaat

SEQ ID NO: 148722 - DNA, 25 bp, Saccharomyces pastorianus
tctcgttgttcctgtcaagctagag

SEQ ID NO: 148723 - DNA, 25 bp, Saccharomyces pastorianus
gcaatatttccaagagccgagccaa

SEQ ID NO: 148724 - DNA, 25 bp, Saccharomyces pastorianus
tagagaaacctctcgttgttcctgt

SEQ ID NO: 148725 - DNA, 25 bp, Saccharomyces pastorianus
gaagatatcaggatccgagcacaaa

SEQ ID NO: 148726 - DNA, 25 bp, Saccharomyces pastorianus
cacctaatcactcgcctgagattga

SEQ ID NO: 148727 - DNA, 25 bp, Saccharomyces pastorianus
gattcgacccatcatctagcgatag

SEQ ID NO: 148728 - DNA, 25 bp, Saccharomyces pastorianus
attttaccacgtgaggagcatgata

SEQ ID NO: 148729 - DNA, 25 bp, Saccharomyces pastorianus
aagtctgccttagcaaacttggagg

SEQ ID NO: 148730 - DNA, 25 bp, Saccharomyces pastorianus
ctaattcttctattctgttgggtaa

SEQ ID NO: 148731 - DNA, 25 bp, Saccharomyces pastorianus
gagccaagcctgtcactaattcttc

SEQ ID NO: 148732 - DNA, 25 bp, Saccharomyces pastorianus
ttgtcgcatatacacctactgatgt

SEQ ID NO: 148733 - DNA, 25 bp, Saccharomyces pastorianus
aatgaggaagctactcccattccat

SEQ ID NO: 148734 - DNA, 25 bp, Saccharomyces pastorianus
gtccgccagaatgcaaaactattag

SEQ ID NO: 148735 - DNA, 25 bp, Saccharomyces pastorianus
gactataagtgttcctcaaattcgt

SEQ ID NO: 148736 - DNA, 25 bp, Saccharomyces pastorianus
aagtatagaccactgacaccttctt

SEQ ID NO: 148737 - DNA, 25 bp, Saccharomyces pastorianus
gtgttgtttctttgaccaatggcgt

SEQ ID NO: 148738 - DNA, 25 bp, Saccharomyces pastorianus
caaaacccatgacggcatatgccag

SEQ ID NO: 148739 - DNA, 25 bp, Saccharomyces pastorianus
gtacaacataccacctgagagggaa

SEQ ID NO: 148740 - DNA, 25 bp, Saccharomyces pastorianus
gaatcgccacgatttgttatgccaa

SEQ ID NO: 148741 - DNA, 25 bp, Saccharomyces pastorianus
agttattggctgcacttgtcgcata

SEQ ID NO: 148742 - DNA, 25 bp, Saccharomyces pastorianus
gcgtaactgaacatgtccgccagaa

SEQ ID NO: 148743 - DNA, 25 bp, Saccharomyces pastorianus
gtttatcaggtacttccatggcgtc

SEQ ID NO: 148744 - DNA, 25 bp, Saccharomyces pastorianus
gatagagcattcttttcgaactggg

SEQ ID NO: 148745 - DNA, 25 bp, Saccharomyces pastorianus
ctttttatcattacagcctgcacca

SEQ ID NO: 148746 - DNA, 25 bp, Saccharomyces pastorianus
ggtgtccattttgctattgcggcag

SEQ ID NO: 148747 - DNA, 25 bp, Saccharomyces pastorianus
tatgtccacctatattggttcaagg

SEQ ID NO: 148748 - DNA, 25 bp, Saccharomyces pastorianus
agtgaatttttcaacgacgctccct

SEQ ID NO: 148749 - DNA, 25 bp, Saccharomyces pastorianus
atcggtgatgatactcctaacaaat

SEQ ID NO: 148750 - DNA, 25 bp, Saccharomyces pastorianus
gaagatgcttgtctcagttcaccag

SEQ ID NO: 148751 - DNA, 25 bp, Saccharomyces pastorianus
attacggtcggtgcttcgacattta

SEQ ID NO: 148752 - DNA, 25 bp, Saccharomyces pastorianus
gtttgctcccggtataaatattatg

SEQ ID NO: 148753 - DNA, 25 bp, Saccharomyces pastorianus
gcagctgtagatagcggtgtccatt

SEQ ID NO: 148754 - DNA, 25 bp, Saccharomyces pastorianus
gaaggatcatagtacctcagtaggt

SEQ ID NO: 148755 - DNA, 25 bp, Saccharomyces pastorianus
gtatgatcatccctgaattcgacgg

SEQ ID NO: 148756 - DNA, 25 bp, Saccharomyces pastorianus
agatatttccctccagcagattcaa

SEQ ID NO: 148757 - DNA, 25 bp, Saccharomyces pastorianus
aggtttgggacagcatgatcctgga

SEQ ID NO: 148758 - DNA, 25 bp, Saccharomyces pastorianus
agaatattgatggtactcgcagtgt

SEQ ID NO: 148759 - DNA, 25 bp, Saccharomyces pastorianus
taaaacagagtttctaccttatcgg

SEQ ID NO: 148760 - DNA, 25 bp, Saccharomyces pastorianus
accttatcggtatgtcatagtcttt

SEQ ID NO: 148761 - DNA, 25 bp, Saccharomyces pastorianus
aatcgcatatgcaagtggtacagaa

SEQ ID NO: 148762 - DNA, 25 bp, Saccharomyces pastorianus
gatcctggaaattttcacactgaac

SEQ ID NO: 148763 - DNA, 25 bp, Saccharomyces pastorianus
attgctgtctttgtatgatcatccc

SEQ ID NO: 148764 - DNA, 25 bp, Saccharomyces pastorianus
actgaacatcaacatgtcgctcata

SEQ ID NO: 148765 - DNA, 25 bp, Saccharomyces pastorianus
tttaaagatccaaagtcacctgcgg

SEQ ID NO: 148766 - DNA, 25 bp, Saccharomyces pastorianus
agaagaaagtcaactcgcccagcga

SEQ ID NO: 148767 - DNA, 25 bp, Saccharomyces pastorianus
caggtatgtggttgcttctcaggac

SEQ ID NO: 148768 - DNA, 25 bp, Saccharomyces pastorianus
gttatggaacctctcagtacggcga

SEQ ID NO: 148769 - DNA, 25 bp, Saccharomyces pastorianus
aagtcacctgcggagtgcatcgaaa

SEQ ID NO: 148770 - DNA, 25 bp, Saccharomyces pastorianus
aagcgtcgttaatattagcggtgca

SEQ ID NO: 148771 - DNA, 25 bp, Saccharomyces pastorianus
ggtgttccattaatccatttaacca

SEQ ID NO: 148772 - DNA, 25 bp, Saccharomyces pastorianus
tcgcccagcgatgaggtgaaagaca

SEQ ID NO: 148773 - DNA, 25 bp, Saccharomyces pastorianus
gaaagcttggtccaaaggctcctaa

SEQ ID NO: 148774 - DNA, 25 bp, Saccharomyces pastorianus
aaggctcctaatcctttgagcgtaa

SEQ ID NO: 148775 - DNA, 25 bp, Saccharomyces pastorianus
ctcagtacggcgagtgccaaggcaa

SEQ ID NO: 148776 - DNA, 25 bp, Saccharomyces pastorianus
gctcccgatatacctaacatgcttc

SEQ ID NO: 148777 - DNA, 25 bp, Saccharomyces pastorianus
cgctcccgatatacctaacatgctt

SEQ ID NO: 148778 - DNA, 25 bp, Saccharomyces pastorianus
tgcttcaaaagagggctaagtcata

SEQ ID NO: 148779 - DNA, 25 bp, Saccharomyces pastorianus
gatatacctaacatgcttcaaaaga

SEQ ID NO: 148780 - DNA, 25 bp, Saccharomyces pastorianus
tcccgatatacctaacatgcttcaa

SEQ ID NO: 148781 - DNA, 25 bp, Saccharomyces pastorianus
acatgcttcaaaagagggctaagtc

SEQ ID NO: 148782 - DNA, 25 bp, Saccharomyces pastorianus
cccgatatacctaacatgcttcaaa

SEQ ID NO: 148783 - DNA, 25 bp, Saccharomyces pastorianus
atatacctaacatgcttcaaaagag

SEQ ID NO: 148784 - DNA, 25 bp, Saccharomyces pastorianus
ccgatatacctaacatgcttcaaaa

SEQ ID NO: 148785 - DNA, 25 bp, Saccharomyces pastorianus
tacctaacatgcttcaaaagagggc

SEQ ID NO: 148786 - DNA, 25 bp, Saccharomyces pastorianus
ctaacatgcttcaaaagagggctaa

SEQ ID NO: 148787 - DNA, 25 bp, Saccharomyces pastorianus
agccagggtcgttgcccctgaatgg

SEQ ID NO: 148788 - DNA, 25 bp, Saccharomyces pastorianus
gactgcatgaatgaggtacacgaaa

SEQ ID NO: 148789 - DNA, 25 bp, Saccharomyces pastorianus
agatcagcagtcactttgtaactta

SEQ ID NO: 148790 - DNA, 25 bp, Saccharomyces pastorianus
cctattttgaggaaagactgcatga

SEQ ID NO: 148791 - DNA, 25 bp, Saccharomyces pastorianus
cagcagtcactttgtaacttaataa

SEQ ID NO: 148792 - DNA, 25 bp, Saccharomyces pastorianus
aaataacagatcagcagtcactttg

SEQ ID NO: 148793 - DNA, 25 bp, Saccharomyces pastorianus
aacttaataatcataccatatactg

SEQ ID NO: 148794 - DNA, 25 bp, Saccharomyces pastorianus
gatactataccgaaaatagccaggg

SEQ ID NO: 148795 - DNA, 25 bp, Saccharomyces pastorianus
aacaagtaaaggcttctgatactat

SEQ ID NO: 148796 - DNA, 25 bp, Saccharomyces pastorianus
accatatactgatcctattttgagg

SEQ ID NO: 148797 - DNA, 25 bp, Saccharomyces pastorianus
aaatagccagggtcgttgcccctga

SEQ ID NO: 148798 - DNA, 25 bp, Saccharomyces pastorianus
attgctaaactgctggcatcctgat

SEQ ID NO: 148799 - DNA, 25 bp, Saccharomyces pastorianus
ttcgcgccccaattagccaaaaaag

SEQ ID NO: 148800 - DNA, 25 bp, Saccharomyces pastorianus
agtggagacaggttcgcttccggac

SEQ ID NO: 148801 - DNA, 25 bp, Saccharomyces pastorianus
acggagcgagcttatcatcaggaac

SEQ ID NO: 148802 - DNA, 25 bp, Saccharomyces pastorianus
tatgccgtacactacatgatgattt

SEQ ID NO: 148803 - DNA, 25 bp, Saccharomyces pastorianus
gagtcttgtcaagtccgaacctttc

SEQ ID NO: 148804 - DNA, 25 bp, Saccharomyces pastorianus
atacttctttgatatcgtgcttaaa

SEQ ID NO: 148805 - DNA, 25 bp, Saccharomyces pastorianus
gttcgcttccggacgaggatttaag

SEQ ID NO: 148806 - DNA, 25 bp, Saccharomyces pastorianus
gatgctcaggattatcttagcgtga

SEQ ID NO: 148807 - DNA, 25 bp, Saccharomyces pastorianus
gaacctttcctgcactgtgtggaga

SEQ ID NO: 148808 - DNA, 25 bp, Saccharomyces pastorianus
gggcatcgactatacctatttgtac

SEQ ID NO: 148809 - DNA, 25 bp, Saccharomyces pastorianus
ttgtactttgtacggcggctattgt

SEQ ID NO: 148810 - DNA, 25 bp, Saccharomyces pastorianus
gaccccagtgaatcaattgttctag

SEQ ID NO: 148811 - DNA, 25 bp, Saccharomyces pastorianus
gagtacttatttcagacagctttca

SEQ ID NO: 148812 - DNA, 25 bp, Saccharomyces pastorianus
ttatgttctctctgactatgtcacg

SEQ ID NO: 148813 - DNA, 25 bp, Saccharomyces pastorianus
gtaggacggctaaatctaaccccag

SEQ ID NO: 148814 - DNA, 25 bp, Saccharomyces pastorianus
aactaccacggaatgcaaggcttta

SEQ ID NO: 148815 - DNA, 25 bp, Saccharomyces pastorianus
tcaaacatctttgccggattacttt

SEQ ID NO: 148816 - DNA, 25 bp, Saccharomyces pastorianus
aaatcacggtctttggataacacag

SEQ ID NO: 148817 - DNA, 25 bp, Saccharomyces pastorianus
aatacctgccgaatggattgacccc

SEQ ID NO: 148818 - DNA, 25 bp, Saccharomyces pastorianus
gggacgttcggttaatcagctgtaa

SEQ ID NO: 148819 - DNA, 25 bp, Saccharomyces pastorianus
atctaaccccagctatcaagcggaa

SEQ ID NO: 148820 - DNA, 25 bp, Saccharomyces pastorianus
atttcggaaaccaaactgtcatcat

SEQ ID NO: 148821 - DNA, 25 bp, Saccharomyces pastorianus
aagtctaccaccgatgggcgaactc

SEQ ID NO: 148822 - DNA, 25 bp, Saccharomyces pastorianus
acaactaagtctaccaccgatgggc

SEQ ID NO: 148823 - DNA, 25 bp, Saccharomyces pastorianus
atcacaactaagtctaccaccgatg

SEQ ID NO: 148824 - DNA, 25 bp, Saccharomyces pastorianus
ggaaaccaaactgtcatcattgtat

SEQ ID NO: 148825 - DNA, 25 bp, Saccharomyces pastorianus
gtcatcattgtataaatcacaacta

SEQ ID NO: 148826 - DNA, 25 bp, Saccharomyces pastorianus
aatgacatttcggaaaccaaactgt

SEQ ID NO: 148827 - DNA, 25 bp, Saccharomyces pastorianus
agattgtttgggtgatagttttgaa

SEQ ID NO: 148828 - DNA, 25 bp, Saccharomyces pastorianus
tctaccaccgatgggcgaactcgag

SEQ ID NO: 148829 - DNA, 25 bp, Saccharomyces pastorianus
actaagtctaccaccgatgggcgaa

SEQ ID NO: 148830 - DNA, 25 bp, Saccharomyces pastorianus
aaactgtcatcattgtataaatcac

SEQ ID NO: 148831 - DNA, 25 bp, Saccharomyces pastorianus
atgaaaagcagggaaacgcaatctg

SEQ ID NO: 148832 - DNA, 25 bp, Saccharomyces pastorianus
gggaaacgcaatctgaggaatcaga

SEQ ID NO: 148833 - DNA, 25 bp, Saccharomyces pastorianus
gcagggaaacgcaatctgaggaatc

SEQ ID NO: 148834 - DNA, 25 bp, Saccharomyces pastorianus
agcagggaaacgcaatctgaggaat

SEQ ID NO: 148835 - DNA, 25 bp, Saccharomyces pastorianus
agggaaacgcaatctgaggaatcag

SEQ ID NO: 148836 - DNA, 25 bp, Saccharomyces pastorianus
aacgcaatctgaggaatcagaagac

SEQ ID NO: 148837 - DNA, 25 bp, Saccharomyces pastorianus
gaaacgcaatctgaggaatcagaag

SEQ ID NO: 148838 - DNA, 25 bp, Saccharomyces pastorianus
caatctgaggaatcagaagacgagg

SEQ ID NO: 148839 - DNA, 25 bp, Saccharomyces pastorianus
cagggaaacgcaatctgaggaatca

SEQ ID NO: 148840 - DNA, 25 bp, Saccharomyces pastorianus
gaagacgaggaaagtggttcaaaag

SEQ ID NO: 148841 - DNA, 25 bp, Saccharomyces pastorianus
ggaaacgcaatctgaggaatcagaa

SEQ ID NO: 148842 - DNA, 25 bp, Saccharomyces pastorianus
gcagtactagctctcaatcacagga

SEQ ID NO: 148843 - DNA, 25 bp, Saccharomyces pastorianus
ggtacagctggatctgactctacga

SEQ ID NO: 148844 - DNA, 25 bp, Saccharomyces pastorianus
gatattaaccctttcgacgactcaa

SEQ ID NO: 148845 - DNA, 25 bp, Saccharomyces pastorianus
tatacgcctcttcattttcatctaa

SEQ ID NO: 148846 - DNA, 25 bp, Saccharomyces pastorianus
agctcgctaacttcggatactttgg

SEQ ID NO: 148847 - DNA, 25 bp, Saccharomyces pastorianus
tagccattgctctttgtatcttgtt

SEQ ID NO: 148848 - DNA, 25 bp, Saccharomyces pastorianus
gagggcggttccacaatttttgtca

SEQ ID NO: 148849 - DNA, 25 bp, Saccharomyces pastorianus
atttttgtcacgaacaccatcacgg

SEQ ID NO: 148850 - DNA, 25 bp, Saccharomyces pastorianus
gacgccacttcgataatctattcca

SEQ ID NO: 148851 - DNA, 25 bp, Saccharomyces pastorianus
attccactacttttcacactgaggg

SEQ ID NO: 148852 - DNA, 25 bp, Saccharomyces pastorianus
ttcaggatcggccacaggtacagct

SEQ ID NO: 148853 - DNA, 25 bp, Saccharomyces pastorianus
gttattatccattttatcgcaagcg

SEQ ID NO: 148854 - DNA, 25 bp, Saccharomyces pastorianus
gaccgaacaaaacaagtctgcttct

SEQ ID NO: 148855 - DNA, 25 bp, Saccharomyces pastorianus
tctgcttctggcgttattatccatt

SEQ ID NO: 148856 - DNA, 25 bp, Saccharomyces pastorianus
gcaagcgaacgcctatgaatacgtg

SEQ ID NO: 148857 - DNA, 25 bp, Saccharomyces pastorianus
gcgaacgcctatgaatacgtgaatt

SEQ ID NO: 148858 - DNA, 25 bp, Saccharomyces pastorianus
aagtctgcttctggcgttattatcc

SEQ ID NO: 148859 - DNA, 25 bp, Saccharomyces pastorianus
attatccattttatcgcaagcgaac

SEQ ID NO: 148860 - DNA, 25 bp, Saccharomyces pastorianus
gaattgttttagctcactaccctct

SEQ ID NO: 148861 - DNA, 25 bp, Saccharomyces pastorianus
cgcctatgaatacgtgaattgtttt

SEQ ID NO: 148862 - DNA, 25 bp, Saccharomyces pastorianus
gcttctggcgttattatccatttta

SEQ ID NO: 148863 - DNA, 25 bp, Saccharomyces pastorianus
ttatcgcaagcgaacgcctatgaat

SEQ ID NO: 148864 - DNA, 25 bp, Saccharomyces pastorianus
gcaagacagtttacacagcagcgct

SEQ ID NO: 148865 - DNA, 25 bp, Saccharomyces pastorianus
ttctcttctttatgacaccaaggat

SEQ ID NO: 148866 - DNA, 25 bp, Saccharomyces pastorianus
gtattaaatattatctctccgctta

SEQ ID NO: 148867 - DNA, 25 bp, Saccharomyces pastorianus
aaacatattgtcctgtaccggtact

SEQ ID NO: 148868 - DNA, 25 bp, Saccharomyces pastorianus
gatcttatcttgtttttctcttctt

SEQ ID NO: 148869 - DNA, 25 bp, Saccharomyces pastorianus
atctctccgcttataatttttgtca

SEQ ID NO: 148870 - DNA, 25 bp, Saccharomyces pastorianus
gtaccggtactaaggtcaatggcag

SEQ ID NO: 148871 - DNA, 25 bp, Saccharomyces pastorianus
tacacagcagcgcttgttacgcaaa

SEQ ID NO: 148872 - DNA, 25 bp, Saccharomyces pastorianus
ccgcttataatttttgtcagtccta

SEQ ID NO: 148873 - DNA, 25 bp, Saccharomyces pastorianus
ttgtcagtcctattaaaaagcaaga

SEQ ID NO: 148874 - DNA, 25 bp, Saccharomyces pastorianus
gcgcttgttacgcaaatttgacgtt

SEQ ID NO: 148875 - DNA, 25 bp, Saccharomyces pastorianus
tcttttccgtaaaccttgcctatct

SEQ ID NO: 148876 - DNA, 25 bp, Saccharomyces pastorianus
ctatttattttgcactccactcttt

SEQ ID NO: 148877 - DNA, 25 bp, Saccharomyces pastorianus
tttgcactccactcttttccgtaaa

SEQ ID NO: 148878 - DNA, 25 bp, Saccharomyces pastorianus
tattatttctatacttttctccaaa

SEQ ID NO: 148879 - DNA, 25 bp, Saccharomyces pastorianus
acttttctccaaatatatcttcgtt

SEQ ID NO: 148880 - DNA, 25 bp, Saccharomyces pastorianus
ttcctctatttattttgcactccac

SEQ ID NO: 148881 - DNA, 25 bp, Saccharomyces pastorianus
cctttcctctatttattttgcactc

SEQ ID NO: 148882 - DNA, 25 bp, Saccharomyces pastorianus
tatatcttcgtttttcttttcgctt

SEQ ID NO: 148883 - DNA, 25 bp, Saccharomyces pastorianus
ttctgcctttcctctatttattttg

SEQ ID NO: 148884 - DNA, 25 bp, Saccharomyces pastorianus
atttattttgcactccactcttttc

SEQ ID NO: 148885 - DNA, 25 bp, Saccharomyces pastorianus
ttttccttctgcctttcctctattt

SEQ ID NO: 148886 - DNA, 25 bp, Saccharomyces pastorianus
cccgaatattcgaacaaaactatag

SEQ ID NO: 148887 - DNA, 25 bp, Saccharomyces pastorianus
gaaaccaaagatagaatccccgaat

SEQ ID NO: 148888 - DNA, 25 bp, Saccharomyces pastorianus
gaactggtaaatggggtcaacttgt

SEQ ID NO: 148889 - DNA, 25 bp, Saccharomyces pastorianus
agagcagcagtatatgaagagcaaa

SEQ ID NO: 148890 - DNA, 25 bp, Saccharomyces pastorianus
tagaatccccgaatattcgaacaaa

SEQ ID NO: 148891 - DNA, 25 bp, Saccharomyces pastorianus
caaaactatagcaaagataagccac

SEQ ID NO: 148892 - DNA, 25 bp, Saccharomyces pastorianus
caaagatagaatccccgaatattcg

SEQ ID NO: 148893 - DNA, 25 bp, Saccharomyces pastorianus
ggtcaacttgttgaagaaaccaaag

SEQ ID NO: 148894 - DNA, 25 bp, Saccharomyces pastorianus
gaatattcgaacaaaactatagcaa

SEQ ID NO: 148895 - DNA, 25 bp, Saccharomyces pastorianus
accaaagatagaatccccgaatatt

SEQ ID NO: 148896 - DNA, 25 bp, Saccharomyces pastorianus
atagaatccccgaatattcgaacaa

SEQ ID NO: 148897 - DNA, 25 bp, Saccharomyces pastorianus
agcggatcctcagtatcattgcagc

SEQ ID NO: 148898 - DNA, 25 bp, Saccharomyces pastorianus
taaatctctctttcacttcagcaaa

SEQ ID NO: 148899 - DNA, 25 bp, Saccharomyces pastorianus
gattggtgaggatcttccaccggct

SEQ ID NO: 148900 - DNA, 25 bp, Saccharomyces pastorianus
tccaggctcgagcaagagttccaat

SEQ ID NO: 148901 - DNA, 25 bp, Saccharomyces pastorianus
gaaaggccacaaattcttcatcaca

SEQ ID NO: 148902 - DNA, 25 bp, Saccharomyces pastorianus
gagcgcaacccacaatcgaaggtca

SEQ ID NO: 148903 - DNA, 25 bp, Saccharomyces pastorianus
acgttcatcgtcagttcggagcaac

SEQ ID NO: 148904 - DNA, 25 bp, Saccharomyces pastorianus
cagagttccctcgtatgataaagca

SEQ ID NO: 148905 - DNA, 25 bp, Saccharomyces pastorianus
aactgattctacatctgacgctaat

SEQ ID NO: 148906 - DNA, 25 bp, Saccharomyces pastorianus
tcacaagtctacatcctctttgttg

SEQ ID NO: 148907 - DNA, 25 bp, Saccharomyces pastorianus
tagtaggacacacttatcccactct

SEQ ID NO: 148908 - DNA, 25 bp, Saccharomyces pastorianus
taattacgaattccctttcagcgcg

SEQ ID NO: 148909 - DNA, 25 bp, Saccharomyces pastorianus
aaaaaagccctttctactgcatcat

SEQ ID NO: 148910 - DNA, 25 bp, Saccharomyces pastorianus
aagcagcccgacttgatctgtaaaa

SEQ ID NO: 148911 - DNA, 25 bp, Saccharomyces pastorianus
tgctgccgtcacttatgctctggaa

SEQ ID NO: 148912 - DNA, 25 bp, Saccharomyces pastorianus
tagaaggcctaccaaatgctgccgt

SEQ ID NO: 148913 - DNA, 25 bp, Saccharomyces pastorianus
tatgctctggaagctactatcgaga

SEQ ID NO: 148914 - DNA, 25 bp, Saccharomyces pastorianus
ctttggctttgagactttttggtag

SEQ ID NO: 148915 - DNA, 25 bp, Saccharomyces pastorianus
gagagacttaagcagcccgacttga

SEQ ID NO: 148916 - DNA, 25 bp, Saccharomyces pastorianus
ttacaaactgttcatgggccgcata

SEQ ID NO: 148917 - DNA, 25 bp, Saccharomyces pastorianus
ttcagcgcgattattcctgggtcat

SEQ ID NO: 148918 - DNA, 25 bp, Saccharomyces pastorianus
gccgcataagcgatactcaaagttt

SEQ ID NO: 148919 - DNA, 25 bp, Saccharomyces pastorianus
acgccggacgtctagattatgctat

SEQ ID NO: 148920 - DNA, 25 bp, Saccharomyces pastorianus
gaaatggctcattacgaacaaactt

SEQ ID NO: 148921 - DNA, 25 bp, Saccharomyces pastorianus
ttatgctatgtctccaagtctgcta

SEQ ID NO: 148922 - DNA, 25 bp, Saccharomyces pastorianus
aattaaccgtacagagaccgcaatg

SEQ ID NO: 148923 - DNA, 25 bp, Saccharomyces pastorianus
gacaacctgttctttattggctcac

SEQ ID NO: 148924 - DNA, 25 bp, Saccharomyces pastorianus
taatgtttaccacgtctgtgatccc

SEQ ID NO: 148925 - DNA, 25 bp, Saccharomyces pastorianus
gatattgcagcgtttatcctaaaag

SEQ ID NO: 148926 - DNA, 25 bp, Saccharomyces pastorianus
attggctcaccaattggattgttaa

SEQ ID NO: 148927 - DNA, 25 bp, Saccharomyces pastorianus
tacaggtttgaattacgccggacgt

SEQ ID NO: 148928 - DNA, 25 bp, Saccharomyces pastorianus
gaaagatttgccaggtactgatgaa

SEQ ID NO: 148929 - DNA, 25 bp, Saccharomyces pastorianus
atcttacgagaatgcttacaggttt

SEQ ID NO: 148930 - DNA, 25 bp, Saccharomyces pastorianus
ctatctaaggtctaatctggctcaa

SEQ ID NO: 148931 - DNA, 25 bp, Saccharomyces pastorianus
aaaacgcctcaaacggaagtagcag

SEQ ID NO: 148932 - DNA, 25 bp, Saccharomyces pastorianus
gatcatacaaatatccatcctccgc

SEQ ID NO: 148933 - DNA, 25 bp, Saccharomyces pastorianus
gacatccacatcttttaaggcagca

SEQ ID NO: 148934 - DNA, 25 bp, Saccharomyces pastorianus
atctggctcaatccttaccgattaa

SEQ ID NO: 148935 - DNA, 25 bp, Saccharomyces pastorianus
gtttcaaacctcttcaatttatcgg

SEQ ID NO: 148936 - DNA, 25 bp, Saccharomyces pastorianus
ggaaaactgcaattagcctatctaa

SEQ ID NO: 148937 - DNA, 25 bp, Saccharomyces pastorianus
atcggactttttacagttgttcaat

SEQ ID NO: 148938 - DNA, 25 bp, Saccharomyces pastorianus
taagcagctcaaattcgacgacagt

SEQ ID NO: 148939 - DNA, 25 bp, Saccharomyces pastorianus
agtaatgatgatccgaccacgacgc

SEQ ID NO: 148940 - DNA, 25 bp, Saccharomyces pastorianus
gacgcctcctgcagaatcgcaagat

SEQ ID NO: 148941 - DNA, 25 bp, Saccharomyces pastorianus
gccatcactgcgaaaaagccttatt

SEQ ID NO: 148942 - DNA, 25 bp, Saccharomyces pastorianus
aactactaagtcaagccaagctcgg

SEQ ID NO: 148943 - DNA, 25 bp, Saccharomyces pastorianus
attcatcatcattcagcggagttaa

SEQ ID NO: 148944 - DNA, 25 bp, Saccharomyces pastorianus
gatggcgatactagcgaggattata

SEQ ID NO: 148945 - DNA, 25 bp, Saccharomyces pastorianus
aatagacaaccactatttcctcggc

SEQ ID NO: 148946 - DNA, 25 bp, Saccharomyces pastorianus
aagccttattggtgccaggtcacag

SEQ ID NO: 148947 - DNA, 25 bp, Saccharomyces pastorianus
atttcccgggtcatcccagaggagt

SEQ ID NO: 148948 - DNA, 25 bp, Saccharomyces pastorianus
aagctcggccggcagtcagatctat

SEQ ID NO: 148949 - DNA, 25 bp, Saccharomyces pastorianus
aagaatcaaatcacgcaaaggccat

SEQ ID NO: 148950 - DNA, 25 bp, Saccharomyces pastorianus
atcaagagttcccacgagcagcacc

SEQ ID NO: 148951 - DNA, 25 bp, Saccharomyces pastorianus
ctatttcctcggcacgttaatcaaa

SEQ ID NO: 148952 - DNA, 25 bp, Saccharomyces pastorianus
gaaggtccaagtgcgaccaccatta

SEQ ID NO: 148953 - DNA, 25 bp, Saccharomyces pastorianus
gaggttgactactacgagctatacg

SEQ ID NO: 148954 - DNA, 25 bp, Saccharomyces pastorianus
gaatcacgactcctgaattgttcat

SEQ ID NO: 148955 - DNA, 25 bp, Saccharomyces pastorianus
ggttccacaacaacatcacagttca

SEQ ID NO: 148956 - DNA, 25 bp, Saccharomyces pastorianus
gcccttgtggcaacgatttttctat

SEQ ID NO: 148957 - DNA, 25 bp, Saccharomyces pastorianus
atgttgattgtccagttcttccaga

SEQ ID NO: 148958 - DNA, 25 bp, Saccharomyces pastorianus
gaaccaagaaataggcgccgcgcca

SEQ ID NO: 148959 - DNA, 25 bp, Saccharomyces pastorianus
ccattcttagcgcttgcttttcaat

SEQ ID NO: 148960 - DNA, 25 bp, Saccharomyces pastorianus
atctgatacccttcgaaaactctac

SEQ ID NO: 148961 - DNA, 25 bp, Saccharomyces pastorianus
ttctaattacgatccctctaccttt

SEQ ID NO: 148962 - DNA, 25 bp, Saccharomyces pastorianus
gtaggtataacccacattttgcatg

SEQ ID NO: 148963 - DNA, 25 bp, Saccharomyces pastorianus
tgcttctcaaacatggcgctgatcc

SEQ ID NO: 148964 - DNA, 25 bp, Saccharomyces pastorianus
tatctacattgttgacctgcttctc

SEQ ID NO: 148965 - DNA, 25 bp, Saccharomyces pastorianus
gtgacttaatacttagcggtgcaaa

SEQ ID NO: 148966 - DNA, 25 bp, Saccharomyces pastorianus
ggagcaaatcctaaccaggcggcag

SEQ ID NO: 148967 - DNA, 25 bp, Saccharomyces pastorianus
gcgctgatccgacgctcaaagatga

SEQ ID NO: 148968 - DNA, 25 bp, Saccharomyces pastorianus
gcactgggccgcaaggtacggtaat

SEQ ID NO: 148969 - DNA, 25 bp, Saccharomyces pastorianus
cctactttgggctgcttatcaagga

SEQ ID NO: 148970 - DNA, 25 bp, Saccharomyces pastorianus
aatgctctccattgtgctctagttg

SEQ ID NO: 148971 - DNA, 25 bp, Saccharomyces pastorianus
gactgttttgatctagccgaaggaa

SEQ ID NO: 148972 - DNA, 25 bp, Saccharomyces pastorianus
aatttggcgccacagttacatggac

SEQ ID NO: 148973 - DNA, 25 bp, Saccharomyces pastorianus
gagcagggtcttaacatcatgcatt

SEQ ID NO: 148974 - DNA, 25 bp, Saccharomyces pastorianus
tttgcagcagtatcacttgggtaac

SEQ ID NO: 148975 - DNA, 25 bp, Saccharomyces pastorianus
tgagcagtgcatcttcacaggcgac

SEQ ID NO: 148976 - DNA, 25 bp, Saccharomyces pastorianus
tgaagtacccgataatttgcagcag

SEQ ID NO: 148977 - DNA, 25 bp, Saccharomyces pastorianus
ttcacaggcgacactttattcattg

SEQ ID NO: 148978 - DNA, 25 bp, Saccharomyces pastorianus
agcgctttatagtatcttgtgccaa

SEQ ID NO: 148979 - DNA, 25 bp, Saccharomyces pastorianus
gtattaggactccatgccatacaaa

SEQ ID NO: 148980 - DNA, 25 bp, Saccharomyces pastorianus
aattggtggatcgaagtcctccccg

SEQ ID NO: 148981 - DNA, 25 bp, Saccharomyces pastorianus
gatcgtgccgttagactagcagtcg

SEQ ID NO: 148982 - DNA, 25 bp, Saccharomyces pastorianus
gtcggcgatactgctgggacttatc

SEQ ID NO: 148983 - DNA, 25 bp, Saccharomyces pastorianus
ggacttatcccagatccgtagtgat

SEQ ID NO: 148984 - DNA, 25 bp, Saccharomyces pastorianus
ctggtcacttcaccctgagagatga

SEQ ID NO: 148985 - DNA, 25 bp, Saccharomyces pastorianus
acaggtggtgtcaattatagttatt

SEQ ID NO: 148986 - DNA, 25 bp, Saccharomyces pastorianus
gaccctgcagaaccacttgaggtgt

SEQ ID NO: 148987 - DNA, 25 bp, Saccharomyces pastorianus
gaaatatgcatgttaagcctataaa

SEQ ID NO: 148988 - DNA, 25 bp, Saccharomyces pastorianus
gaaactcatggctgattgaccctgc

SEQ ID NO: 148989 - DNA, 25 bp, Saccharomyces pastorianus
agcctataaaaatgcgatggttgac

SEQ ID NO: 148990 - DNA, 25 bp, Saccharomyces pastorianus
agcactgaagacaggagaaactcat

SEQ ID NO: 148991 - DNA, 25 bp, Saccharomyces pastorianus
tgattgaccctgcagaaccacttga

SEQ ID NO: 148992 - DNA, 25 bp, Saccharomyces pastorianus
gaaccacttgaggtgtcgccaaaat

SEQ ID NO: 148993 - DNA, 25 bp, Saccharomyces pastorianus
ggtgtcgccaaaattaagcgccgaa

SEQ ID NO: 148994 - DNA, 25 bp, Saccharomyces pastorianus
gttatttactaagcactgaagacag

SEQ ID NO: 148995 - DNA, 25 bp, Saccharomyces pastorianus
aaaaatgcgatggttgacaggtggt

SEQ ID NO: 148996 - DNA, 25 bp, Saccharomyces pastorianus
tgtccgattcaaggtgggtcactgc

SEQ ID NO: 148997 - DNA, 25 bp, Saccharomyces pastorianus
aactggtggctatcgagcattcttt

SEQ ID NO: 148998 - DNA, 25 bp, Saccharomyces pastorianus
ataaccaaaattactcccgtcgctg

SEQ ID NO: 148999 - DNA, 25 bp, Saccharomyces pastorianus
agattaattccgttgccatcgagaa

SEQ ID NO: 149000 - DNA, 25 bp, Saccharomyces pastorianus
actgccaaatttatctaccaccttg

SEQ ID NO: 149001 - DNA, 25 bp, Saccharomyces pastorianus
cattcttttattttgctgagctcag

SEQ ID NO: 149002 - DNA, 25 bp, Saccharomyces pastorianus
gtcagaaccggtactaacagcatat

SEQ ID NO: 149003 - DNA, 25 bp, Saccharomyces pastorianus
gtagaaataatgtccaacccgccca

SEQ ID NO: 149004 - DNA, 25 bp, Saccharomyces pastorianus
gtcaacccggcttcaacaatagcag

SEQ ID NO: 149005 - DNA, 25 bp, Saccharomyces pastorianus
gcggcaacagctactctcggaataa

SEQ ID NO: 149006 - DNA, 25 bp, Saccharomyces pastorianus
ggaatagctacaacagtcaacccgg

SEQ ID NO: 149007 - DNA, 25 bp, Saccharomyces pastorianus
gctgagttatgggttccgggtcttc

SEQ ID NO: 149008 - DNA, 25 bp, Saccharomyces pastorianus
gaatataatcccaacacaacgcact

SEQ ID NO: 149009 - DNA, 25 bp, Saccharomyces pastorianus
agggaatacttgtccgctgagttat

SEQ ID NO: 149010 - DNA, 25 bp, Saccharomyces pastorianus
cttgccactcatgaaccacatttta

SEQ ID NO: 149011 - DNA, 25 bp, Saccharomyces pastorianus
accgtcccaggtgaaggtgagcaca

SEQ ID NO: 149012 - DNA, 25 bp, Saccharomyces pastorianus
acaacgcactgtatatacggtttgg

SEQ ID NO: 149013 - DNA, 25 bp, Saccharomyces pastorianus
tccgggtcttccatttacatttgat

SEQ ID NO: 149014 - DNA, 25 bp, Saccharomyces pastorianus
tgactttttaccacatttaccatgc

SEQ ID NO: 149015 - DNA, 25 bp, Saccharomyces pastorianus
gaacctcccttctgttgaaacgcta

SEQ ID NO: 149016 - DNA, 25 bp, Saccharomyces pastorianus
gaacaacctttcttgtggctgcaca

SEQ ID NO: 149017 - DNA, 25 bp, Saccharomyces pastorianus
acatgacctgcgacggtgtcttgaa

SEQ ID NO: 149018 - DNA, 25 bp, Saccharomyces pastorianus
ttccaccctggatttgcgtttaaag

SEQ ID NO: 149019 - DNA, 25 bp, Saccharomyces pastorianus
gttgttgttaccgtttggctgaatt

SEQ ID NO: 149020 - DNA, 25 bp, Saccharomyces pastorianus
tggaacgtccacaacaaccggcaat

SEQ ID NO: 149021 - DNA, 25 bp, Saccharomyces pastorianus
ttctagacctatctcattgagcctc

SEQ ID NO: 149022 - DNA, 25 bp, Saccharomyces pastorianus
atcgatggccatctttcttatgtta

SEQ ID NO: 149023 - DNA, 25 bp, Saccharomyces pastorianus
ggtagaagcacctcgattccaatca

SEQ ID NO: 149024 - DNA, 25 bp, Saccharomyces pastorianus
gatggctatctgatcacacacgagt

SEQ ID NO: 149025 - DNA, 25 bp, Saccharomyces pastorianus
gctggtttggccattcaagttgcat

SEQ ID NO: 149026 - DNA, 25 bp, Saccharomyces pastorianus
gaaactttaccacatactgacgatg

SEQ ID NO: 149027 - DNA, 25 bp, Saccharomyces pastorianus
gtttcacttccttttccgtatatat

SEQ ID NO: 149028 - DNA, 25 bp, Saccharomyces pastorianus
cgggccatgttgatcctgaaacttt

SEQ ID NO: 149029 - DNA, 25 bp, Saccharomyces pastorianus
gaagaacgatactggtggtaaagat

SEQ ID NO: 149030 - DNA, 25 bp, Saccharomyces pastorianus
taaacggtgacatcgggttaagtgg

SEQ ID NO: 149031 - DNA, 25 bp, Saccharomyces pastorianus
gatgccttgggtaactgtatttaaa

SEQ ID NO: 149032 - DNA, 25 bp, Saccharomyces pastorianus
aaccgtcagaaaaagtcatgggcat

SEQ ID NO: 149033 - DNA, 25 bp, Saccharomyces pastorianus
ggtacgttcaattccataatgacta

SEQ ID NO: 149034 - DNA, 25 bp, Saccharomyces pastorianus
ctaggtggttatcccgatgtttctg

SEQ ID NO: 149035 - DNA, 25 bp, Saccharomyces pastorianus
attgttggcaagatagtcgtcaaac

SEQ ID NO: 149036 - DNA, 25 bp, Saccharomyces pastorianus
gtagcggtacgttcaattccataat

SEQ ID NO: 149037 - DNA, 25 bp, Saccharomyces pastorianus
gttatcccgatgtttctgcgggaaa

SEQ ID NO: 149038 - DNA, 25 bp, Saccharomyces pastorianus
tcatgggcataaacggtgacatcgg

SEQ ID NO: 149039 - DNA, 25 bp, Saccharomyces pastorianus
cgtcaaactaggtggttatcccgat

SEQ ID NO: 149040 - DNA, 25 bp, Saccharomyces pastorianus
gaagacgtcttcaaactcagcggct

SEQ ID NO: 149041 - DNA, 25 bp, Saccharomyces pastorianus
ttaaccgcaaacacgttggccaaga

SEQ ID NO: 149042 - DNA, 25 bp, Saccharomyces pastorianus
aaatggcctctactactggatttcc

SEQ ID NO: 149043 - DNA, 25 bp, Saccharomyces pastorianus
ggatttccttcgacacttggtggta

SEQ ID NO: 149044 - DNA, 25 bp, Saccharomyces pastorianus
aactcagcggcttctcagacaaata

SEQ ID NO: 149045 - DNA, 25 bp, Saccharomyces pastorianus
gtcgtacgtacagcaactcttcaaa

SEQ ID NO: 149046 - DNA, 25 bp, Saccharomyces pastorianus
atacttctttcaacagcaccaattc

SEQ ID NO: 149047 - DNA, 25 bp, Saccharomyces pastorianus
ttagttgtcgcaccattaaccgcaa

SEQ ID NO: 149048 - DNA, 25 bp, Saccharomyces pastorianus
gcaccaattctaatgctggcaatat

SEQ ID NO: 149049 - DNA, 25 bp, Saccharomyces pastorianus
gattgcccttggtttatgtgacaac

SEQ ID NO: 149050 - DNA, 25 bp, Saccharomyces pastorianus
gttgtatcgcaacatcctcaaattg

SEQ ID NO: 149051 - DNA, 25 bp, Saccharomyces pastorianus
ttgactctctgtgggttggcatcgt

SEQ ID NO: 149052 - DNA, 25 bp, Saccharomyces pastorianus
gttaccaatcgtcaccgtattacaa

SEQ ID NO: 149053 - DNA, 25 bp, Saccharomyces pastorianus
atcaggtcttagcagtacttccact

SEQ ID NO: 149054 - DNA, 25 bp, Saccharomyces pastorianus
gtaccgtttatgttagttgcctcag

SEQ ID NO: 149055 - DNA, 25 bp, Saccharomyces pastorianus
agctggttatgtttccttgtatcct

SEQ ID NO: 149056 - DNA, 25 bp, Saccharomyces pastorianus
tataatcagctcgtggtttgcctta

SEQ ID NO: 149057 - DNA, 25 bp, Saccharomyces pastorianus
tggcatcgtttttgttcgggtggca

SEQ ID NO: 149058 - DNA, 25 bp, Saccharomyces pastorianus
atgctagtcatcattccgttcacat

SEQ ID NO: 149059 - DNA, 25 bp, Saccharomyces pastorianus
aagatttgttggctcgttgactctc

SEQ ID NO: 149060 - DNA, 25 bp, Saccharomyces pastorianus
acttccacttttgtttgatccatcg

SEQ ID NO: 149061 - DNA, 25 bp, Saccharomyces pastorianus
tatcctcttctgtacaaaggccaag

SEQ ID NO: 149062 - DNA, 25 bp, Saccharomyces pastorianus
ataaatactcactacggtaatgttg

SEQ ID NO: 149063 - DNA, 25 bp, Saccharomyces pastorianus
taaatactcactacggtaatgttga

SEQ ID NO: 149064 - DNA, 25 bp, Saccharomyces pastorianus
aaatactcactacggtaatgttgaa

SEQ ID NO: 149065 - DNA, 25 bp, Saccharomyces pastorianus
tactcactacggtaatgttgaaatt

SEQ ID NO: 149066 - DNA, 25 bp, Saccharomyces pastorianus
aatactcactacggtaatgttgaaa

SEQ ID NO: 149067 - DNA, 25 bp, Saccharomyces pastorianus
ctcactacggtaatgttgaaattac

SEQ ID NO: 149068 - DNA, 25 bp, Saccharomyces pastorianus
tcactacggtaatgttgaaattacc

SEQ ID NO: 149069 - DNA, 25 bp, Saccharomyces pastorianus
cactacggtaatgttgaaattaccg

SEQ ID NO: 149070 - DNA, 25 bp, Saccharomyces pastorianus
actcactacggtaatgttgaaatta

SEQ ID NO: 149071 - DNA, 25 bp, Saccharomyces pastorianus
atactcactacggtaatgttgaaat

SEQ ID NO: 149072 - DNA, 25 bp, Saccharomyces pastorianus
aggttttgaagactgccgcgaccga

SEQ ID NO: 149073 - DNA, 25 bp, Saccharomyces pastorianus
ttcgaggcaaaatatggctgtgaca

SEQ ID NO: 149074 - DNA, 25 bp, Saccharomyces pastorianus
actgccgcgaccgaaaaaggtgagg

SEQ ID NO: 149075 - DNA, 25 bp, Saccharomyces pastorianus
ggttttgaagactgccgcgaccgaa

SEQ ID NO: 149076 - DNA, 25 bp, Saccharomyces pastorianus
gaagactgccgcgaccgaaaaaggt

SEQ ID NO: 149077 - DNA, 25 bp, Saccharomyces pastorianus
cgaggcaaaatatggctgtgacaaa

SEQ ID NO: 149078 - DNA, 25 bp, Saccharomyces pastorianus
gttttgaagactgccgcgaccgaaa

SEQ ID NO: 149079 - DNA, 25 bp, Saccharomyces pastorianus
agactgccgcgaccgaaaaaggtga

SEQ ID NO: 149080 - DNA, 25 bp, Saccharomyces pastorianus
ctgtgacaaagaagccaaagttaaa

SEQ ID NO: 149081 - DNA, 25 bp, Saccharomyces pastorianus
aaggttttgaagactgccgcgaccg

SEQ ID NO: 149082 - DNA, 25 bp, Saccharomyces pastorianus
gatcgttcgaggcaaaatatggctg

SEQ ID NO: 149083 - DNA, 25 bp, Saccharomyces pastorianus
caagagactttgacgatgggtgtga

SEQ ID NO: 149084 - DNA, 25 bp, Saccharomyces pastorianus
gaaatatcactagaagcggccattg

SEQ ID NO: 149085 - DNA, 25 bp, Saccharomyces pastorianus
aaatctttggaaatggtcgacacct

SEQ ID NO: 149086 - DNA, 25 bp, Saccharomyces pastorianus
gaaaccctagcgtctttgaacgtga

SEQ ID NO: 149087 - DNA, 25 bp, Saccharomyces pastorianus
gggtgtgatgctggacgactatatt

SEQ ID NO: 149088 - DNA, 25 bp, Saccharomyces pastorianus
gtcgacacctcaagaaacaccctgg

SEQ ID NO: 149089 - DNA, 25 bp, Saccharomyces pastorianus
gagtgaacctaattcggaactgctg

SEQ ID NO: 149090 - DNA, 25 bp, Saccharomyces pastorianus
agaaacactcacaattgggcaaatt

SEQ ID NO: 149091 - DNA, 25 bp, Saccharomyces pastorianus
ctatattaggtcattggcaagcgta

SEQ ID NO: 149092 - DNA, 25 bp, Saccharomyces pastorianus
aacaccctggctgcatcaacagaag

SEQ ID NO: 149093 - DNA, 25 bp, Saccharomyces pastorianus
gaattccaaggtttctctactgata

SEQ ID NO: 149094 - DNA, 25 bp, Saccharomyces pastorianus
ttctttggtgattccggaacaccct

SEQ ID NO: 149095 - DNA, 25 bp, Saccharomyces pastorianus
tacttcaatagttatgaacccggag

SEQ ID NO: 149096 - DNA, 25 bp, Saccharomyces pastorianus
gtgattccggaacaccctcaaccgt

SEQ ID NO: 149097 - DNA, 25 bp, Saccharomyces pastorianus
gacagtaacagtggcgttctttggt

SEQ ID NO: 149098 - DNA, 25 bp, Saccharomyces pastorianus
aaccgtctccaatgctacttcaata

SEQ ID NO: 149099 - DNA, 25 bp, Saccharomyces pastorianus
gacttgacagtaacagtggcgttct

SEQ ID NO: 149100 - DNA, 25 bp, Saccharomyces pastorianus
gtctccaatgctacttcaatagtta

SEQ ID NO: 149101 - DNA, 25 bp, Saccharomyces pastorianus
aacagtggcgttctttggtgattcc

SEQ ID NO: 149102 - DNA, 25 bp, Saccharomyces pastorianus
ggcgttctttggtgattccggaaca

SEQ ID NO: 149103 - DNA, 25 bp, Saccharomyces pastorianus
ttggtgattccggaacaccctcaac

SEQ ID NO: 149104 - DNA, 25 bp, Saccharomyces pastorianus
agtggcgttctttggtgattccgga

SEQ ID NO: 149105 - DNA, 25 bp, Saccharomyces pastorianus
tcaccatcaggatcaaacccagagt

SEQ ID NO: 149106 - DNA, 25 bp, Saccharomyces pastorianus
gaagacaaggaagcgcaaagaccgg

SEQ ID NO: 149107 - DNA, 25 bp, Saccharomyces pastorianus
tcgatgtatctgaagacaaggaagc

SEQ ID NO: 149108 - DNA, 25 bp, Saccharomyces pastorianus
caaggataataattcgagctcacca

SEQ ID NO: 149109 - DNA, 25 bp, Saccharomyces pastorianus
gagctcaccatcaggatcaaaccca

SEQ ID NO: 149110 - DNA, 25 bp, Saccharomyces pastorianus
gtatctgaagacaaggaagcgcaaa

SEQ ID NO: 149111 - DNA, 25 bp, Saccharomyces pastorianus
catcaggatcaaacccagagtatct

SEQ ID NO: 149112 - DNA, 25 bp, Saccharomyces pastorianus
tcgagctcaccatcaggatcaaacc

SEQ ID NO: 149113 - DNA, 25 bp, Saccharomyces pastorianus
attcgagctcaccatcaggatcaaa

SEQ ID NO: 149114 - DNA, 25 bp, Saccharomyces pastorianus
accatcaggatcaaacccagagtat

SEQ ID NO: 149115 - DNA, 25 bp, Saccharomyces pastorianus
ggcattcaggtacaaggataataat

SEQ ID NO: 149116 - DNA, 25 bp, Saccharomyces pastorianus
acatggtggtcctttcacttcggaa

SEQ ID NO: 149117 - DNA, 25 bp, Saccharomyces pastorianus
accccaaccaattaatcgattctgc

SEQ ID NO: 149118 - DNA, 25 bp, Saccharomyces pastorianus
aaagtggctgtcactggagactcaa

SEQ ID NO: 149119 - DNA, 25 bp, Saccharomyces pastorianus
ggacggtaaagtcgctatccaccga

SEQ ID NO: 149120 - DNA, 25 bp, Saccharomyces pastorianus
gtttatacaactccactaactcaat

SEQ ID NO: 149121 - DNA, 25 bp, Saccharomyces pastorianus
gaacatccaggagaaccgaacgtta

SEQ ID NO: 149122 - DNA, 25 bp, Saccharomyces pastorianus
agcgatttctggttcttgtgcacta

SEQ ID NO: 149123 - DNA, 25 bp, Saccharomyces pastorianus
gatctagtccgttatgtagcctatc

SEQ ID NO: 149124 - DNA, 25 bp, Saccharomyces pastorianus
agggcatttggagactatcgctaca

SEQ ID NO: 149125 - DNA, 25 bp, Saccharomyces pastorianus
gcaaacactttaccagcgatttctg

SEQ ID NO: 149126 - DNA, 25 bp, Saccharomyces pastorianus
gttcattacaaccatccagggcatt

SEQ ID NO: 149127 - DNA, 25 bp, Saccharomyces pastorianus
acatcttatgttggagccgcttcag

SEQ ID NO: 149128 - DNA, 25 bp, Saccharomyces pastorianus
tgccaatctttggtgtcttgtggtg

SEQ ID NO: 149129 - DNA, 25 bp, Saccharomyces pastorianus
taaggccttgttccatggctgttat

SEQ ID NO: 149130 - DNA, 25 bp, Saccharomyces pastorianus
taccctggtttctggaaatccgcag

SEQ ID NO: 149131 - DNA, 25 bp, Saccharomyces pastorianus
gattatcgcttttattccctgggta

SEQ ID NO: 149132 - DNA, 25 bp, Saccharomyces pastorianus
ggtttgattcttttaggcgctactc

SEQ ID NO: 149133 - DNA, 25 bp, Saccharomyces pastorianus
gcacctgctctaactttcattatgg

SEQ ID NO: 149134 - DNA, 25 bp, Saccharomyces pastorianus
aatccgcagtggtattagtctttct

SEQ ID NO: 149135 - DNA, 25 bp, Saccharomyces pastorianus
cactgcaagttatacccctgaggac

SEQ ID NO: 149136 - DNA, 25 bp, Saccharomyces pastorianus
ggaacttaccaacaatgaccacctt

SEQ ID NO: 149137 - DNA, 25 bp, Saccharomyces pastorianus
atgaccaccttaatctacttcactg

SEQ ID NO: 149138 - DNA, 25 bp, Saccharomyces pastorianus
tatcctttgatggtcgttagtttac

SEQ ID NO: 149139 - DNA, 25 bp, Saccharomyces pastorianus
acctctttctttttgatgcttcaat

SEQ ID NO: 149140 - DNA, 25 bp, Saccharomyces pastorianus
gtacctctttctttttgatgcttca

SEQ ID NO: 149141 - DNA, 25 bp, Saccharomyces pastorianus
tacctctttctttttgatgcttcaa

SEQ ID NO: 149142 - DNA, 25 bp, Saccharomyces pastorianus
atggaatgtacctctttctttttga

SEQ ID NO: 149143 - DNA, 25 bp, Saccharomyces pastorianus
gaatgtacctctttctttttgatgc

SEQ ID NO: 149144 - DNA, 25 bp, Saccharomyces pastorianus
ggaatgtacctctttctttttgatg

SEQ ID NO: 149145 - DNA, 25 bp, Saccharomyces pastorianus
aatgtacctctttctttttgatgct

SEQ ID NO: 149146 - DNA, 25 bp, Saccharomyces pastorianus
atgtacctctttctttttgatgctt

SEQ ID NO: 149147 - DNA, 25 bp, Saccharomyces pastorianus
tttgatgcttcaatatcctttgatg

SEQ ID NO: 149148 - DNA, 25 bp, Saccharomyces pastorianus
ctctttctttttgatgcttcaatat

SEQ ID NO: 149149 - DNA, 25 bp, Saccharomyces pastorianus
cagggagaggtcgtcaatttgaact

SEQ ID NO: 149150 - DNA, 25 bp, Saccharomyces pastorianus
gcattcgactactttgtgtgtaaca

SEQ ID NO: 149151 - DNA, 25 bp, Saccharomyces pastorianus
gagcatcgataatgcaagcctggtt

SEQ ID NO: 149152 - DNA, 25 bp, Saccharomyces pastorianus
ggaacgacataatcccatcttgggt

SEQ ID NO: 149153 - DNA, 25 bp, Saccharomyces pastorianus
aaagatccctttatcacagaacaat

SEQ ID NO: 149154 - DNA, 25 bp, Saccharomyces pastorianus
tcccatcttgggtaacctaacgact

SEQ ID NO: 149155 - DNA, 25 bp, Saccharomyces pastorianus
tgcaagcctggtttgatcagaaaat

SEQ ID NO: 149156 - DNA, 25 bp, Saccharomyces pastorianus
gttcacagtgacattggtagttgtt

SEQ ID NO: 149157 - DNA, 25 bp, Saccharomyces pastorianus
aactggtgacctgggctttatcaaa

SEQ ID NO: 149158 - DNA, 25 bp, Saccharomyces pastorianus
taagctatttgagaactggtgacct

SEQ ID NO: 149159 - DNA, 25 bp, Saccharomyces pastorianus
taagttgcacgaattcacagggaga

SEQ ID NO: 149160 - DNA, 25 bp, Saccharomyces pastorianus
tatatttggtgcgaatgctgcctct

SEQ ID NO: 149161 - DNA, 25 bp, Saccharomyces pastorianus
ggtgcagcttctaatcaatcttcat

SEQ ID NO: 149162 - DNA, 25 bp, Saccharomyces pastorianus
aatacaaacagctcattcacgccat

SEQ ID NO: 149163 - DNA, 25 bp, Saccharomyces pastorianus
ggtctcaatccttttacatcagcaa

SEQ ID NO: 149164 - DNA, 25 bp, Saccharomyces pastorianus
gtgtttgccggctctaataaccaac

SEQ ID NO: 149165 - DNA, 25 bp, Saccharomyces pastorianus
aatgtgccctctgcttttaatttta

SEQ ID NO: 149166 - DNA, 25 bp, Saccharomyces pastorianus
atgctgcctctggttctaattcaaa

SEQ ID NO: 149167 - DNA, 25 bp, Saccharomyces pastorianus
ttattcaataaacctccttccacga

SEQ ID NO: 149168 - DNA, 25 bp, Saccharomyces pastorianus
ctggtggcggctctgtatttaatat

SEQ ID NO: 149169 - DNA, 25 bp, Saccharomyces pastorianus
gacaacttcttttgggcagccgcag

SEQ ID NO: 149170 - DNA, 25 bp, Saccharomyces pastorianus
tcacgccatcaacagttcctaatat

SEQ ID NO: 149171 - DNA, 25 bp, Saccharomyces pastorianus
agcaatattgactcctctgcacaat

SEQ ID NO: 149172 - DNA, 25 bp, Saccharomyces pastorianus
caagctttgtctttggtgcaagtga

SEQ ID NO: 149173 - DNA, 25 bp, Saccharomyces pastorianus
gacgcatcagggaaaccaagctttg

SEQ ID NO: 149174 - DNA, 25 bp, Saccharomyces pastorianus
agaagcctactttacttttgggcag

SEQ ID NO: 149175 - DNA, 25 bp, Saccharomyces pastorianus
gaggatacaaacaccaagcctttat

SEQ ID NO: 149176 - DNA, 25 bp, Saccharomyces pastorianus
tggtaaagccgccaccgcgaaagaa

SEQ ID NO: 149177 - DNA, 25 bp, Saccharomyces pastorianus
gaaacacacaccaaaccatctgaga

SEQ ID NO: 149178 - DNA, 25 bp, Saccharomyces pastorianus
aaggcgtttacctgttagcgaggat

SEQ ID NO: 149179 - DNA, 25 bp, Saccharomyces pastorianus
catctgagacacctgccacaatagt

SEQ ID NO: 149180 - DNA, 25 bp, Saccharomyces pastorianus
aagcctttattcgatttcggcaaga

SEQ ID NO: 149181 - DNA, 25 bp, Saccharomyces pastorianus
gaggtacaccattatttacattcgg

SEQ ID NO: 149182 - DNA, 25 bp, Saccharomyces pastorianus
cgctgtttttggaccgctctgaaat

SEQ ID NO: 149183 - DNA, 25 bp, Saccharomyces pastorianus
ctccagcatactccgcatattttga

SEQ ID NO: 149184 - DNA, 25 bp, Saccharomyces pastorianus
gttgcactgtgatatcgactacgat

SEQ ID NO: 149185 - DNA, 25 bp, Saccharomyces pastorianus
ttattaccatgttccatttcactcc

SEQ ID NO: 149186 - DNA, 25 bp, Saccharomyces pastorianus
gttagcgacgatcagggactttcat

SEQ ID NO: 149187 - DNA, 25 bp, Saccharomyces pastorianus
agctactatccccactttatgggag

SEQ ID NO: 149188 - DNA, 25 bp, Saccharomyces pastorianus
gggactttcatacaatttgtgccat

SEQ ID NO: 149189 - DNA, 25 bp, Saccharomyces pastorianus
tcccatcctgagcttatccatgaaa

SEQ ID NO: 149190 - DNA, 25 bp, Saccharomyces pastorianus
agttcattctattggtgctgcgctg

SEQ ID NO: 149191 - DNA, 25 bp, Saccharomyces pastorianus
gaaaaagtatgcctttgccatttcc

SEQ ID NO: 149192 - DNA, 25 bp, Saccharomyces pastorianus
gctctgaaatccatcactttggtga

SEQ ID NO: 149193 - DNA, 25 bp, Saccharomyces pastorianus
gggatgcatctattaaggcggtatt

SEQ ID NO: 149194 - DNA, 25 bp, Saccharomyces pastorianus
cattccttgggttctggttccgcaa

SEQ ID NO: 149195 - DNA, 25 bp, Saccharomyces pastorianus
aaactactctgaacattccttgggt

SEQ ID NO: 149196 - DNA, 25 bp, Saccharomyces pastorianus
atctcttctttgatggatgcgctat

SEQ ID NO: 149197 - DNA, 25 bp, Saccharomyces pastorianus
acccaagcggcatctttcataaatc

SEQ ID NO: 149198 - DNA, 25 bp, Saccharomyces pastorianus
tacgtcaccttgttgaattacgaag

SEQ ID NO: 149199 - DNA, 25 bp, Saccharomyces pastorianus
tagacgtaccaagaccaatgcaagt

SEQ ID NO: 149200 - DNA, 25 bp, Saccharomyces pastorianus
acggaaatggtcctatctcttcttt

SEQ ID NO: 149201 - DNA, 25 bp, Saccharomyces pastorianus
agttgtcaacatcgaaggctacgga

SEQ ID NO: 149202 - DNA, 25 bp, Saccharomyces pastorianus
aaattgaacccagagcgtagagctt

SEQ ID NO: 149203 - DNA, 25 bp, Saccharomyces pastorianus
gttgatttctccaatactctacaga

SEQ ID NO: 149204 - DNA, 25 bp, Saccharomyces pastorianus
gggcgtttgctccaccaaaaatggt

SEQ ID NO: 149205 - DNA, 25 bp, Saccharomyces pastorianus
cattcgttcatagagctagctgagc

SEQ ID NO: 149206 - DNA, 25 bp, Saccharomyces pastorianus
cacgttggctgtctactgacttgag

SEQ ID NO: 149207 - DNA, 25 bp, Saccharomyces pastorianus
tattcaaaaggctccacgttggctg

SEQ ID NO: 149208 - DNA, 25 bp, Saccharomyces pastorianus
taatcaatctttaccggacccaatg

SEQ ID NO: 149209 - DNA, 25 bp, Saccharomyces pastorianus
ggatttggcctgacaaaactattca

SEQ ID NO: 149210 - DNA, 25 bp, Saccharomyces pastorianus
aaaatatagggcgtttgctccacca

SEQ ID NO: 149211 - DNA, 25 bp, Saccharomyces pastorianus
aatatgctacgggacccatcggtaa

SEQ ID NO: 149212 - DNA, 25 bp, Saccharomyces pastorianus
tcccacccgtcaaactgacttataa

SEQ ID NO: 149213 - DNA, 25 bp, Saccharomyces pastorianus
tctactgacttgagggacggtaatc

SEQ ID NO: 149214 - DNA, 25 bp, Saccharomyces pastorianus
taagaaggtctatcccacccgtcaa

SEQ ID NO: 149215 - DNA, 25 bp, Saccharomyces pastorianus
tgaaccagttaacgttgtcaccgct

SEQ ID NO: 149216 - DNA, 25 bp, Saccharomyces pastorianus
aattggtaccattccgagatgaaac

SEQ ID NO: 149217 - DNA, 25 bp, Saccharomyces pastorianus
taacgtagttggtttaccgctcaat

SEQ ID NO: 149218 - DNA, 25 bp, Saccharomyces pastorianus
ggatatgtgtgcgatactagctggc

SEQ ID NO: 149219 - DNA, 25 bp, Saccharomyces pastorianus
atgggagaatctacgagaagcctaa

SEQ ID NO: 149220 - DNA, 25 bp, Saccharomyces pastorianus
taagcttatcatatgtgcagacaca

SEQ ID NO: 149221 - DNA, 25 bp, Saccharomyces pastorianus
tactagctggcataaagcgcagaat

SEQ ID NO: 149222 - DNA, 25 bp, Saccharomyces pastorianus
gtcaccgctgtgactttaattaaat

SEQ ID NO: 149223 - DNA, 25 bp, Saccharomyces pastorianus
tgaattattctaccgatccgattgg

SEQ ID NO: 149224 - DNA, 25 bp, Saccharomyces pastorianus
aacaatggtttctacttttgaagag

SEQ ID NO: 149225 - DNA, 25 bp, Saccharomyces pastorianus
aagggcaaggtgctattctaattga

SEQ ID NO: 149226 - DNA, 25 bp, Saccharomyces pastorianus
gagcgaaattgattccgcccaggac

SEQ ID NO: 149227 - DNA, 25 bp, Saccharomyces pastorianus
tgaaagcggcccatcgaaggtgcct

SEQ ID NO: 149228 - DNA, 25 bp, Saccharomyces pastorianus
tttacgtttaaattctccctcagca

SEQ ID NO: 149229 - DNA, 25 bp, Saccharomyces pastorianus
aacgttggcaaaatccatcgctcct

SEQ ID NO: 149230 - DNA, 25 bp, Saccharomyces pastorianus
gtggatgggacgacctcagcgatac

SEQ ID NO: 149231 - DNA, 25 bp, Saccharomyces pastorianus
gaaaacaacgatcctagcgccaaga

SEQ ID NO: 149232 - DNA, 25 bp, Saccharomyces pastorianus
aactctactgttaccaccaaatcgt

SEQ ID NO: 149233 - DNA, 25 bp, Saccharomyces pastorianus
ctataagtagtatccgcggctcggt

SEQ ID NO: 149234 - DNA, 25 bp, Saccharomyces pastorianus
atggtaccacagaatccttcgatga

SEQ ID NO: 149235 - DNA, 25 bp, Saccharomyces pastorianus
aaatcgtcgctgtccaataaaactg

SEQ ID NO: 149236 - DNA, 25 bp, Saccharomyces pastorianus
cagcgataccgatggctttattaca

SEQ ID NO: 149237 - DNA, 25 bp, Saccharomyces pastorianus
gaacgagtagttccatttccttggg

SEQ ID NO: 149238 - DNA, 25 bp, Saccharomyces pastorianus
aatttgccagtagagcgaggtcata

SEQ ID NO: 149239 - DNA, 25 bp, Saccharomyces pastorianus
gagatttccgtaaatttaacgcctg

SEQ ID NO: 149240 - DNA, 25 bp, Saccharomyces pastorianus
tttccttgggataatctaggctctt

SEQ ID NO: 149241 - DNA, 25 bp, Saccharomyces pastorianus
tccttcttgtctgcccaaagattgg

SEQ ID NO: 149242 - DNA, 25 bp, Saccharomyces pastorianus
gagtgggtactatttgggctagaac

SEQ ID NO: 149243 - DNA, 25 bp, Saccharomyces pastorianus
atctaggctctttatctcaaaacaa

SEQ ID NO: 149244 - DNA, 25 bp, Saccharomyces pastorianus
gattaagtgcgtttgaatttgccag

SEQ ID NO: 149245 - DNA, 25 bp, Saccharomyces pastorianus
tttgtccttggtacgctttctaaag

SEQ ID NO: 149246 - DNA, 25 bp, Saccharomyces pastorianus
agtcttatggctccttcttgtctgc

SEQ ID NO: 149247 - DNA, 25 bp, Saccharomyces pastorianus
acagttgccctgtgaagatccgaat

SEQ ID NO: 149248 - DNA, 25 bp, Saccharomyces pastorianus
tgtgaacagttcgaatccgtccaac

SEQ ID NO: 149249 - DNA, 25 bp, Saccharomyces pastorianus
taaactacaattacaccacacttcc

SEQ ID NO: 149250 - DNA, 25 bp, Saccharomyces pastorianus
gctccgggtgtattaatggcgccaa

SEQ ID NO: 149251 - DNA, 25 bp, Saccharomyces pastorianus
agacatgggtacgttgcaatcacaa

SEQ ID NO: 149252 - DNA, 25 bp, Saccharomyces pastorianus
gcaacttttcggtaggtgcagctcc

SEQ ID NO: 149253 - DNA, 25 bp, Saccharomyces pastorianus
acatagtatgatttcgccgacgcaa

SEQ ID NO: 149254 - DNA, 25 bp, Saccharomyces pastorianus
gcgccaaccaccaataatgacttca

SEQ ID NO: 149255 - DNA, 25 bp, Saccharomyces pastorianus
gagcggcaacttttggagtactttg

SEQ ID NO: 149256 - DNA, 25 bp, Saccharomyces pastorianus
tagtaacagcaatccgggctcacat

SEQ ID NO: 149257 - DNA, 25 bp, Saccharomyces pastorianus
gaacattccacttgaagagcggcaa

SEQ ID NO: 149258 - DNA, 25 bp, Saccharomyces pastorianus
gaaaaccatcctgcgagcacaattt

SEQ ID NO: 149259 - DNA, 25 bp, Saccharomyces pastorianus
tcaagaccccttcattttcgacggg

SEQ ID NO: 149260 - DNA, 25 bp, Saccharomyces pastorianus
aatgataatacttcgcagccacctt

SEQ ID NO: 149261 - DNA, 25 bp, Saccharomyces pastorianus
gccctactcctattcttaatcaaag

SEQ ID NO: 149262 - DNA, 25 bp, Saccharomyces pastorianus
acgcctctatcaactcattcttgaa

SEQ ID NO: 149263 - DNA, 25 bp, Saccharomyces pastorianus
ttaatcaaagtcaaccggcctcttc

SEQ ID NO: 149264 - DNA, 25 bp, Saccharomyces pastorianus
gggaagttcttctcaatatcaattt

SEQ ID NO: 149265 - DNA, 25 bp, Saccharomyces pastorianus
ccacgattatccacttcaagtacac

SEQ ID NO: 149266 - DNA, 25 bp, Saccharomyces pastorianus
aactgcacagttcatgggccctacg

SEQ ID NO: 149267 - DNA, 25 bp, Saccharomyces pastorianus
aaaccaggagcatgggcaaggccct

SEQ ID NO: 149268 - DNA, 25 bp, Saccharomyces pastorianus
tacaggaggacctagttctggcggc

SEQ ID NO: 149269 - DNA, 25 bp, Saccharomyces pastorianus
gcctattccaatcttccacgattat

SEQ ID NO: 149270 - DNA, 25 bp, Saccharomyces pastorianus
gacctattcaatcattttctttgga

SEQ ID NO: 149271 - DNA, 25 bp, Saccharomyces pastorianus
gtagatatcatacgttctcataact

SEQ ID NO: 149272 - DNA, 25 bp, Saccharomyces pastorianus
gaggttatttgcttggcgtctttta

SEQ ID NO: 149273 - DNA, 25 bp, Saccharomyces pastorianus
aatatcaggcgatgttatcagttct

SEQ ID NO: 149274 - DNA, 25 bp, Saccharomyces pastorianus
gaaccgtttttggagatacctgtgg

SEQ ID NO: 149275 - DNA, 25 bp, Saccharomyces pastorianus
gtcttccttaggttattcatctgaa

SEQ ID NO: 149276 - DNA, 25 bp, Saccharomyces pastorianus
ggaacgttttaccttcttgattatg

SEQ ID NO: 149277 - DNA, 25 bp, Saccharomyces pastorianus
gttctgatagcaatgtaacttccga

SEQ ID NO: 149278 - DNA, 25 bp, Saccharomyces pastorianus
gcgtcttttatcgacaggccaacag

SEQ ID NO: 149279 - DNA, 25 bp, Saccharomyces pastorianus
taggcctaaaacagcttttcccaag

SEQ ID NO: 149280 - DNA, 25 bp, Saccharomyces pastorianus
agaggtgtgttgtcttccttaggtt

SEQ ID NO: 149281 - DNA, 25 bp, Saccharomyces pastorianus
tccactaacggaacaacaagagcac

SEQ ID NO: 149282 - DNA, 25 bp, Saccharomyces pastorianus
acaacaagagcacaacagcaatatc

SEQ ID NO: 149283 - DNA, 25 bp, Saccharomyces pastorianus
actaacggaacaacaagagcacaac

SEQ ID NO: 149284 - DNA, 25 bp, Saccharomyces pastorianus
caaggtccactaacggaacaacaag

SEQ ID NO: 149285 - DNA, 25 bp, Saccharomyces pastorianus
ggtccactaacggaacaacaagagc

SEQ ID NO: 149286 - DNA, 25 bp, Saccharomyces pastorianus
cactaacggaacaacaagagcacaa

SEQ ID NO: 149287 - DNA, 25 bp, Saccharomyces pastorianus
aacggaacaacaagagcacaacagc

SEQ ID NO: 149288 - DNA, 25 bp, Saccharomyces pastorianus
ccactaacggaacaacaagagcaca

SEQ ID NO: 149289 - DNA, 25 bp, Saccharomyces pastorianus
taacggaacaacaagagcacaacag

SEQ ID NO: 149290 - DNA, 25 bp, Saccharomyces pastorianus
gtccactaacggaacaacaagagca

SEQ ID NO: 149291 - DNA, 25 bp, Saccharomyces pastorianus
acggaacaacaagagcacaacagca

SEQ ID NO: 149292 - DNA, 25 bp, Saccharomyces pastorianus
atgagtgtcgatccacgtcatatcc

SEQ ID NO: 149293 - DNA, 25 bp, Saccharomyces pastorianus
ttgcagctagcctccttcgaaaaga

SEQ ID NO: 149294 - DNA, 25 bp, Saccharomyces pastorianus
ttacggcctgcgagatgtgatgtgt

SEQ ID NO: 149295 - DNA, 25 bp, Saccharomyces pastorianus
tgaccatttattcgatgcggccttt

SEQ ID NO: 149296 - DNA, 25 bp, Saccharomyces pastorianus
ttccgttttgggtatcgaagctgca

SEQ ID NO: 149297 - DNA, 25 bp, Saccharomyces pastorianus
ggatctggttcctaagcgatgtcta

SEQ ID NO: 149298 - DNA, 25 bp, Saccharomyces pastorianus
tacctgatatttctcgtgcggttat

SEQ ID NO: 149299 - DNA, 25 bp, Saccharomyces pastorianus
gagggactctgttttgcagctagcc

SEQ ID NO: 149300 - DNA, 25 bp, Saccharomyces pastorianus
gatgtcgatcggtaccggttccttt

SEQ ID NO: 149301 - DNA, 25 bp, Saccharomyces pastorianus
tgcaacagttacgtcgtgcgcttcc

SEQ ID NO: 149302 - DNA, 25 bp, Saccharomyces pastorianus
gtgcgcttcctgatgttgttgttaa

SEQ ID NO: 149303 - DNA, 25 bp, Saccharomyces pastorianus
gttaccgcatttccccaagaattcg

SEQ ID NO: 149304 - DNA, 25 bp, Saccharomyces pastorianus
gaaggtttagttgacacagctgtta

SEQ ID NO: 149305 - DNA, 25 bp, Saccharomyces pastorianus
gttccatgctatttcgggtcgtgaa

SEQ ID NO: 149306 - DNA, 25 bp, Saccharomyces pastorianus
aatcgtgttccagatggttttcaag

SEQ ID NO: 149307 - DNA, 25 bp, Saccharomyces pastorianus
ggtaatgcacaaccggtcaatttca

SEQ ID NO: 149308 - DNA, 25 bp, Saccharomyces pastorianus
ggtcagaacttcagccaacggtatc

SEQ ID NO: 149309 - DNA, 25 bp, Saccharomyces pastorianus
gttttcaagatcgttcgttaccgca

SEQ ID NO: 149310 - DNA, 25 bp, Saccharomyces pastorianus
ggcttactaccctatgcaattatgg

SEQ ID NO: 149311 - DNA, 25 bp, Saccharomyces pastorianus
aacggtatcgtccaattcacatatg

SEQ ID NO: 149312 - DNA, 25 bp, Saccharomyces pastorianus
gagagagatttttaccattccttga

SEQ ID NO: 149313 - DNA, 25 bp, Saccharomyces pastorianus
tgacgggttggatcccctggaaatg

SEQ ID NO: 149314 - DNA, 25 bp, Saccharomyces pastorianus
ctactgatgagtttaatggtgccca

SEQ ID NO: 149315 - DNA, 25 bp, Saccharomyces pastorianus
tggtgcccagttaaaggcggtaact

SEQ ID NO: 149316 - DNA, 25 bp, Saccharomyces pastorianus
gctccgatgatcgtgtcaaagtctt

SEQ ID NO: 149317 - DNA, 25 bp, Saccharomyces pastorianus
tggcggctaccaatagagttgatgt

SEQ ID NO: 149318 - DNA, 25 bp, Saccharomyces pastorianus
gcaagaacttgccaggtctactgat

SEQ ID NO: 149319 - DNA, 25 bp, Saccharomyces pastorianus
gaaaaattgaattcccactcccatc

SEQ ID NO: 149320 - DNA, 25 bp, Saccharomyces pastorianus
gagttgatgttttagatcctgcttt

SEQ ID NO: 149321 - DNA, 25 bp, Saccharomyces pastorianus
atcgtgtcaaagtcttggcggctac

SEQ ID NO: 149322 - DNA, 25 bp, Saccharomyces pastorianus
aatgggcaatcttccgttaaacacg

SEQ ID NO: 149323 - DNA, 25 bp, Saccharomyces pastorianus
actcgagagctcaaattttacaaat

SEQ ID NO: 149324 - DNA, 25 bp, Saccharomyces pastorianus
actcccatccgaagactcgagagct

SEQ ID NO: 149325 - DNA, 25 bp, Saccharomyces pastorianus
gtaccttgtggctaacgttgtcgag

SEQ ID NO: 149326 - DNA, 25 bp, Saccharomyces pastorianus
tgtcaacttagataacaccgctgtt

SEQ ID NO: 149327 - DNA, 25 bp, Saccharomyces pastorianus
cttgcccatggtcggtttagtagat

SEQ ID NO: 149328 - DNA, 25 bp, Saccharomyces pastorianus
tagacagactgttttcttgcccatg

SEQ ID NO: 149329 - DNA, 25 bp, Saccharomyces pastorianus
tctgaattgcaaagactgtcccatg

SEQ ID NO: 149330 - DNA, 25 bp, Saccharomyces pastorianus
caccgctgttggcaaagctgctgta

SEQ ID NO: 149331 - DNA, 25 bp, Saccharomyces pastorianus
gattttggatactttaccctctgaa

SEQ ID NO: 149332 - DNA, 25 bp, Saccharomyces pastorianus
tagacagttaccgtaccttgtggct

SEQ ID NO: 149333 - DNA, 25 bp, Saccharomyces pastorianus
gctgctgtagtcaagacttcttcta

SEQ ID NO: 149334 - DNA, 25 bp, Saccharomyces pastorianus
acagaaacttactcggacgtgggtg

SEQ ID NO: 149335 - DNA, 25 bp, Saccharomyces pastorianus
aactttattagctcgtgcttgcgcg

SEQ ID NO: 149336 - DNA, 25 bp, Saccharomyces pastorianus
gctgacgatagaagtatctacggta

SEQ ID NO: 149337 - DNA, 25 bp, Saccharomyces pastorianus
gtgaggccaccaagattgtcgagca

SEQ ID NO: 149338 - DNA, 25 bp, Saccharomyces pastorianus
tatctacggtagacatgatgctgag

SEQ ID NO: 149339 - DNA, 25 bp, Saccharomyces pastorianus
attatccaccaaccgtacaagccgg

SEQ ID NO: 149340 - DNA, 25 bp, Saccharomyces pastorianus
gtacaagccggtgaggccaccaaga

SEQ ID NO: 149341 - DNA, 25 bp, Saccharomyces pastorianus
ggccaccaagattgtcgagcaattg

SEQ ID NO: 149342 - DNA, 25 bp, Saccharomyces pastorianus
ctgagggagttgtttgtgtaagaac

SEQ ID NO: 149343 - DNA, 25 bp, Saccharomyces pastorianus
aaaccgttattattgctcattatcc

SEQ ID NO: 149344 - DNA, 25 bp, Saccharomyces pastorianus
tattgctcattatccaccaaccgta

SEQ ID NO: 149345 - DNA, 25 bp, Saccharomyces pastorianus
gtgtaagaactaagcaaaccgttat

SEQ ID NO: 149346 - DNA, 25 bp, Saccharomyces pastorianus
gttgagagctgacgatagaagtatc

SEQ ID NO: 149347 - DNA, 25 bp, Saccharomyces pastorianus
atttgcccttcacaaaatctctgtc

SEQ ID NO: 149348 - DNA, 25 bp, Saccharomyces pastorianus
gggcgtcaaaaatctgctatgctat

SEQ ID NO: 149349 - DNA, 25 bp, Saccharomyces pastorianus
atgtcatcccataggtatggccctt

SEQ ID NO: 149350 - DNA, 25 bp, Saccharomyces pastorianus
aagggagattcgaccaacacttcct

SEQ ID NO: 149351 - DNA, 25 bp, Saccharomyces pastorianus
attgcatcatcatctttcgctggcg

SEQ ID NO: 149352 - DNA, 25 bp, Saccharomyces pastorianus
aagggcttctcctctactagaaaga

SEQ ID NO: 149353 - DNA, 25 bp, Saccharomyces pastorianus
atccccacggtgttatagtatcagc

SEQ ID NO: 149354 - DNA, 25 bp, Saccharomyces pastorianus
gaagtatctccacagtcaattgcga

SEQ ID NO: 149355 - DNA, 25 bp, Saccharomyces pastorianus
catctgttcctctatcttcaaacga

SEQ ID NO: 149356 - DNA, 25 bp, Saccharomyces pastorianus
gatatcttggcgtttttcctcacat

SEQ ID NO: 149357 - DNA, 25 bp, Saccharomyces pastorianus
tacaactgagtacacgccctaatat

SEQ ID NO: 149358 - DNA, 25 bp, Saccharomyces pastorianus
gacctatgcgcttttattttgtcat

SEQ ID NO: 149359 - DNA, 25 bp, Saccharomyces pastorianus
ttgtgacttttcatgaccaactcat

SEQ ID NO: 149360 - DNA, 25 bp, Saccharomyces pastorianus
aagatttcagccaaagacgctcccg

SEQ ID NO: 149361 - DNA, 25 bp, Saccharomyces pastorianus
gcgggcgtatgtagcatcgaatagt

SEQ ID NO: 149362 - DNA, 25 bp, Saccharomyces pastorianus
tatggacatttctcttgttgacggt

SEQ ID NO: 149363 - DNA, 25 bp, Saccharomyces pastorianus
tcttgttgacggtttgcgggcgtat

SEQ ID NO: 149364 - DNA, 25 bp, Saccharomyces pastorianus
attttgtcattagccaacataacgg

SEQ ID NO: 149365 - DNA, 25 bp, Saccharomyces pastorianus
agtgctacactctatccatgacgaa

SEQ ID NO: 149366 - DNA, 25 bp, Saccharomyces pastorianus
aatgctgcgttgatttttccctata

SEQ ID NO: 149367 - DNA, 25 bp, Saccharomyces pastorianus
gctagcgatccacaatcatacttca

SEQ ID NO: 149368 - DNA, 25 bp, Saccharomyces pastorianus
ataacggcaacttatgctagcgatc

SEQ ID NO: 149369 - DNA, 25 bp, Saccharomyces pastorianus
gatagtctgtatcccaaacctagaa

SEQ ID NO: 149370 - DNA, 25 bp, Saccharomyces pastorianus
ggagcggtgcttattctttactgaa

SEQ ID NO: 149371 - DNA, 25 bp, Saccharomyces pastorianus
aaatccagtatttcgggcacgtctt

SEQ ID NO: 149372 - DNA, 25 bp, Saccharomyces pastorianus
gcagggattgcttcgctcattaaac

SEQ ID NO: 149373 - DNA, 25 bp, Saccharomyces pastorianus
agtcctctaaagctgacaccgagat

SEQ ID NO: 149374 - DNA, 25 bp, Saccharomyces pastorianus
attagactcgtctgtcttgacgggc

SEQ ID NO: 149375 - DNA, 25 bp, Saccharomyces pastorianus
caattcggtactctcagcagggatt

SEQ ID NO: 149376 - DNA, 25 bp, Saccharomyces pastorianus
gcaaattgtgctccagattcggtaa

SEQ ID NO: 149377 - DNA, 25 bp, Saccharomyces pastorianus
tcctcttttacactagttgccaaca

SEQ ID NO: 149378 - DNA, 25 bp, Saccharomyces pastorianus
gattcggtaactccattagactcgt

SEQ ID NO: 149379 - DNA, 25 bp, Saccharomyces pastorianus
gcacgtctagtgctgatcctaaaac

SEQ ID NO: 149380 - DNA, 25 bp, Saccharomyces pastorianus
ttttgttcacagagtttcaccttca

SEQ ID NO: 149381 - DNA, 25 bp, Saccharomyces pastorianus
gaagagcttcttcccgtaataactc

SEQ ID NO: 149382 - DNA, 25 bp, Saccharomyces pastorianus
gatgacagcaatactcacgatgata

SEQ ID NO: 149383 - DNA, 25 bp, Saccharomyces pastorianus
gaaaacgcaaaccatgttccgctgg

SEQ ID NO: 149384 - DNA, 25 bp, Saccharomyces pastorianus
aattccgggcgccaataactctatc

SEQ ID NO: 149385 - DNA, 25 bp, Saccharomyces pastorianus
aactacgatatagattccggtgcaa

SEQ ID NO: 149386 - DNA, 25 bp, Saccharomyces pastorianus
tggtaatttcgttccgcaaattccg

SEQ ID NO: 149387 - DNA, 25 bp, Saccharomyces pastorianus
tccaccagttccaattcctttggta

SEQ ID NO: 149388 - DNA, 25 bp, Saccharomyces pastorianus
gttccgctggaatccaataacccgg

SEQ ID NO: 149389 - DNA, 25 bp, Saccharomyces pastorianus
agagcaaaacagacctccgaacttt

SEQ ID NO: 149390 - DNA, 25 bp, Saccharomyces pastorianus
gagtaagaccctcttcaattcaaga

SEQ ID NO: 149391 - DNA, 25 bp, Saccharomyces pastorianus
aatcgctaaaagtgacgccaatgtc

SEQ ID NO: 149392 - DNA, 25 bp, Saccharomyces pastorianus
gagattgatctgctgagcgccacaa

SEQ ID NO: 149393 - DNA, 25 bp, Saccharomyces pastorianus
gaaactctgaacgaaaatgccgaga

SEQ ID NO: 149394 - DNA, 25 bp, Saccharomyces pastorianus
tatgaccatcttcagtcggcaagaa

SEQ ID NO: 149395 - DNA, 25 bp, Saccharomyces pastorianus
aacgtatggttcaacgctgatccga

SEQ ID NO: 149396 - DNA, 25 bp, Saccharomyces pastorianus
gctgagcgccacaactcaacaaatt

SEQ ID NO: 149397 - DNA, 25 bp, Saccharomyces pastorianus
atcagttgtcacaagagggtgtctt

SEQ ID NO: 149398 - DNA, 25 bp, Saccharomyces pastorianus
aacgctgatccgagcatagtcgtga

SEQ ID NO: 149399 - DNA, 25 bp, Saccharomyces pastorianus
agatttggtctatcagttgtcacaa

SEQ ID NO: 149400 - DNA, 25 bp, Saccharomyces pastorianus
gcggaaatcaatcccttcgtttttg

SEQ ID NO: 149401 - DNA, 25 bp, Saccharomyces pastorianus
tttggcgtcaagaataccgaagtat

SEQ ID NO: 149402 - DNA, 25 bp, Saccharomyces pastorianus
attagtacacccacagtctatgcgt

SEQ ID NO: 149403 - DNA, 25 bp, Saccharomyces pastorianus
acgctcaatcgttccatggttagac

SEQ ID NO: 149404 - DNA, 25 bp, Saccharomyces pastorianus
aatagattctaccacaatgacccca

SEQ ID NO: 149405 - DNA, 25 bp, Saccharomyces pastorianus
gactggcttcgcgatgttgtaaaac

SEQ ID NO: 149406 - DNA, 25 bp, Saccharomyces pastorianus
gttcctagtgaacttattgccttag

SEQ ID NO: 149407 - DNA, 25 bp, Saccharomyces pastorianus
aagtttgtgacgactggcttcgcga

SEQ ID NO: 149408 - DNA, 25 bp, Saccharomyces pastorianus
aaggcccctcgtattgacttgtaag

SEQ ID NO: 149409 - DNA, 25 bp, Saccharomyces pastorianus
ggtcctaacatcaactcttggttca

SEQ ID NO: 149410 - DNA, 25 bp, Saccharomyces pastorianus
tgtgaattttcacgaaggcccctcg

SEQ ID NO: 149411 - DNA, 25 bp, Saccharomyces pastorianus
atgttattggtcaagcaacgctcaa

SEQ ID NO: 149412 - DNA, 25 bp, Saccharomyces pastorianus
caatcaactgatctactctccataa

SEQ ID NO: 149413 - DNA, 25 bp, Saccharomyces pastorianus
gagattgaccaattccataatctgg

SEQ ID NO: 149414 - DNA, 25 bp, Saccharomyces pastorianus
gggtactacctttgcatcccaatta

SEQ ID NO: 149415 - DNA, 25 bp, Saccharomyces pastorianus
actggttgaaagacggccaagttga

SEQ ID NO: 149416 - DNA, 25 bp, Saccharomyces pastorianus
ctggaactcgccaaatgtatcgatt

SEQ ID NO: 149417 - DNA, 25 bp, Saccharomyces pastorianus
aaattctacttctcatctatcatcg

SEQ ID NO: 149418 - DNA, 25 bp, Saccharomyces pastorianus
tccagtattatcgacaggtgacagt

SEQ ID NO: 149419 - DNA, 25 bp, Saccharomyces pastorianus
aaacttgtcagatttacagcttatt

SEQ ID NO: 149420 - DNA, 25 bp, Saccharomyces pastorianus
atcggagtcgaaatatgcagtggtg

SEQ ID NO: 149421 - DNA, 25 bp, Saccharomyces pastorianus
ggacttgaagacaactttccctcag

SEQ ID NO: 149422 - DNA, 25 bp, Saccharomyces pastorianus
caaaagtcacttccaattccacgaa

SEQ ID NO: 149423 - DNA, 25 bp, Saccharomyces pastorianus
tttccctcaggaacctccagtatta

SEQ ID NO: 149424 - DNA, 25 bp, Saccharomyces pastorianus
gatttgcgtcaagaagtattaaaac

SEQ ID NO: 149425 - DNA, 25 bp, Saccharomyces pastorianus
aaaacaaaaggcacatacagattat

SEQ ID NO: 149426 - DNA, 25 bp, Saccharomyces pastorianus
cagtagatttgcgtcaagaagtatt

SEQ ID NO: 149427 - DNA, 25 bp, Saccharomyces pastorianus
aaacaaaaggcacatacagattatc

SEQ ID NO: 149428 - DNA, 25 bp, Saccharomyces pastorianus
aacaaaaggcacatacagattatca

SEQ ID NO: 149429 - DNA, 25 bp, Saccharomyces pastorianus
gacagtagatttgcgtcaagaagta

SEQ ID NO: 149430 - DNA, 25 bp, Saccharomyces pastorianus
agtagatttgcgtcaagaagtatta

SEQ ID NO: 149431 - DNA, 25 bp, Saccharomyces pastorianus
attaaaacaaaaggcacatacagat

SEQ ID NO: 149432 - DNA, 25 bp, Saccharomyces pastorianus
gtagatttgcgtcaagaagtattaa

SEQ ID NO: 149433 - DNA, 25 bp, Saccharomyces pastorianus
atttgcgtcaagaagtattaaaaca

SEQ ID NO: 149434 - DNA, 25 bp, Saccharomyces pastorianus
gttgacagtagatttgcgtcaagaa

SEQ ID NO: 149435 - DNA, 25 bp, Saccharomyces pastorianus
aattgagaagcaacggttagaccgc

SEQ ID NO: 149436 - DNA, 25 bp, Saccharomyces pastorianus
tagcggtatgttgcctaaaaataat

SEQ ID NO: 149437 - DNA, 25 bp, Saccharomyces pastorianus
cgcttaaaagttttcgatggaagtg

SEQ ID NO: 149438 - DNA, 25 bp, Saccharomyces pastorianus
tgagaagcaacggttagaccgctta

SEQ ID NO: 149439 - DNA, 25 bp, Saccharomyces pastorianus
agtagtagcggtatgttgcctaaaa

SEQ ID NO: 149440 - DNA, 25 bp, Saccharomyces pastorianus
gagaagcaacggttagaccgcttaa

SEQ ID NO: 149441 - DNA, 25 bp, Saccharomyces pastorianus
attgagaagcaacggttagaccgct

SEQ ID NO: 149442 - DNA, 25 bp, Saccharomyces pastorianus
ttagaccgcttaaaagttttcgatg

SEQ ID NO: 149443 - DNA, 25 bp, Saccharomyces pastorianus
ttcgatggaagtgaaaacccttata

SEQ ID NO: 149444 - DNA, 25 bp, Saccharomyces pastorianus
gaaaaagtagtagcggtatgttgcc

SEQ ID NO: 149445 - DNA, 25 bp, Saccharomyces pastorianus
tagaccgcttaaaagttttcgatgg

SEQ ID NO: 149446 - DNA, 25 bp, Saccharomyces pastorianus
tcgcagaagattggacacagtggct

SEQ ID NO: 149447 - DNA, 25 bp, Saccharomyces pastorianus
acacagtggcttggcttttgcgcgt

SEQ ID NO: 149448 - DNA, 25 bp, Saccharomyces pastorianus
ttgcgcgtctttggcaccatgtcga

SEQ ID NO: 149449 - DNA, 25 bp, Saccharomyces pastorianus
acaagactgtggagactacgtagta

SEQ ID NO: 149450 - DNA, 25 bp, Saccharomyces pastorianus
accatgtcgacgttgcccgtgataa

SEQ ID NO: 149451 - DNA, 25 bp, Saccharomyces pastorianus
ctacgtagtagtgactaattgccaa

SEQ ID NO: 149452 - DNA, 25 bp, Saccharomyces pastorianus
gcagaagacttactggtctcattca

SEQ ID NO: 149453 - DNA, 25 bp, Saccharomyces pastorianus
gacattgggtagattggcttcagca

SEQ ID NO: 149454 - DNA, 25 bp, Saccharomyces pastorianus
ataagccggtctatcatccgtcaca

SEQ ID NO: 149455 - DNA, 25 bp, Saccharomyces pastorianus
ggtctatcatccgtcacaagactgt

SEQ ID NO: 149456 - DNA, 25 bp, Saccharomyces pastorianus
gacgttgcccgtgataagaggacat

SEQ ID NO: 149457 - DNA, 25 bp, Saccharomyces pastorianus
gcatccgatgcctttagagtccata

SEQ ID NO: 149458 - DNA, 25 bp, Saccharomyces pastorianus
aagtcgcggcactatctggtaatga

SEQ ID NO: 149459 - DNA, 25 bp, Saccharomyces pastorianus
tatgattgctcatggtgctgcctca

SEQ ID NO: 149460 - DNA, 25 bp, Saccharomyces pastorianus
ggtgctgcctcattcttgaaggaga

SEQ ID NO: 149461 - DNA, 25 bp, Saccharomyces pastorianus
tccatatttgtggtatttgcgggct

SEQ ID NO: 149462 - DNA, 25 bp, Saccharomyces pastorianus
cgtatgactgttgcccatttaattg

SEQ ID NO: 149463 - DNA, 25 bp, Saccharomyces pastorianus
gcaagtattgacgagacagcctgta

SEQ ID NO: 149464 - DNA, 25 bp, Saccharomyces pastorianus
aaattcatattccatacgccgcgaa

SEQ ID NO: 149465 - DNA, 25 bp, Saccharomyces pastorianus
atacatgccagagcacgtggtccaa

SEQ ID NO: 149466 - DNA, 25 bp, Saccharomyces pastorianus
ggtatatccaaactactgcgtgaac

SEQ ID NO: 149467 - DNA, 25 bp, Saccharomyces pastorianus
atacgccgcgaagttattattccaa

SEQ ID NO: 149468 - DNA, 25 bp, Saccharomyces pastorianus
gaagacgatgaatcactaggccata

SEQ ID NO: 149469 - DNA, 25 bp, Saccharomyces pastorianus
tggaaccactggaagattacgtacc

SEQ ID NO: 149470 - DNA, 25 bp, Saccharomyces pastorianus
attacgtaccacatcaatcacctga

SEQ ID NO: 149471 - DNA, 25 bp, Saccharomyces pastorianus
atcacctgacgcgacaagggtcttc

SEQ ID NO: 149472 - DNA, 25 bp, Saccharomyces pastorianus
gaacaaacactcctattggtcgtga

SEQ ID NO: 149473 - DNA, 25 bp, Saccharomyces pastorianus
gatggctaccgaataccaagatatt

SEQ ID NO: 149474 - DNA, 25 bp, Saccharomyces pastorianus
gggtgatatcaatccggaagtttct

SEQ ID NO: 149475 - DNA, 25 bp, Saccharomyces pastorianus
gaaactcctgaaggccaagcgtgtg

SEQ ID NO: 149476 - DNA, 25 bp, Saccharomyces pastorianus
gaaagggtcatattgccaaactgat

SEQ ID NO: 149477 - DNA, 25 bp, Saccharomyces pastorianus
gtcactgatgtcttgtatttctgtt

SEQ ID NO: 149478 - DNA, 25 bp, Saccharomyces pastorianus
caagggtcttcgtcaatggtgtgtg

SEQ ID NO: 149479 - DNA, 25 bp, Saccharomyces pastorianus
tatatcgctggtgtctttttctact

SEQ ID NO: 149480 - DNA, 25 bp, Saccharomyces pastorianus
ctctgttggctgttggtgttgctaa

SEQ ID NO: 149481 - DNA, 25 bp, Saccharomyces pastorianus
gctaacttagcctctttgttgttta

SEQ ID NO: 149482 - DNA, 25 bp, Saccharomyces pastorianus
ttatgttggttctatgggtctgctt

SEQ ID NO: 149483 - DNA, 25 bp, Saccharomyces pastorianus
gggtgctttattttggttgttctct

SEQ ID NO: 149484 - DNA, 25 bp, Saccharomyces pastorianus
gacttatttcattcaggctctgttg

SEQ ID NO: 149485 - DNA, 25 bp, Saccharomyces pastorianus
ttctcttgtgctttctacgtttatg

SEQ ID NO: 149486 - DNA, 25 bp, Saccharomyces pastorianus
gaaaatgccactgacacctgtagtt

SEQ ID NO: 149487 - DNA, 25 bp, Saccharomyces pastorianus
gggtctgcttgtcatttctttcaac

SEQ ID NO: 149488 - DNA, 25 bp, Saccharomyces pastorianus
gtgttatgactaccccaagtgccat

SEQ ID NO: 149489 - DNA, 25 bp, Saccharomyces pastorianus
gtacagggtttcacctttgacttat

SEQ ID NO: 149490 - DNA, 25 bp, Saccharomyces pastorianus
ttctacattctatttccgtggttct

SEQ ID NO: 149491 - DNA, 25 bp, Saccharomyces pastorianus
aacattgtcgcggttttctccatgt

SEQ ID NO: 149492 - DNA, 25 bp, Saccharomyces pastorianus
ttcaatgcattttcttctctgttag

SEQ ID NO: 149493 - DNA, 25 bp, Saccharomyces pastorianus
gttataccatccaagtgctgacgct

SEQ ID NO: 149494 - DNA, 25 bp, Saccharomyces pastorianus
gttaatcatcactgtttgcttcaat

SEQ ID NO: 149495 - DNA, 25 bp, Saccharomyces pastorianus
gacgcttttgcatcagttctatcag

SEQ ID NO: 149496 - DNA, 25 bp, Saccharomyces pastorianus
gtatggctttattcttgggttcaat

SEQ ID NO: 149497 - DNA, 25 bp, Saccharomyces pastorianus
gtataccggttttgctattcctaag

SEQ ID NO: 149498 - DNA, 25 bp, Saccharomyces pastorianus
gttggctctatccatgtataccggt

SEQ ID NO: 149499 - DNA, 25 bp, Saccharomyces pastorianus
aaatcttttcgttatatgaggccag

SEQ ID NO: 149500 - DNA, 25 bp, Saccharomyces pastorianus
atttgcagaagctatggttcccgct

SEQ ID NO: 149501 - DNA, 25 bp, Saccharomyces pastorianus
tcatttgtcgccttcgtagggttga

SEQ ID NO: 149502 - DNA, 25 bp, Saccharomyces pastorianus
aataacgagagagctttactttgaa

SEQ ID NO: 149503 - DNA, 25 bp, Saccharomyces pastorianus
gagagcaaaaatggcgctattgaaa

SEQ ID NO: 149504 - DNA, 25 bp, Saccharomyces pastorianus
tgatatcctatctattaataacgag

SEQ ID NO: 149505 - DNA, 25 bp, Saccharomyces pastorianus
gctgaataactttgccaatcaattg

SEQ ID NO: 149506 - DNA, 25 bp, Saccharomyces pastorianus
agagctttactttgaagatttcgaa

SEQ ID NO: 149507 - DNA, 25 bp, Saccharomyces pastorianus
gagtaatctagatctgctgaataac

SEQ ID NO: 149508 - DNA, 25 bp, Saccharomyces pastorianus
aattgtttatgcgtcatttgtcgcc

SEQ ID NO: 149509 - DNA, 25 bp, Saccharomyces pastorianus
actaaccgtcatttattgcatttgg

SEQ ID NO: 149510 - DNA, 25 bp, Saccharomyces pastorianus
ggagaatgacaaatttactaaccgt

SEQ ID NO: 149511 - DNA, 25 bp, Saccharomyces pastorianus
gtcgccttcgtagggttgatatcct

SEQ ID NO: 149512 - DNA, 25 bp, Saccharomyces pastorianus
gactccaaacacaagcaatctctca

SEQ ID NO: 149513 - DNA, 25 bp, Saccharomyces pastorianus
gtatttactgaatccctgttcagct

SEQ ID NO: 149514 - DNA, 25 bp, Saccharomyces pastorianus
aaagctcatccctttgaagttcgat

SEQ ID NO: 149515 - DNA, 25 bp, Saccharomyces pastorianus
gaattttattgtcccatatccttaa

SEQ ID NO: 149516 - DNA, 25 bp, Saccharomyces pastorianus
gctggtgcattatcatgtacttcaa

SEQ ID NO: 149517 - DNA, 25 bp, Saccharomyces pastorianus
ttcttttcctcgaccttcaagagat

SEQ ID NO: 149518 - DNA, 25 bp, Saccharomyces pastorianus
gctaattacgaattcttttcctcga

SEQ ID NO: 149519 - DNA, 25 bp, Saccharomyces pastorianus
tagaaacgcgtttagagactccaaa

SEQ ID NO: 149520 - DNA, 25 bp, Saccharomyces pastorianus
ttaatgcatccttttgtccttccaa

SEQ ID NO: 149521 - DNA, 25 bp, Saccharomyces pastorianus
aatctctcagacttagctggtgcat

SEQ ID NO: 149522 - DNA, 25 bp, Saccharomyces pastorianus
ttcagctccgcagcaattcattgtt

SEQ ID NO: 149523 - DNA, 25 bp, Saccharomyces pastorianus
atcgaaggtgatttgcctccaatcc

SEQ ID NO: 149524 - DNA, 25 bp, Saccharomyces pastorianus
aatgactttaacacatcggctcaag

SEQ ID NO: 149525 - DNA, 25 bp, Saccharomyces pastorianus
ttcttgaaccaaggcgctactacga

SEQ ID NO: 149526 - DNA, 25 bp, Saccharomyces pastorianus
cactattaccggctgttctacaaaa

SEQ ID NO: 149527 - DNA, 25 bp, Saccharomyces pastorianus
cagtattaattccttcgttacggcg

SEQ ID NO: 149528 - DNA, 25 bp, Saccharomyces pastorianus
aatagagggccatcaacgccactat

SEQ ID NO: 149529 - DNA, 25 bp, Saccharomyces pastorianus
atacgccacccttatgaaacggaga

SEQ ID NO: 149530 - DNA, 25 bp, Saccharomyces pastorianus
atatatacacttgagcaccagcggc

SEQ ID NO: 149531 - DNA, 25 bp, Saccharomyces pastorianus
aactctggcccaaactaatgacttt

SEQ ID NO: 149532 - DNA, 25 bp, Saccharomyces pastorianus
ggaagcgcagagaaacccctacgga

SEQ ID NO: 149533 - DNA, 25 bp, Saccharomyces pastorianus
aacaaggaccacatcggcggcacat

SEQ ID NO: 149534 - DNA, 25 bp, Saccharomyces pastorianus
ggtaatcctgcaaatttaacgcctt

SEQ ID NO: 149535 - DNA, 25 bp, Saccharomyces pastorianus
aagacgggtgcgttcaagcatcctg

SEQ ID NO: 149536 - DNA, 25 bp, Saccharomyces pastorianus
gtaccgaccgagatgaatcacctag

SEQ ID NO: 149537 - DNA, 25 bp, Saccharomyces pastorianus
gtgacagctctccagagtactgcat

SEQ ID NO: 149538 - DNA, 25 bp, Saccharomyces pastorianus
ttagcatattcctttacctcaccgt

SEQ ID NO: 149539 - DNA, 25 bp, Saccharomyces pastorianus
tgttttctggcttttcaataccgtt

SEQ ID NO: 149540 - DNA, 25 bp, Saccharomyces pastorianus
gaggcaatagatttcccgtatccct

SEQ ID NO: 149541 - DNA, 25 bp, Saccharomyces pastorianus
tattcccaacaacaggccttagcat

SEQ ID NO: 149542 - DNA, 25 bp, Saccharomyces pastorianus
agagtactgcattgccaccttattc

SEQ ID NO: 149543 - DNA, 25 bp, Saccharomyces pastorianus
gccttatcttaaagtaccgaccgag

SEQ ID NO: 149544 - DNA, 25 bp, Saccharomyces pastorianus
ccgtatccctgtgaactagtgtcta

SEQ ID NO: 149545 - DNA, 25 bp, Saccharomyces pastorianus
accgattcataatagttcggccgtt

SEQ ID NO: 149546 - DNA, 25 bp, Saccharomyces pastorianus
accagttgaagatttccgaatttgt

SEQ ID NO: 149547 - DNA, 25 bp, Saccharomyces pastorianus
gtccctacatggcagtgtccgattt

SEQ ID NO: 149548 - DNA, 25 bp, Saccharomyces pastorianus
gatggctcatggaaaccgattcata

SEQ ID NO: 149549 - DNA, 25 bp, Saccharomyces pastorianus
tggtttcttcactctcagtcacaag

SEQ ID NO: 149550 - DNA, 25 bp, Saccharomyces pastorianus
gaagtatccggcgaagactgaccaa

SEQ ID NO: 149551 - DNA, 25 bp, Saccharomyces pastorianus
ctctcagtcacaagtccctacatgg

SEQ ID NO: 149552 - DNA, 25 bp, Saccharomyces pastorianus
gactgaccaatgtaagcatatccaa

SEQ ID NO: 149553 - DNA, 25 bp, Saccharomyces pastorianus
tgtccgatttgtcaacaccctataa

SEQ ID NO: 149554 - DNA, 25 bp, Saccharomyces pastorianus
tctgttgatggctcatggaaaccga

SEQ ID NO: 149555 - DNA, 25 bp, Saccharomyces pastorianus
acaccctataaaattcgaccagttg

SEQ ID NO: 149556 - DNA, 25 bp, Saccharomyces pastorianus
gttcataccacaacgaacccgaaat

SEQ ID NO: 149557 - DNA, 25 bp, Saccharomyces pastorianus
tgacagccgaaatgccttcgatact

SEQ ID NO: 149558 - DNA, 25 bp, Saccharomyces pastorianus
agccgaaatgccttcgatactgatt

SEQ ID NO: 149559 - DNA, 25 bp, Saccharomyces pastorianus
ggcgtaatggttcataccacaacga

SEQ ID NO: 149560 - DNA, 25 bp, Saccharomyces pastorianus
aagagcaagattatgacagccgaaa

SEQ ID NO: 149561 - DNA, 25 bp, Saccharomyces pastorianus
aacgaacccgaaataatatctctgg

SEQ ID NO: 149562 - DNA, 25 bp, Saccharomyces pastorianus
actgattggcgtaatggttcatacc

SEQ ID NO: 149563 - DNA, 25 bp, Saccharomyces pastorianus
aacccgaaataatatctctggatag

SEQ ID NO: 149564 - DNA, 25 bp, Saccharomyces pastorianus
aagattatgacagccgaaatgcctt

SEQ ID NO: 149565 - DNA, 25 bp, Saccharomyces pastorianus
ggcactgtcaaacaagagcaagatt

SEQ ID NO: 149566 - DNA, 25 bp, Saccharomyces pastorianus
aatgccttcgatactgattggcgta

SEQ ID NO: 149567 - DNA, 25 bp, Saccharomyces pastorianus
gtaacttctaacttcacgcaatttg

SEQ ID NO: 149568 - DNA, 25 bp, Saccharomyces pastorianus
aaacggaggaattcactgatgccta

SEQ ID NO: 149569 - DNA, 25 bp, Saccharomyces pastorianus
ttattaaacctctaccatgtcgcta

SEQ ID NO: 149570 - DNA, 25 bp, Saccharomyces pastorianus
gttgttgaactttcaggcgcacaag

SEQ ID NO: 149571 - DNA, 25 bp, Saccharomyces pastorianus
gaggctaggctattacacaaacacg

SEQ ID NO: 149572 - DNA, 25 bp, Saccharomyces pastorianus
tattactttcaggtaacaccaccct

SEQ ID NO: 149573 - DNA, 25 bp, Saccharomyces pastorianus
gaattcatcgttacagaatcccaac

SEQ ID NO: 149574 - DNA, 25 bp, Saccharomyces pastorianus
actgatgcctatgatgtaacttcta

SEQ ID NO: 149575 - DNA, 25 bp, Saccharomyces pastorianus
gaattacattcgatcgttgttgaac

SEQ ID NO: 149576 - DNA, 25 bp, Saccharomyces pastorianus
aatgatgtctcaacctcttttaagg

SEQ ID NO: 149577 - DNA, 25 bp, Saccharomyces pastorianus
aataatgggctctttgtcaaacgaa

SEQ ID NO: 149578 - DNA, 25 bp, Saccharomyces pastorianus
ccgtgtcaacaggtcatcgagatgt

SEQ ID NO: 149579 - DNA, 25 bp, Saccharomyces pastorianus
atattagtgtattcatcgggctggt

SEQ ID NO: 149580 - DNA, 25 bp, Saccharomyces pastorianus
catcgggctggttactacttttgaa

SEQ ID NO: 149581 - DNA, 25 bp, Saccharomyces pastorianus
aaaacaccgctcattcagatgccat

SEQ ID NO: 149582 - DNA, 25 bp, Saccharomyces pastorianus
caacttggccaagtaacccttaatg

SEQ ID NO: 149583 - DNA, 25 bp, Saccharomyces pastorianus
gccactatttgcatcgattggattt

SEQ ID NO: 149584 - DNA, 25 bp, Saccharomyces pastorianus
gtgatagcccacgtaaccaatgata

SEQ ID NO: 149585 - DNA, 25 bp, Saccharomyces pastorianus
gcaaacaacaacgatgccactattt

SEQ ID NO: 149586 - DNA, 25 bp, Saccharomyces pastorianus
gggttcaaatccaccgtgtcaacag

SEQ ID NO: 149587 - DNA, 25 bp, Saccharomyces pastorianus
gatgccatcagttgtattgtaaaat

SEQ ID NO: 149588 - DNA, 25 bp, Saccharomyces pastorianus
attgccctgatgtttaaactggaaa

SEQ ID NO: 149589 - DNA, 25 bp, Saccharomyces pastorianus
gagatttcatgtattttgcgagcca

SEQ ID NO: 149590 - DNA, 25 bp, Saccharomyces pastorianus
ggtgacgatgaatcattccccatat

SEQ ID NO: 149591 - DNA, 25 bp, Saccharomyces pastorianus
tatctgtggtgttctggttccctta

SEQ ID NO: 149592 - DNA, 25 bp, Saccharomyces pastorianus
ttctaggccccgtactgaatgttgc

SEQ ID NO: 149593 - DNA, 25 bp, Saccharomyces pastorianus
gaatgttgccctcgagtgtgttaat

SEQ ID NO: 149594 - DNA, 25 bp, Saccharomyces pastorianus
gagccaatattaccttctgttgccg

SEQ ID NO: 149595 - DNA, 25 bp, Saccharomyces pastorianus
tatccccgagtctgaaagatgctgt

SEQ ID NO: 149596 - DNA, 25 bp, Saccharomyces pastorianus
gatgctgtctggaaatttgccctct

SEQ ID NO: 149597 - DNA, 25 bp, Saccharomyces pastorianus
tatcctggcgcatttttgaattcaa

SEQ ID NO: 149598 - DNA, 25 bp, Saccharomyces pastorianus
gaattcaacagagcttctaggcccc

SEQ ID NO: 149599 - DNA, 25 bp, Saccharomyces pastorianus
aacgactggattcggttcctatctg

SEQ ID NO: 149600 - DNA, 25 bp, Saccharomyces pastorianus
actttctttgttgctcttggtaata

SEQ ID NO: 149601 - DNA, 25 bp, Saccharomyces pastorianus
atccggtactgcaactttctttgtt

SEQ ID NO: 149602 - DNA, 25 bp, Saccharomyces pastorianus
ggcattctcatttgttattgcttta

SEQ ID NO: 149603 - DNA, 25 bp, Saccharomyces pastorianus
gaagccattagatccggtactgcaa

SEQ ID NO: 149604 - DNA, 25 bp, Saccharomyces pastorianus
gttcttgtatctaaggtttacctcg

SEQ ID NO: 149605 - DNA, 25 bp, Saccharomyces pastorianus
gaccgctttgttcacgttcttgtat

SEQ ID NO: 149606 - DNA, 25 bp, Saccharomyces pastorianus
taataacccggaggtcttccatcat

SEQ ID NO: 149607 - DNA, 25 bp, Saccharomyces pastorianus
ttccatcattcttaccctcataggt

SEQ ID NO: 149608 - DNA, 25 bp, Saccharomyces pastorianus
aacggcgccctaatggcattctcat

SEQ ID NO: 149609 - DNA, 25 bp, Saccharomyces pastorianus
gtttacctcgcctcaatacaattcg

SEQ ID NO: 149610 - DNA, 25 bp, Saccharomyces pastorianus
atacaattcgaacggcgcttacaac

SEQ ID NO: 149611 - DNA, 25 bp, Saccharomyces pastorianus
gcagctgttcgcattccaaattgat

SEQ ID NO: 149612 - DNA, 25 bp, Saccharomyces pastorianus
ggcgtctttggcagctggtattata

SEQ ID NO: 149613 - DNA, 25 bp, Saccharomyces pastorianus
gatcagacacgatgttacctccagc

SEQ ID NO: 149614 - DNA, 25 bp, Saccharomyces pastorianus
actcgttcatcgctctttatggtaa

SEQ ID NO: 149615 - DNA, 25 bp, Saccharomyces pastorianus
acattgtgttatttctggcgtcttt

SEQ ID NO: 149616 - DNA, 25 bp, Saccharomyces pastorianus
gagagccatgacttactcgttcggt

SEQ ID NO: 149617 - DNA, 25 bp, Saccharomyces pastorianus
ggtggcccgcatttggagcattgaa

SEQ ID NO: 149618 - DNA, 25 bp, Saccharomyces pastorianus
ggaatggacgccctaatcaatgata

SEQ ID NO: 149619 - DNA, 25 bp, Saccharomyces pastorianus
ttttctgcggctattatatctctga

SEQ ID NO: 149620 - DNA, 25 bp, Saccharomyces pastorianus
ttatcggctttctgaagtggctcgc

SEQ ID NO: 149621 - DNA, 25 bp, Saccharomyces pastorianus
tttgggtttctcttctcagcagtca

SEQ ID NO: 149622 - DNA, 25 bp, Saccharomyces pastorianus
ggcagggcttttttccaaaacattg

SEQ ID NO: 149623 - DNA, 25 bp, Saccharomyces pastorianus
tgttctctgatctactttaagttga

SEQ ID NO: 149624 - DNA, 25 bp, Saccharomyces pastorianus
gatcgcttgttcacggccggaaata

SEQ ID NO: 149625 - DNA, 25 bp, Saccharomyces pastorianus
atgagcttgtactcgtcaatcttcg

SEQ ID NO: 149626 - DNA, 25 bp, Saccharomyces pastorianus
cctataggactattcttggcaacgt

SEQ ID NO: 149627 - DNA, 25 bp, Saccharomyces pastorianus
gaccgaggaaacatggctagcacaa

SEQ ID NO: 149628 - DNA, 25 bp, Saccharomyces pastorianus
gacgaaattgactgttcctttagac

SEQ ID NO: 149629 - DNA, 25 bp, Saccharomyces pastorianus
ggactatgtctatccaacgatatgg

SEQ ID NO: 149630 - DNA, 25 bp, Saccharomyces pastorianus
atccgcagagcgataatccatcatc

SEQ ID NO: 149631 - DNA, 25 bp, Saccharomyces pastorianus
ggcagcgggatctcagccttgcagt

SEQ ID NO: 149632 - DNA, 25 bp, Saccharomyces pastorianus
acgccctcaataattccaatgtcac

SEQ ID NO: 149633 - DNA, 25 bp, Saccharomyces pastorianus
tacggttactacaatagggttgcat

SEQ ID NO: 149634 - DNA, 25 bp, Saccharomyces pastorianus
gtagaagaagaacttggcccacttg

SEQ ID NO: 149635 - DNA, 25 bp, Saccharomyces pastorianus
ggcagtcggactattattgtcgttt

SEQ ID NO: 149636 - DNA, 25 bp, Saccharomyces pastorianus
tggcccacttggacattacacaggt

SEQ ID NO: 149637 - DNA, 25 bp, Saccharomyces pastorianus
atattcattcggtggagatggctcc

SEQ ID NO: 149638 - DNA, 25 bp, Saccharomyces pastorianus
tatcttgtaacgttggtagaccctt

SEQ ID NO: 149639 - DNA, 25 bp, Saccharomyces pastorianus
gagatggctccgatttggttaatat

SEQ ID NO: 149640 - DNA, 25 bp, Saccharomyces pastorianus
cccggatttgaaagcttattccaag

SEQ ID NO: 149641 - DNA, 25 bp, Saccharomyces pastorianus
gagcgtgcacaaatgttaatacttt

SEQ ID NO: 149642 - DNA, 25 bp, Saccharomyces pastorianus
aggccaatgttgttaactctttatg

SEQ ID NO: 149643 - DNA, 25 bp, Saccharomyces pastorianus
taatacttttctactactatcgtga

SEQ ID NO: 149644 - DNA, 25 bp, Saccharomyces pastorianus
acgaaggtgtgtttcattcccgtcg

SEQ ID NO: 149645 - DNA, 25 bp, Saccharomyces pastorianus
tcgtttcgcacacatcttgactgaa

SEQ ID NO: 149646 - DNA, 25 bp, Saccharomyces pastorianus
ttttgaggttctttcacttgctgta

SEQ ID NO: 149647 - DNA, 25 bp, Saccharomyces pastorianus
ttattcctgatgtaccaatggctga

SEQ ID NO: 149648 - DNA, 25 bp, Saccharomyces pastorianus
gggccctgttgttaatgttgttcaa

SEQ ID NO: 149649 - DNA, 25 bp, Saccharomyces pastorianus
agaacatgccctggaagtttttgag

SEQ ID NO: 149650 - DNA, 25 bp, Saccharomyces pastorianus
tcgtggctgtcataagaaacccctt

SEQ ID NO: 149651 - DNA, 25 bp, Saccharomyces pastorianus
ccaccttggatttacgttttgctag

SEQ ID NO: 149652 - DNA, 25 bp, Saccharomyces pastorianus
gttttagatcaattccgtaggcaga

SEQ ID NO: 149653 - DNA, 25 bp, Saccharomyces pastorianus
actagaacgcatattccaccttgga

SEQ ID NO: 149654 - DNA, 25 bp, Saccharomyces pastorianus
gtaacccttaccttgatcttaggtg

SEQ ID NO: 149655 - DNA, 25 bp, Saccharomyces pastorianus
ctcgagtttgagtgattccgttacg

SEQ ID NO: 149656 - DNA, 25 bp, Saccharomyces pastorianus
atttaaagtttgtcgggctagctca

SEQ ID NO: 149657 - DNA, 25 bp, Saccharomyces pastorianus
gatgaatcgattgctcctttaaagg

SEQ ID NO: 149658 - DNA, 25 bp, Saccharomyces pastorianus
gatcacaaggtgctgttactttttg

SEQ ID NO: 149659 - DNA, 25 bp, Saccharomyces pastorianus
gggctagctcataagttgttgcaag

SEQ ID NO: 149660 - DNA, 25 bp, Saccharomyces pastorianus
acctgctggttgtgagggttctagc

SEQ ID NO: 149661 - DNA, 25 bp, Saccharomyces pastorianus
aggatctttaacatctcagctagtg

SEQ ID NO: 149662 - DNA, 25 bp, Saccharomyces pastorianus
aggtcaatctttccctatttggcaa

SEQ ID NO: 149663 - DNA, 25 bp, Saccharomyces pastorianus
ggttctagcctgtatgattatttcg

SEQ ID NO: 149664 - DNA, 25 bp, Saccharomyces pastorianus
atcatgtaggtgtgactccactctc

SEQ ID NO: 149665 - DNA, 25 bp, Saccharomyces pastorianus
gatttagatcttccaactcagcaaa

SEQ ID NO: 149666 - DNA, 25 bp, Saccharomyces pastorianus
aaacgacttcactttctgggttgat

SEQ ID NO: 149667 - DNA, 25 bp, Saccharomyces pastorianus
agaagatggattttcagatttgaac

SEQ ID NO: 149668 - DNA, 25 bp, Saccharomyces pastorianus
ttataaacgacttcactttctgggt

SEQ ID NO: 149669 - DNA, 25 bp, Saccharomyces pastorianus
caagaagccttcaggatgagaagat

SEQ ID NO: 149670 - DNA, 25 bp, Saccharomyces pastorianus
ttccatgacagattctttataaacg

SEQ ID NO: 149671 - DNA, 25 bp, Saccharomyces pastorianus
tgaacaattggttgtaaaccctagt

SEQ ID NO: 149672 - DNA, 25 bp, Saccharomyces pastorianus
cactttctgggttgatgtccttcaa

SEQ ID NO: 149673 - DNA, 25 bp, Saccharomyces pastorianus
gtccttcaagaagccttcaggatga

SEQ ID NO: 149674 - DNA, 25 bp, Saccharomyces pastorianus
tgggttgatgtccttcaagaagcct

SEQ ID NO: 149675 - DNA, 25 bp, Saccharomyces pastorianus
gatgtccttcaagaagccttcagga

SEQ ID NO: 149676 - DNA, 25 bp, Saccharomyces pastorianus
gacttcactttctgggttgatgtcc

SEQ ID NO: 149677 - DNA, 25 bp, Saccharomyces pastorianus
ataatgcccatgttatgcaagacgt

SEQ ID NO: 149678 - DNA, 25 bp, Saccharomyces pastorianus
gaatgacaccaattttattatcctt

SEQ ID NO: 149679 - DNA, 25 bp, Saccharomyces pastorianus
tttcctttggaacccttgcaagtgg

SEQ ID NO: 149680 - DNA, 25 bp, Saccharomyces pastorianus
atgcaagaatcccagtgacaagaat

SEQ ID NO: 149681 - DNA, 25 bp, Saccharomyces pastorianus
tggagtcaggtttattttcagtgga

SEQ ID NO: 149682 - DNA, 25 bp, Saccharomyces pastorianus
ggatggtaccattgatttagtcata

SEQ ID NO: 149683 - DNA, 25 bp, Saccharomyces pastorianus
atgccgtatattgctaaggacacca

SEQ ID NO: 149684 - DNA, 25 bp, Saccharomyces pastorianus
gagccagaagttattcactcaaaaa

SEQ ID NO: 149685 - DNA, 25 bp, Saccharomyces pastorianus
gctgctttaccagcggatggtacca

SEQ ID NO: 149686 - DNA, 25 bp, Saccharomyces pastorianus
ggacaccaaattttttcccgctgct

SEQ ID NO: 149687 - DNA, 25 bp, Saccharomyces pastorianus
aaggttctcatgtattagagccaga

SEQ ID NO: 149688 - DNA, 25 bp, Saccharomyces pastorianus
gggtgtagcattcaacattatccaa

SEQ ID NO: 149689 - DNA, 25 bp, Saccharomyces pastorianus
tgaacgaatggccaagattatcctt

SEQ ID NO: 149690 - DNA, 25 bp, Saccharomyces pastorianus
gagtcagacgtacggcgttattgca

SEQ ID NO: 149691 - DNA, 25 bp, Saccharomyces pastorianus
gtacggcgttattgcagaatctgat

SEQ ID NO: 149692 - DNA, 25 bp, Saccharomyces pastorianus
cagatggatgggtcccgttaggttt

SEQ ID NO: 149693 - DNA, 25 bp, Saccharomyces pastorianus
ctctgtgccttgtcaaatccattga

SEQ ID NO: 149694 - DNA, 25 bp, Saccharomyces pastorianus
aagattatcctttttgagtcagacg

SEQ ID NO: 149695 - DNA, 25 bp, Saccharomyces pastorianus
aataacccatcgtacgccgctctgt

SEQ ID NO: 149696 - DNA, 25 bp, Saccharomyces pastorianus
cgaagttttcgtcaaatatgctgcc

SEQ ID NO: 149697 - DNA, 25 bp, Saccharomyces pastorianus
ggtaagaaatatccctgcgaagttt

SEQ ID NO: 149698 - DNA, 25 bp, Saccharomyces pastorianus
gttcccaaccttcttatatgaacga

SEQ ID NO: 149699 - DNA, 25 bp, Saccharomyces pastorianus
gataaggctcctgtaagcgaatcac

SEQ ID NO: 149700 - DNA, 25 bp, Saccharomyces pastorianus
gtgtctcccgatgattcacaggatt

SEQ ID NO: 149701 - DNA, 25 bp, Saccharomyces pastorianus
ggatgattccctggaactgttgcct

SEQ ID NO: 149702 - DNA, 25 bp, Saccharomyces pastorianus
gaacactgtgaaggtgtctcccgat

SEQ ID NO: 149703 - DNA, 25 bp, Saccharomyces pastorianus
acaggattactcacccatctttagg

SEQ ID NO: 149704 - DNA, 25 bp, Saccharomyces pastorianus
ggaactgttgcctcttaatactacc

SEQ ID NO: 149705 - DNA, 25 bp, Saccharomyces pastorianus
agcgaatcacagtcatttcccaaaa

SEQ ID NO: 149706 - DNA, 25 bp, Saccharomyces pastorianus
gaaaatctgagttcttcgtctgaaa

SEQ ID NO: 149707 - DNA, 25 bp, Saccharomyces pastorianus
aatactaccattccgttcaacagaa

SEQ ID NO: 149708 - DNA, 25 bp, Saccharomyces pastorianus
agggcctgatgttataccacaaata

SEQ ID NO: 149709 - DNA, 25 bp, Saccharomyces pastorianus
gattctttatccttgttgagctgct

SEQ ID NO: 149710 - DNA, 25 bp, Saccharomyces pastorianus
aagagtttccgcaacctgtcagaga

SEQ ID NO: 149711 - DNA, 25 bp, Saccharomyces pastorianus
gttttattgttttccgcacattctc

SEQ ID NO: 149712 - DNA, 25 bp, Saccharomyces pastorianus
gaaggcatggcagatctcgtcaaaa

SEQ ID NO: 149713 - DNA, 25 bp, Saccharomyces pastorianus
tggcaagtccaatgatcctgtaaag

SEQ ID NO: 149714 - DNA, 25 bp, Saccharomyces pastorianus
atgtttattcctatcgcctttacct

SEQ ID NO: 149715 - DNA, 25 bp, Saccharomyces pastorianus
actacctcttgattttgcacttggc

SEQ ID NO: 149716 - DNA, 25 bp, Saccharomyces pastorianus
gtagctgcgacggtttacaacatca

SEQ ID NO: 149717 - DNA, 25 bp, Saccharomyces pastorianus
tgttaacaccggtgatgcctaccca

SEQ ID NO: 149718 - DNA, 25 bp, Saccharomyces pastorianus
ggtcggttattgatcgttggcctac

SEQ ID NO: 149719 - DNA, 25 bp, Saccharomyces pastorianus
aaccatggttgggagcgcagacagc

SEQ ID NO: 149720 - DNA, 25 bp, Saccharomyces pastorianus
aaggccttctccgaaaatatcacca

SEQ ID NO: 149721 - DNA, 25 bp, Saccharomyces pastorianus
gatcattttcggttacattcaacat

SEQ ID NO: 149722 - DNA, 25 bp, Saccharomyces pastorianus
ctgaccattacaagatcattttcgg

SEQ ID NO: 149723 - DNA, 25 bp, Saccharomyces pastorianus
tttcggttacattcaacatgcagaa

SEQ ID NO: 149724 - DNA, 25 bp, Saccharomyces pastorianus
gtacacaaggttccttcctaagaag

SEQ ID NO: 149725 - DNA, 25 bp, Saccharomyces pastorianus
aaggttccttcctaagaagatcaca

SEQ ID NO: 149726 - DNA, 25 bp, Saccharomyces pastorianus
acaagatcattttcggttacattca

SEQ ID NO: 149727 - DNA, 25 bp, Saccharomyces pastorianus
gaagatcacaactgaccattacaag

SEQ ID NO: 149728 - DNA, 25 bp, Saccharomyces pastorianus
gaacaatccgtacacaaggttcctt

SEQ ID NO: 149729 - DNA, 25 bp, Saccharomyces pastorianus
tgctttccagaacaatccgtacaca

SEQ ID NO: 149730 - DNA, 25 bp, Saccharomyces pastorianus
aaagagatcacccacaggaattgtt

SEQ ID NO: 149731 - DNA, 25 bp, Saccharomyces pastorianus
catgcagaatgcacaaaagagatca

SEQ ID NO: 149732 - DNA, 25 bp, Saccharomyces pastorianus
aattaatgacccctcttgttctgag

SEQ ID NO: 149733 - DNA, 25 bp, Saccharomyces pastorianus
agaaggcccattactctcagaaaga

SEQ ID NO: 149734 - DNA, 25 bp, Saccharomyces pastorianus
agcttctcaactgcaatgatccaag

SEQ ID NO: 149735 - DNA, 25 bp, Saccharomyces pastorianus
gatgcccatttgaaggatcgctatc

SEQ ID NO: 149736 - DNA, 25 bp, Saccharomyces pastorianus
atgtcacgagtttcaggagttgcaa

SEQ ID NO: 149737 - DNA, 25 bp, Saccharomyces pastorianus
gcttcagactcaatttaccgctcaa

SEQ ID NO: 149738 - DNA, 25 bp, Saccharomyces pastorianus
aaagtatgttactgactcaccaaga

SEQ ID NO: 149739 - DNA, 25 bp, Saccharomyces pastorianus
aacatttggagaggtcgcttcagac

SEQ ID NO: 149740 - DNA, 25 bp, Saccharomyces pastorianus
gttctgaggcagaggcacttgataa

SEQ ID NO: 149741 - DNA, 25 bp, Saccharomyces pastorianus
gaggaaggcccgaaagatgcccatt

SEQ ID NO: 149742 - DNA, 25 bp, Saccharomyces pastorianus
atttaccgctcaaaacagcttctca

SEQ ID NO: 149743 - DNA, 25 bp, Saccharomyces pastorianus
tccttcgaggagtattacaacgatt

SEQ ID NO: 149744 - DNA, 25 bp, Saccharomyces pastorianus
gaagatacaagctatagcaactcct

SEQ ID NO: 149745 - DNA, 25 bp, Saccharomyces pastorianus
agatacaagctatagcaactccttc

SEQ ID NO: 149746 - DNA, 25 bp, Saccharomyces pastorianus
cgaggagtattacaacgattctcac

SEQ ID NO: 149747 - DNA, 25 bp, Saccharomyces pastorianus
ctccttcgaggagtattacaacgat

SEQ ID NO: 149748 - DNA, 25 bp, Saccharomyces pastorianus
ttcgaggagtattacaacgattctc

SEQ ID NO: 149749 - DNA, 25 bp, Saccharomyces pastorianus
ccttcgaggagtattacaacgattc

SEQ ID NO: 149750 - DNA, 25 bp, Saccharomyces pastorianus
gcaactccttcgaggagtattacaa

SEQ ID NO: 149751 - DNA, 25 bp, Saccharomyces pastorianus
gatacaagctatagcaactccttcg

SEQ ID NO: 149752 - DNA, 25 bp, Saccharomyces pastorianus
tagcaactccttcgaggagtattac

SEQ ID NO: 149753 - DNA, 25 bp, Saccharomyces pastorianus
cttcgaggagtattacaacgattct

SEQ ID NO: 149754 - DNA, 25 bp, Saccharomyces pastorianus
ggcctttatccgaaaagtgtactag

SEQ ID NO: 149755 - DNA, 25 bp, Saccharomyces pastorianus
gtacaccagttctgtttaaagaatt

SEQ ID NO: 149756 - DNA, 25 bp, Saccharomyces pastorianus
gaaagaattgttacacagtgaaatg

SEQ ID NO: 149757 - DNA, 25 bp, Saccharomyces pastorianus
cagaagcttatcaaagcacaagcaa

SEQ ID NO: 149758 - DNA, 25 bp, Saccharomyces pastorianus
aaagttcttcaggacataaagcaga

SEQ ID NO: 149759 - DNA, 25 bp, Saccharomyces pastorianus
attttcagtacaccagttctgttta

SEQ ID NO: 149760 - DNA, 25 bp, Saccharomyces pastorianus
atccgaaaagtgtactaggtatgaa

SEQ ID NO: 149761 - DNA, 25 bp, Saccharomyces pastorianus
gcagaatttagaaggcctttatccg

SEQ ID NO: 149762 - DNA, 25 bp, Saccharomyces pastorianus
atcaactgacaaatactgaaacatt

SEQ ID NO: 149763 - DNA, 25 bp, Saccharomyces pastorianus
gcacaagcaatggagactaacggaa

SEQ ID NO: 149764 - DNA, 25 bp, Saccharomyces pastorianus
cagtgaaatgaaacagaagcttatc

SEQ ID NO: 149765 - DNA, 25 bp, Saccharomyces pastorianus
gaggattttgtatacattgcactat

SEQ ID NO: 149766 - DNA, 25 bp, Saccharomyces pastorianus
aaacgatattgattctgtcttgtat

SEQ ID NO: 149767 - DNA, 25 bp, Saccharomyces pastorianus
attgatccaaaacttttgaactctt

SEQ ID NO: 149768 - DNA, 25 bp, Saccharomyces pastorianus
gattctgtcttgtatactagttcta

SEQ ID NO: 149769 - DNA, 25 bp, Saccharomyces pastorianus
gtatacattgcactattactgcata

SEQ ID NO: 149770 - DNA, 25 bp, Saccharomyces pastorianus
gcactattactgcataaggcaaacg

SEQ ID NO: 149771 - DNA, 25 bp, Saccharomyces pastorianus
gatattgattctgtcttgtatacta

SEQ ID NO: 149772 - DNA, 25 bp, Saccharomyces pastorianus
tttgaactctttaactttcgaggat

SEQ ID NO: 149773 - DNA, 25 bp, Saccharomyces pastorianus
aaggcaaacgatattgattctgtct

SEQ ID NO: 149774 - DNA, 25 bp, Saccharomyces pastorianus
taactttcgaggattttgtatacat

SEQ ID NO: 149775 - DNA, 25 bp, Saccharomyces pastorianus
tgtcttgtatactagttctacaaag

SEQ ID NO: 149776 - DNA, 25 bp, Saccharomyces pastorianus
caaattctcctcaggctaaagttca

SEQ ID NO: 149777 - DNA, 25 bp, Saccharomyces pastorianus
aaattctcctcaggctaaagttcac

SEQ ID NO: 149778 - DNA, 25 bp, Saccharomyces pastorianus
ttttcaaattctcctcaggctaaag

SEQ ID NO: 149779 - DNA, 25 bp, Saccharomyces pastorianus
tcaaattctcctcaggctaaagttc

SEQ ID NO: 149780 - DNA, 25 bp, Saccharomyces pastorianus
tttttcaaattctcctcaggctaaa

SEQ ID NO: 149781 - DNA, 25 bp, Saccharomyces pastorianus
ttttttcaaattctcctcaggctaa

SEQ ID NO: 149782 - DNA, 25 bp, Saccharomyces pastorianus
ttcaaattctcctcaggctaaagtt

SEQ ID NO: 149783 - DNA, 25 bp, Saccharomyces pastorianus
tttcaaattctcctcaggctaaagt

SEQ ID NO: 149784 - DNA, 25 bp, Saccharomyces pastorianus
attctcctcaggctaaagttcacgg

SEQ ID NO: 149785 - DNA, 25 bp, Saccharomyces pastorianus
aaccaaagggtcgtgcttacaagag

SEQ ID NO: 149786 - DNA, 25 bp, Saccharomyces pastorianus
ttctcctcaggctaaagttcacggt

SEQ ID NO: 149787 - DNA, 25 bp, Saccharomyces pastorianus
gtaagcaatttttcgcgtaccacca

SEQ ID NO: 149788 - DNA, 25 bp, Saccharomyces pastorianus
aaatgcgaattacgtgttcaacgtc

SEQ ID NO: 149789 - DNA, 25 bp, Saccharomyces pastorianus
gccacagtgcgggtaagcaattttt

SEQ ID NO: 149790 - DNA, 25 bp, Saccharomyces pastorianus
taagcaatttttcgcgtaccaccac

SEQ ID NO: 149791 - DNA, 25 bp, Saccharomyces pastorianus
ttttttcaccgccacagtgcgggta

SEQ ID NO: 149792 - DNA, 25 bp, Saccharomyces pastorianus
caatttggcttataaatgttcgaga

SEQ ID NO: 149793 - DNA, 25 bp, Saccharomyces pastorianus
gcaattttcgaaactcaatttggct

SEQ ID NO: 149794 - DNA, 25 bp, Saccharomyces pastorianus
gcaaccaagcaattttcgaaactca

SEQ ID NO: 149795 - DNA, 25 bp, Saccharomyces pastorianus
gtaccaccaccattacacatgtata

SEQ ID NO: 149796 - DNA, 25 bp, Saccharomyces pastorianus
atgctatgtataacgcaaccaagca

SEQ ID NO: 149797 - DNA, 25 bp, Saccharomyces pastorianus
taacgcaaccaagcaattttcgaaa

SEQ ID NO: 149798 - DNA, 25 bp, Saccharomyces pastorianus
aaactttagagctaccgccattcat

SEQ ID NO: 149799 - DNA, 25 bp, Saccharomyces pastorianus
gatctggtgccgctactttattggt

SEQ ID NO: 149800 - DNA, 25 bp, Saccharomyces pastorianus
ggtgaccgtacccaatctgagagag

SEQ ID NO: 149801 - DNA, 25 bp, Saccharomyces pastorianus
ggtttcggtcgcaacaacaacagag

SEQ ID NO: 149802 - DNA, 25 bp, Saccharomyces pastorianus
tcttgccactgcctttttcaacagt

SEQ ID NO: 149803 - DNA, 25 bp, Saccharomyces pastorianus
agattaccgtaaggccggaggcgct

SEQ ID NO: 149804 - DNA, 25 bp, Saccharomyces pastorianus
aagaagtcccatcattcttgaagga

SEQ ID NO: 149805 - DNA, 25 bp, Saccharomyces pastorianus
ttattggttgccacagctgtcgcag

SEQ ID NO: 149806 - DNA, 25 bp, Saccharomyces pastorianus
gcagatcaattgaccgatttcctga

SEQ ID NO: 149807 - DNA, 25 bp, Saccharomyces pastorianus
gtagcgattccaagtcttctggctg

SEQ ID NO: 149808 - DNA, 25 bp, Saccharomyces pastorianus
aactctttcagaggcggtagtggct

SEQ ID NO: 149809 - DNA, 25 bp, Saccharomyces pastorianus
tcgttaccttggatttcctactaag

SEQ ID NO: 149810 - DNA, 25 bp, Saccharomyces pastorianus
gactcaggaccttatctttatcata

SEQ ID NO: 149811 - DNA, 25 bp, Saccharomyces pastorianus
gccactattagtccattgttctgca

SEQ ID NO: 149812 - DNA, 25 bp, Saccharomyces pastorianus
gcaaagttttattacaagcctcgaa

SEQ ID NO: 149813 - DNA, 25 bp, Saccharomyces pastorianus
aagattgtgaccttccgcataatgg

SEQ ID NO: 149814 - DNA, 25 bp, Saccharomyces pastorianus
aattggttagattcatgcggcgtag

SEQ ID NO: 149815 - DNA, 25 bp, Saccharomyces pastorianus
ataatggtgaccttacttccactac

SEQ ID NO: 149816 - DNA, 25 bp, Saccharomyces pastorianus
atggctgtgttctcagagtctttca

SEQ ID NO: 149817 - DNA, 25 bp, Saccharomyces pastorianus
tatccgagccgtttattgtttacca

SEQ ID NO: 149818 - DNA, 25 bp, Saccharomyces pastorianus
gatacagcaaattcatcgccactat

SEQ ID NO: 149819 - DNA, 25 bp, Saccharomyces pastorianus
ttccactaccatggctgtatccgag

SEQ ID NO: 149820 - DNA, 25 bp, Saccharomyces pastorianus
cgctatatcggaaaagggccacata

SEQ ID NO: 149821 - DNA, 25 bp, Saccharomyces pastorianus
cgacgttaacatacggcggacaact

SEQ ID NO: 149822 - DNA, 25 bp, Saccharomyces pastorianus
tgcaaagatttggacgacgttaaca

SEQ ID NO: 149823 - DNA, 25 bp, Saccharomyces pastorianus
gcaatagaatggcttcttccgctat

SEQ ID NO: 149824 - DNA, 25 bp, Saccharomyces pastorianus
gaatggcttcttccgctatatcgga

SEQ ID NO: 149825 - DNA, 25 bp, Saccharomyces pastorianus
tctgtctaaccttccccaaaatcaa

SEQ ID NO: 149826 - DNA, 25 bp, Saccharomyces pastorianus
aagggccacatacaagtcaatcaaa

SEQ ID NO: 149827 - DNA, 25 bp, Saccharomyces pastorianus
gtcaaatgcccgtctatagaggtga

SEQ ID NO: 149828 - DNA, 25 bp, Saccharomyces pastorianus
tagaacacctggtcaaatgcccgtc

SEQ ID NO: 149829 - DNA, 25 bp, Saccharomyces pastorianus
gtcaatcaaactagaacacctggtc

SEQ ID NO: 149830 - DNA, 25 bp, Saccharomyces pastorianus
tataaatctgtctaaccttccccaa

SEQ ID NO: 149831 - DNA, 25 bp, Saccharomyces pastorianus
attttgggtcagacgcgacacataa

SEQ ID NO: 149832 - DNA, 25 bp, Saccharomyces pastorianus
tatagccgatttgccctggattaaa

SEQ ID NO: 149833 - DNA, 25 bp, Saccharomyces pastorianus
atgtctcttcgtatagccgatttgc

SEQ ID NO: 149834 - DNA, 25 bp, Saccharomyces pastorianus
atattgaatgatcctgcagtacaga

SEQ ID NO: 149835 - DNA, 25 bp, Saccharomyces pastorianus
gccctggattaaaagccttgcgctt

SEQ ID NO: 149836 - DNA, 25 bp, Saccharomyces pastorianus
cccaggagggagcagttttttatgt

SEQ ID NO: 149837 - DNA, 25 bp, Saccharomyces pastorianus
atgtttataacacaactaccagatg

SEQ ID NO: 149838 - DNA, 25 bp, Saccharomyces pastorianus
aagccttgcgcttatagatgaggat

SEQ ID NO: 149839 - DNA, 25 bp, Saccharomyces pastorianus
caggcatttttgaaattaccgaaca

SEQ ID NO: 149840 - DNA, 25 bp, Saccharomyces pastorianus
gagcaattgaaaatcatcccaggag

SEQ ID NO: 149841 - DNA, 25 bp, Saccharomyces pastorianus
gatgacagacgtggttcagatgata

SEQ ID NO: 149842 - DNA, 25 bp, Saccharomyces pastorianus
cattgtgcacggaactttcgatgat

SEQ ID NO: 149843 - DNA, 25 bp, Saccharomyces pastorianus
aaagcgtcttttcattgtgcacgga

SEQ ID NO: 149844 - DNA, 25 bp, Saccharomyces pastorianus
atgaaccaaccatcggaaaaccatg

SEQ ID NO: 149845 - DNA, 25 bp, Saccharomyces pastorianus
tccggtaccacaacgctcaaagaat

SEQ ID NO: 149846 - DNA, 25 bp, Saccharomyces pastorianus
gtatccaccatccaaaatttcaaat

SEQ ID NO: 149847 - DNA, 25 bp, Saccharomyces pastorianus
gaaggctattttgaagtatccacca

SEQ ID NO: 149848 - DNA, 25 bp, Saccharomyces pastorianus
gttaagggatgcctttgctgaacgc

SEQ ID NO: 149849 - DNA, 25 bp, Saccharomyces pastorianus
ggattgacgaactatgacatgcaca

SEQ ID NO: 149850 - DNA, 25 bp, Saccharomyces pastorianus
agactctgatcattccatccggtac

SEQ ID NO: 149851 - DNA, 25 bp, Saccharomyces pastorianus
acatgcacatttttccagactctga

SEQ ID NO: 149852 - DNA, 25 bp, Saccharomyces pastorianus
ggacattgtatgattccgtttacac

SEQ ID NO: 149853 - DNA, 25 bp, Saccharomyces pastorianus
aaagagcctatccagttgaccaaag

SEQ ID NO: 149854 - DNA, 25 bp, Saccharomyces pastorianus
gatgattcaatcttgcaactgacga

SEQ ID NO: 149855 - DNA, 25 bp, Saccharomyces pastorianus
acacctttatagtatcagccttacg

SEQ ID NO: 149856 - DNA, 25 bp, Saccharomyces pastorianus
gggcctgatacacctattaaagtag

SEQ ID NO: 149857 - DNA, 25 bp, Saccharomyces pastorianus
cagccttacggattctacaactcag

SEQ ID NO: 149858 - DNA, 25 bp, Saccharomyces pastorianus
agaactacgatttacctatcacaag

SEQ ID NO: 149859 - DNA, 25 bp, Saccharomyces pastorianus
aatgagattggtgtcatgtcacaac

SEQ ID NO: 149860 - DNA, 25 bp, Saccharomyces pastorianus
aaccatggtcctagacgatggcgta

SEQ ID NO: 149861 - DNA, 25 bp, Saccharomyces pastorianus
gaacgttgccgaaattcacgatgat

SEQ ID NO: 149862 - DNA, 25 bp, Saccharomyces pastorianus
tcagtcatctcttttattacccaac

SEQ ID NO: 149863 - DNA, 25 bp, Saccharomyces pastorianus
tagctggtccgcttacaagggtttt

SEQ ID NO: 149864 - DNA, 25 bp, Saccharomyces pastorianus
tgaaatgtgggcactctcttctccg

SEQ ID NO: 149865 - DNA, 25 bp, Saccharomyces pastorianus
tggcccgggcaatgtgatttataat

SEQ ID NO: 149866 - DNA, 25 bp, Saccharomyces pastorianus
ttcatcatgccctagatagattcgt

SEQ ID NO: 149867 - DNA, 25 bp, Saccharomyces pastorianus
tagcactgtgttgaggcccgttcag

SEQ ID NO: 149868 - DNA, 25 bp, Saccharomyces pastorianus
taagagtatttgctttggcccgggc

SEQ ID NO: 149869 - DNA, 25 bp, Saccharomyces pastorianus
agcaggactgtgcaattcaccatgt

SEQ ID NO: 149870 - DNA, 25 bp, Saccharomyces pastorianus
tccgagggccacagatttaccgcaa

SEQ ID NO: 149871 - DNA, 25 bp, Saccharomyces pastorianus
gataccataaactctggaaccccag

SEQ ID NO: 149872 - DNA, 25 bp, Saccharomyces pastorianus
atccccttccataatagcactgtgt

SEQ ID NO: 149873 - DNA, 25 bp, Saccharomyces pastorianus
cgttcaggaaccactctatgactac

SEQ ID NO: 149874 - DNA, 25 bp, Saccharomyces pastorianus
aatgtgtagtcaccggtctagttga

SEQ ID NO: 149875 - DNA, 25 bp, Saccharomyces pastorianus
aaggcgcatttcaacctccgatgga

SEQ ID NO: 149876 - DNA, 25 bp, Saccharomyces pastorianus
gaggaagtaaactgagtatcgaact

SEQ ID NO: 149877 - DNA, 25 bp, Saccharomyces pastorianus
atgacaaggcgcatttcaacctccg

SEQ ID NO: 149878 - DNA, 25 bp, Saccharomyces pastorianus
aactgagtatcgaactcaaggataa

SEQ ID NO: 149879 - DNA, 25 bp, Saccharomyces pastorianus
tcttttggccgtatgacaaggcgca

SEQ ID NO: 149880 - DNA, 25 bp, Saccharomyces pastorianus
ggccgtatgacaaggcgcatttcaa

SEQ ID NO: 149881 - DNA, 25 bp, Saccharomyces pastorianus
tttcaacctccgatggaggaagtaa

SEQ ID NO: 149882 - DNA, 25 bp, Saccharomyces pastorianus
caaggataaaacaaagcttaccagt

SEQ ID NO: 149883 - DNA, 25 bp, Saccharomyces pastorianus
tttggccgtatgacaaggcgcattt

SEQ ID NO: 149884 - DNA, 25 bp, Saccharomyces pastorianus
gcgcatttcaacctccgatggagga

SEQ ID NO: 149885 - DNA, 25 bp, Saccharomyces pastorianus
gacaaggcgcatttcaacctccgat

SEQ ID NO: 149886 - DNA, 25 bp, Saccharomyces pastorianus
aagtttgatggattgttcaacagac

SEQ ID NO: 149887 - DNA, 25 bp, Saccharomyces pastorianus
atgaagtttgatggattgttcaaca

SEQ ID NO: 149888 - DNA, 25 bp, Saccharomyces pastorianus
acagacggcaaaaaatggcgatttt

SEQ ID NO: 149889 - DNA, 25 bp, Saccharomyces pastorianus
gattgttcaacagacggcaaaaaat

SEQ ID NO: 149890 - DNA, 25 bp, Saccharomyces pastorianus
aacagacggcaaaaaatggcgattt

SEQ ID NO: 149891 - DNA, 25 bp, Saccharomyces pastorianus
gcaaaaaatggcgatttttgccggt

SEQ ID NO: 149892 - DNA, 25 bp, Saccharomyces pastorianus
atggattgttcaacagacggcaaaa

SEQ ID NO: 149893 - DNA, 25 bp, Saccharomyces pastorianus
ggattgttcaacagacggcaaaaaa

SEQ ID NO: 149894 - DNA, 25 bp, Saccharomyces pastorianus
gatggattgttcaacagacggcaaa

SEQ ID NO: 149895 - DNA, 25 bp, Saccharomyces pastorianus
tgatggattgttcaacagacggcaa

SEQ ID NO: 149896 - DNA, 25 bp, Saccharomyces pastorianus
tttgatggattgttcaacagacggc

SEQ ID NO: 149897 - DNA, 25 bp, Saccharomyces pastorianus
aattgccgtttactactcattcggt

SEQ ID NO: 149898 - DNA, 25 bp, Saccharomyces pastorianus
gtttactactcattcggtggcctct

SEQ ID NO: 149899 - DNA, 25 bp, Saccharomyces pastorianus
gtaagcaaggatctaattgccgttt

SEQ ID NO: 149900 - DNA, 25 bp, Saccharomyces pastorianus
cggtggcctcttaatgagattagaa

SEQ ID NO: 149901 - DNA, 25 bp, Saccharomyces pastorianus
ttactactcattcggtggcctctta

SEQ ID NO: 149902 - DNA, 25 bp, Saccharomyces pastorianus
ttgccgtttactactcattcggtgg

SEQ ID NO: 149903 - DNA, 25 bp, Saccharomyces pastorianus
tactcattcggtggcctcttaatga

SEQ ID NO: 149904 - DNA, 25 bp, Saccharomyces pastorianus
gatctaattgccgtttactactcat

SEQ ID NO: 149905 - DNA, 25 bp, Saccharomyces pastorianus
tatggtaccgcttacaagtttgagg

SEQ ID NO: 149906 - DNA, 25 bp, Saccharomyces pastorianus
cattcggtggcctcttaatgagatt

SEQ ID NO: 149907 - DNA, 25 bp, Saccharomyces pastorianus
tggtaccgcttacaagtttgaggaa

SEQ ID NO: 149908 - DNA, 25 bp, Saccharomyces pastorianus
actgggttcagcacgggtgtcatca

SEQ ID NO: 149909 - DNA, 25 bp, Saccharomyces pastorianus
gcggacaaaccgctttggacgctaa

SEQ ID NO: 149910 - DNA, 25 bp, Saccharomyces pastorianus
acgaagttcgagtggctgctccgga

SEQ ID NO: 149911 - DNA, 25 bp, Saccharomyces pastorianus
gtgctgtgcaactggctactactga

SEQ ID NO: 149912 - DNA, 25 bp, Saccharomyces pastorianus
aagaggaacactgtggcgctacacc

SEQ ID NO: 149913 - DNA, 25 bp, Saccharomyces pastorianus
cgctacaccccgtaatcaatgattt

SEQ ID NO: 149914 - DNA, 25 bp, Saccharomyces pastorianus
gttgtcgatatcctgttctcacaaa

SEQ ID NO: 149915 - DNA, 25 bp, Saccharomyces pastorianus
gctccggaggaacttcagggtcaat

SEQ ID NO: 149916 - DNA, 25 bp, Saccharomyces pastorianus
gaagatcgagcaacccattcgggaa

SEQ ID NO: 149917 - DNA, 25 bp, Saccharomyces pastorianus
aagttgttccattctggcggcgatt

SEQ ID NO: 149918 - DNA, 25 bp, Saccharomyces pastorianus
gttactgcctacaaaccatttctgg

SEQ ID NO: 149919 - DNA, 25 bp, Saccharomyces pastorianus
aagggcaccttgacgactagtcttt

SEQ ID NO: 149920 - DNA, 25 bp, Saccharomyces pastorianus
agtggagcacgccataaaccggcac

SEQ ID NO: 149921 - DNA, 25 bp, Saccharomyces pastorianus
aaggttcccgttcatatcgtacagg

SEQ ID NO: 149922 - DNA, 25 bp, Saccharomyces pastorianus
attccagacaaatccaagggcacct

SEQ ID NO: 149923 - DNA, 25 bp, Saccharomyces pastorianus
aatgatgggccctgctactagatac

SEQ ID NO: 149924 - DNA, 25 bp, Saccharomyces pastorianus
tacggcgatcgcgatgtccaagaac

SEQ ID NO: 149925 - DNA, 25 bp, Saccharomyces pastorianus
attgcgcccaaagtggatttaccag

SEQ ID NO: 149926 - DNA, 25 bp, Saccharomyces pastorianus
aagacattctatgacgacgacgacg

SEQ ID NO: 149927 - DNA, 25 bp, Saccharomyces pastorianus
agccaccccaaatccagagtatggt

SEQ ID NO: 149928 - DNA, 25 bp, Saccharomyces pastorianus
aaagctcagacgacagtacggcgat

SEQ ID NO: 149929 - DNA, 25 bp, Saccharomyces pastorianus
caagaacggctctttggcatggttc

SEQ ID NO: 149930 - DNA, 25 bp, Saccharomyces pastorianus
gatccaaataaacacgaagcaacgt

SEQ ID NO: 149931 - DNA, 25 bp, Saccharomyces pastorianus
aacaccctaagaaagcacggtattg

SEQ ID NO: 149932 - DNA, 25 bp, Saccharomyces pastorianus
gttttccatgtacaacaattaggtt

SEQ ID NO: 149933 - DNA, 25 bp, Saccharomyces pastorianus
gaatgacagagttatcagaccagca

SEQ ID NO: 149934 - DNA, 25 bp, Saccharomyces pastorianus
aacgttcgagttgccacaacctgat

SEQ ID NO: 149935 - DNA, 25 bp, Saccharomyces pastorianus
cgggtactgttttccatgtacaaca

SEQ ID NO: 149936 - DNA, 25 bp, Saccharomyces pastorianus
attaggtttcaccttgaatgacaga

SEQ ID NO: 149937 - DNA, 25 bp, Saccharomyces pastorianus
tgggagaaccatttgatccaaataa

SEQ ID NO: 149938 - DNA, 25 bp, Saccharomyces pastorianus
tttgaaaacaccctaagaaagcacg

SEQ ID NO: 149939 - DNA, 25 bp, Saccharomyces pastorianus
agacccattgggagaaccatttgat

SEQ ID NO: 149940 - DNA, 25 bp, Saccharomyces pastorianus
gaagcaacgttcgagttgccacaac

SEQ ID NO: 149941 - DNA, 25 bp, Saccharomyces pastorianus
ttgtgactccatcatttacaaagag

SEQ ID NO: 149942 - DNA, 25 bp, Saccharomyces pastorianus
atgagattttattctgatgaagcca

SEQ ID NO: 149943 - DNA, 25 bp, Saccharomyces pastorianus
gttagggccacaactaggaagtcgt

SEQ ID NO: 149944 - DNA, 25 bp, Saccharomyces pastorianus
agaactccttttgtgactccatcat

SEQ ID NO: 149945 - DNA, 25 bp, Saccharomyces pastorianus
agagccagttaagcgcgaagactaa

SEQ ID NO: 149946 - DNA, 25 bp, Saccharomyces pastorianus
ttttcagcagccaccgttagggcca

SEQ ID NO: 149947 - DNA, 25 bp, Saccharomyces pastorianus
atgagagctttttcagcagccaccg

SEQ ID NO: 149948 - DNA, 25 bp, Saccharomyces pastorianus
aggaagtcgttcatcccaatggcac

SEQ ID NO: 149949 - DNA, 25 bp, Saccharomyces pastorianus
tcgttcatcccaatggcaccaagaa

SEQ ID NO: 149950 - DNA, 25 bp, Saccharomyces pastorianus
ggcaccaagaactccttttgtgact

SEQ ID NO: 149951 - DNA, 25 bp, Saccharomyces pastorianus
aaattagagagccagttaagcgcga

SEQ ID NO: 149952 - DNA, 25 bp, Saccharomyces pastorianus
ttagagctacctttagaaacaactt

SEQ ID NO: 149953 - DNA, 25 bp, Saccharomyces pastorianus
gcaaagtcaccagaactcacggtaa

SEQ ID NO: 149954 - DNA, 25 bp, Saccharomyces pastorianus
caaagtcaccagaactcacggtaac

SEQ ID NO: 149955 - DNA, 25 bp, Saccharomyces pastorianus
gggcaaagtcaccagaactcacggt

SEQ ID NO: 149956 - DNA, 25 bp, Saccharomyces pastorianus
gctacctttagaaacaacttgccag

SEQ ID NO: 149957 - DNA, 25 bp, Saccharomyces pastorianus
agccaagactttcggtgcctctgtc

SEQ ID NO: 149958 - DNA, 25 bp, Saccharomyces pastorianus
gagctacctttagaaacaacttgcc

SEQ ID NO: 149959 - DNA, 25 bp, Saccharomyces pastorianus
tacctttagaaacaacttgccagcc

SEQ ID NO: 149960 - DNA, 25 bp, Saccharomyces pastorianus
ggcaaagtcaccagaactcacggta

SEQ ID NO: 149961 - DNA, 25 bp, Saccharomyces pastorianus
gttagagctacctttagaaacaact

SEQ ID NO: 149962 - DNA, 25 bp, Saccharomyces pastorianus
aactctggtgtcgttagagctacct

SEQ ID NO: 149963 - DNA, 25 bp, Saccharomyces pastorianus
gaagcccacaagagcatagtcataa

SEQ ID NO: 149964 - DNA, 25 bp, Saccharomyces pastorianus
aatctctggccaatggtcaggtgtt

SEQ ID NO: 149965 - DNA, 25 bp, Saccharomyces pastorianus
tgcctttaggaaattggcgtccaaa

SEQ ID NO: 149966 - DNA, 25 bp, Saccharomyces pastorianus
aagactcgcaagtttcacatcagtt

SEQ ID NO: 149967 - DNA, 25 bp, Saccharomyces pastorianus
catcggaaactcctactgaacattt

SEQ ID NO: 149968 - DNA, 25 bp, Saccharomyces pastorianus
cacatcagttttacgattcatcgga

SEQ ID NO: 149969 - DNA, 25 bp, Saccharomyces pastorianus
aatcgaagaacaacatcctctggaa

SEQ ID NO: 149970 - DNA, 25 bp, Saccharomyces pastorianus
gaaagatgtttcaaccgcattgcat

SEQ ID NO: 149971 - DNA, 25 bp, Saccharomyces pastorianus
gaaaatgcgctatacctaatctctg

SEQ ID NO: 149972 - DNA, 25 bp, Saccharomyces pastorianus
caagtgggacattgattggcggcaa

SEQ ID NO: 149973 - DNA, 25 bp, Saccharomyces pastorianus
gcgtccaaactgcagctttctgtga

SEQ ID NO: 149974 - DNA, 25 bp, Saccharomyces pastorianus
gctccaagagccgtcgaattagtta

SEQ ID NO: 149975 - DNA, 25 bp, Saccharomyces pastorianus
gcgtcgaacctcattctgtggatat

SEQ ID NO: 149976 - DNA, 25 bp, Saccharomyces pastorianus
aatagccacagattttgctccaaga

SEQ ID NO: 149977 - DNA, 25 bp, Saccharomyces pastorianus
gtgctttagcaccaaaccaatggga

SEQ ID NO: 149978 - DNA, 25 bp, Saccharomyces pastorianus
atttccaatcttatacgcatctacc

SEQ ID NO: 149979 - DNA, 25 bp, Saccharomyces pastorianus
gacgcagaacccgttacaatatttg

SEQ ID NO: 149980 - DNA, 25 bp, Saccharomyces pastorianus
gtacggccacgcaacagtatgggat

SEQ ID NO: 149981 - DNA, 25 bp, Saccharomyces pastorianus
gatcttcgtttttagtgctttagca

SEQ ID NO: 149982 - DNA, 25 bp, Saccharomyces pastorianus
aatttacctgatggcgtcgaacctc

SEQ ID NO: 149983 - DNA, 25 bp, Saccharomyces pastorianus
gatttggccaatcctgacggtaatt

SEQ ID NO: 149984 - DNA, 25 bp, Saccharomyces pastorianus
ggatcaagccatggataaccttcac

SEQ ID NO: 149985 - DNA, 25 bp, Saccharomyces pastorianus
acaacctccgccattcaagaagtga

SEQ ID NO: 149986 - DNA, 25 bp, Saccharomyces pastorianus
tgtcgacgacagcaccaaaaccggt

SEQ ID NO: 149987 - DNA, 25 bp, Saccharomyces pastorianus
gctgacatcgagcaatctaatggca

SEQ ID NO: 149988 - DNA, 25 bp, Saccharomyces pastorianus
taacaccaacgctaatgtcgacgac

SEQ ID NO: 149989 - DNA, 25 bp, Saccharomyces pastorianus
gatggctctacaagtaccacgactt

SEQ ID NO: 149990 - DNA, 25 bp, Saccharomyces pastorianus
gaagagggctccatcagcgagaata

SEQ ID NO: 149991 - DNA, 25 bp, Saccharomyces pastorianus
gaagggattgctactcctaaacaaa

SEQ ID NO: 149992 - DNA, 25 bp, Saccharomyces pastorianus
gaaaatgccgaaaacgcttctcaac

SEQ ID NO: 149993 - DNA, 25 bp, Saccharomyces pastorianus
aatgatgatacaaccggcgacacca

SEQ ID NO: 149994 - DNA, 25 bp, Saccharomyces pastorianus
ataatgcatctgaaccagccgaaga

SEQ ID NO: 149995 - DNA, 25 bp, Saccharomyces pastorianus
aatactggcgctgaagttcttgcaa

SEQ ID NO: 149996 - DNA, 25 bp, Saccharomyces pastorianus
tggaagaatacgaacaaaagggctc

SEQ ID NO: 149997 - DNA, 25 bp, Saccharomyces pastorianus
atgagagctatggaagaatacgaac

SEQ ID NO: 149998 - DNA, 25 bp, Saccharomyces pastorianus
gagagctatggaagaatacgaacaa

SEQ ID NO: 149999 - DNA, 25 bp, Saccharomyces pastorianus
gctatggaagaatacgaacaaaagg

SEQ ID NO: 150000 - DNA, 25 bp, Saccharomyces pastorianus
tgagagctatggaagaatacgaaca

SEQ ID NO: 150001 - DNA, 25 bp, Saccharomyces pastorianus
atggaagaatacgaacaaaagggct

SEQ ID NO: 150002 - DNA, 25 bp, Saccharomyces pastorianus
agagctatggaagaatacgaacaaa

SEQ ID NO: 150003 - DNA, 25 bp, Saccharomyces pastorianus
agctatggaagaatacgaacaaaag

SEQ ID NO: 150004 - DNA, 25 bp, Saccharomyces pastorianus
ggaagaatacgaacaaaagggctca

SEQ ID NO: 150005 - DNA, 25 bp, Saccharomyces pastorianus
gaagaatacgaacaaaagggctcat

SEQ ID NO: 150006 - DNA, 25 bp, Saccharomyces pastorianus
gagctatggaagaatacgaacaaaa

SEQ ID NO: 150007 - DNA, 25 bp, Saccharomyces pastorianus
gtgaagctcagttcattcgtgcaaa

SEQ ID NO: 150008 - DNA, 25 bp, Saccharomyces pastorianus
gaagatgtcgtgttaccatcgccgg

SEQ ID NO: 150009 - DNA, 25 bp, Saccharomyces pastorianus
gtgaacactgatttggacatcctga

SEQ ID NO: 150010 - DNA, 25 bp, Saccharomyces pastorianus
accatcgccgggttttgatgtgctt

SEQ ID NO: 150011 - DNA, 25 bp, Saccharomyces pastorianus
accactaatttctgggattgacgat

SEQ ID NO: 150012 - DNA, 25 bp, Saccharomyces pastorianus
gaagcttgagacttctcgccgtggc

SEQ ID NO: 150013 - DNA, 25 bp, Saccharomyces pastorianus
tgatgtgctttatccttccaacgaa

SEQ ID NO: 150014 - DNA, 25 bp, Saccharomyces pastorianus
tgccaccatggcattacgtgaactc

SEQ ID NO: 150015 - DNA, 25 bp, Saccharomyces pastorianus
aattaggaacctccgcatatgccac

SEQ ID NO: 150016 - DNA, 25 bp, Saccharomyces pastorianus
tgatccttctcaacaattggtgaac

SEQ ID NO: 150017 - DNA, 25 bp, Saccharomyces pastorianus
ttcgcgatttttcattggctggctc

SEQ ID NO: 150018 - DNA, 25 bp, Saccharomyces pastorianus
tagaggccaaattaagcagcgttat

SEQ ID NO: 150019 - DNA, 25 bp, Saccharomyces pastorianus
agcaacgtactcaggcagatggtat

SEQ ID NO: 150020 - DNA, 25 bp, Saccharomyces pastorianus
gtaggaccttccgaaaatgctgcaa

SEQ ID NO: 150021 - DNA, 25 bp, Saccharomyces pastorianus
atgtctgactcctcagaagccactg

SEQ ID NO: 150022 - DNA, 25 bp, Saccharomyces pastorianus
gttcttatctccagaattgccagga

SEQ ID NO: 150023 - DNA, 25 bp, Saccharomyces pastorianus
gaagccactgtaaagagaccccttg

SEQ ID NO: 150024 - DNA, 25 bp, Saccharomyces pastorianus
gagaccccttgatgctcacgtagga

SEQ ID NO: 150025 - DNA, 25 bp, Saccharomyces pastorianus
ggtattactttgttcttatctccag

SEQ ID NO: 150026 - DNA, 25 bp, Saccharomyces pastorianus
gcagcgttatactgactttttggtc

SEQ ID NO: 150027 - DNA, 25 bp, Saccharomyces pastorianus
gtcgaccccgaattaagacatcaat

SEQ ID NO: 150028 - DNA, 25 bp, Saccharomyces pastorianus
gacaagaattcaacgtcgaccccga

SEQ ID NO: 150029 - DNA, 25 bp, Saccharomyces pastorianus
gcgcctatcaatgttgttgttggaa

SEQ ID NO: 150030 - DNA, 25 bp, Saccharomyces pastorianus
tacgatttcggtttgttgccattta

SEQ ID NO: 150031 - DNA, 25 bp, Saccharomyces pastorianus
taccattcccattttttctacgcaa

SEQ ID NO: 150032 - DNA, 25 bp, Saccharomyces pastorianus
ccattttttctacgcaagaggatta

SEQ ID NO: 150033 - DNA, 25 bp, Saccharomyces pastorianus
ttggaaggcctatatacgttgaaaa

SEQ ID NO: 150034 - DNA, 25 bp, Saccharomyces pastorianus
caatgttgttgttggaaggcctata

SEQ ID NO: 150035 - DNA, 25 bp, Saccharomyces pastorianus
ggattattcaattacgatttcggtt

SEQ ID NO: 150036 - DNA, 25 bp, Saccharomyces pastorianus
ttctacgcaagaggattattcaatt

SEQ ID NO: 150037 - DNA, 25 bp, Saccharomyces pastorianus
ttagagcgcctatcaatgttgttgt

SEQ ID NO: 150038 - DNA, 25 bp, Saccharomyces pastorianus
gttgccatttagagcgcctatcaat

SEQ ID NO: 150039 - DNA, 25 bp, Saccharomyces pastorianus
ggtttgttgccatttagagcgccta

SEQ ID NO: 150040 - DNA, 25 bp, Saccharomyces pastorianus
atctgcattgttgttggtggcgcta

SEQ ID NO: 150041 - DNA, 25 bp, Saccharomyces pastorianus
gggaatattaacctagtgcctgtgt

SEQ ID NO: 150042 - DNA, 25 bp, Saccharomyces pastorianus
gtacagggccaacgtacttatttgg

SEQ ID NO: 150043 - DNA, 25 bp, Saccharomyces pastorianus
gacactggtcacacaatttcatatc

SEQ ID NO: 150044 - DNA, 25 bp, Saccharomyces pastorianus
atttggttaccatccacacggcata

SEQ ID NO: 150045 - DNA, 25 bp, Saccharomyces pastorianus
agcacttggtgcgtttggagcgttt

SEQ ID NO: 150046 - DNA, 25 bp, Saccharomyces pastorianus
ggtattcctatttctctgatgacac

SEQ ID NO: 150047 - DNA, 25 bp, Saccharomyces pastorianus
ggtggcgctagggaatctttattaa

SEQ ID NO: 150048 - DNA, 25 bp, Saccharomyces pastorianus
tattccaagattttcccaggtattc

SEQ ID NO: 150049 - DNA, 25 bp, Saccharomyces pastorianus
tactattgactatcgcaaccaggaa

SEQ ID NO: 150050 - DNA, 25 bp, Saccharomyces pastorianus
ggcgttaggtatttcttcagtatct

SEQ ID NO: 150051 - DNA, 25 bp, Saccharomyces pastorianus
gaattcccatttgtaaggaagaaga

SEQ ID NO: 150052 - DNA, 25 bp, Saccharomyces pastorianus
gtaacctatcaaccattctagaatt

SEQ ID NO: 150053 - DNA, 25 bp, Saccharomyces pastorianus
cattctagaattcccatttgtaagg

SEQ ID NO: 150054 - DNA, 25 bp, Saccharomyces pastorianus
gaggcagagtgcttgatcagctgta

SEQ ID NO: 150055 - DNA, 25 bp, Saccharomyces pastorianus
gtgcttgatcagctgtaacctatca

SEQ ID NO: 150056 - DNA, 25 bp, Saccharomyces pastorianus
gatcagctgtaacctatcaaccatt

SEQ ID NO: 150057 - DNA, 25 bp, Saccharomyces pastorianus
agagtgcttgatcagctgtaaccta

SEQ ID NO: 150058 - DNA, 25 bp, Saccharomyces pastorianus
tgagcttttggaatctcttagtgtt

SEQ ID NO: 150059 - DNA, 25 bp, Saccharomyces pastorianus
cagctgtaacctatcaaccattcta

SEQ ID NO: 150060 - DNA, 25 bp, Saccharomyces pastorianus
accattctagaattcccatttgtaa

SEQ ID NO: 150061 - DNA, 25 bp, Saccharomyces pastorianus
agatgagcttttggaatctcttagt

SEQ ID NO: 150062 - DNA, 25 bp, Saccharomyces pastorianus
aactgctgaagtttctagttcactt

SEQ ID NO: 150063 - DNA, 25 bp, Saccharomyces pastorianus
ggaactacgactcttctattatcaa

SEQ ID NO: 150064 - DNA, 25 bp, Saccharomyces pastorianus
gatacgaatccatatccgatgtata

SEQ ID NO: 150065 - DNA, 25 bp, Saccharomyces pastorianus
ataaacttcatagaggtgcacccgg

SEQ ID NO: 150066 - DNA, 25 bp, Saccharomyces pastorianus
tatcactttgcagaacgtgccttct

SEQ ID NO: 150067 - DNA, 25 bp, Saccharomyces pastorianus
taaaggtagctttcaaggcacttga

SEQ ID NO: 150068 - DNA, 25 bp, Saccharomyces pastorianus
gaaattcatggctatcactttgcag

SEQ ID NO: 150069 - DNA, 25 bp, Saccharomyces pastorianus
gccaatattttcagtaacgcctaca

SEQ ID NO: 150070 - DNA, 25 bp, Saccharomyces pastorianus
taaaacatcctcttcctctttaagg

SEQ ID NO: 150071 - DNA, 25 bp, Saccharomyces pastorianus
gaacgtgccttctcaaaactttgat

SEQ ID NO: 150072 - DNA, 25 bp, Saccharomyces pastorianus
gaatcactgaaactagactacgacc

SEQ ID NO: 150073 - DNA, 25 bp, Saccharomyces pastorianus
gcaggatgtagttaactctgataca

SEQ ID NO: 150074 - DNA, 25 bp, Saccharomyces pastorianus
aagaaactggaatggcacttttggc

SEQ ID NO: 150075 - DNA, 25 bp, Saccharomyces pastorianus
gaagaggaggtcaaacaggccacca

SEQ ID NO: 150076 - DNA, 25 bp, Saccharomyces pastorianus
gtgctactgcaacaaaggagggatc

SEQ ID NO: 150077 - DNA, 25 bp, Saccharomyces pastorianus
gcaaccaatatttgatcacgcccac

SEQ ID NO: 150078 - DNA, 25 bp, Saccharomyces pastorianus
gatcacgcccacacaagagagttta

SEQ ID NO: 150079 - DNA, 25 bp, Saccharomyces pastorianus
ctgatacattcaaagggcaaccaat

SEQ ID NO: 150080 - DNA, 25 bp, Saccharomyces pastorianus
ctgtccagacttgagtgatgcgaag

SEQ ID NO: 150081 - DNA, 25 bp, Saccharomyces pastorianus
gcacttttggccttttgaatactct

SEQ ID NO: 150082 - DNA, 25 bp, Saccharomyces pastorianus
acaggccaccaagcaatagacaagt

SEQ ID NO: 150083 - DNA, 25 bp, Saccharomyces pastorianus
aagagtccacgaactagctcgggta

SEQ ID NO: 150084 - DNA, 25 bp, Saccharomyces pastorianus
tggcttatctatccggttgaccaac

SEQ ID NO: 150085 - DNA, 25 bp, Saccharomyces pastorianus
atttgccttgtactattgaggccga

SEQ ID NO: 150086 - DNA, 25 bp, Saccharomyces pastorianus
agacgtacgtgatcaagcagcaggt

SEQ ID NO: 150087 - DNA, 25 bp, Saccharomyces pastorianus
gtggtgacaaagaagcaactgcgcc

SEQ ID NO: 150088 - DNA, 25 bp, Saccharomyces pastorianus
aaagacgtttctacatttgccttgt

SEQ ID NO: 150089 - DNA, 25 bp, Saccharomyces pastorianus
aaatctcggaacacctgatgatgac

SEQ ID NO: 150090 - DNA, 25 bp, Saccharomyces pastorianus
gtttaccaacagatgcatatgtcgc

SEQ ID NO: 150091 - DNA, 25 bp, Saccharomyces pastorianus
gcaagctacaagatgttttcaacct

SEQ ID NO: 150092 - DNA, 25 bp, Saccharomyces pastorianus
agcagcaggtggcttatctatccgg

SEQ ID NO: 150093 - DNA, 25 bp, Saccharomyces pastorianus
gcatatgtcgcgattgagcaagtta

SEQ ID NO: 150094 - DNA, 25 bp, Saccharomyces pastorianus
ggaattaccgataaaccacactata

SEQ ID NO: 150095 - DNA, 25 bp, Saccharomyces pastorianus
aaagaaacactcgtcaagctgattt

SEQ ID NO: 150096 - DNA, 25 bp, Saccharomyces pastorianus
aagccctagaggagctgttgtctaa

SEQ ID NO: 150097 - DNA, 25 bp, Saccharomyces pastorianus
gagcgatagctatttccaatgactt

SEQ ID NO: 150098 - DNA, 25 bp, Saccharomyces pastorianus
atacttactggatgccactgacctt

SEQ ID NO: 150099 - DNA, 25 bp, Saccharomyces pastorianus
tcaaagaattcttaccgtggctaac

SEQ ID NO: 150100 - DNA, 25 bp, Saccharomyces pastorianus
actgacctttctcaatgggacacga

SEQ ID NO: 150101 - DNA, 25 bp, Saccharomyces pastorianus
tgggacacgaatgcatctcaaagag

SEQ ID NO: 150102 - DNA, 25 bp, Saccharomyces pastorianus
atacttgcaacgtctgtcgtaacgc

SEQ ID NO: 150103 - DNA, 25 bp, Saccharomyces pastorianus
attagcaatcgacccatcaagcaag

SEQ ID NO: 150104 - DNA, 25 bp, Saccharomyces pastorianus
aaagaggcgccttgcaagaaatcaa

SEQ ID NO: 150105 - DNA, 25 bp, Saccharomyces pastorianus
ggacgattggacacattatacttgc

SEQ ID NO: 150106 - DNA, 25 bp, Saccharomyces pastorianus
agggcattcctcaccatgtaatgaa

SEQ ID NO: 150107 - DNA, 25 bp, Saccharomyces pastorianus
ataaacatccgcttcaagaaagaga

SEQ ID NO: 150108 - DNA, 25 bp, Saccharomyces pastorianus
ttcctcaccatgtaatgaatcacgt

SEQ ID NO: 150109 - DNA, 25 bp, Saccharomyces pastorianus
gaccgcttaaaggttgcttaaatat

SEQ ID NO: 150110 - DNA, 25 bp, Saccharomyces pastorianus
tcagttgtccatacaattggcacaa

SEQ ID NO: 150111 - DNA, 25 bp, Saccharomyces pastorianus
ggaaagtctcagttgtccatacaat

SEQ ID NO: 150112 - DNA, 25 bp, Saccharomyces pastorianus
aatcacgtagattggtcagaagaat

SEQ ID NO: 150113 - DNA, 25 bp, Saccharomyces pastorianus
ggcgaagttatcaattcggattcta

SEQ ID NO: 150114 - DNA, 25 bp, Saccharomyces pastorianus
ggcacaaaaatttaatggcgaagtt

SEQ ID NO: 150115 - DNA, 25 bp, Saccharomyces pastorianus
ataacaaataaacatccgcttcaag

SEQ ID NO: 150116 - DNA, 25 bp, Saccharomyces pastorianus
gttatagtgattgctggtacaacag

SEQ ID NO: 150117 - DNA, 25 bp, Saccharomyces pastorianus
taagtgccggcacagcattttacga

SEQ ID NO: 150118 - DNA, 25 bp, Saccharomyces pastorianus
gaaaatttaattacttctaccagca

SEQ ID NO: 150119 - DNA, 25 bp, Saccharomyces pastorianus
ctaccagcaatctgtacaatgaggt

SEQ ID NO: 150120 - DNA, 25 bp, Saccharomyces pastorianus
ttacttctaccagcaatctgtacaa

SEQ ID NO: 150121 - DNA, 25 bp, Saccharomyces pastorianus
ccttcaaactgcttgatgaggtgaa

SEQ ID NO: 150122 - DNA, 25 bp, Saccharomyces pastorianus
gatatccttcaaactgcttgatgag

SEQ ID NO: 150123 - DNA, 25 bp, Saccharomyces pastorianus
ttaattacttctaccagcaatctgt

SEQ ID NO: 150124 - DNA, 25 bp, Saccharomyces pastorianus
gaggatcccgagatatccttcaaac

SEQ ID NO: 150125 - DNA, 25 bp, Saccharomyces pastorianus
gtgccggcacagcattttacgaaaa

SEQ ID NO: 150126 - DNA, 25 bp, Saccharomyces pastorianus
gaaagaaaatttaagtgccggcaca

SEQ ID NO: 150127 - DNA, 25 bp, Saccharomyces pastorianus
gaggtacaggaatatgatacagcaa

SEQ ID NO: 150128 - DNA, 25 bp, Saccharomyces pastorianus
agcatctttaccctcaattagtgaa

SEQ ID NO: 150129 - DNA, 25 bp, Saccharomyces pastorianus
gtggccatgtggatattgacagttt

SEQ ID NO: 150130 - DNA, 25 bp, Saccharomyces pastorianus
gatcaaactcatcagctgatatcag

SEQ ID NO: 150131 - DNA, 25 bp, Saccharomyces pastorianus
gaatattcaggtgagaacactccta

SEQ ID NO: 150132 - DNA, 25 bp, Saccharomyces pastorianus
gtacgagatctcgagctattcaaag

SEQ ID NO: 150133 - DNA, 25 bp, Saccharomyces pastorianus
aagaagttggcgaaccaatccctcg

SEQ ID NO: 150134 - DNA, 25 bp, Saccharomyces pastorianus
aacactcctacaactactggtgctg

SEQ ID NO: 150135 - DNA, 25 bp, Saccharomyces pastorianus
gtgaattgccatttccaattccaat

SEQ ID NO: 150136 - DNA, 25 bp, Saccharomyces pastorianus
aaatagtctaccagcatctttaccc

SEQ ID NO: 150137 - DNA, 25 bp, Saccharomyces pastorianus
tggtgctgccagtcgaagaagacgt

SEQ ID NO: 150138 - DNA, 25 bp, Saccharomyces pastorianus
aaagacgttcacagtctagactggg

SEQ ID NO: 150139 - DNA, 25 bp, Saccharomyces pastorianus
gtcaaggactccaagcagtttattg

SEQ ID NO: 150140 - DNA, 25 bp, Saccharomyces pastorianus
gactccaagcagtttattgtgagac

SEQ ID NO: 150141 - DNA, 25 bp, Saccharomyces pastorianus
gaggtgctatccagaatgattttac

SEQ ID NO: 150142 - DNA, 25 bp, Saccharomyces pastorianus
gtgctatccagaatgattttacaat

SEQ ID NO: 150143 - DNA, 25 bp, Saccharomyces pastorianus
gaaaatcatcaagctcataagatca

SEQ ID NO: 150144 - DNA, 25 bp, Saccharomyces pastorianus
gattacgtcaaggactccaagcagt

SEQ ID NO: 150145 - DNA, 25 bp, Saccharomyces pastorianus
gtcactatagtggattacgtcaagg

SEQ ID NO: 150146 - DNA, 25 bp, Saccharomyces pastorianus
tcaagctcataagatcattgttttc

SEQ ID NO: 150147 - DNA, 25 bp, Saccharomyces pastorianus
acctctgtcactatagtggattacg

SEQ ID NO: 150148 - DNA, 25 bp, Saccharomyces pastorianus
tgagacgtgtcggaaacacccaaca

SEQ ID NO: 150149 - DNA, 25 bp, Saccharomyces pastorianus
cagtttattgtgagacgtgtcggaa

SEQ ID NO: 150150 - DNA, 25 bp, Saccharomyces pastorianus
aagatacctcgatcaatcctacggg

SEQ ID NO: 150151 - DNA, 25 bp, Saccharomyces pastorianus
tcctacgggagaagaacaagccact

SEQ ID NO: 150152 - DNA, 25 bp, Saccharomyces pastorianus
taggcatggacaaacagaacacaat

SEQ ID NO: 150153 - DNA, 25 bp, Saccharomyces pastorianus
gttaactggatgtgtcgaagccgca

SEQ ID NO: 150154 - DNA, 25 bp, Saccharomyces pastorianus
acatggtgaaggctcttttagaaat

SEQ ID NO: 150155 - DNA, 25 bp, Saccharomyces pastorianus
tgacgataacaacatcatcagatta

SEQ ID NO: 150156 - DNA, 25 bp, Saccharomyces pastorianus
ggaagtaccatattattgcgataat

SEQ ID NO: 150157 - DNA, 25 bp, Saccharomyces pastorianus
aaaatgtgcctacttcctatacttc

SEQ ID NO: 150158 - DNA, 25 bp, Saccharomyces pastorianus
cttgcgttcaagaggtattcatttt

SEQ ID NO: 150159 - DNA, 25 bp, Saccharomyces pastorianus
gtgtaggcaaactacggctttagtt

SEQ ID NO: 150160 - DNA, 25 bp, Saccharomyces pastorianus
gaagccgcagtagctgcagcatcta

SEQ ID NO: 150161 - DNA, 25 bp, Saccharomyces pastorianus
gtcttgcctcctgttgttacgtcaa

SEQ ID NO: 150162 - DNA, 25 bp, Saccharomyces pastorianus
aactcaccactcgactttactgtat

SEQ ID NO: 150163 - DNA, 25 bp, Saccharomyces pastorianus
atggacgataactcaccactcgact

SEQ ID NO: 150164 - DNA, 25 bp, Saccharomyces pastorianus
gcgtggctgaatctttcacagatga

SEQ ID NO: 150165 - DNA, 25 bp, Saccharomyces pastorianus
ttgatgaacagtatggcaccagacc

SEQ ID NO: 150166 - DNA, 25 bp, Saccharomyces pastorianus
aacagtatggcaccagacccctcgt

SEQ ID NO: 150167 - DNA, 25 bp, Saccharomyces pastorianus
gttacgtcaagcgtggctgaatctt

SEQ ID NO: 150168 - DNA, 25 bp, Saccharomyces pastorianus
tgcctcctgttgttacgtcaagcgt

SEQ ID NO: 150169 - DNA, 25 bp, Saccharomyces pastorianus
caccactcgactttactgtatttga

SEQ ID NO: 150170 - DNA, 25 bp, Saccharomyces pastorianus
tcctgttgttacgtcaagcgtggct

SEQ ID NO: 150171 - DNA, 25 bp, Saccharomyces pastorianus
gtcaagcgtggctgaatctttcaca

SEQ ID NO: 150172 - DNA, 25 bp, Saccharomyces pastorianus
aacttgtatgtcattaaggctttac

SEQ ID NO: 150173 - DNA, 25 bp, Saccharomyces pastorianus
tttttatacagaaggtgttgttgtc

SEQ ID NO: 150174 - DNA, 25 bp, Saccharomyces pastorianus
tgtcattaaggctttacaatccttg

SEQ ID NO: 150175 - DNA, 25 bp, Saccharomyces pastorianus
gtatgtcattaaggctttacaatcc

SEQ ID NO: 150176 - DNA, 25 bp, Saccharomyces pastorianus
cagaaggtgttgttgtcgccaagaa

SEQ ID NO: 150177 - DNA, 25 bp, Saccharomyces pastorianus
gtcattaaggctttacaatccttga

SEQ ID NO: 150178 - DNA, 25 bp, Saccharomyces pastorianus
cttgtatgtcattaaggctttacaa

SEQ ID NO: 150179 - DNA, 25 bp, Saccharomyces pastorianus
tcattaaggctttacaatccttgac

SEQ ID NO: 150180 - DNA, 25 bp, Saccharomyces pastorianus
atgtcattaaggctttacaatcctt

SEQ ID NO: 150181 - DNA, 25 bp, Saccharomyces pastorianus
ggctttacaatccttgacttctaag

SEQ ID NO: 150182 - DNA, 25 bp, Saccharomyces pastorianus
acttgtatgtcattaaggctttaca

SEQ ID NO: 150183 - DNA, 25 bp, Saccharomyces pastorianus
gagctcaccaaggaaattaccgtaa

SEQ ID NO: 150184 - DNA, 25 bp, Saccharomyces pastorianus
atctcgtgaggatctgctaaaggaa

SEQ ID NO: 150185 - DNA, 25 bp, Saccharomyces pastorianus
aagcgcataatctgcagaatcctaa

SEQ ID NO: 150186 - DNA, 25 bp, Saccharomyces pastorianus
aggaccgaagtagtacgacgactct

SEQ ID NO: 150187 - DNA, 25 bp, Saccharomyces pastorianus
aaaataagcgactgtcctcctctta

SEQ ID NO: 150188 - DNA, 25 bp, Saccharomyces pastorianus
gtacgacgactctgggcatatatta

SEQ ID NO: 150189 - DNA, 25 bp, Saccharomyces pastorianus
gaaaggccgcgcttcgaaagatctc

SEQ ID NO: 150190 - DNA, 25 bp, Saccharomyces pastorianus
gctactttggcgattgagctcacca

SEQ ID NO: 150191 - DNA, 25 bp, Saccharomyces pastorianus
tcctcttatccaagaagtccgcaga

SEQ ID NO: 150192 - DNA, 25 bp, Saccharomyces pastorianus
gtaagtcacctatttcaacacgaaa

SEQ ID NO: 150193 - DNA, 25 bp, Saccharomyces pastorianus
cgcagaaaggaaaagcccatcgttt

SEQ ID NO: 150194 - DNA, 25 bp, Saccharomyces pastorianus
ttcttctctctgatatggatttgga

SEQ ID NO: 150195 - DNA, 25 bp, Saccharomyces pastorianus
tctctctgatatggatttggaaacg

SEQ ID NO: 150196 - DNA, 25 bp, Saccharomyces pastorianus
tcgatattcttctctctgatatgga

SEQ ID NO: 150197 - DNA, 25 bp, Saccharomyces pastorianus
gatgatcgatattcttctctctgat

SEQ ID NO: 150198 - DNA, 25 bp, Saccharomyces pastorianus
gctgaattaaacgattatagtacga

SEQ ID NO: 150199 - DNA, 25 bp, Saccharomyces pastorianus
tggatttggaaacggtcacaactaa

SEQ ID NO: 150200 - DNA, 25 bp, Saccharomyces pastorianus
acgatgatcgatattcttctctctg

SEQ ID NO: 150201 - DNA, 25 bp, Saccharomyces pastorianus
gtacgatgatcgatattcttctctc

SEQ ID NO: 150202 - DNA, 25 bp, Saccharomyces pastorianus
gatattcttctctctgatatggatt

SEQ ID NO: 150203 - DNA, 25 bp, Saccharomyces pastorianus
tatggatttggaaacggtcacaact

SEQ ID NO: 150204 - DNA, 25 bp, Saccharomyces pastorianus
gatcgatattcttctctctgatatg

SEQ ID NO: 150205 - DNA, 25 bp, Saccharomyces pastorianus
aatcgaggctgtattcaaatggctt

SEQ ID NO: 150206 - DNA, 25 bp, Saccharomyces pastorianus
tcttctacctgcattgaatagcgct

SEQ ID NO: 150207 - DNA, 25 bp, Saccharomyces pastorianus
gaagttcagcgattgattcccctat

SEQ ID NO: 150208 - DNA, 25 bp, Saccharomyces pastorianus
ggccaacatgattacgttcatcgaa

SEQ ID NO: 150209 - DNA, 25 bp, Saccharomyces pastorianus
tgctgatcccagctttttatgataa

SEQ ID NO: 150210 - DNA, 25 bp, Saccharomyces pastorianus
aaatggcttgatgcgctgtgtgtag

SEQ ID NO: 150211 - DNA, 25 bp, Saccharomyces pastorianus
gaacgctgatttacttcttctacct

SEQ ID NO: 150212 - DNA, 25 bp, Saccharomyces pastorianus
ggtatcaggatacggtcgtcctttg

SEQ ID NO: 150213 - DNA, 25 bp, Saccharomyces pastorianus
aatccgctggaacaatatctcgaaa

SEQ ID NO: 150214 - DNA, 25 bp, Saccharomyces pastorianus
atattgatcgcgaaaggccaacatg

SEQ ID NO: 150215 - DNA, 25 bp, Saccharomyces pastorianus
ggtcgtcctttgactcaagcggaaa

SEQ ID NO: 150216 - DNA, 25 bp, Saccharomyces pastorianus
atgctttcatactcagctcaactaa

SEQ ID NO: 150217 - DNA, 25 bp, Saccharomyces pastorianus
gaaagctcagacactcgatcttcac

SEQ ID NO: 150218 - DNA, 25 bp, Saccharomyces pastorianus
acgtgcgtactgctaaatgatcttg

SEQ ID NO: 150219 - DNA, 25 bp, Saccharomyces pastorianus
aactccgaagatggtagctcctgct

SEQ ID NO: 150220 - DNA, 25 bp, Saccharomyces pastorianus
gtgatgaaccatcctactctttaga

SEQ ID NO: 150221 - DNA, 25 bp, Saccharomyces pastorianus
gctcctgctccatatcagttcaaga

SEQ ID NO: 150222 - DNA, 25 bp, Saccharomyces pastorianus
gcaagatcgattactcccaaatggg

SEQ ID NO: 150223 - DNA, 25 bp, Saccharomyces pastorianus
gtttgtgtttgagtctccattcgga

SEQ ID NO: 150224 - DNA, 25 bp, Saccharomyces pastorianus
agtaccactcctcccataatttaga

SEQ ID NO: 150225 - DNA, 25 bp, Saccharomyces pastorianus
tttcaaactcctacgtttccatgag

SEQ ID NO: 150226 - DNA, 25 bp, Saccharomyces pastorianus
atacccttcgaattatcggtgctga

SEQ ID NO: 150227 - DNA, 25 bp, Saccharomyces pastorianus
gctcacattgaatccgcagggaact

SEQ ID NO: 150228 - DNA, 25 bp, Saccharomyces pastorianus
ttcgctcacattgaatccgcaggga

SEQ ID NO: 150229 - DNA, 25 bp, Saccharomyces pastorianus
gaaattcactccgagaaagctcaag

SEQ ID NO: 150230 - DNA, 25 bp, Saccharomyces pastorianus
ggtttcctatcgatatttcgctcac

SEQ ID NO: 150231 - DNA, 25 bp, Saccharomyces pastorianus
gatgatgggtttcctatcgatattt

SEQ ID NO: 150232 - DNA, 25 bp, Saccharomyces pastorianus
aagccaatatgaaattcactccgag

SEQ ID NO: 150233 - DNA, 25 bp, Saccharomyces pastorianus
atgggtttcctatcgatatttcgct

SEQ ID NO: 150234 - DNA, 25 bp, Saccharomyces pastorianus
aagatgatctatgtggaaaagccaa

SEQ ID NO: 150235 - DNA, 25 bp, Saccharomyces pastorianus
cactccgagaaagctcaaggatgat

SEQ ID NO: 150236 - DNA, 25 bp, Saccharomyces pastorianus
gatatttcgctcacattgaatccgc

SEQ ID NO: 150237 - DNA, 25 bp, Saccharomyces pastorianus
aaagacttagcggaagatgatctat

SEQ ID NO: 150238 - DNA, 25 bp, Saccharomyces pastorianus
tattggtagcagagcaagagctggt

SEQ ID NO: 150239 - DNA, 25 bp, Saccharomyces pastorianus
tcaaggccaaattaatgctgcaaga

SEQ ID NO: 150240 - DNA, 25 bp, Saccharomyces pastorianus
caagagctggtggttctggcccaag

SEQ ID NO: 150241 - DNA, 25 bp, Saccharomyces pastorianus
aagggccaacgttgccagatctcaa

SEQ ID NO: 150242 - DNA, 25 bp, Saccharomyces pastorianus
gttgccagatctcaaggccaaatta

SEQ ID NO: 150243 - DNA, 25 bp, Saccharomyces pastorianus
aacgttgccagatctcaaggccaaa

SEQ ID NO: 150244 - DNA, 25 bp, Saccharomyces pastorianus
aatactattattggtagcagagcaa

SEQ ID NO: 150245 - DNA, 25 bp, Saccharomyces pastorianus
gttgtttccgttgacaagaagtacg

SEQ ID NO: 150246 - DNA, 25 bp, Saccharomyces pastorianus
agcaagagctggtggttctggccca

SEQ ID NO: 150247 - DNA, 25 bp, Saccharomyces pastorianus
ttggttgtttccgttgacaagaagt

SEQ ID NO: 150248 - DNA, 25 bp, Saccharomyces pastorianus
tggttctggcccaagggccaacgtt

SEQ ID NO: 150249 - DNA, 25 bp, Saccharomyces pastorianus
ggccttccagaacggtttatcgcag

SEQ ID NO: 150250 - DNA, 25 bp, Saccharomyces pastorianus
gtcgactgggccatttccctgaggc

SEQ ID NO: 150251 - DNA, 25 bp, Saccharomyces pastorianus
aattcgcatgacatggtccctgaaa

SEQ ID NO: 150252 - DNA, 25 bp, Saccharomyces pastorianus
tttataagctcacctaattcgcatg

SEQ ID NO: 150253 - DNA, 25 bp, Saccharomyces pastorianus
atagcattatcgacctttgcgtgaa

SEQ ID NO: 150254 - DNA, 25 bp, Saccharomyces pastorianus
gcctctgagggctaaacggctgtgt

SEQ ID NO: 150255 - DNA, 25 bp, Saccharomyces pastorianus
gtgcgcgaggaaactgctggaatat

SEQ ID NO: 150256 - DNA, 25 bp, Saccharomyces pastorianus
gtccctgaaatagtaagctcacgca

SEQ ID NO: 150257 - DNA, 25 bp, Saccharomyces pastorianus
acggctgtgtgaacgatggttagac

SEQ ID NO: 150258 - DNA, 25 bp, Saccharomyces pastorianus
tgggtctgaccaaagtttcgaatga

SEQ ID NO: 150259 - DNA, 25 bp, Saccharomyces pastorianus
atgctgctggaaccaccgttggtat

SEQ ID NO: 150260 - DNA, 25 bp, Saccharomyces pastorianus
attcatgccctatgtctccattaaa

SEQ ID NO: 150261 - DNA, 25 bp, Saccharomyces pastorianus
aatagtcttcatttgccattgccaa

SEQ ID NO: 150262 - DNA, 25 bp, Saccharomyces pastorianus
agctccgttgccttcgaataatagt

SEQ ID NO: 150263 - DNA, 25 bp, Saccharomyces pastorianus
gccattgccaattgacgttgtactg

SEQ ID NO: 150264 - DNA, 25 bp, Saccharomyces pastorianus
gttctcccagtgaatttagaccttg

SEQ ID NO: 150265 - DNA, 25 bp, Saccharomyces pastorianus
gctcacatacgatatgctttcgcag

SEQ ID NO: 150266 - DNA, 25 bp, Saccharomyces pastorianus
ctatagtttaccataagggcccatt

SEQ ID NO: 150267 - DNA, 25 bp, Saccharomyces pastorianus
gggagctccgtattatattaccaat

SEQ ID NO: 150268 - DNA, 25 bp, Saccharomyces pastorianus
agaatctggctactgacaaccctga

SEQ ID NO: 150269 - DNA, 25 bp, Saccharomyces pastorianus
aaggcaggattacagcttggcgcaa

SEQ ID NO: 150270 - DNA, 25 bp, Saccharomyces pastorianus
agaggcagtcaattgttctcccagt

SEQ ID NO: 150271 - DNA, 25 bp, Saccharomyces pastorianus
gtatacattatggcaaaccgaacaa

SEQ ID NO: 150272 - DNA, 25 bp, Saccharomyces pastorianus
gatgtatacattatggcaaaccgaa

SEQ ID NO: 150273 - DNA, 25 bp, Saccharomyces pastorianus
tgtatacattatggcaaaccgaaca

SEQ ID NO: 150274 - DNA, 25 bp, Saccharomyces pastorianus
ggatgcacagaataacaaccacaat

SEQ ID NO: 150275 - DNA, 25 bp, Saccharomyces pastorianus
aagatgtatacattatggcaaaccg

SEQ ID NO: 150276 - DNA, 25 bp, Saccharomyces pastorianus
tacatggatgcacagaataacaacc

SEQ ID NO: 150277 - DNA, 25 bp, Saccharomyces pastorianus
atgtatacattatggcaaaccgaac

SEQ ID NO: 150278 - DNA, 25 bp, Saccharomyces pastorianus
caactgtacatggatgcacagaata

SEQ ID NO: 150279 - DNA, 25 bp, Saccharomyces pastorianus
agatgtatacattatggcaaaccga

SEQ ID NO: 150280 - DNA, 25 bp, Saccharomyces pastorianus
aactgtacatggatgcacagaataa

SEQ ID NO: 150281 - DNA, 25 bp, Saccharomyces pastorianus
gtacatggatgcacagaataacaac

SEQ ID NO: 150282 - DNA, 25 bp, Saccharomyces pastorianus
gagtatgagcaacctgacgcaaata

SEQ ID NO: 150283 - DNA, 25 bp, Saccharomyces pastorianus
gagtccatacgctattaactttaat

SEQ ID NO: 150284 - DNA, 25 bp, Saccharomyces pastorianus
aaatctcccgacgacgatggtgaca

SEQ ID NO: 150285 - DNA, 25 bp, Saccharomyces pastorianus
agcactagagcttcaacggttccaa

SEQ ID NO: 150286 - DNA, 25 bp, Saccharomyces pastorianus
gacaagaacggtgcatgagctatca

SEQ ID NO: 150287 - DNA, 25 bp, Saccharomyces pastorianus
gaacttcagcgactagagaggatac

SEQ ID NO: 150288 - DNA, 25 bp, Saccharomyces pastorianus
acaagtacggacttcgtgctgacaa

SEQ ID NO: 150289 - DNA, 25 bp, Saccharomyces pastorianus
gtaaacatccattacatgagctgat

SEQ ID NO: 150290 - DNA, 25 bp, Saccharomyces pastorianus
gacttcgtgctgacaagctctatga

SEQ ID NO: 150291 - DNA, 25 bp, Saccharomyces pastorianus
gagctgataatacagtatccaccta

SEQ ID NO: 150292 - DNA, 25 bp, Saccharomyces pastorianus
gagaggatactcctttatcccaaaa

SEQ ID NO: 150293 - DNA, 25 bp, Saccharomyces pastorianus
tagaccaccagaatattgggctcaa

SEQ ID NO: 150294 - DNA, 25 bp, Saccharomyces pastorianus
gattctgatgcaaacaaactttcca

SEQ ID NO: 150295 - DNA, 25 bp, Saccharomyces pastorianus
gatgtagatccaaaatacgccaagc

SEQ ID NO: 150296 - DNA, 25 bp, Saccharomyces pastorianus
aaatcacacagcaccgtcagttcgt

SEQ ID NO: 150297 - DNA, 25 bp, Saccharomyces pastorianus
gagactatcaagttcaaggcttaaa

SEQ ID NO: 150298 - DNA, 25 bp, Saccharomyces pastorianus
aaactggttaatatcgttgcacgaa

SEQ ID NO: 150299 - DNA, 25 bp, Saccharomyces pastorianus
tattaggcgtcacagaccttttccg

SEQ ID NO: 150300 - DNA, 25 bp, Saccharomyces pastorianus
aactatctggtatcttggccgatga

SEQ ID NO: 150301 - DNA, 25 bp, Saccharomyces pastorianus
aacaatttcattcctaggttatttg

SEQ ID NO: 150302 - DNA, 25 bp, Saccharomyces pastorianus
agttcgtcatcacgtcaccatagaa

SEQ ID NO: 150303 - DNA, 25 bp, Saccharomyces pastorianus
tccctccttcgtcaagtcaggaaaa

SEQ ID NO: 150304 - DNA, 25 bp, Saccharomyces pastorianus
aagctagggcctacaatgcagatgc

SEQ ID NO: 150305 - DNA, 25 bp, Saccharomyces pastorianus
tccaaaggttgttcgtgaggctaag

SEQ ID NO: 150306 - DNA, 25 bp, Saccharomyces pastorianus
aatagtcgaatttgccgcttacaga

SEQ ID NO: 150307 - DNA, 25 bp, Saccharomyces pastorianus
tggtttgctatatcatgcctctctt

SEQ ID NO: 150308 - DNA, 25 bp, Saccharomyces pastorianus
gaagaacgtgtcaaaaccgctgctg

SEQ ID NO: 150309 - DNA, 25 bp, Saccharomyces pastorianus
aggctattgctccaaacttgactca

SEQ ID NO: 150310 - DNA, 25 bp, Saccharomyces pastorianus
tcaggttccttaatttccttggcca

SEQ ID NO: 150311 - DNA, 25 bp, Saccharomyces pastorianus
atgcctctcttgttggtcaagctac

SEQ ID NO: 150312 - DNA, 25 bp, Saccharomyces pastorianus
gaacagttgtccaattacttgtctg

SEQ ID NO: 150313 - DNA, 25 bp, Saccharomyces pastorianus
tagacttatcgctcattcaggttcc

SEQ ID NO: 150314 - DNA, 25 bp, Saccharomyces pastorianus
aaaccgctgctgaagtgtctatggg

SEQ ID NO: 150315 - DNA, 25 bp, Saccharomyces pastorianus
tgttccattcttccattggctttat

SEQ ID NO: 150316 - DNA, 25 bp, Saccharomyces pastorianus
gctacgtcaacaaacctggcgagat

SEQ ID NO: 150317 - DNA, 25 bp, Saccharomyces pastorianus
tggtgttatcacctgctgggtattt

SEQ ID NO: 150318 - DNA, 25 bp, Saccharomyces pastorianus
tgaaattccccgtaaggtgttccat

SEQ ID NO: 150319 - DNA, 25 bp, Saccharomyces pastorianus
taaatcccttgcaggttcgatagct

SEQ ID NO: 150320 - DNA, 25 bp, Saccharomyces pastorianus
acagccgccgcaactattggaagaa

SEQ ID NO: 150321 - DNA, 25 bp, Saccharomyces pastorianus
tggcctttgatatacgccttcatca

SEQ ID NO: 150322 - DNA, 25 bp, Saccharomyces pastorianus
tttactgtagaactgtgggtgcgct

SEQ ID NO: 150323 - DNA, 25 bp, Saccharomyces pastorianus
gatgacgatgcacacgttccagtga

SEQ ID NO: 150324 - DNA, 25 bp, Saccharomyces pastorianus
atttttgctaagttggtccgataca

SEQ ID NO: 150325 - DNA, 25 bp, Saccharomyces pastorianus
atggctattttgttcctgcctacag

SEQ ID NO: 150326 - DNA, 25 bp, Saccharomyces pastorianus
tgaagtcatcgccaagtctcgttac

SEQ ID NO: 150327 - DNA, 25 bp, Saccharomyces pastorianus
gtatccagagttgctgccgtcgaaa

SEQ ID NO: 150328 - DNA, 25 bp, Saccharomyces pastorianus
aatcagagacgtatccagagttgct

SEQ ID NO: 150329 - DNA, 25 bp, Saccharomyces pastorianus
caagcaattcttgaccaaggattta

SEQ ID NO: 150330 - DNA, 25 bp, Saccharomyces pastorianus
tttaaaattcccattacctcacaga

SEQ ID NO: 150331 - DNA, 25 bp, Saccharomyces pastorianus
gcttcaaatgaagtcatcgccaagt

SEQ ID NO: 150332 - DNA, 25 bp, Saccharomyces pastorianus
ggctgctagacacagagctagattt

SEQ ID NO: 150333 - DNA, 25 bp, Saccharomyces pastorianus
atttaaaattcccattacctcacag

SEQ ID NO: 150334 - DNA, 25 bp, Saccharomyces pastorianus
ccaaggtcaagaacttcggtgtttg

SEQ ID NO: 150335 - DNA, 25 bp, Saccharomyces pastorianus
aaagactgctgatgtcaagagacaa

SEQ ID NO: 150336 - DNA, 25 bp, Saccharomyces pastorianus
aaatgaagtcatcgccaagtctcgt

SEQ ID NO: 150337 - DNA, 25 bp, Saccharomyces pastorianus
gagactcccaaggtgatcatctaca

SEQ ID NO: 150338 - DNA, 25 bp, Saccharomyces pastorianus
atgacccgctttcattaaggccaaa

SEQ ID NO: 150339 - DNA, 25 bp, Saccharomyces pastorianus
atacagatccgcttgtctcattgat

SEQ ID NO: 150340 - DNA, 25 bp, Saccharomyces pastorianus
ggtataattttttcctctgcgcttc

SEQ ID NO: 150341 - DNA, 25 bp, Saccharomyces pastorianus
aggttccacttgtcttatcgacgac

SEQ ID NO: 150342 - DNA, 25 bp, Saccharomyces pastorianus
catcggcgttatgttgtctgcattt

SEQ ID NO: 150343 - DNA, 25 bp, Saccharomyces pastorianus
ttttgggcgatgctcttggcaacat

SEQ ID NO: 150344 - DNA, 25 bp, Saccharomyces pastorianus
aaaacttcaccgctatggcattcac

SEQ ID NO: 150345 - DNA, 25 bp, Saccharomyces pastorianus
tccgctactttgcaacctgaattta

SEQ ID NO: 150346 - DNA, 25 bp, Saccharomyces pastorianus
ggaacaatttactgacctggccaaa

SEQ ID NO: 150347 - DNA, 25 bp, Saccharomyces pastorianus
tggtactggcatttcaggttccact

SEQ ID NO: 150348 - DNA, 25 bp, Saccharomyces pastorianus
tatgcgagattgaatgagagcggct

SEQ ID NO: 150349 - DNA, 25 bp, Saccharomyces pastorianus
atggatatgcttctggagcttcttc

SEQ ID NO: 150350 - DNA, 25 bp, Saccharomyces pastorianus
gtgcacaccagggtaatcaatttcc

SEQ ID NO: 150351 - DNA, 25 bp, Saccharomyces pastorianus
tcaacaaatgagacagggtccatct

SEQ ID NO: 150352 - DNA, 25 bp, Saccharomyces pastorianus
agtactaaggagtcagtgcacacca

SEQ ID NO: 150353 - DNA, 25 bp, Saccharomyces pastorianus
tccatgatgtgtacgaagctgtgaa

SEQ ID NO: 150354 - DNA, 25 bp, Saccharomyces pastorianus
atatgcttctggagcttcttcttcc

SEQ ID NO: 150355 - DNA, 25 bp, Saccharomyces pastorianus
cggctggttgctatggtttgtcttc

SEQ ID NO: 150356 - DNA, 25 bp, Saccharomyces pastorianus
ttcttcttccagtctatgcgagatt

SEQ ID NO: 150357 - DNA, 25 bp, Saccharomyces pastorianus
ggtttgtcttccatgatgtgtacga

SEQ ID NO: 150358 - DNA, 25 bp, Saccharomyces pastorianus
atttccctgatattttgtcaactca

SEQ ID NO: 150359 - DNA, 25 bp, Saccharomyces pastorianus
ggcgactgtgagttcttcgtattca

SEQ ID NO: 150360 - DNA, 25 bp, Saccharomyces pastorianus
gaaccttatatgcaatccaccggga

SEQ ID NO: 150361 - DNA, 25 bp, Saccharomyces pastorianus
gccaatgctagtgtcgtttgttcca

SEQ ID NO: 150362 - DNA, 25 bp, Saccharomyces pastorianus
aaattgttcctccaagcggtatgac

SEQ ID NO: 150363 - DNA, 25 bp, Saccharomyces pastorianus
gacatacctcattgatgctctgcta

SEQ ID NO: 150364 - DNA, 25 bp, Saccharomyces pastorianus
accgggacgggttatctgctcgatg

SEQ ID NO: 150365 - DNA, 25 bp, Saccharomyces pastorianus
atgtcattatctttctgcggtgttc

SEQ ID NO: 150366 - DNA, 25 bp, Saccharomyces pastorianus
gcggtgttctggctacgccaaatat

SEQ ID NO: 150367 - DNA, 25 bp, Saccharomyces pastorianus
tctgctatcggtaggactggccaat

SEQ ID NO: 150368 - DNA, 25 bp, Saccharomyces pastorianus
tagagtatcgccactgacatacctc

SEQ ID NO: 150369 - DNA, 25 bp, Saccharomyces pastorianus
aatctcgcttcacttttctttataa

SEQ ID NO: 150370 - DNA, 25 bp, Saccharomyces pastorianus
actcttcataggcttcacttttttc

SEQ ID NO: 150371 - DNA, 25 bp, Saccharomyces pastorianus
tatttcgaagctcatggtgcccata

SEQ ID NO: 150372 - DNA, 25 bp, Saccharomyces pastorianus
atttaccacttttcgttcagcagag

SEQ ID NO: 150373 - DNA, 25 bp, Saccharomyces pastorianus
gtttgctacgtcaactttgtaccag

SEQ ID NO: 150374 - DNA, 25 bp, Saccharomyces pastorianus
accagatgccaatccagccgaatgg

SEQ ID NO: 150375 - DNA, 25 bp, Saccharomyces pastorianus
ggaactcacgctagtcaagattatt

SEQ ID NO: 150376 - DNA, 25 bp, Saccharomyces pastorianus
gaatacatcattacagggcctacag

SEQ ID NO: 150377 - DNA, 25 bp, Saccharomyces pastorianus
aggccatcaagaaccttttcgtgga

SEQ ID NO: 150378 - DNA, 25 bp, Saccharomyces pastorianus
caacaattgtgtctgaactcttcat

SEQ ID NO: 150379 - DNA, 25 bp, Saccharomyces pastorianus
ggtgagttatcgattattccatcaa

SEQ ID NO: 150380 - DNA, 25 bp, Saccharomyces pastorianus
taggtgctgcaccaggaactcacgc

SEQ ID NO: 150381 - DNA, 25 bp, Saccharomyces pastorianus
atgctgtatcggatggtgcgtggcc

SEQ ID NO: 150382 - DNA, 25 bp, Saccharomyces pastorianus
tgcgtggcctgttctgtgcctcttt

SEQ ID NO: 150383 - DNA, 25 bp, Saccharomyces pastorianus
tctgtgcctcttttgtaaaacagtt

SEQ ID NO: 150384 - DNA, 25 bp, Saccharomyces pastorianus
gttctgtgcctcttttgtaaaacag

SEQ ID NO: 150385 - DNA, 25 bp, Saccharomyces pastorianus
gtgcctcttttgtaaaacagttaca

SEQ ID NO: 150386 - DNA, 25 bp, Saccharomyces pastorianus
cctgttctgtgcctcttttgtaaaa

SEQ ID NO: 150387 - DNA, 25 bp, Saccharomyces pastorianus
tggcctgttctgtgcctcttttgta

SEQ ID NO: 150388 - DNA, 25 bp, Saccharomyces pastorianus
ctgttctgtgcctcttttgtaaaac

SEQ ID NO: 150389 - DNA, 25 bp, Saccharomyces pastorianus
tgtgcctcttttgtaaaacagttac

SEQ ID NO: 150390 - DNA, 25 bp, Saccharomyces pastorianus
tgttctgtgcctcttttgtaaaaca

SEQ ID NO: 150391 - DNA, 25 bp, Saccharomyces pastorianus
tggtgcgtggcctgttctgtgcctc

SEQ ID NO: 150392 - DNA, 25 bp, Saccharomyces pastorianus
gttgcgaaagcatggccttcttcaa

SEQ ID NO: 150393 - DNA, 25 bp, Saccharomyces pastorianus
tcaagagccttgacaatcgccttag

SEQ ID NO: 150394 - DNA, 25 bp, Saccharomyces pastorianus
gaatatcccgtctagcgactgttca

SEQ ID NO: 150395 - DNA, 25 bp, Saccharomyces pastorianus
aacttgctcttgaagttgccgtcaa

SEQ ID NO: 150396 - DNA, 25 bp, Saccharomyces pastorianus
tggcaattcctgacaacttttcctt

SEQ ID NO: 150397 - DNA, 25 bp, Saccharomyces pastorianus
tacgatgttggtcttctcgatttcg

SEQ ID NO: 150398 - DNA, 25 bp, Saccharomyces pastorianus
gattaaatcgacgtctctttcaaga

SEQ ID NO: 150399 - DNA, 25 bp, Saccharomyces pastorianus
tcgccttaggttccaacaacttcaa

SEQ ID NO: 150400 - DNA, 25 bp, Saccharomyces pastorianus
gtcagccttcaattggatttccttc

SEQ ID NO: 150401 - DNA, 25 bp, Saccharomyces pastorianus
gtactcgtcccggttgttggcaatt

SEQ ID NO: 150402 - DNA, 25 bp, Saccharomyces pastorianus
gaaccttcaacctcattttgtttgc

SEQ ID NO: 150403 - DNA, 25 bp, Saccharomyces pastorianus
gagaatgctccatacctagttaaat

SEQ ID NO: 150404 - DNA, 25 bp, Saccharomyces pastorianus
aggtgtccagtatcatcggcggtaa

SEQ ID NO: 150405 - DNA, 25 bp, Saccharomyces pastorianus
gctatcactgaagcgatcaactaca

SEQ ID NO: 150406 - DNA, 25 bp, Saccharomyces pastorianus
ggttctgcgcttgccaaaaaggtgt

SEQ ID NO: 150407 - DNA, 25 bp, Saccharomyces pastorianus
ccaatgctgctttagccaagggtat

SEQ ID NO: 150408 - DNA, 25 bp, Saccharomyces pastorianus
aagtcaatctatctattggcaggta

SEQ ID NO: 150409 - DNA, 25 bp, Saccharomyces pastorianus
ggttgttacatctccaatgctgctt

SEQ ID NO: 150410 - DNA, 25 bp, Saccharomyces pastorianus
tgggtgataaaccagccgctataaa

SEQ ID NO: 150411 - DNA, 25 bp, Saccharomyces pastorianus
gatatttctccaaatgctaaagcta

SEQ ID NO: 150412 - DNA, 25 bp, Saccharomyces pastorianus
agccgctataaaggatgcagttgat

SEQ ID NO: 150413 - DNA, 25 bp, Saccharomyces pastorianus
aacttggtcaactttcaatttctgt

SEQ ID NO: 150414 - DNA, 25 bp, Saccharomyces pastorianus
attggacttggccaaatccattgat

SEQ ID NO: 150415 - DNA, 25 bp, Saccharomyces pastorianus
gacgctgctgagtttaatgttgaaa

SEQ ID NO: 150416 - DNA, 25 bp, Saccharomyces pastorianus
acccagatccagttcgtgtagtttc

SEQ ID NO: 150417 - DNA, 25 bp, Saccharomyces pastorianus
gatttctctcataaaaaggctgtgt

SEQ ID NO: 150418 - DNA, 25 bp, Saccharomyces pastorianus
agaattgttggccaacccagctaac

SEQ ID NO: 150419 - DNA, 25 bp, Saccharomyces pastorianus
gataaaacatgtttctacgccgaac

SEQ ID NO: 150420 - DNA, 25 bp, Saccharomyces pastorianus
aaattgttattgatgacgctgctga

SEQ ID NO: 150421 - DNA, 25 bp, Saccharomyces pastorianus
tggtgagacttacccagatccagtt

SEQ ID NO: 150422 - DNA, 25 bp, Saccharomyces pastorianus
tcgtgtagtttctgttggtaagcca

SEQ ID NO: 150423 - DNA, 25 bp, Saccharomyces pastorianus
gtcggtgacaagattatcgcttcat

SEQ ID NO: 150424 - DNA, 25 bp, Saccharomyces pastorianus
ttccacaccgggtctttagaagaag

SEQ ID NO: 150425 - DNA, 25 bp, Saccharomyces pastorianus
cttcgtcattttaacagagagcggt

SEQ ID NO: 150426 - DNA, 25 bp, Saccharomyces pastorianus
ctgttaatggaactgaagcctgtga

SEQ ID NO: 150427 - DNA, 25 bp, Saccharomyces pastorianus
tacttcgtcattttaacagagagcg

SEQ ID NO: 150428 - DNA, 25 bp, Saccharomyces pastorianus
cagagagcggtattgcaaagggtat

SEQ ID NO: 150429 - DNA, 25 bp, Saccharomyces pastorianus
tggaactgaagcctgtgaagctcaa

SEQ ID NO: 150430 - DNA, 25 bp, Saccharomyces pastorianus
cgtcattttaacagagagcggtatt

SEQ ID NO: 150431 - DNA, 25 bp, Saccharomyces pastorianus
gaattgttgctgttaatggaactga

SEQ ID NO: 150432 - DNA, 25 bp, Saccharomyces pastorianus
aatacttcgtcattttaacagagag

SEQ ID NO: 150433 - DNA, 25 bp, Saccharomyces pastorianus
gttgctgttaatggaactgaagcct

SEQ ID NO: 150434 - DNA, 25 bp, Saccharomyces pastorianus
aatggaactgaagcctgtgaagctc

SEQ ID NO: 150435 - DNA, 25 bp, Saccharomyces pastorianus
cattttaacagagagcggtattgca

SEQ ID NO: 150436 - DNA, 25 bp, Saccharomyces pastorianus
gttcttggatgtccttttacctcaa

SEQ ID NO: 150437 - DNA, 25 bp, Saccharomyces pastorianus
tatgagtccaactgaagtaccgctg

SEQ ID NO: 150438 - DNA, 25 bp, Saccharomyces pastorianus
gggatgtctctagatttctgttctt

SEQ ID NO: 150439 - DNA, 25 bp, Saccharomyces pastorianus
tctcctggcgatgaagacgtacctg

SEQ ID NO: 150440 - DNA, 25 bp, Saccharomyces pastorianus
agtaccgctggatccttttgacatt

SEQ ID NO: 150441 - DNA, 25 bp, Saccharomyces pastorianus
catgtctcttgtcaatatcggccaa

SEQ ID NO: 150442 - DNA, 25 bp, Saccharomyces pastorianus
aatttcaaggcctcaaacgtgcacc

SEQ ID NO: 150443 - DNA, 25 bp, Saccharomyces pastorianus
ggattcactatcaacgtatttctac

SEQ ID NO: 150444 - DNA, 25 bp, Saccharomyces pastorianus
taaataagttcgcatcctctcctgg

SEQ ID NO: 150445 - DNA, 25 bp, Saccharomyces pastorianus
gtatttctacagacgccatgtctct

SEQ ID NO: 150446 - DNA, 25 bp, Saccharomyces pastorianus
gtgcacctctaggactattccgaat

SEQ ID NO: 150447 - DNA, 25 bp, Saccharomyces pastorianus
ggaaaggctctccaatggacttgaa

SEQ ID NO: 150448 - DNA, 25 bp, Saccharomyces pastorianus
cattggcctcacagggcgtagtgaa

SEQ ID NO: 150449 - DNA, 25 bp, Saccharomyces pastorianus
gtgaactcagaagctctgcccaaga

SEQ ID NO: 150450 - DNA, 25 bp, Saccharomyces pastorianus
gaatcatgatcctctcaaacagcgt

SEQ ID NO: 150451 - DNA, 25 bp, Saccharomyces pastorianus
ggcgtagtgaataatgtccccaagt

SEQ ID NO: 150452 - DNA, 25 bp, Saccharomyces pastorianus
gcagaactagttctcgcacagattc

SEQ ID NO: 150453 - DNA, 25 bp, Saccharomyces pastorianus
gttccagttagatcagtgactccga

SEQ ID NO: 150454 - DNA, 25 bp, Saccharomyces pastorianus
gaaaagttgccggattactcacctc

SEQ ID NO: 150455 - DNA, 25 bp, Saccharomyces pastorianus
acagattctgagacttccatgtgat

SEQ ID NO: 150456 - DNA, 25 bp, Saccharomyces pastorianus
tcctcttcacactttgccgaatagt

SEQ ID NO: 150457 - DNA, 25 bp, Saccharomyces pastorianus
gtccccaagtatattccaagcatgt

SEQ ID NO: 150458 - DNA, 25 bp, Saccharomyces pastorianus
gcgaccatagggagctgatcatgtt

SEQ ID NO: 150459 - DNA, 25 bp, Saccharomyces pastorianus
agcaccggaacatcctcaattgaat

SEQ ID NO: 150460 - DNA, 25 bp, Saccharomyces pastorianus
tcgatgacttcctaataccttcacc

SEQ ID NO: 150461 - DNA, 25 bp, Saccharomyces pastorianus
tcacctccattatcgccaaagctga

SEQ ID NO: 150462 - DNA, 25 bp, Saccharomyces pastorianus
gcaatgccccataataagccagcct

SEQ ID NO: 150463 - DNA, 25 bp, Saccharomyces pastorianus
cagcctcagctggttaatgtggaaa

SEQ ID NO: 150464 - DNA, 25 bp, Saccharomyces pastorianus
gttgtccgtgctatcgatgcaagta

SEQ ID NO: 150465 - DNA, 25 bp, Saccharomyces pastorianus
gatatccgatagtagcgttgtccgt

SEQ ID NO: 150466 - DNA, 25 bp, Saccharomyces pastorianus
gcaatttcattctccagcaccggaa

SEQ ID NO: 150467 - DNA, 25 bp, Saccharomyces pastorianus
caagtgcagagattggctgtggtca

SEQ ID NO: 150468 - DNA, 25 bp, Saccharomyces pastorianus
gaactcgatggaatcctcacacgga

SEQ ID NO: 150469 - DNA, 25 bp, Saccharomyces pastorianus
gctaccgccaagatcagcatgtaat

SEQ ID NO: 150470 - DNA, 25 bp, Saccharomyces pastorianus
atgggtgaatcttcgctaccgccaa

SEQ ID NO: 150471 - DNA, 25 bp, Saccharomyces pastorianus
taaatcttaaagtacctgcagttgg

SEQ ID NO: 150472 - DNA, 25 bp, Saccharomyces pastorianus
gctggctaaggcaattgtttttatc

SEQ ID NO: 150473 - DNA, 25 bp, Saccharomyces pastorianus
aagccgtcggtctttgctgttaaat

SEQ ID NO: 150474 - DNA, 25 bp, Saccharomyces pastorianus
agagtattccaaatcgctgtctaat

SEQ ID NO: 150475 - DNA, 25 bp, Saccharomyces pastorianus
atcattgacactttgctggctaagg

SEQ ID NO: 150476 - DNA, 25 bp, Saccharomyces pastorianus
tcaggtgtttccctatttatagagt

SEQ ID NO: 150477 - DNA, 25 bp, Saccharomyces pastorianus
cagcatgtaattcatcacagctaat

SEQ ID NO: 150478 - DNA, 25 bp, Saccharomyces pastorianus
aaagaccttgcattcaagccgtcgg

SEQ ID NO: 150479 - DNA, 25 bp, Saccharomyces pastorianus
ggaatcatcgcttaacgtagataga

SEQ ID NO: 150480 - DNA, 25 bp, Saccharomyces pastorianus
gctgaaagtactatcgcccatttgg

SEQ ID NO: 150481 - DNA, 25 bp, Saccharomyces pastorianus
gcgaccgctctgattgctgaaagta

SEQ ID NO: 150482 - DNA, 25 bp, Saccharomyces pastorianus
atttgcgcgactcagatgctggatt

SEQ ID NO: 150483 - DNA, 25 bp, Saccharomyces pastorianus
aggtgttttcccatttctgtatgaa

SEQ ID NO: 150484 - DNA, 25 bp, Saccharomyces pastorianus
ttatgacgatctcagtgacgccact

SEQ ID NO: 150485 - DNA, 25 bp, Saccharomyces pastorianus
gcccatttggctctttatgacgatc

SEQ ID NO: 150486 - DNA, 25 bp, Saccharomyces pastorianus
gaaccgaaacgcctagacgactggg

SEQ ID NO: 150487 - DNA, 25 bp, Saccharomyces pastorianus
gaccaagctgccctatcatattagt

SEQ ID NO: 150488 - DNA, 25 bp, Saccharomyces pastorianus
agttaatattatggcggcgaccgct

SEQ ID NO: 150489 - DNA, 25 bp, Saccharomyces pastorianus
tgcagctaccgcagcaatcttggag

SEQ ID NO: 150490 - DNA, 25 bp, Saccharomyces pastorianus
ggaacacggcaaggctactgtcgaa

SEQ ID NO: 150491 - DNA, 25 bp, Saccharomyces pastorianus
taggaactccgcagcagctcagacg

SEQ ID NO: 150492 - DNA, 25 bp, Saccharomyces pastorianus
aatagctgcgaggttattactgctc

SEQ ID NO: 150493 - DNA, 25 bp, Saccharomyces pastorianus
atgccagagtccagattgcagagac

SEQ ID NO: 150494 - DNA, 25 bp, Saccharomyces pastorianus
cattgggcccaagacaaatagctgc

SEQ ID NO: 150495 - DNA, 25 bp, Saccharomyces pastorianus
taataggtaccattgggcccaagac

SEQ ID NO: 150496 - DNA, 25 bp, Saccharomyces pastorianus
gacgcacctccataataggtaccat

SEQ ID NO: 150497 - DNA, 25 bp, Saccharomyces pastorianus
gccagagtccagattgcagagacta

SEQ ID NO: 150498 - DNA, 25 bp, Saccharomyces pastorianus
gcgaggttattactgctcggagaaa

SEQ ID NO: 150499 - DNA, 25 bp, Saccharomyces pastorianus
gaaaataggaactccgcagcagctc

SEQ ID NO: 150500 - DNA, 25 bp, Saccharomyces pastorianus
ctccataataggtaccattgggccc

SEQ ID NO: 150501 - DNA, 25 bp, Saccharomyces pastorianus
agctcagacgcacctccataatagg

SEQ ID NO: 150502 - DNA, 25 bp, Saccharomyces pastorianus
tataggcatcatcaccattaccaac

SEQ ID NO: 150503 - DNA, 25 bp, Saccharomyces pastorianus
gagattccgcaaggctattttctac

SEQ ID NO: 150504 - DNA, 25 bp, Saccharomyces pastorianus
ccttcttgtgttcttgtttggcata

SEQ ID NO: 150505 - DNA, 25 bp, Saccharomyces pastorianus
aatgggtgcatcttgaccagcgcgt

SEQ ID NO: 150506 - DNA, 25 bp, Saccharomyces pastorianus
aatatcagcaccatttccgggtttc

SEQ ID NO: 150507 - DNA, 25 bp, Saccharomyces pastorianus
ggattaaggttcttccccacattat

SEQ ID NO: 150508 - DNA, 25 bp, Saccharomyces pastorianus
tattttctacaatggcctctacgac

SEQ ID NO: 150509 - DNA, 25 bp, Saccharomyces pastorianus
gtggttctctctcattgttataggc

SEQ ID NO: 150510 - DNA, 25 bp, Saccharomyces pastorianus
gccgccaatgcgtttatgtttgcga

SEQ ID NO: 150511 - DNA, 25 bp, Saccharomyces pastorianus
gagatcactgttgaccatggcgcaa

SEQ ID NO: 150512 - DNA, 25 bp, Saccharomyces pastorianus
ggtatgccattttcatccctaagta

SEQ ID NO: 150513 - DNA, 25 bp, Saccharomyces pastorianus
ttgtctccttcacaacagctggaat

SEQ ID NO: 150514 - DNA, 25 bp, Saccharomyces pastorianus
ttcagggtgttttcgccaagttcta

SEQ ID NO: 150515 - DNA, 25 bp, Saccharomyces pastorianus
gtatactacagatctttgtctcctt

SEQ ID NO: 150516 - DNA, 25 bp, Saccharomyces pastorianus
aatctgggttggttgttctacatcc

SEQ ID NO: 150517 - DNA, 25 bp, Saccharomyces pastorianus
ttaggtgtcaccaggcaactccaag

SEQ ID NO: 150518 - DNA, 25 bp, Saccharomyces pastorianus
gattctcagcttacttcatcaatag

SEQ ID NO: 150519 - DNA, 25 bp, Saccharomyces pastorianus
aaattcttcccgttcttggcaatat

SEQ ID NO: 150520 - DNA, 25 bp, Saccharomyces pastorianus
acaaggatccgttgacaggtggtat

SEQ ID NO: 150521 - DNA, 25 bp, Saccharomyces pastorianus
gtaagcgtgatcaaattcttcccgt

SEQ ID NO: 150522 - DNA, 25 bp, Saccharomyces pastorianus
gtcgctttacaaggtatgttccaga

SEQ ID NO: 150523 - DNA, 25 bp, Saccharomyces pastorianus
aagctctacaagtggcctgccagaa

SEQ ID NO: 150524 - DNA, 25 bp, Saccharomyces pastorianus
tagacaccatactaccgagatgcgt

SEQ ID NO: 150525 - DNA, 25 bp, Saccharomyces pastorianus
aagtatcttccaggttcgagactac

SEQ ID NO: 150526 - DNA, 25 bp, Saccharomyces pastorianus
gtcgttcttttgtatgtcacagcgt

SEQ ID NO: 150527 - DNA, 25 bp, Saccharomyces pastorianus
agcgatgtcttgtgcgtctatctaa

SEQ ID NO: 150528 - DNA, 25 bp, Saccharomyces pastorianus
taagcgtcattctgctttcacctta

SEQ ID NO: 150529 - DNA, 25 bp, Saccharomyces pastorianus
agatgcgtgcctcttttgaccaagt

SEQ ID NO: 150530 - DNA, 25 bp, Saccharomyces pastorianus
tgcggagcttttctacaatcttgac

SEQ ID NO: 150531 - DNA, 25 bp, Saccharomyces pastorianus
agatgcctttgaccagctaccggaa

SEQ ID NO: 150532 - DNA, 25 bp, Saccharomyces pastorianus
aagatgatcctgcacttctagacac

SEQ ID NO: 150533 - DNA, 25 bp, Saccharomyces pastorianus
aagatctcccactcaaaagtcctta

SEQ ID NO: 150534 - DNA, 25 bp, Saccharomyces pastorianus
taaacctttcttggctaagcgtcat

SEQ ID NO: 150535 - DNA, 25 bp, Saccharomyces pastorianus
atgactttaccaccatcgaagagat

SEQ ID NO: 150536 - DNA, 25 bp, Saccharomyces pastorianus
gttaccgcatggtcaagttctttga

SEQ ID NO: 150537 - DNA, 25 bp, Saccharomyces pastorianus
gttcaaccagaagatgccagcgatg

SEQ ID NO: 150538 - DNA, 25 bp, Saccharomyces pastorianus
atatcacttgggatccatctggtag

SEQ ID NO: 150539 - DNA, 25 bp, Saccharomyces pastorianus
tgacaccgccatgagagatttgatt

SEQ ID NO: 150540 - DNA, 25 bp, Saccharomyces pastorianus
gctggcttcaagaactttgcctgga

SEQ ID NO: 150541 - DNA, 25 bp, Saccharomyces pastorianus
ggagaccaaggccagcttccatttt

SEQ ID NO: 150542 - DNA, 25 bp, Saccharomyces pastorianus
gaaagatgttgctcatcctacctac

SEQ ID NO: 150543 - DNA, 25 bp, Saccharomyces pastorianus
gagatttgattctacaccaacgtga

SEQ ID NO: 150544 - DNA, 25 bp, Saccharomyces pastorianus
gtaggtgctttagtgggtccaaaca

SEQ ID NO: 150545 - DNA, 25 bp, Saccharomyces pastorianus
gcttccattttgtctaacgccgaaa

SEQ ID NO: 150546 - DNA, 25 bp, Saccharomyces pastorianus
gacattaagctagaggacatccctg

SEQ ID NO: 150547 - DNA, 25 bp, Saccharomyces pastorianus
gaagccactggtaagacgaaaggtt

SEQ ID NO: 150548 - DNA, 25 bp, Saccharomyces pastorianus
agtacatcgtcgttaatggtgcccc

SEQ ID NO: 150549 - DNA, 25 bp, Saccharomyces pastorianus
aggacatccctgttgacgacattga

SEQ ID NO: 150550 - DNA, 25 bp, Saccharomyces pastorianus
tatagtatctcgcaacacacagctc

SEQ ID NO: 150551 - DNA, 25 bp, Saccharomyces pastorianus
atcccatccgccaaagttcctgttt

SEQ ID NO: 150552 - DNA, 25 bp, Saccharomyces pastorianus
ttttctcttcgtggaatgtggctca

SEQ ID NO: 150553 - DNA, 25 bp, Saccharomyces pastorianus
gaaaaattttcttccacgcacattg

SEQ ID NO: 150554 - DNA, 25 bp, Saccharomyces pastorianus
gacttctttgttttccaaagctggt

SEQ ID NO: 150555 - DNA, 25 bp, Saccharomyces pastorianus
acgacattgatttttccgacctgga

SEQ ID NO: 150556 - DNA, 25 bp, Saccharomyces pastorianus
aatgactaccgagactttcgaagac

SEQ ID NO: 150557 - DNA, 25 bp, Saccharomyces pastorianus
aaatgctccagtggctacgaatgca

SEQ ID NO: 150558 - DNA, 25 bp, Saccharomyces pastorianus
gatgatgaaaatgctccagtggcta

SEQ ID NO: 150559 - DNA, 25 bp, Saccharomyces pastorianus
tccagtggctacgaatgcaaacgct

SEQ ID NO: 150560 - DNA, 25 bp, Saccharomyces pastorianus
atgctccagtggctacgaatgcaaa

SEQ ID NO: 150561 - DNA, 25 bp, Saccharomyces pastorianus
ccagtggctacgaatgcaaacgcta

SEQ ID NO: 150562 - DNA, 25 bp, Saccharomyces pastorianus
tgatgaaaatgctccagtggctacg

SEQ ID NO: 150563 - DNA, 25 bp, Saccharomyces pastorianus
agtggctacgaatgcaaacgctacc

SEQ ID NO: 150564 - DNA, 25 bp, Saccharomyces pastorianus
gctccagtggctacgaatgcaaacg

SEQ ID NO: 150565 - DNA, 25 bp, Saccharomyces pastorianus
atgaaaatgctccagtggctacgaa

SEQ ID NO: 150566 - DNA, 25 bp, Saccharomyces pastorianus
aaaatgctccagtggctacgaatgc

SEQ ID NO: 150567 - DNA, 25 bp, Saccharomyces pastorianus
gaaaatgctccagtggctacgaatg

SEQ ID NO: 150568 - DNA, 25 bp, Saccharomyces pastorianus
tttacccttgatcaattccaccaaa

SEQ ID NO: 150569 - DNA, 25 bp, Saccharomyces pastorianus
gacatatccatggatgttcccgata

SEQ ID NO: 150570 - DNA, 25 bp, Saccharomyces pastorianus
ggctccacttatagcttagcacaca

SEQ ID NO: 150571 - DNA, 25 bp, Saccharomyces pastorianus
gtgccgctcctaatctaaactttat

SEQ ID NO: 150572 - DNA, 25 bp, Saccharomyces pastorianus
aatctcactgttaactttacccttg

SEQ ID NO: 150573 - DNA, 25 bp, Saccharomyces pastorianus
gaaaacatgcctccgtcaattggtt

SEQ ID NO: 150574 - DNA, 25 bp, Saccharomyces pastorianus
ttcgagtgaaagtaaccgtgccgct

SEQ ID NO: 150575 - DNA, 25 bp, Saccharomyces pastorianus
ttaaaaactactatgaccctcccat

SEQ ID NO: 150576 - DNA, 25 bp, Saccharomyces pastorianus
aaaacatcggtgttgctgacccaca

SEQ ID NO: 150577 - DNA, 25 bp, Saccharomyces pastorianus
gaaaatgagagcgtaccaccgtaca

SEQ ID NO: 150578 - DNA, 25 bp, Saccharomyces pastorianus
ttcccgatatttttggtagccttga

SEQ ID NO: 150579 - DNA, 25 bp, Saccharomyces pastorianus
ggagaatctgtgtatcttactgtta

SEQ ID NO: 150580 - DNA, 25 bp, Saccharomyces pastorianus
acgagtttacggacaggctactaca

SEQ ID NO: 150581 - DNA, 25 bp, Saccharomyces pastorianus
tatttagaggatacatgccccaccg

SEQ ID NO: 150582 - DNA, 25 bp, Saccharomyces pastorianus
gaggatcgcgtatatctctttgaca

SEQ ID NO: 150583 - DNA, 25 bp, Saccharomyces pastorianus
gcttactctatatctggtgtgcatt

SEQ ID NO: 150584 - DNA, 25 bp, Saccharomyces pastorianus
gaggtacgactatcgatgggcacaa

SEQ ID NO: 150585 - DNA, 25 bp, Saccharomyces pastorianus
tgggcacaacccttatacgaaataa

SEQ ID NO: 150586 - DNA, 25 bp, Saccharomyces pastorianus
gaagtaattttcctagcgcagcaga

SEQ ID NO: 150587 - DNA, 25 bp, Saccharomyces pastorianus
attgaacagtacctctctcatttct

SEQ ID NO: 150588 - DNA, 25 bp, Saccharomyces pastorianus
ttgagcatattttccacctaatccc

SEQ ID NO: 150589 - DNA, 25 bp, Saccharomyces pastorianus
acctaatcccttttgccagcaagga

SEQ ID NO: 150590 - DNA, 25 bp, Saccharomyces pastorianus
atgatgcggtttacgaatcggtccc

SEQ ID NO: 150591 - DNA, 25 bp, Saccharomyces pastorianus
gtgctggatgcaaccttacatggat

SEQ ID NO: 150592 - DNA, 25 bp, Saccharomyces pastorianus
gacctctgcacacatgcttattagg

SEQ ID NO: 150593 - DNA, 25 bp, Saccharomyces pastorianus
ttcggctttctttactctcaattta

SEQ ID NO: 150594 - DNA, 25 bp, Saccharomyces pastorianus
aggtctatactagtgggttctctac

SEQ ID NO: 150595 - DNA, 25 bp, Saccharomyces pastorianus
gtaacttatttcagcagcccatagc

SEQ ID NO: 150596 - DNA, 25 bp, Saccharomyces pastorianus
aatcggtcccggaactgcacgaaat

SEQ ID NO: 150597 - DNA, 25 bp, Saccharomyces pastorianus
agcccatagctgtgtcttcttttat

SEQ ID NO: 150598 - DNA, 25 bp, Saccharomyces pastorianus
tgggttctctacaagcgcacggaaa

SEQ ID NO: 150599 - DNA, 25 bp, Saccharomyces pastorianus
ctggtggttaatggcgacctctgca

SEQ ID NO: 150600 - DNA, 25 bp, Saccharomyces pastorianus
gcagcgttttctttgtatctcttca

SEQ ID NO: 150601 - DNA, 25 bp, Saccharomyces pastorianus
taatgtgcgatcgtgccatcgggaa

SEQ ID NO: 150602 - DNA, 25 bp, Saccharomyces pastorianus
agcattttccttgggtgtttgttcg

SEQ ID NO: 150603 - DNA, 25 bp, Saccharomyces pastorianus
gttggtagtcaagaatctctcgaag

SEQ ID NO: 150604 - DNA, 25 bp, Saccharomyces pastorianus
gcatttggccaatttcaaggatcct

SEQ ID NO: 150605 - DNA, 25 bp, Saccharomyces pastorianus
ggccacttattgagcactaccatga

SEQ ID NO: 150606 - DNA, 25 bp, Saccharomyces pastorianus
aaggatcctggcaccaagcattttc

SEQ ID NO: 150607 - DNA, 25 bp, Saccharomyces pastorianus
gggttcaatatacaaggcttcgttc

SEQ ID NO: 150608 - DNA, 25 bp, Saccharomyces pastorianus
aatcagttagaggagcccgatgcca

SEQ ID NO: 150609 - DNA, 25 bp, Saccharomyces pastorianus
ggagcccgatgccaaatattctata

SEQ ID NO: 150610 - DNA, 25 bp, Saccharomyces pastorianus
gcatctccatggcttagggttcaat

SEQ ID NO: 150611 - DNA, 25 bp, Saccharomyces pastorianus
gatatggcgctaacgttggatttat

SEQ ID NO: 150612 - DNA, 25 bp, Saccharomyces pastorianus
gttccgaatactattcacggccaca

SEQ ID NO: 150613 - DNA, 25 bp, Saccharomyces pastorianus
ggcggctaatttgtcttccagaaga

SEQ ID NO: 150614 - DNA, 25 bp, Saccharomyces pastorianus
tactttggaccaacaggaccgagtt

SEQ ID NO: 150615 - DNA, 25 bp, Saccharomyces pastorianus
ggtcttcgatccacttttttcatga

SEQ ID NO: 150616 - DNA, 25 bp, Saccharomyces pastorianus
cggccacatccagtgcatgattata

SEQ ID NO: 150617 - DNA, 25 bp, Saccharomyces pastorianus
aaacccgatgatgttgtcaccgaga

SEQ ID NO: 150618 - DNA, 25 bp, Saccharomyces pastorianus
aagtcacttctttcgggtttcatct

SEQ ID NO: 150619 - DNA, 25 bp, Saccharomyces pastorianus
gaggaaacttccagaaccgatcgaa

SEQ ID NO: 150620 - DNA, 25 bp, Saccharomyces pastorianus
accactttgactattccttactttg

SEQ ID NO: 150621 - DNA, 25 bp, Saccharomyces pastorianus
gcatgtctgatggtcggtcttcgat

SEQ ID NO: 150622 - DNA, 25 bp, Saccharomyces pastorianus
tagaccaccgtacttgtttattccg

SEQ ID NO: 150623 - DNA, 25 bp, Saccharomyces pastorianus
gtggttgttgcagaacaagtccaaa

SEQ ID NO: 150624 - DNA, 25 bp, Saccharomyces pastorianus
gccttgcttgcttatccaaacagtg

SEQ ID NO: 150625 - DNA, 25 bp, Saccharomyces pastorianus
ccgacattcttgagtctctacatca

SEQ ID NO: 150626 - DNA, 25 bp, Saccharomyces pastorianus
gtgcccgtatcattggtggttgttg

SEQ ID NO: 150627 - DNA, 25 bp, Saccharomyces pastorianus
ttcttaggaatcaactgcgtcagct

SEQ ID NO: 150628 - DNA, 25 bp, Saccharomyces pastorianus
gacttgggcgacaaaataaatccta

SEQ ID NO: 150629 - DNA, 25 bp, Saccharomyces pastorianus
agtacattagcagcggtgcccgtat

SEQ ID NO: 150630 - DNA, 25 bp, Saccharomyces pastorianus
atcaactgcgtcagcttcaaccaat

SEQ ID NO: 150631 - DNA, 25 bp, Saccharomyces pastorianus
aaccaatcacccgacattcttgagt

SEQ ID NO: 150632 - DNA, 25 bp, Saccharomyces pastorianus
gggatacggttgttaaacagtacat

SEQ ID NO: 150633 - DNA, 25 bp, Saccharomyces pastorianus
ccaaatatggccttgcttgcttatc

SEQ ID NO: 150634 - DNA, 25 bp, Saccharomyces pastorianus
gtcatcgttgatccagactactacg

SEQ ID NO: 150635 - DNA, 25 bp, Saccharomyces pastorianus
gcatgcggcggttcttgtgcctgct

SEQ ID NO: 150636 - DNA, 25 bp, Saccharomyces pastorianus
tgccctgccggaacctgaagatgat

SEQ ID NO: 150637 - DNA, 25 bp, Saccharomyces pastorianus
cggttcttgtgcctgctccacctgt

SEQ ID NO: 150638 - DNA, 25 bp, Saccharomyces pastorianus
gctccacctgtcacgtcatcgttga

SEQ ID NO: 150639 - DNA, 25 bp, Saccharomyces pastorianus
aaacgatatgctcgatcttgcttac

SEQ ID NO: 150640 - DNA, 25 bp, Saccharomyces pastorianus
acctgtcacgtcatcgttgatccag

SEQ ID NO: 150641 - DNA, 25 bp, Saccharomyces pastorianus
gaaaacgatatgctcgatcttgctt

SEQ ID NO: 150642 - DNA, 25 bp, Saccharomyces pastorianus
gtcacgtcatcgttgatccagacta

SEQ ID NO: 150643 - DNA, 25 bp, Saccharomyces pastorianus
agactactacgatgccctgccggaa

SEQ ID NO: 150644 - DNA, 25 bp, Saccharomyces pastorianus
gatgccctgccggaacctgaagatg

SEQ ID NO: 150645 - DNA, 25 bp, Saccharomyces pastorianus
atgggattagagtcgctctgcccca

SEQ ID NO: 150646 - DNA, 25 bp, Saccharomyces pastorianus
gatatcgatgggattagagtcgctc

SEQ ID NO: 150647 - DNA, 25 bp, Saccharomyces pastorianus
attagagtcgctctgccccagatga

SEQ ID NO: 150648 - DNA, 25 bp, Saccharomyces pastorianus
atcgatgggattagagtcgctctgc

SEQ ID NO: 150649 - DNA, 25 bp, Saccharomyces pastorianus
ttgcttacgggctaacagagacaag

SEQ ID NO: 150650 - DNA, 25 bp, Saccharomyces pastorianus
acgggctaacagagacaagcaggct

SEQ ID NO: 150651 - DNA, 25 bp, Saccharomyces pastorianus
ggattagagtcgctctgccccagat

SEQ ID NO: 150652 - DNA, 25 bp, Saccharomyces pastorianus
ttagagtcgctctgccccagatgac

SEQ ID NO: 150653 - DNA, 25 bp, Saccharomyces pastorianus
tcgatcttgcttacgggctaacaga

SEQ ID NO: 150654 - DNA, 25 bp, Saccharomyces pastorianus
ctcgatcttgcttacgggctaacag

SEQ ID NO: 150655 - DNA, 25 bp, Saccharomyces pastorianus
cgatgggattagagtcgctctgccc

SEQ ID NO: 150656 - DNA, 25 bp, Saccharomyces pastorianus
ctacaagaagggtgctgcctccaac

SEQ ID NO: 150657 - DNA, 25 bp, Saccharomyces pastorianus
cgatttgatcagaaactccggtgaa

SEQ ID NO: 150658 - DNA, 25 bp, Saccharomyces pastorianus
gatttgatcagaaactccggtgaaa

SEQ ID NO: 150659 - DNA, 25 bp, Saccharomyces pastorianus
ccggtttgtccccatatgaaagaag

SEQ ID NO: 150660 - DNA, 25 bp, Saccharomyces pastorianus
atcgatttgatcagaaactccggtg

SEQ ID NO: 150661 - DNA, 25 bp, Saccharomyces pastorianus
ttgatcagaaactccggtgaaaaga

SEQ ID NO: 150662 - DNA, 25 bp, Saccharomyces pastorianus
tcgatttgatcagaaactccggtga

SEQ ID NO: 150663 - DNA, 25 bp, Saccharomyces pastorianus
tgatcagaaactccggtgaaaagag

SEQ ID NO: 150664 - DNA, 25 bp, Saccharomyces pastorianus
gatcgatttgatcagaaactccggt

SEQ ID NO: 150665 - DNA, 25 bp, Saccharomyces pastorianus
atttgatcagaaactccggtgaaaa

SEQ ID NO: 150666 - DNA, 25 bp, Saccharomyces pastorianus
agaaatcgccggtttgtccccatat

SEQ ID NO: 150667 - DNA, 25 bp, Saccharomyces pastorianus
ctctcgtaactctccagtgacaata

SEQ ID NO: 150668 - DNA, 25 bp, Saccharomyces pastorianus
agctgcaatcattagtgccactgac

SEQ ID NO: 150669 - DNA, 25 bp, Saccharomyces pastorianus
agtcacgccttttctagggcaacag

SEQ ID NO: 150670 - DNA, 25 bp, Saccharomyces pastorianus
agggccttcacctgtgccattgaaa

SEQ ID NO: 150671 - DNA, 25 bp, Saccharomyces pastorianus
gttaaatatgtttctcctggctcag

SEQ ID NO: 150672 - DNA, 25 bp, Saccharomyces pastorianus
gagcaagtttcagtgatctagtcaa

SEQ ID NO: 150673 - DNA, 25 bp, Saccharomyces pastorianus
taccctactcttccggaggaaaatg

SEQ ID NO: 150674 - DNA, 25 bp, Saccharomyces pastorianus
gtcaagctgttatctaaccgtccac

SEQ ID NO: 150675 - DNA, 25 bp, Saccharomyces pastorianus
tggtggcgccaattttaatcaaagt

SEQ ID NO: 150676 - DNA, 25 bp, Saccharomyces pastorianus
actgaccccgtctgctttgtttggt

SEQ ID NO: 150677 - DNA, 25 bp, Saccharomyces pastorianus
tgtccttcactttcactaacaatag

SEQ ID NO: 150678 - DNA, 25 bp, Saccharomyces pastorianus
aaccgctccagaagcttctaccgaa

SEQ ID NO: 150679 - DNA, 25 bp, Saccharomyces pastorianus
cagaagcttctaccgaagctccagt

SEQ ID NO: 150680 - DNA, 25 bp, Saccharomyces pastorianus
taccgaagctccagttgaagaggtt

SEQ ID NO: 150681 - DNA, 25 bp, Saccharomyces pastorianus
aacagaaaccgctccagaagcttct

SEQ ID NO: 150682 - DNA, 25 bp, Saccharomyces pastorianus
aaaccgctccagaagcttctaccga

SEQ ID NO: 150683 - DNA, 25 bp, Saccharomyces pastorianus
agaaaccgctccagaagcttctacc

SEQ ID NO: 150684 - DNA, 25 bp, Saccharomyces pastorianus
aaacagaaaccgctccagaagcttc

SEQ ID NO: 150685 - DNA, 25 bp, Saccharomyces pastorianus
gctccagaagcttctaccgaagctc

SEQ ID NO: 150686 - DNA, 25 bp, Saccharomyces pastorianus
acagaaaccgctccagaagcttcta

SEQ ID NO: 150687 - DNA, 25 bp, Saccharomyces pastorianus
gcttctaccgaagctccagttgaag

SEQ ID NO: 150688 - DNA, 25 bp, Saccharomyces pastorianus
tagattgatttctttaggtttgaac

SEQ ID NO: 150689 - DNA, 25 bp, Saccharomyces pastorianus
tcgagggtaaaactttggttgacat

SEQ ID NO: 150690 - DNA, 25 bp, Saccharomyces pastorianus
agatgctccagctgccatcagaact

SEQ ID NO: 150691 - DNA, 25 bp, Saccharomyces pastorianus
ttgctagatgctccagctgccatca

SEQ ID NO: 150692 - DNA, 25 bp, Saccharomyces pastorianus
aattgctagatgctccagctgccat

SEQ ID NO: 150693 - DNA, 25 bp, Saccharomyces pastorianus
cttgaaggatatcttgggtgaccaa

SEQ ID NO: 150694 - DNA, 25 bp, Saccharomyces pastorianus
acaaattgctagatgctccagctgc

SEQ ID NO: 150695 - DNA, 25 bp, Saccharomyces pastorianus
gacattactaaagatttcgaattgg

SEQ ID NO: 150696 - DNA, 25 bp, Saccharomyces pastorianus
ctagatgctccagctgccatcagaa

SEQ ID NO: 150697 - DNA, 25 bp, Saccharomyces pastorianus
aaattgctagatgctccagctgcca

SEQ ID NO: 150698 - DNA, 25 bp, Saccharomyces pastorianus
ggccttgaaggatatcttgggtgac

SEQ ID NO: 150699 - DNA, 25 bp, Saccharomyces pastorianus
gaaggatatcttgggtgaccaagtg

SEQ ID NO: 150700 - DNA, 25 bp, Saccharomyces pastorianus
agatgctccagctgccatcagaact

SEQ ID NO: 150701 - DNA, 25 bp, Saccharomyces pastorianus
gaactggtcaattcggctggtctgc

SEQ ID NO: 150702 - DNA, 25 bp, Saccharomyces pastorianus
gcagctccggttgaagaggtcccag

SEQ ID NO: 150703 - DNA, 25 bp, Saccharomyces pastorianus
aattgctagatgctccagctgccat

SEQ ID NO: 150704 - DNA, 25 bp, Saccharomyces pastorianus
gctagatgctccagctgccatcaga

SEQ ID NO: 150705 - DNA, 25 bp, Saccharomyces pastorianus
cttgaaggatatcttgggtgaccaa

SEQ ID NO: 150706 - DNA, 25 bp, Saccharomyces pastorianus
acaaattgctagatgctccagctgc

SEQ ID NO: 150707 - DNA, 25 bp, Saccharomyces pastorianus
gacattactaaagatttcgaattgg

SEQ ID NO: 150708 - DNA, 25 bp, Saccharomyces pastorianus
gaggtcccagttgacaccgaaatgg

SEQ ID NO: 150709 - DNA, 25 bp, Saccharomyces pastorianus
ggccttgaaggatatcttgggtgac

SEQ ID NO: 150710 - DNA, 25 bp, Saccharomyces pastorianus
tcgagggtaaaactttggttgacat

SEQ ID NO: 150711 - DNA, 25 bp, Saccharomyces pastorianus
taaagctttcatggaagctctatct

SEQ ID NO: 150712 - DNA, 25 bp, Saccharomyces pastorianus
agtctggtactaaagctttcatgga

SEQ ID NO: 150713 - DNA, 25 bp, Saccharomyces pastorianus
tctttcaccgttactttggacgaag

SEQ ID NO: 150714 - DNA, 25 bp, Saccharomyces pastorianus
gaggacgaacaatatatttgggaat

SEQ ID NO: 150715 - DNA, 25 bp, Saccharomyces pastorianus
tactctttattcttagtcgccgaca

SEQ ID NO: 150716 - DNA, 25 bp, Saccharomyces pastorianus
taccattgctaagtctggtactaaa

SEQ ID NO: 150717 - DNA, 25 bp, Saccharomyces pastorianus
aattggtagaggtaccgtcttgaga

SEQ ID NO: 150718 - DNA, 25 bp, Saccharomyces pastorianus
atttgggaatctaatgccggtggtt

SEQ ID NO: 150719 - DNA, 25 bp, Saccharomyces pastorianus
gacagagttcaagttatttccaaga

SEQ ID NO: 150720 - DNA, 25 bp, Saccharomyces pastorianus
taatgccggtggttctttcaccgtt

SEQ ID NO: 150721 - DNA, 25 bp, Saccharomyces pastorianus
ttagtcgccgacagagttcaagtta

SEQ ID NO: 150722 - DNA, 25 bp, Saccharomyces pastorianus
aattgaacaagtcgccaaggaagcc

SEQ ID NO: 150723 - DNA, 25 bp, Saccharomyces pastorianus
aaggaagccaccgaggctttaagag

SEQ ID NO: 150724 - DNA, 25 bp, Saccharomyces pastorianus
caagtcgccaaggaagccaccgagg

SEQ ID NO: 150725 - DNA, 25 bp, Saccharomyces pastorianus
acaagtcgccaaggaagccaccgag

SEQ ID NO: 150726 - DNA, 25 bp, Saccharomyces pastorianus
agtcgccaaggaagccaccgaggct

SEQ ID NO: 150727 - DNA, 25 bp, Saccharomyces pastorianus
tgaacaagtcgccaaggaagccacc

SEQ ID NO: 150728 - DNA, 25 bp, Saccharomyces pastorianus
gaacaagtcgccaaggaagccaccg

SEQ ID NO: 150729 - DNA, 25 bp, Saccharomyces pastorianus
ggaagccaccgaggctttaagagaa

SEQ ID NO: 150730 - DNA, 25 bp, Saccharomyces pastorianus
gccaaggaagccaccgaggctttaa

SEQ ID NO: 150731 - DNA, 25 bp, Saccharomyces pastorianus
gaaattgaacaagtcgccaaggaag

SEQ ID NO: 150732 - DNA, 25 bp, Saccharomyces pastorianus
aagtcgccaaggaagccaccgaggc

SEQ ID NO: 150733 - DNA, 25 bp, Saccharomyces pastorianus
ggtttctcgcgcaaatagtgccgaa

SEQ ID NO: 150734 - DNA, 25 bp, Saccharomyces pastorianus
atgggcctacacagtgaaccgttag

SEQ ID NO: 150735 - DNA, 25 bp, Saccharomyces pastorianus
agaccgttcggtatatactggagac

SEQ ID NO: 150736 - DNA, 25 bp, Saccharomyces pastorianus
gaatctgattctacggctttacata

SEQ ID NO: 150737 - DNA, 25 bp, Saccharomyces pastorianus
attcggccacgatgctatctttgag

SEQ ID NO: 150738 - DNA, 25 bp, Saccharomyces pastorianus
cggctttacattgggcgtcgttgaa

SEQ ID NO: 150739 - DNA, 25 bp, Saccharomyces pastorianus
gagtatgaggcagacccctttatta

SEQ ID NO: 150740 - DNA, 25 bp, Saccharomyces pastorianus
agacgtggtcaagctactgtgtgat

SEQ ID NO: 150741 - DNA, 25 bp, Saccharomyces pastorianus
tggctgctgccaacggtcatataga

SEQ ID NO: 150742 - DNA, 25 bp, Saccharomyces pastorianus
gtcagtcccaagttactttcgactt

SEQ ID NO: 150743 - DNA, 25 bp, Saccharomyces pastorianus
atttaccactttagtcagtcccaag

SEQ ID NO: 150744 - DNA, 25 bp, Saccharomyces pastorianus
aacggcaaactggacgtggtcagat

SEQ ID NO: 150745 - DNA, 25 bp, Saccharomyces pastorianus
tgtgacgaatatgaggccgacccct

SEQ ID NO: 150746 - DNA, 25 bp, Saccharomyces pastorianus
gtttctcgcgagaacagtgctgaag

SEQ ID NO: 150747 - DNA, 25 bp, Saccharomyces pastorianus
gtttggccacgatgccatctttgaa

SEQ ID NO: 150748 - DNA, 25 bp, Saccharomyces pastorianus
aacggccatgttgagacagtccagt

SEQ ID NO: 150749 - DNA, 25 bp, Saccharomyces pastorianus
aaatacgatgttgagcccgaggatg

SEQ ID NO: 150750 - DNA, 25 bp, Saccharomyces pastorianus
ttcattgggcctcgttgaacggcaa

SEQ ID NO: 150751 - DNA, 25 bp, Saccharomyces pastorianus
gacaagctggcgttcaaatcacaaa

SEQ ID NO: 150752 - DNA, 25 bp, Saccharomyces pastorianus
aggccgaccccttcatcagaaataa

SEQ ID NO: 150753 - DNA, 25 bp, Saccharomyces pastorianus
gaaacaggcaacaccgcacttcatt

SEQ ID NO: 150754 - DNA, 25 bp, Saccharomyces pastorianus
accaaggaggccactgatgctttaa

SEQ ID NO: 150755 - DNA, 25 bp, Saccharomyces pastorianus
agcgcgcagcctagtgtgcaaagct

SEQ ID NO: 150756 - DNA, 25 bp, Saccharomyces pastorianus
ggtatctatttctcacgatgacctc

SEQ ID NO: 150757 - DNA, 25 bp, Saccharomyces pastorianus
ccttaggcggtggtgctgcattgaa

SEQ ID NO: 150758 - DNA, 25 bp, Saccharomyces pastorianus
gtgcctacaaattcttccataatgg

SEQ ID NO: 150759 - DNA, 25 bp, Saccharomyces pastorianus
agaggatgtttacttggacccatta

SEQ ID NO: 150760 - DNA, 25 bp, Saccharomyces pastorianus
aaagctctttcgctgggacatggtc

SEQ ID NO: 150761 - DNA, 25 bp, Saccharomyces pastorianus
gctgttttcaagtccttaggcgtca

SEQ ID NO: 150762 - DNA, 25 bp, Saccharomyces pastorianus
aggctccttgactttcaactctaaa

SEQ ID NO: 150763 - DNA, 25 bp, Saccharomyces pastorianus
atggtccgccaaagaggctgttttc

SEQ ID NO: 150764 - DNA, 25 bp, Saccharomyces pastorianus
gagcatgctccatacactgatgaat

SEQ ID NO: 150765 - DNA, 25 bp, Saccharomyces pastorianus
gagaaagtctctaacggtggcgtcg

SEQ ID NO: 150766 - DNA, 25 bp, Saccharomyces pastorianus
ctggaactgggctaaacaatcttta

SEQ ID NO: 150767 - DNA, 25 bp, Saccharomyces pastorianus
ttaacggtgttgctacttctttctc

SEQ ID NO: 150768 - DNA, 25 bp, Saccharomyces pastorianus
aaggacactgttgctgaacttcaag

SEQ ID NO: 150769 - DNA, 25 bp, Saccharomyces pastorianus
tcgatgctggcgctctggaagaaat

SEQ ID NO: 150770 - DNA, 25 bp, Saccharomyces pastorianus
gaaccttcgattcttcctggaactg

SEQ ID NO: 150771 - DNA, 25 bp, Saccharomyces pastorianus
tggcgcgtcaacaactgcaagtatt

SEQ ID NO: 150772 - DNA, 25 bp, Saccharomyces pastorianus
gcaagtattggctcgttatctaaaa

SEQ ID NO: 150773 - DNA, 25 bp, Saccharomyces pastorianus
gaacagatccaacgatgctttgatt

SEQ ID NO: 150774 - DNA, 25 bp, Saccharomyces pastorianus
gaccacaaggttttggcgcgtcaac

SEQ ID NO: 150775 - DNA, 25 bp, Saccharomyces pastorianus
ttgacttatcatcagctgctagcgc

SEQ ID NO: 150776 - DNA, 25 bp, Saccharomyces pastorianus
atacgcttccattgttggtgttgac

SEQ ID NO: 150777 - DNA, 25 bp, Saccharomyces pastorianus
aatggctttcaacttattgggtcta

SEQ ID NO: 150778 - DNA, 25 bp, Saccharomyces pastorianus
aaccgtttgcggtgctcttattggt

SEQ ID NO: 150779 - DNA, 25 bp, Saccharomyces pastorianus
ccagaagtcgtagagttgtgccaaa

SEQ ID NO: 150780 - DNA, 25 bp, Saccharomyces pastorianus
gggttctactttgattgttgttccg

SEQ ID NO: 150781 - DNA, 25 bp, Saccharomyces pastorianus
atcctgggccaatcaattaaccgtt

SEQ ID NO: 150782 - DNA, 25 bp, Saccharomyces pastorianus
attgggtctattgactccagaagtc

SEQ ID NO: 150783 - DNA, 25 bp, Saccharomyces pastorianus
agaccagctcaagtcattctaccaa

SEQ ID NO: 150784 - DNA, 25 bp, Saccharomyces pastorianus
gaggtactggtttaatgagcgctaa

SEQ ID NO: 150785 - DNA, 25 bp, Saccharomyces pastorianus
cgccaaatatggtgctaagggttct

SEQ ID NO: 150786 - DNA, 25 bp, Saccharomyces pastorianus
agtcattctaccaatgtctccaaac

SEQ ID NO: 150787 - DNA, 25 bp, Saccharomyces pastorianus
gattgttgttccgttcaaccaaggt

SEQ ID NO: 150788 - DNA, 25 bp, Saccharomyces pastorianus
gaattttcgttggaaggttgcgttg

SEQ ID NO: 150789 - DNA, 25 bp, Saccharomyces pastorianus
taatttgaagggtcgtccatacact

SEQ ID NO: 150790 - DNA, 25 bp, Saccharomyces pastorianus
tggcttggattatgggcttcatttc

SEQ ID NO: 150791 - DNA, 25 bp, Saccharomyces pastorianus
aaatggcttggattatgggcttcat

SEQ ID NO: 150792 - DNA, 25 bp, Saccharomyces pastorianus
tttgaagggtcgtccatacactggt

SEQ ID NO: 150793 - DNA, 25 bp, Saccharomyces pastorianus
ttatgggcttcatttcataccataa

SEQ ID NO: 150794 - DNA, 25 bp, Saccharomyces pastorianus
ggaagcttttggtgaattttcgttg

SEQ ID NO: 150795 - DNA, 25 bp, Saccharomyces pastorianus
ggattatgggcttcatttcatacca

SEQ ID NO: 150796 - DNA, 25 bp, Saccharomyces pastorianus
gttgcgttgaaatggcttggattat

SEQ ID NO: 150797 - DNA, 25 bp, Saccharomyces pastorianus
aggttgcgttgaaatggcttggatt

SEQ ID NO: 150798 - DNA, 25 bp, Saccharomyces pastorianus
gcttttggtgaattttcgttggaag

SEQ ID NO: 150799 - DNA, 25 bp, Saccharomyces pastorianus
gaattttcgttggaaggttgcgttg

SEQ ID NO: 150800 - DNA, 25 bp, Saccharomyces pastorianus
taatttgaagggtcgtccatacact

SEQ ID NO: 150801 - DNA, 25 bp, Saccharomyces pastorianus
catacactggttgggttgattccaa

SEQ ID NO: 150802 - DNA, 25 bp, Saccharomyces pastorianus
tggcttggattatgggcttcatttc

SEQ ID NO: 150803 - DNA, 25 bp, Saccharomyces pastorianus
aaatggcttggattatgggcttcat

SEQ ID NO: 150804 - DNA, 25 bp, Saccharomyces pastorianus
tttgaagggtcgtccatacactggt

SEQ ID NO: 150805 - DNA, 25 bp, Saccharomyces pastorianus
aagggtcgtccatacactggttggg

SEQ ID NO: 150806 - DNA, 25 bp, Saccharomyces pastorianus
gggcttcatttcataccataacggt

SEQ ID NO: 150807 - DNA, 25 bp, Saccharomyces pastorianus
ggaagcttttggtgaattttcgttg

SEQ ID NO: 150808 - DNA, 25 bp, Saccharomyces pastorianus
ggattatgggcttcatttcatacca

SEQ ID NO: 150809 - DNA, 25 bp, Saccharomyces pastorianus
aggttgcgttgaaatggcttggatt

SEQ ID NO: 150810 - DNA, 25 bp, Saccharomyces pastorianus
gagtggttgtcatcgccaaaaggta

SEQ ID NO: 150811 - DNA, 25 bp, Saccharomyces pastorianus
gaattaattccttcagttatcacca

SEQ ID NO: 150812 - DNA, 25 bp, Saccharomyces pastorianus
aaagggctctgcacaagttgaccaa

SEQ ID NO: 150813 - DNA, 25 bp, Saccharomyces pastorianus
tcgtcgtctacgttacattgagtgg

SEQ ID NO: 150814 - DNA, 25 bp, Saccharomyces pastorianus
gttggtgctttatgtcctgaacaat

SEQ ID NO: 150815 - DNA, 25 bp, Saccharomyces pastorianus
gttaaagtcgttattgccggtgcta

SEQ ID NO: 150816 - DNA, 25 bp, Saccharomyces pastorianus
gatgacgatgattctccagctaaca

SEQ ID NO: 150817 - DNA, 25 bp, Saccharomyces pastorianus
ggtaatgctgatgccgttggtctaa

SEQ ID NO: 150818 - DNA, 25 bp, Saccharomyces pastorianus
aagaagctgcaagccgaacgtcgtc

SEQ ID NO: 150819 - DNA, 25 bp, Saccharomyces pastorianus
cgacgatcacgaagcctccagagaa

SEQ ID NO: 150820 - DNA, 25 bp, Saccharomyces pastorianus
accatactccattaggttctttatc

SEQ ID NO: 150821 - DNA, 25 bp, Saccharomyces pastorianus
ggattacttatcatctggtgccaaa

SEQ ID NO: 150822 - DNA, 25 bp, Saccharomyces pastorianus
gaatacagtcaaacgtgccgcgcaa

SEQ ID NO: 150823 - DNA, 25 bp, Saccharomyces pastorianus
gaatctgccatgctaataatttcca

SEQ ID NO: 150824 - DNA, 25 bp, Saccharomyces pastorianus
agcatacttgctaccattcttcaat

SEQ ID NO: 150825 - DNA, 25 bp, Saccharomyces pastorianus
ggccagggctatcaaaaatctactt

SEQ ID NO: 150826 - DNA, 25 bp, Saccharomyces pastorianus
ttctactacatctttgacctctttg

SEQ ID NO: 150827 - DNA, 25 bp, Saccharomyces pastorianus
tttaacctgttttgtactgcctacg

SEQ ID NO: 150828 - DNA, 25 bp, Saccharomyces pastorianus
actgcctacgattttggattactta

SEQ ID NO: 150829 - DNA, 25 bp, Saccharomyces pastorianus
gctgtgacgcccaaccaaagtggaa

SEQ ID NO: 150830 - DNA, 25 bp, Saccharomyces pastorianus
acccatctctcaattcttgtcaaag

SEQ ID NO: 150831 - DNA, 25 bp, Saccharomyces pastorianus
gacaatcgtcgatgttctatctaaa

SEQ ID NO: 150832 - DNA, 25 bp, Saccharomyces pastorianus
tgtgaacgactggaaaagacttgaa

SEQ ID NO: 150833 - DNA, 25 bp, Saccharomyces pastorianus
cgccgtttttggtggttcagattca

SEQ ID NO: 150834 - DNA, 25 bp, Saccharomyces pastorianus
acgaaggtattgagattgtcaacac

SEQ ID NO: 150835 - DNA, 25 bp, Saccharomyces pastorianus
caaatcttcgtctcctaaagggtca

SEQ ID NO: 150836 - DNA, 25 bp, Saccharomyces pastorianus
gtcaaacaagactttatccataact

SEQ ID NO: 150837 - DNA, 25 bp, Saccharomyces pastorianus
tctcctaaagggtcatcgttacggt

SEQ ID NO: 150838 - DNA, 25 bp, Saccharomyces pastorianus
tggtggttcagattcacaaagagaa

SEQ ID NO: 150839 - DNA, 25 bp, Saccharomyces pastorianus
gaatgacgaaactgttatcaagtat

SEQ ID NO: 150840 - DNA, 25 bp, Saccharomyces pastorianus
gaccgtggattctaatgtgaacgac

SEQ ID NO: 150841 - DNA, 25 bp, Saccharomyces pastorianus
gagcaagattttgaccgtggattct

SEQ ID NO: 150842 - DNA, 25 bp, Saccharomyces pastorianus
gtctactttaatgagagcaattgct

SEQ ID NO: 150843 - DNA, 25 bp, Saccharomyces pastorianus
catgctatgccagcccgagatttga

SEQ ID NO: 150844 - DNA, 25 bp, Saccharomyces pastorianus
ggaagacgctgctagttccacccaa

SEQ ID NO: 150845 - DNA, 25 bp, Saccharomyces pastorianus
ggaaccaagcatactggaagacgct

SEQ ID NO: 150846 - DNA, 25 bp, Saccharomyces pastorianus
aaatgcatgctatgccagcccgaga

SEQ ID NO: 150847 - DNA, 25 bp, Saccharomyces pastorianus
gttgcaaacgcccaagatgttacta

SEQ ID NO: 150848 - DNA, 25 bp, Saccharomyces pastorianus
atgccagcccgagatttgagcttga

SEQ ID NO: 150849 - DNA, 25 bp, Saccharomyces pastorianus
gcttgagcagtgttgcaaacgccca

SEQ ID NO: 150850 - DNA, 25 bp, Saccharomyces pastorianus
gcccgagatttgagcttgagcagtg

SEQ ID NO: 150851 - DNA, 25 bp, Saccharomyces pastorianus
gagcagtgttgcaaacgcccaagat

SEQ ID NO: 150852 - DNA, 25 bp, Saccharomyces pastorianus
agttccacccaaatgcatgctatgc

SEQ ID NO: 150853 - DNA, 25 bp, Saccharomyces pastorianus
gctagttccacccaaatgcatgcta

SEQ ID NO: 150854 - DNA, 25 bp, Saccharomyces pastorianus
atttgtcggattcgcacaggcatca

SEQ ID NO: 150855 - DNA, 25 bp, Saccharomyces pastorianus
tatttgcactgtcaccttggtcaac

SEQ ID NO: 150856 - DNA, 25 bp, Saccharomyces pastorianus
tgactccaggttcaagccagcaaag

SEQ ID NO: 150857 - DNA, 25 bp, Saccharomyces pastorianus
gtattttgttgccatcatccgttat

SEQ ID NO: 150858 - DNA, 25 bp, Saccharomyces pastorianus
ggcctttaccacaatcattctgttt

SEQ ID NO: 150859 - DNA, 25 bp, Saccharomyces pastorianus
gttttctaagaatcctgactccagg

SEQ ID NO: 150860 - DNA, 25 bp, Saccharomyces pastorianus
gctattcctcatgaaggtgccttga

SEQ ID NO: 150861 - DNA, 25 bp, Saccharomyces pastorianus
ccatcatgggctgggtgtttttcat

SEQ ID NO: 150862 - DNA, 25 bp, Saccharomyces pastorianus
aatgctgcgttttctttgcttctac

SEQ ID NO: 150863 - DNA, 25 bp, Saccharomyces pastorianus
actgttgatgattctggcctttacc

SEQ ID NO: 150864 - DNA, 25 bp, Saccharomyces pastorianus
aaaagtatgctgtctctgccatcat

SEQ ID NO: 150865 - DNA, 25 bp, Saccharomyces pastorianus
tccaaacgccgtttctgaagcggag

SEQ ID NO: 150866 - DNA, 25 bp, Saccharomyces pastorianus
agaactggctattggtaacattaag

SEQ ID NO: 150867 - DNA, 25 bp, Saccharomyces pastorianus
gaagcggagctacgttctgctttag

SEQ ID NO: 150868 - DNA, 25 bp, Saccharomyces pastorianus
gttaatggtatcgtctttttagtcg

SEQ ID NO: 150869 - DNA, 25 bp, Saccharomyces pastorianus
attgccgaattgaaggacgttcctt

SEQ ID NO: 150870 - DNA, 25 bp, Saccharomyces pastorianus
tcgatttgggtggtcatattcaagc

SEQ ID NO: 150871 - DNA, 25 bp, Saccharomyces pastorianus
gaataccactggctctcaaagaatt

SEQ ID NO: 150872 - DNA, 25 bp, Saccharomyces pastorianus
agatttgatgaagcacgtgtcgaat

SEQ ID NO: 150873 - DNA, 25 bp, Saccharomyces pastorianus
ggattattgaataccactggctctc

SEQ ID NO: 150874 - DNA, 25 bp, Saccharomyces pastorianus
gattggcaaccttacaaccaacatg

SEQ ID NO: 150875 - DNA, 25 bp, Saccharomyces pastorianus
agatgctttattcaacattgccgaa

SEQ ID NO: 150876 - DNA, 25 bp, Saccharomyces pastorianus
aatacttcgcccagaatggtaaaag

SEQ ID NO: 150877 - DNA, 25 bp, Saccharomyces pastorianus
aaagaaagaatacttcgcccagaat

SEQ ID NO: 150878 - DNA, 25 bp, Saccharomyces pastorianus
gaatacttcgcccagaatggtaaaa

SEQ ID NO: 150879 - DNA, 25 bp, Saccharomyces pastorianus
aagaaagaatacttcgcccagaatg

SEQ ID NO: 150880 - DNA, 25 bp, Saccharomyces pastorianus
tacttcgcccagaatggtaaaagaa

SEQ ID NO: 150881 - DNA, 25 bp, Saccharomyces pastorianus
agaaagaatacttcgcccagaatgg

SEQ ID NO: 150882 - DNA, 25 bp, Saccharomyces pastorianus
aagaatacttcgcccagaatggtaa

SEQ ID NO: 150883 - DNA, 25 bp, Saccharomyces pastorianus
gaggaagaaaaatcacaaagggata

SEQ ID NO: 150884 - DNA, 25 bp, Saccharomyces pastorianus
gaaagaatacttcgcccagaatggt

SEQ ID NO: 150885 - DNA, 25 bp, Saccharomyces pastorianus
aagaacaactatggacggtgacgat

SEQ ID NO: 150886 - DNA, 25 bp, Saccharomyces pastorianus
atacttcgcccagaatggtaaaaga

SEQ ID NO: 150887 - DNA, 25 bp, Saccharomyces pastorianus
taagatcatggtatcctgtccgcgt

SEQ ID NO: 150888 - DNA, 25 bp, Saccharomyces pastorianus
atcctgtccgcgtcaagaaattcta

SEQ ID NO: 150889 - DNA, 25 bp, Saccharomyces pastorianus
gcaggcaaggcaaccagcacaggct

SEQ ID NO: 150890 - DNA, 25 bp, Saccharomyces pastorianus
tgagggtcactatagggcagccttt

SEQ ID NO: 150891 - DNA, 25 bp, Saccharomyces pastorianus
agggtgcgcagatcaaaactgtctc

SEQ ID NO: 150892 - DNA, 25 bp, Saccharomyces pastorianus
ggcactttcaaagcctgagggtcac

SEQ ID NO: 150893 - DNA, 25 bp, Saccharomyces pastorianus
ctataatcctgttacctcactattg

SEQ ID NO: 150894 - DNA, 25 bp, Saccharomyces pastorianus
aactgtctcgggtatccgtggtgaa

SEQ ID NO: 150895 - DNA, 25 bp, Saccharomyces pastorianus
tcgaatccggacagtgcatatcata

SEQ ID NO: 150896 - DNA, 25 bp, Saccharomyces pastorianus
aagtattgacgcatttcgcaaagcc

SEQ ID NO: 150897 - DNA, 25 bp, Saccharomyces pastorianus
gctatgaacctggaaacaccgtcga

SEQ ID NO: 150898 - DNA, 25 bp, Saccharomyces pastorianus
atatgttctaagcaggttatcagac

SEQ ID NO: 150899 - DNA, 25 bp, Saccharomyces pastorianus
ggttatcagacagagagtttgccac

SEQ ID NO: 150900 - DNA, 25 bp, Saccharomyces pastorianus
tgacaccaaagcaagaggaagagtt

SEQ ID NO: 150901 - DNA, 25 bp, Saccharomyces pastorianus
gtctgttgtgagatacatttattct

SEQ ID NO: 150902 - DNA, 25 bp, Saccharomyces pastorianus
attctcaactatatgttctaagcag

SEQ ID NO: 150903 - DNA, 25 bp, Saccharomyces pastorianus
gacagagagtttgccacaggtaaat

SEQ ID NO: 150904 - DNA, 25 bp, Saccharomyces pastorianus
gtttgccacaggtaaattcaagttt

SEQ ID NO: 150905 - DNA, 25 bp, Saccharomyces pastorianus
gaagctctagacaaggatcctaaaa

SEQ ID NO: 150906 - DNA, 25 bp, Saccharomyces pastorianus
gtgaaggtcgaaaaactgacaccaa

SEQ ID NO: 150907 - DNA, 25 bp, Saccharomyces pastorianus
atggttcatttagagtctgttgtga

SEQ ID NO: 150908 - DNA, 25 bp, Saccharomyces pastorianus
atatgaagctctagacaaggatcct

SEQ ID NO: 150909 - DNA, 25 bp, Saccharomyces pastorianus
gtacagaaccttacattatcgaata

SEQ ID NO: 150910 - DNA, 25 bp, Saccharomyces pastorianus
cggtcgcctattgcctatgaatgta

SEQ ID NO: 150911 - DNA, 25 bp, Saccharomyces pastorianus
gagcgcccaggacgttgaagaatct

SEQ ID NO: 150912 - DNA, 25 bp, Saccharomyces pastorianus
gtaccgcatttagagactttagact

SEQ ID NO: 150913 - DNA, 25 bp, Saccharomyces pastorianus
tacattactgttgggccgaaacaat

SEQ ID NO: 150914 - DNA, 25 bp, Saccharomyces pastorianus
aaaggttgtgtagagcgcccaggac

SEQ ID NO: 150915 - DNA, 25 bp, Saccharomyces pastorianus
ctttccaaggcaggcggacggcgat

SEQ ID NO: 150916 - DNA, 25 bp, Saccharomyces pastorianus
gacggcgatacgttgggcccagtaa

SEQ ID NO: 150917 - DNA, 25 bp, Saccharomyces pastorianus
tatcgttgaagtagacggtcgccta

SEQ ID NO: 150918 - DNA, 25 bp, Saccharomyces pastorianus
agagcgcaatgagctttccaaggca

SEQ ID NO: 150919 - DNA, 25 bp, Saccharomyces pastorianus
acttcgattagtaccgcatttagag

SEQ ID NO: 150920 - DNA, 25 bp, Saccharomyces pastorianus
gagtatcttcgaattcttgacagct

SEQ ID NO: 150921 - DNA, 25 bp, Saccharomyces pastorianus
tgaaatatccagcaccactcagagc

SEQ ID NO: 150922 - DNA, 25 bp, Saccharomyces pastorianus
gtcaggcttacggacagcagaagat

SEQ ID NO: 150923 - DNA, 25 bp, Saccharomyces pastorianus
tggcaaccttaattacccgttgtgg

SEQ ID NO: 150924 - DNA, 25 bp, Saccharomyces pastorianus
ccgtcgaacgcattagtcaggctta

SEQ ID NO: 150925 - DNA, 25 bp, Saccharomyces pastorianus
gtttggttacaaggcgatcgatttt

SEQ ID NO: 150926 - DNA, 25 bp, Saccharomyces pastorianus
taatattccgaaggcacctgcatta

SEQ ID NO: 150927 - DNA, 25 bp, Saccharomyces pastorianus
aggtcttactgatgcgcccgagagc

SEQ ID NO: 150928 - DNA, 25 bp, Saccharomyces pastorianus
gataaatcgggacctgctgtgcaaa

SEQ ID NO: 150929 - DNA, 25 bp, Saccharomyces pastorianus
agctaagggtatcccaggtcttact

SEQ ID NO: 150930 - DNA, 25 bp, Saccharomyces pastorianus
gttattggcgatgcccaaacagaat

SEQ ID NO: 150931 - DNA, 25 bp, Saccharomyces pastorianus
acctccaaattacctgatcctgaaa

SEQ ID NO: 150932 - DNA, 25 bp, Saccharomyces pastorianus
agaacaggcccttgacatatcaaag

SEQ ID NO: 150933 - DNA, 25 bp, Saccharomyces pastorianus
gagttgtttcgtcagattctttgga

SEQ ID NO: 150934 - DNA, 25 bp, Saccharomyces pastorianus
aattaggctccgtgagagtccaatt

SEQ ID NO: 150935 - DNA, 25 bp, Saccharomyces pastorianus
acgtcgggtttgaattattgtccat

SEQ ID NO: 150936 - DNA, 25 bp, Saccharomyces pastorianus
gatcctgaaaggtggctgccattaa

SEQ ID NO: 150937 - DNA, 25 bp, Saccharomyces pastorianus
aggcgatgcagatgtccttgttgac

SEQ ID NO: 150938 - DNA, 25 bp, Saccharomyces pastorianus
gaatcgaaggctttactcagagaga

SEQ ID NO: 150939 - DNA, 25 bp, Saccharomyces pastorianus
gtgaaacccttagaatcgtcagcaa

SEQ ID NO: 150940 - DNA, 25 bp, Saccharomyces pastorianus
gagacaggtctacttataggccaaa

SEQ ID NO: 150941 - DNA, 25 bp, Saccharomyces pastorianus
tttttacaaggtcgcgacacctcca

SEQ ID NO: 150942 - DNA, 25 bp, Saccharomyces pastorianus
gacttgcgtgaaactattggattct

SEQ ID NO: 150943 - DNA, 25 bp, Saccharomyces pastorianus
actaatttgctctctcaattgaaca

SEQ ID NO: 150944 - DNA, 25 bp, Saccharomyces pastorianus
tttaactaatttgctctctcaattg

SEQ ID NO: 150945 - DNA, 25 bp, Saccharomyces pastorianus
taactaatttgctctctcaattgaa

SEQ ID NO: 150946 - DNA, 25 bp, Saccharomyces pastorianus
gtcgaacagacttgcgtgaaactat

SEQ ID NO: 150947 - DNA, 25 bp, Saccharomyces pastorianus
gaacagacttgcgtgaaactattgg

SEQ ID NO: 150948 - DNA, 25 bp, Saccharomyces pastorianus
taatttgctctctcaattgaacatt

SEQ ID NO: 150949 - DNA, 25 bp, Saccharomyces pastorianus
attgtctcaagacgagcattcgcag

SEQ ID NO: 150950 - DNA, 25 bp, Saccharomyces pastorianus
cagacttgcgtgaaactattggatt

SEQ ID NO: 150951 - DNA, 25 bp, Saccharomyces pastorianus
gataatttaactaatttgctctctc

SEQ ID NO: 150952 - DNA, 25 bp, Saccharomyces pastorianus
tcgaacagacttgcgtgaaactatt

SEQ ID NO: 150953 - DNA, 25 bp, Saccharomyces pastorianus
gacttgcgtgaaactattggattct

SEQ ID NO: 150954 - DNA, 25 bp, Saccharomyces pastorianus
actaatttgctctctcaattgaaca

SEQ ID NO: 150955 - DNA, 25 bp, Saccharomyces pastorianus
gtcgaacagacttgcgtgaaactat

SEQ ID NO: 150956 - DNA, 25 bp, Saccharomyces pastorianus
gaacagacttgcgtgaaactattgg

SEQ ID NO: 150957 - DNA, 25 bp, Saccharomyces pastorianus
taatttgctctctcaattgaacatt

SEQ ID NO: 150958 - DNA, 25 bp, Saccharomyces pastorianus
attgtctcaagacgagcattcgcag

SEQ ID NO: 150959 - DNA, 25 bp, Saccharomyces pastorianus
cagacttgcgtgaaactattggatt

SEQ ID NO: 150960 - DNA, 25 bp, Saccharomyces pastorianus
gacgagcattcgcaggtcgaacaga

SEQ ID NO: 150961 - DNA, 25 bp, Saccharomyces pastorianus
gataatttaactaatttgctctctc

SEQ ID NO: 150962 - DNA, 25 bp, Saccharomyces pastorianus
tgaacattcaattgtctcaagacga

SEQ ID NO: 150963 - DNA, 25 bp, Saccharomyces pastorianus
ttaactaatttgctctctcaattga

SEQ ID NO: 150964 - DNA, 25 bp, Saccharomyces pastorianus
cggacccttcaacgatattttagca

SEQ ID NO: 150965 - DNA, 25 bp, Saccharomyces pastorianus
tattgaggttacacggacccttcaa

SEQ ID NO: 150966 - DNA, 25 bp, Saccharomyces pastorianus
gagtgtacctgctaatggaatactt

SEQ ID NO: 150967 - DNA, 25 bp, Saccharomyces pastorianus
gaccccaaagatagaatgcgccttg

SEQ ID NO: 150968 - DNA, 25 bp, Saccharomyces pastorianus
tggcgtttgaactactgaccggtgc

SEQ ID NO: 150969 - DNA, 25 bp, Saccharomyces pastorianus
acaattgactacctttctccagaaa

SEQ ID NO: 150970 - DNA, 25 bp, Saccharomyces pastorianus
attgccaatgccctagattatatgc

SEQ ID NO: 150971 - DNA, 25 bp, Saccharomyces pastorianus
gtaacatttctcaggatgcgcaaga

SEQ ID NO: 150972 - DNA, 25 bp, Saccharomyces pastorianus
atgcgccttggagacgtaaaaatgc

SEQ ID NO: 150973 - DNA, 25 bp, Saccharomyces pastorianus
gtgcccctccgttcgaagaagaaat

SEQ ID NO: 150974 - DNA, 25 bp, Saccharomyces pastorianus
agatgcatgggctcttggcgtcctg

SEQ ID NO: 150975 - DNA, 25 bp, Saccharomyces pastorianus
gtagtagacaattcctttaccagaa

SEQ ID NO: 150976 - DNA, 25 bp, Saccharomyces pastorianus
gagtctattgtgctgacgtttatac

SEQ ID NO: 150977 - DNA, 25 bp, Saccharomyces pastorianus
gaattaccttcgctgttcagcaacg

SEQ ID NO: 150978 - DNA, 25 bp, Saccharomyces pastorianus
ttaagaatgaccctgcttttgcaga

SEQ ID NO: 150979 - DNA, 25 bp, Saccharomyces pastorianus
agagcccgtttgcagggtatacaaa

SEQ ID NO: 150980 - DNA, 25 bp, Saccharomyces pastorianus
gatctacacgatttgagagcccgtt

SEQ ID NO: 150981 - DNA, 25 bp, Saccharomyces pastorianus
ttactggaccacctgcaactgatga

SEQ ID NO: 150982 - DNA, 25 bp, Saccharomyces pastorianus
tttggccgaagtagatcatgcgatt

SEQ ID NO: 150983 - DNA, 25 bp, Saccharomyces pastorianus
gaattcttaccccaccaaatatgaa

SEQ ID NO: 150984 - DNA, 25 bp, Saccharomyces pastorianus
gactcttatgcaattgatccttaca

SEQ ID NO: 150985 - DNA, 25 bp, Saccharomyces pastorianus
gatgccaaggctttccatactgcat

SEQ ID NO: 150986 - DNA, 25 bp, Saccharomyces pastorianus
gatgcgttaaaagcactacttcagt

SEQ ID NO: 150987 - DNA, 25 bp, Saccharomyces pastorianus
actatcgtggacaatgttcgtgtga

SEQ ID NO: 150988 - DNA, 25 bp, Saccharomyces pastorianus
accttacttggatgcattgccttcc

SEQ ID NO: 150989 - DNA, 25 bp, Saccharomyces pastorianus
attcctcccgagattgtcatttcaa

SEQ ID NO: 150990 - DNA, 25 bp, Saccharomyces pastorianus
gcgagttgaagcgtttatcatctac

SEQ ID NO: 150991 - DNA, 25 bp, Saccharomyces pastorianus
aggaatctgcccatgaagttttttg

SEQ ID NO: 150992 - DNA, 25 bp, Saccharomyces pastorianus
gtgcgtcatttggtgtaatagtgcc

SEQ ID NO: 150993 - DNA, 25 bp, Saccharomyces pastorianus
ggatggctgaagttgttcttcgcaa

SEQ ID NO: 150994 - DNA, 25 bp, Saccharomyces pastorianus
tggtctggaacccaagcgagttgaa

SEQ ID NO: 150995 - DNA, 25 bp, Saccharomyces pastorianus
taccgatcttaagggcattatttgc

SEQ ID NO: 150996 - DNA, 25 bp, Saccharomyces pastorianus
gacaatcccagcatcaagattcctc

SEQ ID NO: 150997 - DNA, 25 bp, Saccharomyces pastorianus
tccatatatgtggtcgtgtttcaac

SEQ ID NO: 150998 - DNA, 25 bp, Saccharomyces pastorianus
accaaatgctttcctcgagtgtcga

SEQ ID NO: 150999 - DNA, 25 bp, Saccharomyces pastorianus
agaaattcaaacgtgggctgcctat

SEQ ID NO: 151000 - DNA, 25 bp, Saccharomyces pastorianus
aaatgctttcctcgagtgtcgaacc

SEQ ID NO: 151001 - DNA, 25 bp, Saccharomyces pastorianus
tgttttcaccaccaaatgctttcct

SEQ ID NO: 151002 - DNA, 25 bp, Saccharomyces pastorianus
aatcacgttccatatatgtggtcgt

SEQ ID NO: 151003 - DNA, 25 bp, Saccharomyces pastorianus
aaattcaaacgtgggctgcctatta

SEQ ID NO: 151004 - DNA, 25 bp, Saccharomyces pastorianus
ctttgtatttcaatcacgttccata

SEQ ID NO: 151005 - DNA, 25 bp, Saccharomyces pastorianus
tttcctcgagtgtcgaacctttctt

SEQ ID NO: 151006 - DNA, 25 bp, Saccharomyces pastorianus
gaacctttcttctctttgtatttca

SEQ ID NO: 151007 - DNA, 25 bp, Saccharomyces pastorianus
tgtcgaacctttcttctctttgtat

SEQ ID NO: 151008 - DNA, 25 bp, Saccharomyces pastorianus
gtacaaactgtcacatggacgcttt

SEQ ID NO: 151009 - DNA, 25 bp, Saccharomyces pastorianus
cacatcaggtatcggtgacacgtct

SEQ ID NO: 151010 - DNA, 25 bp, Saccharomyces pastorianus
ccgacgtcgtggatctactaagcaa

SEQ ID NO: 151011 - DNA, 25 bp, Saccharomyces pastorianus
acccttttacgatactactccaatg

SEQ ID NO: 151012 - DNA, 25 bp, Saccharomyces pastorianus
acgctttgtgggactcctgattaca

SEQ ID NO: 151013 - DNA, 25 bp, Saccharomyces pastorianus
tgggttcgccaaagaggtacaaact

SEQ ID NO: 151014 - DNA, 25 bp, Saccharomyces pastorianus
ggtgacacgtctttattcgatcaat

SEQ ID NO: 151015 - DNA, 25 bp, Saccharomyces pastorianus
aactgatcactgcagatttgacaag

SEQ ID NO: 151016 - DNA, 25 bp, Saccharomyces pastorianus
gatcaatatcccgaggagcagctag

SEQ ID NO: 151017 - DNA, 25 bp, Saccharomyces pastorianus
cggttccagggacatcaaagctcac

SEQ ID NO: 151018 - DNA, 25 bp, Saccharomyces pastorianus
ttttacgctgcggaagtcatactgg

SEQ ID NO: 151019 - DNA, 25 bp, Saccharomyces pastorianus
tgcaaacgaaaactcccaacttttg

SEQ ID NO: 151020 - DNA, 25 bp, Saccharomyces pastorianus
tcccaacttttggactttataagag

SEQ ID NO: 151021 - DNA, 25 bp, Saccharomyces pastorianus
aagatgtactttttgggagctctga

SEQ ID NO: 151022 - DNA, 25 bp, Saccharomyces pastorianus
tcaagtgcagagaggaaatccgaag

SEQ ID NO: 151023 - DNA, 25 bp, Saccharomyces pastorianus
gtactttttgggagctctgaagata

SEQ ID NO: 151024 - DNA, 25 bp, Saccharomyces pastorianus
aacctagcattttcaaagagtcaag

SEQ ID NO: 151025 - DNA, 25 bp, Saccharomyces pastorianus
gagccaacctagcattttcaaagag

SEQ ID NO: 151026 - DNA, 25 bp, Saccharomyces pastorianus
gattacttgaatatgagctatctca

SEQ ID NO: 151027 - DNA, 25 bp, Saccharomyces pastorianus
gatacagcgagaatttgcaaacgaa

SEQ ID NO: 151028 - DNA, 25 bp, Saccharomyces pastorianus
gaagatgaactgaagagccaaccta

SEQ ID NO: 151029 - DNA, 25 bp, Saccharomyces pastorianus
aatccgaagattgacttgaacttga

SEQ ID NO: 151030 - DNA, 25 bp, Saccharomyces pastorianus
ccctcctatgagtaccaattacaat

SEQ ID NO: 151031 - DNA, 25 bp, Saccharomyces pastorianus
agaccttccacctaacgttgtatcg

SEQ ID NO: 151032 - DNA, 25 bp, Saccharomyces pastorianus
gaatttgctttcaatggcccaacaa

SEQ ID NO: 151033 - DNA, 25 bp, Saccharomyces pastorianus
gcaacagcaacctgctggcaataat

SEQ ID NO: 151034 - DNA, 25 bp, Saccharomyces pastorianus
gaccagcaacaactattatctgcca

SEQ ID NO: 151035 - DNA, 25 bp, Saccharomyces pastorianus
acaacagttgggtggatattcctct

SEQ ID NO: 151036 - DNA, 25 bp, Saccharomyces pastorianus
aatatatctgcaaaaccctctgccc

SEQ ID NO: 151037 - DNA, 25 bp, Saccharomyces pastorianus
cctaacgttgtatcgaatttgcttt

SEQ ID NO: 151038 - DNA, 25 bp, Saccharomyces pastorianus
gatattcctctatgaactcatcctc

SEQ ID NO: 151039 - DNA, 25 bp, Saccharomyces pastorianus
attatctgccattcaagaccttcca

SEQ ID NO: 151040 - DNA, 25 bp, Saccharomyces pastorianus
aacaacctcatgctcagcagcaatt

SEQ ID NO: 151041 - DNA, 25 bp, Saccharomyces pastorianus
gaaccgcagatcgtacgtatgccat

SEQ ID NO: 151042 - DNA, 25 bp, Saccharomyces pastorianus
gattaccgtgctatgagccatcagc

SEQ ID NO: 151043 - DNA, 25 bp, Saccharomyces pastorianus
gaatgctcgtcctcaatttgatcat

SEQ ID NO: 151044 - DNA, 25 bp, Saccharomyces pastorianus
ataattctcgtcctactgattaccg

SEQ ID NO: 151045 - DNA, 25 bp, Saccharomyces pastorianus
gaaagcttatcaatgatgccgcata

SEQ ID NO: 151046 - DNA, 25 bp, Saccharomyces pastorianus
agacacaccgtttcttgcaacattt

SEQ ID NO: 151047 - DNA, 25 bp, Saccharomyces pastorianus
gatcctggaagtttctagctcgaat

SEQ ID NO: 151048 - DNA, 25 bp, Saccharomyces pastorianus
gttctacttttatttcttctgcaaa

SEQ ID NO: 151049 - DNA, 25 bp, Saccharomyces pastorianus
atgacgacaatggtgctggctacaa

SEQ ID NO: 151050 - DNA, 25 bp, Saccharomyces pastorianus
gtttgacaaccctcaaagcgttaga

SEQ ID NO: 151051 - DNA, 25 bp, Saccharomyces pastorianus
atatccgctgatgacgcagttgcca

SEQ ID NO: 151052 - DNA, 25 bp, Saccharomyces pastorianus
acaggtttgtttgcggtatcggtgc

SEQ ID NO: 151053 - DNA, 25 bp, Saccharomyces pastorianus
atctctatggattttgcttgggtgc

SEQ ID NO: 151054 - DNA, 25 bp, Saccharomyces pastorianus
gactgcggtaatggtaagcctattt

SEQ ID NO: 151055 - DNA, 25 bp, Saccharomyces pastorianus
agctttgccgtattctcatttgtag

SEQ ID NO: 151056 - DNA, 25 bp, Saccharomyces pastorianus
ggcatgacatccaattacgagtgtt

SEQ ID NO: 151057 - DNA, 25 bp, Saccharomyces pastorianus
ggcgaaacctacattactaactgtt

SEQ ID NO: 151058 - DNA, 25 bp, Saccharomyces pastorianus
acaattcacatagtccggagttttt

SEQ ID NO: 151059 - DNA, 25 bp, Saccharomyces pastorianus
ggagagcctggcatacaagttttaa

SEQ ID NO: 151060 - DNA, 25 bp, Saccharomyces pastorianus
tctatgttccatttggcgggtccaa

SEQ ID NO: 151061 - DNA, 25 bp, Saccharomyces pastorianus
gggtaatccgttacatctatgttcc

SEQ ID NO: 151062 - DNA, 25 bp, Saccharomyces pastorianus
tggaacttttgatcccatggaggct

SEQ ID NO: 151063 - DNA, 25 bp, Saccharomyces pastorianus
gtgggcccaattatcacttttaatg

SEQ ID NO: 151064 - DNA, 25 bp, Saccharomyces pastorianus
gaaaataagcttccttcgctaacga

SEQ ID NO: 151065 - DNA, 25 bp, Saccharomyces pastorianus
tgagccgccaaccttcgatagatta

SEQ ID NO: 151066 - DNA, 25 bp, Saccharomyces pastorianus
tacgcatgcttttattttcttcact

SEQ ID NO: 151067 - DNA, 25 bp, Saccharomyces pastorianus
ataggcttctatgccctcaaagtat

SEQ ID NO: 151068 - DNA, 25 bp, Saccharomyces pastorianus
atattgctatcatcctaagtcccat

SEQ ID NO: 151069 - DNA, 25 bp, Saccharomyces pastorianus
aagggtatcgttcctcgatgggatt

SEQ ID NO: 151070 - DNA, 25 bp, Saccharomyces pastorianus
gatagccgcttttgcgatttggtcc

SEQ ID NO: 151071 - DNA, 25 bp, Saccharomyces pastorianus
gcgccattgtttttagtgggcccaa

SEQ ID NO: 151072 - DNA, 25 bp, Saccharomyces pastorianus
tggtcctatggtatctttacactat

SEQ ID NO: 151073 - DNA, 25 bp, Saccharomyces pastorianus
tcttcactttggcacattcgctaaa

SEQ ID NO: 151074 - DNA, 25 bp, Saccharomyces pastorianus
gacgctgaagcttggcattggttgc

SEQ ID NO: 151075 - DNA, 25 bp, Saccharomyces pastorianus
cgctgaagcttggcattggctgcaa

SEQ ID NO: 151076 - DNA, 25 bp, Saccharomyces pastorianus
tgcagttaaagcctggccaaccaat

SEQ ID NO: 151077 - DNA, 25 bp, Saccharomyces pastorianus
gtacaagagagaagccgacgctgaa

SEQ ID NO: 151078 - DNA, 25 bp, Saccharomyces pastorianus
tggctgcaactaaagcctggccaac

SEQ ID NO: 151079 - DNA, 25 bp, Saccharomyces pastorianus
ttggcattggctgcaactaaagcct

SEQ ID NO: 151080 - DNA, 25 bp, Saccharomyces pastorianus
attggttgcaactaaaacctggcca

SEQ ID NO: 151081 - DNA, 25 bp, Saccharomyces pastorianus
gtacaaaagagaagccgacgctgaa

SEQ ID NO: 151082 - DNA, 25 bp, Saccharomyces pastorianus
cattggttgcagttaaagcctggcc

SEQ ID NO: 151083 - DNA, 25 bp, Saccharomyces pastorianus
gttgcaactaaaacctggccaacca

SEQ ID NO: 151084 - DNA, 25 bp, Saccharomyces pastorianus
gttgcagttaaagcctggccaacca

SEQ ID NO: 151085 - DNA, 25 bp, Saccharomyces pastorianus
attagctgctccagtcaacactaca

SEQ ID NO: 151086 - DNA, 25 bp, Saccharomyces pastorianus
gctccagtcaacactacaacagaag

SEQ ID NO: 151087 - DNA, 25 bp, Saccharomyces pastorianus
ttagctgctccagtcaacactacaa

SEQ ID NO: 151088 - DNA, 25 bp, Saccharomyces pastorianus
agctgctccagtcaacactacaaca

SEQ ID NO: 151089 - DNA, 25 bp, Saccharomyces pastorianus
ccagtcaacactacaacagaagatg

SEQ ID NO: 151090 - DNA, 25 bp, Saccharomyces pastorianus
tgctccagtcaacactacaacagaa

SEQ ID NO: 151091 - DNA, 25 bp, Saccharomyces pastorianus
acaacagaagatgataacggcacaa

SEQ ID NO: 151092 - DNA, 25 bp, Saccharomyces pastorianus
tagctgctccagtcaacactacaac

SEQ ID NO: 151093 - DNA, 25 bp, Saccharomyces pastorianus
gcattagctgctccagtcaacacta

SEQ ID NO: 151094 - DNA, 25 bp, Saccharomyces pastorianus
aacagaagatgataacggcacaaat

SEQ ID NO: 151095 - DNA, 25 bp, Saccharomyces pastorianus
gctgctccagtcaacactacaacag

SEQ ID NO: 151096 - DNA, 25 bp, Saccharomyces pastorianus
taatgctacaagaacttccgccaca

SEQ ID NO: 151097 - DNA, 25 bp, Saccharomyces pastorianus
gcacctgtagtgcagttgccggtac

SEQ ID NO: 151098 - DNA, 25 bp, Saccharomyces pastorianus
gctgcagcagcttcttcgacaataa

SEQ ID NO: 151099 - DNA, 25 bp, Saccharomyces pastorianus
acaagtgactttatcgctgcagcag

SEQ ID NO: 151100 - DNA, 25 bp, Saccharomyces pastorianus
aattaccgcaggcaagctttcactg

SEQ ID NO: 151101 - DNA, 25 bp, Saccharomyces pastorianus
aacgtcgtatttattgcgctgaaag

SEQ ID NO: 151102 - DNA, 25 bp, Saccharomyces pastorianus
actggaccctactatctcaaatctt

SEQ ID NO: 151103 - DNA, 25 bp, Saccharomyces pastorianus
agagcttcttgttgtcatttcacca

SEQ ID NO: 151104 - DNA, 25 bp, Saccharomyces pastorianus
tttggttgaccacaaactggaccct

SEQ ID NO: 151105 - DNA, 25 bp, Saccharomyces pastorianus
gttgccggtacatcaatctggtatc

SEQ ID NO: 151106 - DNA, 25 bp, Saccharomyces pastorianus
gtaccattttccgttgatccgattt

SEQ ID NO: 151107 - DNA, 25 bp, Saccharomyces pastorianus
cagccgactacgagggcagtgaatc

SEQ ID NO: 151108 - DNA, 25 bp, Saccharomyces pastorianus
tctgcagccgactacgagggcagtg

SEQ ID NO: 151109 - DNA, 25 bp, Saccharomyces pastorianus
ttgcaccaccaacgcgtcattaact

SEQ ID NO: 151110 - DNA, 25 bp, Saccharomyces pastorianus
taactctctgcagccgactacgagg

SEQ ID NO: 151111 - DNA, 25 bp, Saccharomyces pastorianus
ccaacgcgtcattaactctctgcag

SEQ ID NO: 151112 - DNA, 25 bp, Saccharomyces pastorianus
ttaactctctgcagccgactacgag

SEQ ID NO: 151113 - DNA, 25 bp, Saccharomyces pastorianus
gactttgcaccaccaacgcgtcatt

SEQ ID NO: 151114 - DNA, 25 bp, Saccharomyces pastorianus
ctacgagggcagtgaatcgcaggat

SEQ ID NO: 151115 - DNA, 25 bp, Saccharomyces pastorianus
gaatcgcaggatggaaaatgtgggc

SEQ ID NO: 151116 - DNA, 25 bp, Saccharomyces pastorianus
accaacgcgtcattaactctctgca

SEQ ID NO: 151117 - DNA, 25 bp, Saccharomyces pastorianus
ggttccagcacgactttgcaccacc

SEQ ID NO: 151118 - DNA, 25 bp, Saccharomyces pastorianus
gatctttatccacatcttgcaagtg

SEQ ID NO: 151119 - DNA, 25 bp, Saccharomyces pastorianus
gattcaggcagtgttgtccggtata

SEQ ID NO: 151120 - DNA, 25 bp, Saccharomyces pastorianus
gagtacaaaccacagcgttggccac

SEQ ID NO: 151121 - DNA, 25 bp, Saccharomyces pastorianus
ttcgcccagttccttaaatcagatg

SEQ ID NO: 151122 - DNA, 25 bp, Saccharomyces pastorianus
tcagtcaatcgcacattctagcagt

SEQ ID NO: 151123 - DNA, 25 bp, Saccharomyces pastorianus
gtacgaactccggtagcgatgcaaa

SEQ ID NO: 151124 - DNA, 25 bp, Saccharomyces pastorianus
gtccaacgaacatatcacatctagt

SEQ ID NO: 151125 - DNA, 25 bp, Saccharomyces pastorianus
gacaatccaactcaggtgccaaatt

SEQ ID NO: 151126 - DNA, 25 bp, Saccharomyces pastorianus
gtagtgactctatctttatggcagg

SEQ ID NO: 151127 - DNA, 25 bp, Saccharomyces pastorianus
ggacgattgctctttactaactatg

SEQ ID NO: 151128 - DNA, 25 bp, Saccharomyces pastorianus
aatttaatagcttcgcccagttcct

SEQ ID NO: 151129 - DNA, 25 bp, Saccharomyces pastorianus
tcgaaactatcggtcctgaacgggt

SEQ ID NO: 151130 - DNA, 25 bp, Saccharomyces pastorianus
ttggcctttgtgcaccttgttgaac

SEQ ID NO: 151131 - DNA, 25 bp, Saccharomyces pastorianus
tggaagggtccaatcatcagagctg

SEQ ID NO: 151132 - DNA, 25 bp, Saccharomyces pastorianus
ggtaattacgctcttcatccagaag

SEQ ID NO: 151133 - DNA, 25 bp, Saccharomyces pastorianus
tccaacccagatttagtctaccgtt

SEQ ID NO: 151134 - DNA, 25 bp, Saccharomyces pastorianus
agggcccgctttacactggaggttg

SEQ ID NO: 151135 - DNA, 25 bp, Saccharomyces pastorianus
gtttgaggttgtcgccatacggcac

SEQ ID NO: 151136 - DNA, 25 bp, Saccharomyces pastorianus
gaaggttataccgactacccaacat

SEQ ID NO: 151137 - DNA, 25 bp, Saccharomyces pastorianus
gctgaaccaggtattatcgctcaat

SEQ ID NO: 151138 - DNA, 25 bp, Saccharomyces pastorianus
taccgtttagaagagggcctgccat

SEQ ID NO: 151139 - DNA, 25 bp, Saccharomyces pastorianus
gggtactaacgattttgcctactct

SEQ ID NO: 151140 - DNA, 25 bp, Saccharomyces pastorianus
taaaaggttttgagccgatctccct

SEQ ID NO: 151141 - DNA, 25 bp, Saccharomyces pastorianus
tttgagccgatctccctaagagaca

SEQ ID NO: 151142 - DNA, 25 bp, Saccharomyces pastorianus
tgccatttgtaaaaggttttgagcc

SEQ ID NO: 151143 - DNA, 25 bp, Saccharomyces pastorianus
tccctaagagacacaaacctttttg

SEQ ID NO: 151144 - DNA, 25 bp, Saccharomyces pastorianus
gagacacaaacctttttgaaccaat

SEQ ID NO: 151145 - DNA, 25 bp, Saccharomyces pastorianus
gttttgagccgatctccctaagaga

SEQ ID NO: 151146 - DNA, 25 bp, Saccharomyces pastorianus
ttgagccgatctccctaagagacac

SEQ ID NO: 151147 - DNA, 25 bp, Saccharomyces pastorianus
gatctccctaagagacacaaacctt

SEQ ID NO: 151148 - DNA, 25 bp, Saccharomyces pastorianus
aggttttgagccgatctccctaaga

SEQ ID NO: 151149 - DNA, 25 bp, Saccharomyces pastorianus
gagccgatctccctaagagacacaa

SEQ ID NO: 151150 - DNA, 25 bp, Saccharomyces pastorianus
tgtaaaaggttttgagccgatctcc

SEQ ID NO: 151151 - DNA, 25 bp, Saccharomyces pastorianus
gaacccaaatataacgacaccaccg

SEQ ID NO: 151152 - DNA, 25 bp, Saccharomyces pastorianus
ggcaagcctgaactggaatccaata

SEQ ID NO: 151153 - DNA, 25 bp, Saccharomyces pastorianus
tttgcaactacctccagatgtccag

SEQ ID NO: 151154 - DNA, 25 bp, Saccharomyces pastorianus
gtgtcataatcgcatctgatctgtt

SEQ ID NO: 151155 - DNA, 25 bp, Saccharomyces pastorianus
agagcgtattccacaggcgcttgga

SEQ ID NO: 151156 - DNA, 25 bp, Saccharomyces pastorianus
cagatgtccagtcgcggctaaatcc

SEQ ID NO: 151157 - DNA, 25 bp, Saccharomyces pastorianus
gtcctaccacaggtcgcaagcatga

SEQ ID NO: 151158 - DNA, 25 bp, Saccharomyces pastorianus
ggcgcttggaaaactgcatctattg

SEQ ID NO: 151159 - DNA, 25 bp, Saccharomyces pastorianus
gggttcgttattacgttgcacggat

SEQ ID NO: 151160 - DNA, 25 bp, Saccharomyces pastorianus
tattgcaatagcacagcctccacag

SEQ ID NO: 151161 - DNA, 25 bp, Saccharomyces pastorianus
gcaccccaaggagccatggtcatgg

SEQ ID NO: 151162 - DNA, 25 bp, Saccharomyces pastorianus
ggaaggacctttagttattggatat

SEQ ID NO: 151163 - DNA, 25 bp, Saccharomyces pastorianus
ggctcaacagcagatgcaacaaaat

SEQ ID NO: 151164 - DNA, 25 bp, Saccharomyces pastorianus
tggcagaatgcaaccatgaacgatt

SEQ ID NO: 151165 - DNA, 25 bp, Saccharomyces pastorianus
gattagcgtgaggaactggcagaat

SEQ ID NO: 151166 - DNA, 25 bp, Saccharomyces pastorianus
tatgacgctcatgtggaaggacctt

SEQ ID NO: 151167 - DNA, 25 bp, Saccharomyces pastorianus
atatgtcaactcaaaggcagaagca

SEQ ID NO: 151168 - DNA, 25 bp, Saccharomyces pastorianus
aaggcagaagcagaatcgttaacga

SEQ ID NO: 151169 - DNA, 25 bp, Saccharomyces pastorianus
aacggtgtccggtttgcaggcagta

SEQ ID NO: 151170 - DNA, 25 bp, Saccharomyces pastorianus
ttataagccgcaacgctcgagtagc

SEQ ID NO: 151171 - DNA, 25 bp, Saccharomyces pastorianus
atgagcggatttcacaatgttggaa

SEQ ID NO: 151172 - DNA, 25 bp, Saccharomyces pastorianus
gctcgagtagctgtttatgacgctc

SEQ ID NO: 151173 - DNA, 25 bp, Saccharomyces pastorianus
gtaggaacttctgcaacatgttgta

SEQ ID NO: 151174 - DNA, 25 bp, Saccharomyces pastorianus
gaagcaccacaaccttatcatttct

SEQ ID NO: 151175 - DNA, 25 bp, Saccharomyces pastorianus
aagaccgtgtgcaggacgtgcagtt

SEQ ID NO: 151176 - DNA, 25 bp, Saccharomyces pastorianus
aaattctgatacctcctcttgatag

SEQ ID NO: 151177 - DNA, 25 bp, Saccharomyces pastorianus
gagcgtataccttaccttgttgtta

SEQ ID NO: 151178 - DNA, 25 bp, Saccharomyces pastorianus
gtattttactctcgtgtcaaagcag

SEQ ID NO: 151179 - DNA, 25 bp, Saccharomyces pastorianus
aagggcgagcacaactactacaaaa

SEQ ID NO: 151180 - DNA, 25 bp, Saccharomyces pastorianus
gcaaggacaactgcttcgggaaaga

SEQ ID NO: 151181 - DNA, 25 bp, Saccharomyces pastorianus
gatgcgtatcaccagaagagttctt

SEQ ID NO: 151182 - DNA, 25 bp, Saccharomyces pastorianus
aagaccatagagcagaaccccaata

SEQ ID NO: 151183 - DNA, 25 bp, Saccharomyces pastorianus
acgtgcagttatcgttacacttccg

SEQ ID NO: 151184 - DNA, 25 bp, Saccharomyces pastorianus
gcagatctgtatcgattattccggg

SEQ ID NO: 151185 - DNA, 25 bp, Saccharomyces pastorianus
gggcgaagcctcagacagcagagaa

SEQ ID NO: 151186 - DNA, 25 bp, Saccharomyces pastorianus
tgggtatttccagaagcctcctatt

SEQ ID NO: 151187 - DNA, 25 bp, Saccharomyces pastorianus
ggatcctcagtgcataacataccga

SEQ ID NO: 151188 - DNA, 25 bp, Saccharomyces pastorianus
tagaatgctctccataccgctattg

SEQ ID NO: 151189 - DNA, 25 bp, Saccharomyces pastorianus
ttggccgacagttggttttttgatt

SEQ ID NO: 151190 - DNA, 25 bp, Saccharomyces pastorianus
caaccactcttgtaaccccaatata

SEQ ID NO: 151191 - DNA, 25 bp, Saccharomyces pastorianus
ggataccgcgcatcaacaacatgaa

SEQ ID NO: 151192 - DNA, 25 bp, Saccharomyces pastorianus
aaatttcctgtcttactgcactttc

SEQ ID NO: 151193 - DNA, 25 bp, Saccharomyces pastorianus
aggtaattcaatgctattcactgtg

SEQ ID NO: 151194 - DNA, 25 bp, Saccharomyces pastorianus
aattaccacccacttgcgaagatga

SEQ ID NO: 151195 - DNA, 25 bp, Saccharomyces pastorianus
gatgccataacccattcgaatgcgc

SEQ ID NO: 151196 - DNA, 25 bp, Saccharomyces pastorianus
agttgatcaacatgcttgcgatgag

SEQ ID NO: 151197 - DNA, 25 bp, Saccharomyces pastorianus
attgcccactattagttctagttga

SEQ ID NO: 151198 - DNA, 25 bp, Saccharomyces pastorianus
aatggtcttgctgcaacatgcacat

SEQ ID NO: 151199 - DNA, 25 bp, Saccharomyces pastorianus
gaagtactcaagctgcgttccaacg

SEQ ID NO: 151200 - DNA, 25 bp, Saccharomyces pastorianus
gttgatcgtactgaggctgacttat

SEQ ID NO: 151201 - DNA, 25 bp, Saccharomyces pastorianus
cactgcctgagatgttgacttccaa

SEQ ID NO: 151202 - DNA, 25 bp, Saccharomyces pastorianus
caatggaaacctcacttttggaaat

SEQ ID NO: 151203 - DNA, 25 bp, Saccharomyces pastorianus
taattagcaagctctcgcgatgcca

SEQ ID NO: 151204 - DNA, 25 bp, Saccharomyces pastorianus
ggaacttttgttgcacgagacctca

SEQ ID NO: 151205 - DNA, 25 bp, Saccharomyces pastorianus
gcgttccaacggtctttcatgaaat

SEQ ID NO: 151206 - DNA, 25 bp, Saccharomyces pastorianus
gaaaatttccatccaaaagcgtcat

SEQ ID NO: 151207 - DNA, 25 bp, Saccharomyces pastorianus
ataccatactcccaatagatccttt

SEQ ID NO: 151208 - DNA, 25 bp, Saccharomyces pastorianus
ataatttacctgtccggcgcagaat

SEQ ID NO: 151209 - DNA, 25 bp, Saccharomyces pastorianus
gacttaaatctcaggcatgcacggt

SEQ ID NO: 151210 - DNA, 25 bp, Saccharomyces pastorianus
gcatgcacggtatcgctagcatcag

SEQ ID NO: 151211 - DNA, 25 bp, Saccharomyces pastorianus
ggagacgccctatatagcatttcta

SEQ ID NO: 151212 - DNA, 25 bp, Saccharomyces pastorianus
acgctaccactatcgacgtcatgat

SEQ ID NO: 151213 - DNA, 25 bp, Saccharomyces pastorianus
tgatcgacctccctaatttgagctt

SEQ ID NO: 151214 - DNA, 25 bp, Saccharomyces pastorianus
gtctctaatctgtttgtttgttcca

SEQ ID NO: 151215 - DNA, 25 bp, Saccharomyces pastorianus
tggagccgaacaaagtctggtactg

SEQ ID NO: 151216 - DNA, 25 bp, Saccharomyces pastorianus
attctgtagatgcacacgctaccac

SEQ ID NO: 151217 - DNA, 25 bp, Saccharomyces pastorianus
agctgctgcagttacccaagtggtt

SEQ ID NO: 151218 - DNA, 25 bp, Saccharomyces pastorianus
gtatgttacagttacagctgctgca

SEQ ID NO: 151219 - DNA, 25 bp, Saccharomyces pastorianus
atgattcaaaccacatccgccgatg

SEQ ID NO: 151220 - DNA, 25 bp, Saccharomyces pastorianus
atccgccgatgaacagtactgtagt

SEQ ID NO: 151221 - DNA, 25 bp, Saccharomyces pastorianus
aacagtactgtagtgcgtctaccaa

SEQ ID NO: 151222 - DNA, 25 bp, Saccharomyces pastorianus
tataactgccgatgctagtaatgtt

SEQ ID NO: 151223 - DNA, 25 bp, Saccharomyces pastorianus
tacggcggagcctgttgttaattac

SEQ ID NO: 151224 - DNA, 25 bp, Saccharomyces pastorianus
ttacgttactataactgccgatgct

SEQ ID NO: 151225 - DNA, 25 bp, Saccharomyces pastorianus
tgcgtctaccaagtatgttacagtt

SEQ ID NO: 151226 - DNA, 25 bp, Saccharomyces pastorianus
ggagcctgttgttaattacgttact

SEQ ID NO: 151227 - DNA, 25 bp, Saccharomyces pastorianus
agtggttactactacggcggagcct

SEQ ID NO: 151228 - DNA, 25 bp, Saccharomyces pastorianus
cttcgcttctgccttatatgtcaat

SEQ ID NO: 151229 - DNA, 25 bp, Saccharomyces pastorianus
tacctcccaatcagctgctattatt

SEQ ID NO: 151230 - DNA, 25 bp, Saccharomyces pastorianus
atctactttttactctacctactgg

SEQ ID NO: 151231 - DNA, 25 bp, Saccharomyces pastorianus
cgtacagcgatgaaacaaccacctt

SEQ ID NO: 151232 - DNA, 25 bp, Saccharomyces pastorianus
cacaaatgaatacaccaccacctat

SEQ ID NO: 151233 - DNA, 25 bp, Saccharomyces pastorianus
ctagcctaactacgtccacaaatga

SEQ ID NO: 151234 - DNA, 25 bp, Saccharomyces pastorianus
ttactactggtaacctccaacttcg

SEQ ID NO: 151235 - DNA, 25 bp, Saccharomyces pastorianus
tgaaactacgagctatacaccatac

SEQ ID NO: 151236 - DNA, 25 bp, Saccharomyces pastorianus
caacatactctgtttcacctcaaga

SEQ ID NO: 151237 - DNA, 25 bp, Saccharomyces pastorianus
gcaagtacacctactgcaagcacgc

SEQ ID NO: 151238 - DNA, 25 bp, Saccharomyces pastorianus
accaccttctacataacatctactt

SEQ ID NO: 151239 - DNA, 25 bp, Saccharomyces pastorianus
tgagctactgagacgccaattggaa

SEQ ID NO: 151240 - DNA, 25 bp, Saccharomyces pastorianus
gcgggatagggctttgaaaccactc

SEQ ID NO: 151241 - DNA, 25 bp, Saccharomyces pastorianus
gtagaaatgcttccctttgaggtcg

SEQ ID NO: 151242 - DNA, 25 bp, Saccharomyces pastorianus
agtggtcatactgcaatgtcgctaa

SEQ ID NO: 151243 - DNA, 25 bp, Saccharomyces pastorianus
aaccgttcaaacattggcgagccct

SEQ ID NO: 151244 - DNA, 25 bp, Saccharomyces pastorianus
agcccttaaccaaatcttccaatga

SEQ ID NO: 151245 - DNA, 25 bp, Saccharomyces pastorianus
gtcgctaactgggtgtgacggcact

SEQ ID NO: 151246 - DNA, 25 bp, Saccharomyces pastorianus
agagtgccaaacgactgcgggatag

SEQ ID NO: 151247 - DNA, 25 bp, Saccharomyces pastorianus
ggtgatccgaatttggctctaatga

SEQ ID NO: 151248 - DNA, 25 bp, Saccharomyces pastorianus
aagatcgcaccattgagctactgag

SEQ ID NO: 151249 - DNA, 25 bp, Saccharomyces pastorianus
taaagacattaaagccaccggcaat

SEQ ID NO: 151250 - DNA, 25 bp, Saccharomyces pastorianus
aatcactgtgaccatccggccgaaa

SEQ ID NO: 151251 - DNA, 25 bp, Saccharomyces pastorianus
gagacccctggtttattactaatga

SEQ ID NO: 151252 - DNA, 25 bp, Saccharomyces pastorianus
aattcgggttctcagtcgatttctg

SEQ ID NO: 151253 - DNA, 25 bp, Saccharomyces pastorianus
aggtactctcaaccaagatccaact

SEQ ID NO: 151254 - DNA, 25 bp, Saccharomyces pastorianus
gaggccatcaacgaggtctagttct

SEQ ID NO: 151255 - DNA, 25 bp, Saccharomyces pastorianus
aagatccgtatcagccaaatccgat

SEQ ID NO: 151256 - DNA, 25 bp, Saccharomyces pastorianus
ggagcgttggaacttcccgtgacca

SEQ ID NO: 151257 - DNA, 25 bp, Saccharomyces pastorianus
aatacatttgttagagacccctggt

SEQ ID NO: 151258 - DNA, 25 bp, Saccharomyces pastorianus
atacggagcacctctaattcgggtt

SEQ ID NO: 151259 - DNA, 25 bp, Saccharomyces pastorianus
atccaactcacatcacggtagcaat

SEQ ID NO: 151260 - DNA, 25 bp, Saccharomyces pastorianus
gaagtaactccccactaagatccgt

SEQ ID NO: 151261 - DNA, 25 bp, Saccharomyces pastorianus
ttcggtaagtttatcgcaatcacaa

SEQ ID NO: 151262 - DNA, 25 bp, Saccharomyces pastorianus
gaagccgccagttagcgatacaaat

SEQ ID NO: 151263 - DNA, 25 bp, Saccharomyces pastorianus
taaacgacttggtagagtcaccgat

SEQ ID NO: 151264 - DNA, 25 bp, Saccharomyces pastorianus
gcaataattcggtactaaacgactt

SEQ ID NO: 151265 - DNA, 25 bp, Saccharomyces pastorianus
atgtcggctaagaagccgccagtta

SEQ ID NO: 151266 - DNA, 25 bp, Saccharomyces pastorianus
agagtcaccgattaatgcgaatacg

SEQ ID NO: 151267 - DNA, 25 bp, Saccharomyces pastorianus
tagcgatacaaataataacggcaat

SEQ ID NO: 151268 - DNA, 25 bp, Saccharomyces pastorianus
taataacggcaataattcggtacta

SEQ ID NO: 151269 - DNA, 25 bp, Saccharomyces pastorianus
atacattcggtaagtttatcgcaat

SEQ ID NO: 151270 - DNA, 25 bp, Saccharomyces pastorianus
ggtagagtcaccgattaatgcgaat

SEQ ID NO: 151271 - DNA, 25 bp, Saccharomyces pastorianus
ctaagaagccgccagttagcgatac

SEQ ID NO: 151272 - DNA, 25 bp, Saccharomyces pastorianus
gaaggacatgttcatactacttggg

SEQ ID NO: 151273 - DNA, 25 bp, Saccharomyces pastorianus
ttagcgagtttttgccttgtccgga

SEQ ID NO: 151274 - DNA, 25 bp, Saccharomyces pastorianus
tataaagttaccgagcgctattgcg

SEQ ID NO: 151275 - DNA, 25 bp, Saccharomyces pastorianus
ccgagcgctattgcggctactgaga

SEQ ID NO: 151276 - DNA, 25 bp, Saccharomyces pastorianus
ataaggccaagtcatccgcctcctt

SEQ ID NO: 151277 - DNA, 25 bp, Saccharomyces pastorianus
ttcgctcatcggtacttatattttg

SEQ ID NO: 151278 - DNA, 25 bp, Saccharomyces pastorianus
cttgagatggcattctcctatgcta

SEQ ID NO: 151279 - DNA, 25 bp, Saccharomyces pastorianus
catgcaacatttttactttagcgag

SEQ ID NO: 151280 - DNA, 25 bp, Saccharomyces pastorianus
gaggccacatacatgatgggactga

SEQ ID NO: 151281 - DNA, 25 bp, Saccharomyces pastorianus
ttgccttgtccggatggtgtatctc

SEQ ID NO: 151282 - DNA, 25 bp, Saccharomyces pastorianus
agtccttagtaaattgcccatcatg

SEQ ID NO: 151283 - DNA, 25 bp, Saccharomyces pastorianus
ggtccaggtcatgaatccaactcca

SEQ ID NO: 151284 - DNA, 25 bp, Saccharomyces pastorianus
gatatcactcagaagcacccagtaa

SEQ ID NO: 151285 - DNA, 25 bp, Saccharomyces pastorianus
agatcttacattccgaatttccctc

SEQ ID NO: 151286 - DNA, 25 bp, Saccharomyces pastorianus
gagactattgactccagacgatatg

SEQ ID NO: 151287 - DNA, 25 bp, Saccharomyces pastorianus
ggaagaatccccaacaagagctcat

SEQ ID NO: 151288 - DNA, 25 bp, Saccharomyces pastorianus
tgaatccaactccatgtgtacactt

SEQ ID NO: 151289 - DNA, 25 bp, Saccharomyces pastorianus
cagaagaatcgatcatggtccaggt

SEQ ID NO: 151290 - DNA, 25 bp, Saccharomyces pastorianus
aatttccctctctcacagatgagca

SEQ ID NO: 151291 - DNA, 25 bp, Saccharomyces pastorianus
gacgaagtttcacggaattccagga

SEQ ID NO: 151292 - DNA, 25 bp, Saccharomyces pastorianus
gatgcagatagctcgagatttggta

SEQ ID NO: 151293 - DNA, 25 bp, Saccharomyces pastorianus
agtatgatgaacttgctttcgcaaa

SEQ ID NO: 151294 - DNA, 25 bp, Saccharomyces pastorianus
tattcgctggcggtgacaatggtgt

SEQ ID NO: 151295 - DNA, 25 bp, Saccharomyces pastorianus
agtgtactccagtagaccctcaagt

SEQ ID NO: 151296 - DNA, 25 bp, Saccharomyces pastorianus
gagagctacagcgttgcatcctaag

SEQ ID NO: 151297 - DNA, 25 bp, Saccharomyces pastorianus
catcgactgatgctacggtaaggtt

SEQ ID NO: 151298 - DNA, 25 bp, Saccharomyces pastorianus
cctgttattacactagttgggcata

SEQ ID NO: 151299 - DNA, 25 bp, Saccharomyces pastorianus
tcctaaggagttttcggtggcttct

SEQ ID NO: 151300 - DNA, 25 bp, Saccharomyces pastorianus
gtggcttctgcgtgtactgatgaca

SEQ ID NO: 151301 - DNA, 25 bp, Saccharomyces pastorianus
gcaggccgagatagcgttatcaaac

SEQ ID NO: 151302 - DNA, 25 bp, Saccharomyces pastorianus
aatggtaggctctctggaaggtgaa

SEQ ID NO: 151303 - DNA, 25 bp, Saccharomyces pastorianus
aatggtgtgctttccttttatgatt

SEQ ID NO: 151304 - DNA, 25 bp, Saccharomyces pastorianus
tgttctttgtagcactttcgataaa

SEQ ID NO: 151305 - DNA, 25 bp, Saccharomyces pastorianus
aaagcgaaatggaaggtcagaaatc

SEQ ID NO: 151306 - DNA, 25 bp, Saccharomyces pastorianus
cccacctacaaagcgaaatggaagg

SEQ ID NO: 151307 - DNA, 25 bp, Saccharomyces pastorianus
aatggaaggtcagaaatcattgcta

SEQ ID NO: 151308 - DNA, 25 bp, Saccharomyces pastorianus
aagcgaaatggaaggtcagaaatca

SEQ ID NO: 151309 - DNA, 25 bp, Saccharomyces pastorianus
agcgaaatggaaggtcagaaatcat

SEQ ID NO: 151310 - DNA, 25 bp, Saccharomyces pastorianus
gccccacctacaaagcgaaatggaa

SEQ ID NO: 151311 - DNA, 25 bp, Saccharomyces pastorianus
acaaagcgaaatggaaggtcagaaa

SEQ ID NO: 151312 - DNA, 25 bp, Saccharomyces pastorianus
tacaaagcgaaatggaaggtcagaa

SEQ ID NO: 151313 - DNA, 25 bp, Saccharomyces pastorianus
ctacaaagcgaaatggaaggtcaga

SEQ ID NO: 151314 - DNA, 25 bp, Saccharomyces pastorianus
cgccccacctacaaagcgaaatgga

SEQ ID NO: 151315 - DNA, 25 bp, Saccharomyces pastorianus
ccccacctacaaagcgaaatggaag

SEQ ID NO: 151316 - DNA, 25 bp, Saccharomyces pastorianus
aacttacctagatgccattgccgat

SEQ ID NO: 151317 - DNA, 25 bp, Saccharomyces pastorianus
gacatggaagactatctgttcaatc

SEQ ID NO: 151318 - DNA, 25 bp, Saccharomyces pastorianus
agaggcgttggcttaacttacctag

SEQ ID NO: 151319 - DNA, 25 bp, Saccharomyces pastorianus
tacagattcaatttcatttccatat

SEQ ID NO: 151320 - DNA, 25 bp, Saccharomyces pastorianus
aattatataccccatgtcctcggat

SEQ ID NO: 151321 - DNA, 25 bp, Saccharomyces pastorianus
atgtcctcggatgaattctttgata

SEQ ID NO: 151322 - DNA, 25 bp, Saccharomyces pastorianus
gattattgtcgattccttcagaaaa

SEQ ID NO: 151323 - DNA, 25 bp, Saccharomyces pastorianus
gcaattacaggcagttggtaccgat

SEQ ID NO: 151324 - DNA, 25 bp, Saccharomyces pastorianus
tttccatatcacaaagacccacatt

SEQ ID NO: 151325 - DNA, 25 bp, Saccharomyces pastorianus
aatcacgtcgattgacaacgagatt

SEQ ID NO: 151326 - DNA, 25 bp, Saccharomyces pastorianus
ggtaccgatgaagcaatcacgtcga

SEQ ID NO: 151327 - DNA, 25 bp, Saccharomyces pastorianus
aatttgccagccaagaccttcggtg

SEQ ID NO: 151328 - DNA, 25 bp, Saccharomyces pastorianus
ttagagccaccttcagaaacaattt

SEQ ID NO: 151329 - DNA, 25 bp, Saccharomyces pastorianus
gccaccttcagaaacaatttgccag

SEQ ID NO: 151330 - DNA, 25 bp, Saccharomyces pastorianus
ttaccagaactcacggtaactctgg

SEQ ID NO: 151331 - DNA, 25 bp, Saccharomyces pastorianus
gttagagccaccttcagaaacaatt

SEQ ID NO: 151332 - DNA, 25 bp, Saccharomyces pastorianus
caccttcagaaacaatttgccagcc

SEQ ID NO: 151333 - DNA, 25 bp, Saccharomyces pastorianus
agccaccttcagaaacaatttgcca

SEQ ID NO: 151334 - DNA, 25 bp, Saccharomyces pastorianus
cgttagagccaccttcagaaacaat

SEQ ID NO: 151335 - DNA, 25 bp, Saccharomyces pastorianus
tgtggggtaaggttaccagaactca

SEQ ID NO: 151336 - DNA, 25 bp, Saccharomyces pastorianus
agagccaccttcagaaacaatttgc

SEQ ID NO: 151337 - DNA, 25 bp, Saccharomyces pastorianus
gtaactctggtgtcgttagagccac

SEQ ID NO: 151338 - DNA, 25 bp, Saccharomyces pastorianus
agaactagacatatcctggagcaag

SEQ ID NO: 151339 - DNA, 25 bp, Saccharomyces pastorianus
tggaacgtcattttatatggcccca

SEQ ID NO: 151340 - DNA, 25 bp, Saccharomyces pastorianus
tggtccttaggattaactcttctgg

SEQ ID NO: 151341 - DNA, 25 bp, Saccharomyces pastorianus
gggaggctgttaactctttagcgat

SEQ ID NO: 151342 - DNA, 25 bp, Saccharomyces pastorianus
gaggccttctcccaggcaaatgtta

SEQ ID NO: 151343 - DNA, 25 bp, Saccharomyces pastorianus
aacgcaaaacgtggctcctatagaa

SEQ ID NO: 151344 - DNA, 25 bp, Saccharomyces pastorianus
acgttttctccccagttgaaagatg

SEQ ID NO: 151345 - DNA, 25 bp, Saccharomyces pastorianus
tgacgatgatcctgacgttttctcc

SEQ ID NO: 151346 - DNA, 25 bp, Saccharomyces pastorianus
caaattatgcgatttcggtgtcagt

SEQ ID NO: 151347 - DNA, 25 bp, Saccharomyces pastorianus
gaatacaaggccaaccatacagcgt

SEQ ID NO: 151348 - DNA, 25 bp, Saccharomyces pastorianus
gcgtaacctgtgatgtatggtcctt

SEQ ID NO: 151349 - DNA, 25 bp, Saccharomyces pastorianus
acgacttcagcagtagcgggagcaa

SEQ ID NO: 151350 - DNA, 25 bp, Saccharomyces pastorianus
ctactatctagtgctccaatttcca

SEQ ID NO: 151351 - DNA, 25 bp, Saccharomyces pastorianus
aatagcacttcagctacttccacta

SEQ ID NO: 151352 - DNA, 25 bp, Saccharomyces pastorianus
actacgtcatccatggcttcaaatt

SEQ ID NO: 151353 - DNA, 25 bp, Saccharomyces pastorianus
tgaacgaaagcccatactccaacaa

SEQ ID NO: 151354 - DNA, 25 bp, Saccharomyces pastorianus
gaaggcgaggattcatacccctcga

SEQ ID NO: 151355 - DNA, 25 bp, Saccharomyces pastorianus
aaatagaccggtaccacctccattg

SEQ ID NO: 151356 - DNA, 25 bp, Saccharomyces pastorianus
aaagatctcgacacaccagaaggcg

SEQ ID NO: 151357 - DNA, 25 bp, Saccharomyces pastorianus
agagttgccggcgatagtcagcttt

SEQ ID NO: 151358 - DNA, 25 bp, Saccharomyces pastorianus
gacacttctttctgcgtacgacttc

SEQ ID NO: 151359 - DNA, 25 bp, Saccharomyces pastorianus
ggtggttctgtagccaagtgccgat

SEQ ID NO: 151360 - DNA, 25 bp, Saccharomyces pastorianus
ggacaactggatttcattgataaca

SEQ ID NO: 151361 - DNA, 25 bp, Saccharomyces pastorianus
ggctattgttctacatacgagcgaa

SEQ ID NO: 151362 - DNA, 25 bp, Saccharomyces pastorianus
gcgaataccctgctctgtggaagaa

SEQ ID NO: 151363 - DNA, 25 bp, Saccharomyces pastorianus
aaggttgcaacatctgatacaggcc

SEQ ID NO: 151364 - DNA, 25 bp, Saccharomyces pastorianus
gttcaagagatatcgctaccattat

SEQ ID NO: 151365 - DNA, 25 bp, Saccharomyces pastorianus
taccgaaatgcgcaagctggacgat

SEQ ID NO: 151366 - DNA, 25 bp, Saccharomyces pastorianus
gaggaagccaccaaaatacatgagg

SEQ ID NO: 151367 - DNA, 25 bp, Saccharomyces pastorianus
tcaggaacaatacctccagcagatt

SEQ ID NO: 151368 - DNA, 25 bp, Saccharomyces pastorianus
gctggacgatgatgctgcaagccat

SEQ ID NO: 151369 - DNA, 25 bp, Saccharomyces pastorianus
ctccagcagattgactctttagaat

SEQ ID NO: 151370 - DNA, 25 bp, Saccharomyces pastorianus
attgggtgtctactaatcaggaaca

SEQ ID NO: 151371 - DNA, 25 bp, Saccharomyces pastorianus
aaggcagacaccttttgcatcaggt

SEQ ID NO: 151372 - DNA, 25 bp, Saccharomyces pastorianus
ggatccgtagaaacattgcctgccg

SEQ ID NO: 151373 - DNA, 25 bp, Saccharomyces pastorianus
agctggtaagtcaacttcgtctcct

SEQ ID NO: 151374 - DNA, 25 bp, Saccharomyces pastorianus
aattccatccggtgctgtcttaaga

SEQ ID NO: 151375 - DNA, 25 bp, Saccharomyces pastorianus
atagcgcttcgacatttacaccagg

SEQ ID NO: 151376 - DNA, 25 bp, Saccharomyces pastorianus
gaagtcaaagtcactgctacctatg

SEQ ID NO: 151377 - DNA, 25 bp, Saccharomyces pastorianus
gtctccttcagtttcaacttctaac

SEQ ID NO: 151378 - DNA, 25 bp, Saccharomyces pastorianus
gggtttcttcgttcagcagcagagg

SEQ ID NO: 151379 - DNA, 25 bp, Saccharomyces pastorianus
ttacaccaggcgtggattccgatgt

SEQ ID NO: 151380 - DNA, 25 bp, Saccharomyces pastorianus
gcagcagaggtctttataccctgaa

SEQ ID NO: 151381 - DNA, 25 bp, Saccharomyces pastorianus
gtatctgcgcccaataccgataaag

SEQ ID NO: 151382 - DNA, 25 bp, Saccharomyces pastorianus
tttgcacgtttactgacatcctttg

SEQ ID NO: 151383 - DNA, 25 bp, Saccharomyces pastorianus
aatgctttcctgacattttacccta

SEQ ID NO: 151384 - DNA, 25 bp, Saccharomyces pastorianus
ttagcaggtgccactacttccaata

SEQ ID NO: 151385 - DNA, 25 bp, Saccharomyces pastorianus
gtatttaccaagatttccgaacctg

SEQ ID NO: 151386 - DNA, 25 bp, Saccharomyces pastorianus
aatcgggcatcaggcttggtttagc

SEQ ID NO: 151387 - DNA, 25 bp, Saccharomyces pastorianus
cagattctcccgttcaacaaactaa

SEQ ID NO: 151388 - DNA, 25 bp, Saccharomyces pastorianus
ggttggtaaactatctgctctatca

SEQ ID NO: 151389 - DNA, 25 bp, Saccharomyces pastorianus
aagtgcaaatcgctctcgcatgtgt

SEQ ID NO: 151390 - DNA, 25 bp, Saccharomyces pastorianus
agcgtttaatgatctgtccactatg

SEQ ID NO: 151391 - DNA, 25 bp, Saccharomyces pastorianus
aaaattccttactcgtgctttgcac

SEQ ID NO: 151392 - DNA, 25 bp, Saccharomyces pastorianus
tgtctcaatataacgtccagggtgt

SEQ ID NO: 151393 - DNA, 25 bp, Saccharomyces pastorianus
aggtattaccatcgttcctcttcaa

SEQ ID NO: 151394 - DNA, 25 bp, Saccharomyces pastorianus
ttcctcttcaaatctggtttctcag

SEQ ID NO: 151395 - DNA, 25 bp, Saccharomyces pastorianus
gtagaaggcctcgatggcttcgtat

SEQ ID NO: 151396 - DNA, 25 bp, Saccharomyces pastorianus
tggcttcgtatttgtcttccgtcta

SEQ ID NO: 151397 - DNA, 25 bp, Saccharomyces pastorianus
gtctactcttacctttatacaacca

SEQ ID NO: 151398 - DNA, 25 bp, Saccharomyces pastorianus
ttggatacagatgacgacctcgcac

SEQ ID NO: 151399 - DNA, 25 bp, Saccharomyces pastorianus
gaatcgcttcggttaccgctattaa

SEQ ID NO: 151400 - DNA, 25 bp, Saccharomyces pastorianus
agacctgttaccactcgtgctattg

SEQ ID NO: 151401 - DNA, 25 bp, Saccharomyces pastorianus
ggcttatcattgctagacctgttac

SEQ ID NO: 151402 - DNA, 25 bp, Saccharomyces pastorianus
gtgctattgtctccgtttttcgaag

SEQ ID NO: 151403 - DNA, 25 bp, Saccharomyces pastorianus
gtagcggtatgttatcagtgtctga

SEQ ID NO: 151404 - DNA, 25 bp, Saccharomyces pastorianus
tgagttttcatccatcgcatcttta

SEQ ID NO: 151405 - DNA, 25 bp, Saccharomyces pastorianus
gcaatcaattgcattccatccttta

SEQ ID NO: 151406 - DNA, 25 bp, Saccharomyces pastorianus
aaaatgcacgcatgccggaatcaat

SEQ ID NO: 151407 - DNA, 25 bp, Saccharomyces pastorianus
ggatcagacgtatgattccgttgta

SEQ ID NO: 151408 - DNA, 25 bp, Saccharomyces pastorianus
taaacaagcttttaaccggatggat

SEQ ID NO: 151409 - DNA, 25 bp, Saccharomyces pastorianus
tccatcctttaactgccgaacaatt

SEQ ID NO: 151410 - DNA, 25 bp, Saccharomyces pastorianus
aatcatcgctagaatatcctacgtg

SEQ ID NO: 151411 - DNA, 25 bp, Saccharomyces pastorianus
gactggtttagttcctattttgact

SEQ ID NO: 151412 - DNA, 25 bp, Saccharomyces pastorianus
gacaatctaccaacttctaacgaaa

SEQ ID NO: 151413 - DNA, 25 bp, Saccharomyces pastorianus
atcctacgtgaatccagacgcctta

SEQ ID NO: 151414 - DNA, 25 bp, Saccharomyces pastorianus
agacgccttaatgacttttttagct

SEQ ID NO: 151415 - DNA, 25 bp, Saccharomyces pastorianus
gaagatcgatcgtcacaaatccata

SEQ ID NO: 151416 - DNA, 25 bp, Saccharomyces pastorianus
gaccaaggcactgtcattgataatc

SEQ ID NO: 151417 - DNA, 25 bp, Saccharomyces pastorianus
tgggtttccgaccaacaagacgtat

SEQ ID NO: 151418 - DNA, 25 bp, Saccharomyces pastorianus
aaaaattttgcctctctcgaacact

SEQ ID NO: 151419 - DNA, 25 bp, Saccharomyces pastorianus
accattttccagctacgggatgcca

SEQ ID NO: 151420 - DNA, 25 bp, Saccharomyces pastorianus
gtctcccacaggtcaatcagacgat

SEQ ID NO: 151421 - DNA, 25 bp, Saccharomyces pastorianus
gaaggactagctcaccagtaagaac

SEQ ID NO: 151422 - DNA, 25 bp, Saccharomyces pastorianus
gccattacatagattgtctcccaca

SEQ ID NO: 151423 - DNA, 25 bp, Saccharomyces pastorianus
gaacgaatcgtatatgaccaaggca

SEQ ID NO: 151424 - DNA, 25 bp, Saccharomyces pastorianus
taggaaagtgacgagcccgctagat

SEQ ID NO: 151425 - DNA, 25 bp, Saccharomyces pastorianus
gatatgccctatcgaagaagtagcg

SEQ ID NO: 151426 - DNA, 25 bp, Saccharomyces pastorianus
caaatgaatgaacagctgaaagagt

SEQ ID NO: 151427 - DNA, 25 bp, Saccharomyces pastorianus
aataaggtgctgcatgatagcgaag

SEQ ID NO: 151428 - DNA, 25 bp, Saccharomyces pastorianus
aatggctgaactatgcactaggtta

SEQ ID NO: 151429 - DNA, 25 bp, Saccharomyces pastorianus
aaattgaataaggtgctgcatgata

SEQ ID NO: 151430 - DNA, 25 bp, Saccharomyces pastorianus
ggaatggctgaactatgcactaggt

SEQ ID NO: 151431 - DNA, 25 bp, Saccharomyces pastorianus
ttttggaatggctgaactatgcact

SEQ ID NO: 151432 - DNA, 25 bp, Saccharomyces pastorianus
cgaagggaaagattttggaatggct

SEQ ID NO: 151433 - DNA, 25 bp, Saccharomyces pastorianus
ctgcatgatagcgaagggaaagatt

SEQ ID NO: 151434 - DNA, 25 bp, Saccharomyces pastorianus
aaaatagcggagctggaaaaattga

SEQ ID NO: 151435 - DNA, 25 bp, Saccharomyces pastorianus
ataaacaagagtgggagagtcaaat

SEQ ID NO: 151436 - DNA, 25 bp, Saccharomyces pastorianus
aatgaacagctgaaagagttggaaa

SEQ ID NO: 151437 - DNA, 25 bp, Saccharomyces pastorianus
ggacttgaagaagcctacgaaccag

SEQ ID NO: 151438 - DNA, 25 bp, Saccharomyces pastorianus
gaaaataatcacttacagcaggctt

SEQ ID NO: 151439 - DNA, 25 bp, Saccharomyces pastorianus
ggctagacaaggacaaaactttggt

SEQ ID NO: 151440 - DNA, 25 bp, Saccharomyces pastorianus
tacttgcatcaaccattcttataca

SEQ ID NO: 151441 - DNA, 25 bp, Saccharomyces pastorianus
gacactaataactatcgggtcggta

SEQ ID NO: 151442 - DNA, 25 bp, Saccharomyces pastorianus
tacgaaccagaaggaaattgcgata

SEQ ID NO: 151443 - DNA, 25 bp, Saccharomyces pastorianus
gagatggaactgtcttttattttaa

SEQ ID NO: 151444 - DNA, 25 bp, Saccharomyces pastorianus
attctcagcgaaaacaagatcattg

SEQ ID NO: 151445 - DNA, 25 bp, Saccharomyces pastorianus
gaaacaacttactcttctcaggcaa

SEQ ID NO: 151446 - DNA, 25 bp, Saccharomyces pastorianus
agcaggcttgtaaaattctcagcga

SEQ ID NO: 151447 - DNA, 25 bp, Saccharomyces pastorianus
acaatcaggaagagtggctagacaa

SEQ ID NO: 151448 - DNA, 25 bp, Saccharomyces pastorianus
gacatcgatgactacgttcacagaa

SEQ ID NO: 151449 - DNA, 25 bp, Saccharomyces pastorianus
taattatgatttgccctccgacatc

SEQ ID NO: 151450 - DNA, 25 bp, Saccharomyces pastorianus
gcgaatcaagaagttcccacgtttt

SEQ ID NO: 151451 - DNA, 25 bp, Saccharomyces pastorianus
atatcctggtcgcaacagctgtagc

SEQ ID NO: 151452 - DNA, 25 bp, Saccharomyces pastorianus
gcgtggctacttcattcttcaatag

SEQ ID NO: 151453 - DNA, 25 bp, Saccharomyces pastorianus
agaacaggccgtgctggtaacacag

SEQ ID NO: 151454 - DNA, 25 bp, Saccharomyces pastorianus
acatggtgaccgcacacaggctgaa

SEQ ID NO: 151455 - DNA, 25 bp, Saccharomyces pastorianus
gtaaacatggtggaagcggctcatt

SEQ ID NO: 151456 - DNA, 25 bp, Saccharomyces pastorianus
gaatggcggatcaactcacagattt

SEQ ID NO: 151457 - DNA, 25 bp, Saccharomyces pastorianus
gctaacgtagctgatatcctggtcg

SEQ ID NO: 151458 - DNA, 25 bp, Saccharomyces pastorianus
gaacgtgccttatctgctttcaaag

SEQ ID NO: 151459 - DNA, 25 bp, Saccharomyces pastorianus
aaattagaagccgaactgtttggtg

SEQ ID NO: 151460 - DNA, 25 bp, Saccharomyces pastorianus
aagccgaactgtttggtgtacacga

SEQ ID NO: 151461 - DNA, 25 bp, Saccharomyces pastorianus
ccattcatctggtataaagtttgat

SEQ ID NO: 151462 - DNA, 25 bp, Saccharomyces pastorianus
atggcaagcatataccggggcctaa

SEQ ID NO: 151463 - DNA, 25 bp, Saccharomyces pastorianus
aactgtttggtgtacacgaggatcc

SEQ ID NO: 151464 - DNA, 25 bp, Saccharomyces pastorianus
cgcgaaattagaagccgaactgttt

SEQ ID NO: 151465 - DNA, 25 bp, Saccharomyces pastorianus
agaagccgaactgtttggtgtacac

SEQ ID NO: 151466 - DNA, 25 bp, Saccharomyces pastorianus
agatgggtaaatggcaagcatatac

SEQ ID NO: 151467 - DNA, 25 bp, Saccharomyces pastorianus
taagaacgcgaaattagaagccgaa

SEQ ID NO: 151468 - DNA, 25 bp, Saccharomyces pastorianus
gccgaactgtttggtgtacacgagg

SEQ ID NO: 151469 - DNA, 25 bp, Saccharomyces pastorianus
gtttggtgtacacgaggatcccgat

SEQ ID NO: 151470 - DNA, 25 bp, Saccharomyces pastorianus
ccattcatctggtataaagtttgat

SEQ ID NO: 151471 - DNA, 25 bp, Saccharomyces pastorianus
gtacacgaggatcccgattaccatt

SEQ ID NO: 151472 - DNA, 25 bp, Saccharomyces pastorianus
atggcaagcatataccggggcctaa

SEQ ID NO: 151473 - DNA, 25 bp, Saccharomyces pastorianus
aactgtttggtgtacacgaggatcc

SEQ ID NO: 151474 - DNA, 25 bp, Saccharomyces pastorianus
cgcgaaattagaagccgaactgttt

SEQ ID NO: 151475 - DNA, 25 bp, Saccharomyces pastorianus
agaagccgaactgtttggtgtacac

SEQ ID NO: 151476 - DNA, 25 bp, Saccharomyces pastorianus
agatgggtaaatggcaagcatatac

SEQ ID NO: 151477 - DNA, 25 bp, Saccharomyces pastorianus
taagaacgcgaaattagaagccgaa

SEQ ID NO: 151478 - DNA, 25 bp, Saccharomyces pastorianus
gtttggtgtacacgaggatcccgat

SEQ ID NO: 151479 - DNA, 25 bp, Saccharomyces pastorianus
aggatcccgattaccattcatctgg

SEQ ID NO: 151480 - DNA, 25 bp, Saccharomyces pastorianus
agccgaactgtttggtgtacacgag

SEQ ID NO: 151481 - DNA, 25 bp, Saccharomyces pastorianus
atcgcataagacagcctcaaaacgc

SEQ ID NO: 151482 - DNA, 25 bp, Saccharomyces pastorianus
aagacagcctcaaaacgcaaataca

SEQ ID NO: 151483 - DNA, 25 bp, Saccharomyces pastorianus
gcataagacagcctcaaaacgcaaa

SEQ ID NO: 151484 - DNA, 25 bp, Saccharomyces pastorianus
acaccaacttatgacgatagtgata

SEQ ID NO: 151485 - DNA, 25 bp, Saccharomyces pastorianus
cctcaaaacgcaaatacaccaactt

SEQ ID NO: 151486 - DNA, 25 bp, Saccharomyces pastorianus
accgcatcgcataagacagcctcaa

SEQ ID NO: 151487 - DNA, 25 bp, Saccharomyces pastorianus
aattccctccaatacgaaaccgcat

SEQ ID NO: 151488 - DNA, 25 bp, Saccharomyces pastorianus
ataagacagcctcaaaacgcaaata

SEQ ID NO: 151489 - DNA, 25 bp, Saccharomyces pastorianus
gacagcctcaaaacgcaaatacacc

SEQ ID NO: 151490 - DNA, 25 bp, Saccharomyces pastorianus
gcatcgcataagacagcctcaaaac

SEQ ID NO: 151491 - DNA, 25 bp, Saccharomyces pastorianus
ccgcatcgcataagacagcctcaaa

SEQ ID NO: 151492 - DNA, 25 bp, Saccharomyces pastorianus
ttaacgttgggagaggcacatgcat

SEQ ID NO: 151493 - DNA, 25 bp, Saccharomyces pastorianus
gcaagagttacttcgcagatgggat

SEQ ID NO: 151494 - DNA, 25 bp, Saccharomyces pastorianus
gatttgatcattttggccttgccca

SEQ ID NO: 151495 - DNA, 25 bp, Saccharomyces pastorianus
agcacagttgccgacatggtcataa

SEQ ID NO: 151496 - DNA, 25 bp, Saccharomyces pastorianus
acaacgctaagtaccattctgatct

SEQ ID NO: 151497 - DNA, 25 bp, Saccharomyces pastorianus
caagctgtggtctcgatgtgtttaa

SEQ ID NO: 151498 - DNA, 25 bp, Saccharomyces pastorianus
gatgtgctactagacgctcttgaat

SEQ ID NO: 151499 - DNA, 25 bp, Saccharomyces pastorianus
gggatgttacagctttgccacatat

SEQ ID NO: 151500 - DNA, 25 bp, Saccharomyces pastorianus
taaagcagacactcatcacactcga

SEQ ID NO: 151501 - DNA, 25 bp, Saccharomyces pastorianus
cagtacggcctctacaaacaatatt

SEQ ID NO: 151502 - DNA, 25 bp, Saccharomyces pastorianus
ggtcccgtccaaaagagtctacttg

SEQ ID NO: 151503 - DNA, 25 bp, Saccharomyces pastorianus
aaatacggcatcaacgctgtcattg

SEQ ID NO: 151504 - DNA, 25 bp, Saccharomyces pastorianus
gatctggctattcatgatatccatg

SEQ ID NO: 151505 - DNA, 25 bp, Saccharomyces pastorianus
catctctgcaggttgcgccattgca

SEQ ID NO: 151506 - DNA, 25 bp, Saccharomyces pastorianus
tgaatgtaaccctgatctggctatt

SEQ ID NO: 151507 - DNA, 25 bp, Saccharomyces pastorianus
atcgctctagacgttgttgaatgta

SEQ ID NO: 151508 - DNA, 25 bp, Saccharomyces pastorianus
aaggtcccattatgtgctcctatga

SEQ ID NO: 151509 - DNA, 25 bp, Saccharomyces pastorianus
agacccattatacattcctgctaca

SEQ ID NO: 151510 - DNA, 25 bp, Saccharomyces pastorianus
atgtttcaaacaccatctctgcagg

SEQ ID NO: 151511 - DNA, 25 bp, Saccharomyces pastorianus
atgaaagccgtgcacccagaaacaa

SEQ ID NO: 151512 - DNA, 25 bp, Saccharomyces pastorianus
gaaagattggccgaatccggtaatt

SEQ ID NO: 151513 - DNA, 25 bp, Saccharomyces pastorianus
gaatccggtaatttaatcgctctag

SEQ ID NO: 151514 - DNA, 25 bp, Saccharomyces pastorianus
gaacagattccccttgaccttgggt

SEQ ID NO: 151515 - DNA, 25 bp, Saccharomyces pastorianus
gtcccgtgtcattcctaatgggttt

SEQ ID NO: 151516 - DNA, 25 bp, Saccharomyces pastorianus
gttggtgtacaactccgtgtcgaaa

SEQ ID NO: 151517 - DNA, 25 bp, Saccharomyces pastorianus
aagcttggtgtcgagaagggcccta

SEQ ID NO: 151518 - DNA, 25 bp, Saccharomyces pastorianus
gttttggacaaataccccgatgctg

SEQ ID NO: 151519 - DNA, 25 bp, Saccharomyces pastorianus
atagccattggtactgtatccgcgg

SEQ ID NO: 151520 - DNA, 25 bp, Saccharomyces pastorianus
ggatttgggctggtctacggaatta

SEQ ID NO: 151521 - DNA, 25 bp, Saccharomyces pastorianus
tggatagacgcccacgctgatataa

SEQ ID NO: 151522 - DNA, 25 bp, Saccharomyces pastorianus
tgaacaaggatgtcccacactgtcc

SEQ ID NO: 151523 - DNA, 25 bp, Saccharomyces pastorianus
ccccgatgctggtcttttatggata

SEQ ID NO: 151524 - DNA, 25 bp, Saccharomyces pastorianus
aatcgcgaattgtccatcgttctgg

SEQ ID NO: 151525 - DNA, 25 bp, Saccharomyces pastorianus
catccggatatttgcatcatgcttt

SEQ ID NO: 151526 - DNA, 25 bp, Saccharomyces pastorianus
ggtgtagatgccgtgatcgtcgata

SEQ ID NO: 151527 - DNA, 25 bp, Saccharomyces pastorianus
attcaagaaaatccctgccaacgtt

SEQ ID NO: 151528 - DNA, 25 bp, Saccharomyces pastorianus
ggttattccgatcttgttcctgacg

SEQ ID NO: 151529 - DNA, 25 bp, Saccharomyces pastorianus
aatgggctggtatgtgtcacttacg

SEQ ID NO: 151530 - DNA, 25 bp, Saccharomyces pastorianus
gaaccattgggttgacaccgtgtta

SEQ ID NO: 151531 - DNA, 25 bp, Saccharomyces pastorianus
ggccgatttgagagcctcatcgtta

SEQ ID NO: 151532 - DNA, 25 bp, Saccharomyces pastorianus
attttttcgtcatttcatccggata

SEQ ID NO: 151533 - DNA, 25 bp, Saccharomyces pastorianus
ggattgtatctgctgcagcacccat

SEQ ID NO: 151534 - DNA, 25 bp, Saccharomyces pastorianus
aatgatcccgaaaatgccagtatac

SEQ ID NO: 151535 - DNA, 25 bp, Saccharomyces pastorianus
gtaagtttcccatgcttgatgaggc

SEQ ID NO: 151536 - DNA, 25 bp, Saccharomyces pastorianus
agtagacttcaaagtgccttccaaa

SEQ ID NO: 151537 - DNA, 25 bp, Saccharomyces pastorianus
aactggccggaccaataaagtcata

SEQ ID NO: 151538 - DNA, 25 bp, Saccharomyces pastorianus
taagcccggaagcactagcaaaagt

SEQ ID NO: 151539 - DNA, 25 bp, Saccharomyces pastorianus
agcccttcaatttcattaagcccgg

SEQ ID NO: 151540 - DNA, 25 bp, Saccharomyces pastorianus
gcatccccattcacagttgaacagt

SEQ ID NO: 151541 - DNA, 25 bp, Saccharomyces pastorianus
gaaaaactttttggctggacagcta

SEQ ID NO: 151542 - DNA, 25 bp, Saccharomyces pastorianus
gacagctatcttcgttgcagcagca

SEQ ID NO: 151543 - DNA, 25 bp, Saccharomyces pastorianus
aagctcttgatagccaacaacgcga

SEQ ID NO: 151544 - DNA, 25 bp, Saccharomyces pastorianus
tattgcgcggtcatttgcacattgc

SEQ ID NO: 151545 - DNA, 25 bp, Saccharomyces pastorianus
tcagagacgaactggtcacgcatcc

SEQ ID NO: 151546 - DNA, 25 bp, Saccharomyces pastorianus
gcagcagcagaagggtttacggaca

SEQ ID NO: 151547 - DNA, 25 bp, Saccharomyces pastorianus
tacactccccaaatttgttttatcg

SEQ ID NO: 151548 - DNA, 25 bp, Saccharomyces pastorianus
aaagtcagtgatcccttcgttgacg

SEQ ID NO: 151549 - DNA, 25 bp, Saccharomyces pastorianus
tatcctccgaacttgaatcgtacag

SEQ ID NO: 151550 - DNA, 25 bp, Saccharomyces pastorianus
gcattggcccgatttgatggttata

SEQ ID NO: 151551 - DNA, 25 bp, Saccharomyces pastorianus
gcacaaacattatatcctccgaact

SEQ ID NO: 151552 - DNA, 25 bp, Saccharomyces pastorianus
ggaggaccaagatcaggactttgtt

SEQ ID NO: 151553 - DNA, 25 bp, Saccharomyces pastorianus
accatttctccccttgtcaaatagg

SEQ ID NO: 151554 - DNA, 25 bp, Saccharomyces pastorianus
gttcatgctgatttgcatccaggca

SEQ ID NO: 151555 - DNA, 25 bp, Saccharomyces pastorianus
atagctctattcaacgcattggccc

SEQ ID NO: 151556 - DNA, 25 bp, Saccharomyces pastorianus
tcgttgacgcgtttctacaaatgct

SEQ ID NO: 151557 - DNA, 25 bp, Saccharomyces pastorianus
gaataacgcacgacctgaggaagaa

SEQ ID NO: 151558 - DNA, 25 bp, Saccharomyces pastorianus
catcccaaatggctgctatggctga

SEQ ID NO: 151559 - DNA, 25 bp, Saccharomyces pastorianus
gaaggtttcgactccatcaaagcta

SEQ ID NO: 151560 - DNA, 25 bp, Saccharomyces pastorianus
gagtacatctacacattacgtggta

SEQ ID NO: 151561 - DNA, 25 bp, Saccharomyces pastorianus
tttgcttccgatgctgaaaagacga

SEQ ID NO: 151562 - DNA, 25 bp, Saccharomyces pastorianus
gacccctctgtttacacacaattga

SEQ ID NO: 151563 - DNA, 25 bp, Saccharomyces pastorianus
aagagtatgctccatttgcttccga

SEQ ID NO: 151564 - DNA, 25 bp, Saccharomyces pastorianus
atgacttaaccatcgttgcacacac

SEQ ID NO: 151565 - DNA, 25 bp, Saccharomyces pastorianus
gatctaagcaagaagcatcccaaat

SEQ ID NO: 151566 - DNA, 25 bp, Saccharomyces pastorianus
gaagaacctattccattaccagaag

SEQ ID NO: 151567 - DNA, 25 bp, Saccharomyces pastorianus
cttgctcaagataagctagttgctg

SEQ ID NO: 151568 - DNA, 25 bp, Saccharomyces pastorianus
attggcttctctaggtaacattatt

SEQ ID NO: 151569 - DNA, 25 bp, Saccharomyces pastorianus
gatgtttcctctcaattatctcgtg

SEQ ID NO: 151570 - DNA, 25 bp, Saccharomyces pastorianus
aagggtgccgcctttatttgcgcca

SEQ ID NO: 151571 - DNA, 25 bp, Saccharomyces pastorianus
gtactactcgtatcccaacattgaa

SEQ ID NO: 151572 - DNA, 25 bp, Saccharomyces pastorianus
tactaatgccccattctctgttgaa

SEQ ID NO: 151573 - DNA, 25 bp, Saccharomyces pastorianus
ataacagaacatttcgccgatgagt

SEQ ID NO: 151574 - DNA, 25 bp, Saccharomyces pastorianus
gaagccttcggcaagccattgtcca

SEQ ID NO: 151575 - DNA, 25 bp, Saccharomyces pastorianus
tgtctgctaatactaatgccccatt

SEQ ID NO: 151576 - DNA, 25 bp, Saccharomyces pastorianus
gaacgacgttgatgtttcctctcaa

SEQ ID NO: 151577 - DNA, 25 bp, Saccharomyces pastorianus
gaaagtcttaggaactgcctgcgac

SEQ ID NO: 151578 - DNA, 25 bp, Saccharomyces pastorianus
aactgcctgcgacaagcattttggt

SEQ ID NO: 151579 - DNA, 25 bp, Saccharomyces pastorianus
agatgaagccatcgccaagggtgcc

SEQ ID NO: 151580 - DNA, 25 bp, Saccharomyces pastorianus
ttcttctaagagcacaacccacatg

SEQ ID NO: 151581 - DNA, 25 bp, Saccharomyces pastorianus
ggtgttcagcccgataatgttttag

SEQ ID NO: 151582 - DNA, 25 bp, Saccharomyces pastorianus
gataccatatattcctacagttcaa

SEQ ID NO: 151583 - DNA, 25 bp, Saccharomyces pastorianus
ttttgagatggtgccgatcccaatt

SEQ ID NO: 151584 - DNA, 25 bp, Saccharomyces pastorianus
agtttggacacactgcgttcttctg

SEQ ID NO: 151585 - DNA, 25 bp, Saccharomyces pastorianus
ggagatttgccactgatttcatcaa

SEQ ID NO: 151586 - DNA, 25 bp, Saccharomyces pastorianus
atgcctgtcgctggtaaccagtcaa

SEQ ID NO: 151587 - DNA, 25 bp, Saccharomyces pastorianus
atgcctgaaggcagttccgaagact

SEQ ID NO: 151588 - DNA, 25 bp, Saccharomyces pastorianus
catccactagtatcccgactttaaa

SEQ ID NO: 151589 - DNA, 25 bp, Saccharomyces pastorianus
taatgaccccttgagctggagtgaa

SEQ ID NO: 151590 - DNA, 25 bp, Saccharomyces pastorianus
atcttcttcggcattgaactcttcg

SEQ ID NO: 151591 - DNA, 25 bp, Saccharomyces pastorianus
aaacctaatcgtactcagttagatc

SEQ ID NO: 151592 - DNA, 25 bp, Saccharomyces pastorianus
taatttggcgccttgggctaacaag

SEQ ID NO: 151593 - DNA, 25 bp, Saccharomyces pastorianus
aacccgagggtgctgtttataatca

SEQ ID NO: 151594 - DNA, 25 bp, Saccharomyces pastorianus
aaggcagaactgatggcacaaaaat

SEQ ID NO: 151595 - DNA, 25 bp, Saccharomyces pastorianus
aaaactcaaactggttctgcctggg

SEQ ID NO: 151596 - DNA, 25 bp, Saccharomyces pastorianus
ccgcaacttccataaccactaattt

SEQ ID NO: 151597 - DNA, 25 bp, Saccharomyces pastorianus
aaatattaagctcggcgcaaattcc

SEQ ID NO: 151598 - DNA, 25 bp, Saccharomyces pastorianus
cagttagatcgtgagcaggcattaa

SEQ ID NO: 151599 - DNA, 25 bp, Saccharomyces pastorianus
cagatttcatctgctcttgaagatt

SEQ ID NO: 151600 - DNA, 25 bp, Saccharomyces pastorianus
gaaacttcatcttccgaaaacaccg

SEQ ID NO: 151601 - DNA, 25 bp, Saccharomyces pastorianus
taaagccacagcaaccgatcaaagt

SEQ ID NO: 151602 - DNA, 25 bp, Saccharomyces pastorianus
ctgagagtataagggacgtaatcgc

SEQ ID NO: 151603 - DNA, 25 bp, Saccharomyces pastorianus
tccaagtgtgatacctgaaagcatt

SEQ ID NO: 151604 - DNA, 25 bp, Saccharomyces pastorianus
gccacacgctggatttgctattggt

SEQ ID NO: 151605 - DNA, 25 bp, Saccharomyces pastorianus
ctattggttttgatcgtatgtgcgc

SEQ ID NO: 151606 - DNA, 25 bp, Saccharomyces pastorianus
tcgtatgtgcgctatgatctgtgaa

SEQ ID NO: 151607 - DNA, 25 bp, Saccharomyces pastorianus
tgggaacaccgccacacgctggatt

SEQ ID NO: 151608 - DNA, 25 bp, Saccharomyces pastorianus
tataagggacgtaatcgccttccca

SEQ ID NO: 151609 - DNA, 25 bp, Saccharomyces pastorianus
cgctggatttgctattggttttgat

SEQ ID NO: 151610 - DNA, 25 bp, Saccharomyces pastorianus
gggctgatttggttgtcaagagtcc

SEQ ID NO: 151611 - DNA, 25 bp, Saccharomyces pastorianus
gatacctgaaagcattctggaacct

SEQ ID NO: 151612 - DNA, 25 bp, Saccharomyces pastorianus
gtgcgctatgatctgtgaaactgag

SEQ ID NO: 151613 - DNA, 25 bp, Saccharomyces pastorianus
gtcgagaccccaatgttatttaaag

SEQ ID NO: 151614 - DNA, 25 bp, Saccharomyces pastorianus
taaattgtcagccatatacccacct

SEQ ID NO: 151615 - DNA, 25 bp, Saccharomyces pastorianus
gcaagagagtttctggttccaacaa

SEQ ID NO: 151616 - DNA, 25 bp, Saccharomyces pastorianus
tgttatttaaagctaccccagaagg

SEQ ID NO: 151617 - DNA, 25 bp, Saccharomyces pastorianus
ggactctaacggtgacattatccag

SEQ ID NO: 151618 - DNA, 25 bp, Saccharomyces pastorianus
aaaaggactgtccagcggccagaaa

SEQ ID NO: 151619 - DNA, 25 bp, Saccharomyces pastorianus
aaaccagcgcaaatgcaggatttta

SEQ ID NO: 151620 - DNA, 25 bp, Saccharomyces pastorianus
aaaccatcgttttatgctctagatc

SEQ ID NO: 151621 - DNA, 25 bp, Saccharomyces pastorianus
acctgagttccgctatttgcaattg

SEQ ID NO: 151622 - DNA, 25 bp, Saccharomyces pastorianus
aagccgtaggtatactctctttgaa

SEQ ID NO: 151623 - DNA, 25 bp, Saccharomyces pastorianus
gacacctcgaccatcaaacagttaa

SEQ ID NO: 151624 - DNA, 25 bp, Saccharomyces pastorianus
gagccaaaccattccattttcgaga

SEQ ID NO: 151625 - DNA, 25 bp, Saccharomyces pastorianus
agcattatgacctcgtagttaacgg

SEQ ID NO: 151626 - DNA, 25 bp, Saccharomyces pastorianus
ggatagattatgttccacgcatcat

SEQ ID NO: 151627 - DNA, 25 bp, Saccharomyces pastorianus
gagaatcctactcccctgggaagat

SEQ ID NO: 151628 - DNA, 25 bp, Saccharomyces pastorianus
gctgtcaataaggacgttgcctcat

SEQ ID NO: 151629 - DNA, 25 bp, Saccharomyces pastorianus
tagagttccaatagtgcttccaatt

SEQ ID NO: 151630 - DNA, 25 bp, Saccharomyces pastorianus
acgcatcatccttttactatggtga

SEQ ID NO: 151631 - DNA, 25 bp, Saccharomyces pastorianus
gaattttcatgcaattgccacgttt

SEQ ID NO: 151632 - DNA, 25 bp, Saccharomyces pastorianus
aaaagcttgcatatccggagtacga

SEQ ID NO: 151633 - DNA, 25 bp, Saccharomyces pastorianus
gcctcatggattgtggatttcccgt

SEQ ID NO: 151634 - DNA, 25 bp, Saccharomyces pastorianus
acgccggaaaagtgcttgggtcagc

SEQ ID NO: 151635 - DNA, 25 bp, Saccharomyces pastorianus
gtaattccgtacaaacaagctagag

SEQ ID NO: 151636 - DNA, 25 bp, Saccharomyces pastorianus
ttaaatgctgcagtcgctctctcaa

SEQ ID NO: 151637 - DNA, 25 bp, Saccharomyces pastorianus
tcctggttaacaaagcaagctgccg

SEQ ID NO: 151638 - DNA, 25 bp, Saccharomyces pastorianus
tatgcgagactgacttgggtggaca

SEQ ID NO: 151639 - DNA, 25 bp, Saccharomyces pastorianus
gtttcgcacaaaccgacagttgaga

SEQ ID NO: 151640 - DNA, 25 bp, Saccharomyces pastorianus
aacggatgatccagttacaggtgaa

SEQ ID NO: 151641 - DNA, 25 bp, Saccharomyces pastorianus
atccttgtgtgttgttatgcgagac

SEQ ID NO: 151642 - DNA, 25 bp, Saccharomyces pastorianus
gggtggacatttggcttatctcgac

SEQ ID NO: 151643 - DNA, 25 bp, Saccharomyces pastorianus
tcgctctctcaaacccatgggattt

SEQ ID NO: 151644 - DNA, 25 bp, Saccharomyces pastorianus
gagaaaccagtcttttatacgtata

SEQ ID NO: 151645 - DNA, 25 bp, Saccharomyces pastorianus
ttcgataatcttttcactgccccat

SEQ ID NO: 151646 - DNA, 25 bp, Saccharomyces pastorianus
gttactatccaactgtcactcctag

SEQ ID NO: 151647 - DNA, 25 bp, Saccharomyces pastorianus
acagcttgcttttcacaggttactt

SEQ ID NO: 151648 - DNA, 25 bp, Saccharomyces pastorianus
tgtcagccggtgatttttccctaaa

SEQ ID NO: 151649 - DNA, 25 bp, Saccharomyces pastorianus
attcgtaaccaaacacgtgcctaca

SEQ ID NO: 151650 - DNA, 25 bp, Saccharomyces pastorianus
acagaccctttatttgtcagccggt

SEQ ID NO: 151651 - DNA, 25 bp, Saccharomyces pastorianus
taagcgccaaattcctcttcatgaa

SEQ ID NO: 151652 - DNA, 25 bp, Saccharomyces pastorianus
gggtctgcacttcagattgggttat

SEQ ID NO: 151653 - DNA, 25 bp, Saccharomyces pastorianus
gcctcgttttcacccaagaactaga

SEQ ID NO: 151654 - DNA, 25 bp, Saccharomyces pastorianus
taacggcaccgtcaaacatgtactg

SEQ ID NO: 151655 - DNA, 25 bp, Saccharomyces pastorianus
catgagcctctcatcagggcattat

SEQ ID NO: 151656 - DNA, 25 bp, Saccharomyces pastorianus
gaaccaagtctttggctttcagaga

SEQ ID NO: 151657 - DNA, 25 bp, Saccharomyces pastorianus
tgccactaaggctgatttcgataat

SEQ ID NO: 151658 - DNA, 25 bp, Saccharomyces pastorianus
atataaaattgtttgtgcgggacca

SEQ ID NO: 151659 - DNA, 25 bp, Saccharomyces pastorianus
atcttgcaagggttcggtgttgcta

SEQ ID NO: 151660 - DNA, 25 bp, Saccharomyces pastorianus
tcacatcctgaagccggttccattg

SEQ ID NO: 151661 - DNA, 25 bp, Saccharomyces pastorianus
aaaggttgtcggtctgcacattgtt

SEQ ID NO: 151662 - DNA, 25 bp, Saccharomyces pastorianus
ctagattacgagaacgtccccagcg

SEQ ID NO: 151663 - DNA, 25 bp, Saccharomyces pastorianus
gtaattttctcacatcctgaagccg

SEQ ID NO: 151664 - DNA, 25 bp, Saccharomyces pastorianus
taccgccatgtactatgctatgttg

SEQ ID NO: 151665 - DNA, 25 bp, Saccharomyces pastorianus
tacaattccaaatttaccgccatgt

SEQ ID NO: 151666 - DNA, 25 bp, Saccharomyces pastorianus
cgataattgtgttgctattcatccg

SEQ ID NO: 151667 - DNA, 25 bp, Saccharomyces pastorianus
gagaacgtccccagcgtaattttct

SEQ ID NO: 151668 - DNA, 25 bp, Saccharomyces pastorianus
gcttatgtccataggttgaacggta

SEQ ID NO: 151669 - DNA, 25 bp, Saccharomyces pastorianus
ctgaagtttactccgctaaccatat

SEQ ID NO: 151670 - DNA, 25 bp, Saccharomyces pastorianus
ttgcgaccggtggaaaggctatttt

SEQ ID NO: 151671 - DNA, 25 bp, Saccharomyces pastorianus
gcacttgacttttaattggccagaa

SEQ ID NO: 151672 - DNA, 25 bp, Saccharomyces pastorianus
gaaaacattccaggtttcgaattag

SEQ ID NO: 151673 - DNA, 25 bp, Saccharomyces pastorianus
tgatgaatgcatccagaacactatt

SEQ ID NO: 151674 - DNA, 25 bp, Saccharomyces pastorianus
ggaaggcatcaacgttcataaacta

SEQ ID NO: 151675 - DNA, 25 bp, Saccharomyces pastorianus
gaatccgaaacgcacttggtagtta

SEQ ID NO: 151676 - DNA, 25 bp, Saccharomyces pastorianus
aaccatattttagttgcgaccggtg

SEQ ID NO: 151677 - DNA, 25 bp, Saccharomyces pastorianus
aagttgttgttgttggtgctggtta

SEQ ID NO: 151678 - DNA, 25 bp, Saccharomyces pastorianus
tgttccatgggctggaatccgaaac

SEQ ID NO: 151679 - DNA, 25 bp, Saccharomyces pastorianus
gagaatcctacgtccttttacaata

SEQ ID NO: 151680 - DNA, 25 bp, Saccharomyces pastorianus
ttacaatagaccctctgtttttgat

SEQ ID NO: 151681 - DNA, 25 bp, Saccharomyces pastorianus
cgacttgagaagacgtaaagcagtt

SEQ ID NO: 151682 - DNA, 25 bp, Saccharomyces pastorianus
gaatcctacgtccttttacaataga

SEQ ID NO: 151683 - DNA, 25 bp, Saccharomyces pastorianus
aacgaagaacgtgaactgcaagaga

SEQ ID NO: 151684 - DNA, 25 bp, Saccharomyces pastorianus
gtccttttacaatagaccctctgtt

SEQ ID NO: 151685 - DNA, 25 bp, Saccharomyces pastorianus
ctgcaagagaatcctacgtcctttt

SEQ ID NO: 151686 - DNA, 25 bp, Saccharomyces pastorianus
acgtccttttacaatagaccctctg

SEQ ID NO: 151687 - DNA, 25 bp, Saccharomyces pastorianus
gaacgtgaactgcaagagaatccta

SEQ ID NO: 151688 - DNA, 25 bp, Saccharomyces pastorianus
gagaagacgtaaagcagttgaaaac

SEQ ID NO: 151689 - DNA, 25 bp, Saccharomyces pastorianus
gaactgcaagagaatcctacgtcct

SEQ ID NO: 151690 - DNA, 25 bp, Saccharomyces pastorianus
ggaattattcccctagatgtctatg

SEQ ID NO: 151691 - DNA, 25 bp, Saccharomyces pastorianus
atttacaaatctacccaggctcttg

SEQ ID NO: 151692 - DNA, 25 bp, Saccharomyces pastorianus
ctttctgccttacccaatgatcaaa

SEQ ID NO: 151693 - DNA, 25 bp, Saccharomyces pastorianus
tatcatgaaagcgttccagccgttg

SEQ ID NO: 151694 - DNA, 25 bp, Saccharomyces pastorianus
tcgaatacggatacacagggacaat

SEQ ID NO: 151695 - DNA, 25 bp, Saccharomyces pastorianus
aaatcttctttagtagctgcttcaa

SEQ ID NO: 151696 - DNA, 25 bp, Saccharomyces pastorianus
cagccgttgtgcaggttgattccat

SEQ ID NO: 151697 - DNA, 25 bp, Saccharomyces pastorianus
ggttgattccattaaggcgctcgat

SEQ ID NO: 151698 - DNA, 25 bp, Saccharomyces pastorianus
ggcgctcgatgcaataaaatctcca

SEQ ID NO: 151699 - DNA, 25 bp, Saccharomyces pastorianus
caggctcttgagtgatttggaaaaa

SEQ ID NO: 151700 - DNA, 25 bp, Saccharomyces pastorianus
gtagctgcttcaaactcagacgaaa

SEQ ID NO: 151701 - DNA, 25 bp, Saccharomyces pastorianus
agcatccatggatacacatcagctg

SEQ ID NO: 151702 - DNA, 25 bp, Saccharomyces pastorianus
tagcctctacagttgttaatcagca

SEQ ID NO: 151703 - DNA, 25 bp, Saccharomyces pastorianus
caaagaggcccttggtgaattgaaa

SEQ ID NO: 151704 - DNA, 25 bp, Saccharomyces pastorianus
gataacgttacctcacaggacaatg

SEQ ID NO: 151705 - DNA, 25 bp, Saccharomyces pastorianus
tctacaggcaatggacagagcacat

SEQ ID NO: 151706 - DNA, 25 bp, Saccharomyces pastorianus
ctatgggacccatctcaatacgagg

SEQ ID NO: 151707 - DNA, 25 bp, Saccharomyces pastorianus
gattcccaagcagccaagggcatgg

SEQ ID NO: 151708 - DNA, 25 bp, Saccharomyces pastorianus
caacgagactggtttaactggcaaa

SEQ ID NO: 151709 - DNA, 25 bp, Saccharomyces pastorianus
acatcagctgcttgatctcttcgac

SEQ ID NO: 151710 - DNA, 25 bp, Saccharomyces pastorianus
gaataatggcgattcccaagcagcc

SEQ ID NO: 151711 - DNA, 25 bp, Saccharomyces pastorianus
tgatctcttcgaccccgataacgtt

SEQ ID NO: 151712 - DNA, 25 bp, Saccharomyces pastorianus
ggactctgagaagcacattgacttt

SEQ ID NO: 151713 - DNA, 25 bp, Saccharomyces pastorianus
tgctgcaaggaaggcggaagcttct

SEQ ID NO: 151714 - DNA, 25 bp, Saccharomyces pastorianus
atgctgcaaggaaggcggaagcttc

SEQ ID NO: 151715 - DNA, 25 bp, Saccharomyces pastorianus
gaaggcggaagcttctggtgaagct

SEQ ID NO: 151716 - DNA, 25 bp, Saccharomyces pastorianus
agcacattgactttgctccaacatc

SEQ ID NO: 151717 - DNA, 25 bp, Saccharomyces pastorianus
gagaagcacattgactttgctccaa

SEQ ID NO: 151718 - DNA, 25 bp, Saccharomyces pastorianus
ggaaggcggaagcttctggtgaagc

SEQ ID NO: 151719 - DNA, 25 bp, Saccharomyces pastorianus
caaggaaggcggaagcttctggtga

SEQ ID NO: 151720 - DNA, 25 bp, Saccharomyces pastorianus
cagattggactctgagaagcacatt

SEQ ID NO: 151721 - DNA, 25 bp, Saccharomyces pastorianus
tccaacatctccattcggtggtgct

SEQ ID NO: 151722 - DNA, 25 bp, Saccharomyces pastorianus
attgactttgctccaacatctccat

SEQ ID NO: 151723 - DNA, 25 bp, Saccharomyces pastorianus
agagacaaccagctcaaccaagaga

SEQ ID NO: 151724 - DNA, 25 bp, Saccharomyces pastorianus
tttctactgaaggtaacgttcctca

SEQ ID NO: 151725 - DNA, 25 bp, Saccharomyces pastorianus
tatccaaaagggtatgccacacaag

SEQ ID NO: 151726 - DNA, 25 bp, Saccharomyces pastorianus
tctacaaggttggtgacattgtcga

SEQ ID NO: 151727 - DNA, 25 bp, Saccharomyces pastorianus
tccaaaagggtatgccacacaagtt

SEQ ID NO: 151728 - DNA, 25 bp, Saccharomyces pastorianus
gccaatggttctatccaaaagggta

SEQ ID NO: 151729 - DNA, 25 bp, Saccharomyces pastorianus
agacaaccagctcaaccaagagaat

SEQ ID NO: 151730 - DNA, 25 bp, Saccharomyces pastorianus
tgaagagacaaccagctcaaccaag

SEQ ID NO: 151731 - DNA, 25 bp, Saccharomyces pastorianus
gtccaattgaagagacaaccagctc

SEQ ID NO: 151732 - DNA, 25 bp, Saccharomyces pastorianus
tgaaggtaacgttcctcaaactttg

SEQ ID NO: 151733 - DNA, 25 bp, Saccharomyces pastorianus
ggttctatccaaaagggtatgccac

SEQ ID NO: 151734 - DNA, 25 bp, Saccharomyces pastorianus
caacatgcatagtagcagcgcaatt

SEQ ID NO: 151735 - DNA, 25 bp, Saccharomyces pastorianus
aacgtcgtgaagtggcggtcgcaac

SEQ ID NO: 151736 - DNA, 25 bp, Saccharomyces pastorianus
caaatggaccaaccgttgatcctga

SEQ ID NO: 151737 - DNA, 25 bp, Saccharomyces pastorianus
gctgccatgatgactagaacgccat

SEQ ID NO: 151738 - DNA, 25 bp, Saccharomyces pastorianus
tagaacgccatcaccaacaggaaaa

SEQ ID NO: 151739 - DNA, 25 bp, Saccharomyces pastorianus
gaagctacaagcaacaacatgcata

SEQ ID NO: 151740 - DNA, 25 bp, Saccharomyces pastorianus
aaatccgtcggagatgaagctacaa

SEQ ID NO: 151741 - DNA, 25 bp, Saccharomyces pastorianus
gtagcagcgcaattagaaatccaaa

SEQ ID NO: 151742 - DNA, 25 bp, Saccharomyces pastorianus
aaccgctgctgccatgatgactaga

SEQ ID NO: 151743 - DNA, 25 bp, Saccharomyces pastorianus
aagtcttgagggaccgcaatgctaa

SEQ ID NO: 151744 - DNA, 25 bp, Saccharomyces pastorianus
agtaaactacttcaagtcttgaggg

SEQ ID NO: 151745 - DNA, 25 bp, Saccharomyces pastorianus
agcatccatgagctacccaggacaa

SEQ ID NO: 151746 - DNA, 25 bp, Saccharomyces pastorianus
taccacatgtaaatccctatataag

SEQ ID NO: 151747 - DNA, 25 bp, Saccharomyces pastorianus
aaggcaaatcacgaatgaagacgat

SEQ ID NO: 151748 - DNA, 25 bp, Saccharomyces pastorianus
gacagcatccatgagctacccagga

SEQ ID NO: 151749 - DNA, 25 bp, Saccharomyces pastorianus
agatctccagagaaaaagctcagta

SEQ ID NO: 151750 - DNA, 25 bp, Saccharomyces pastorianus
gaggacagcatccatgagctaccca

SEQ ID NO: 151751 - DNA, 25 bp, Saccharomyces pastorianus
aaaagctcagtacgaaggcaaatca

SEQ ID NO: 151752 - DNA, 25 bp, Saccharomyces pastorianus
agaaatacaggattcaggccatctt

SEQ ID NO: 151753 - DNA, 25 bp, Saccharomyces pastorianus
catccatgagctacccaggacaata

SEQ ID NO: 151754 - DNA, 25 bp, Saccharomyces pastorianus
aaatacaggattcaggccatcttat

SEQ ID NO: 151755 - DNA, 25 bp, Saccharomyces pastorianus
gggaggacagcatccatgagctacc

SEQ ID NO: 151756 - DNA, 25 bp, Saccharomyces pastorianus
agatataccgctacagacacattac

SEQ ID NO: 151757 - DNA, 25 bp, Saccharomyces pastorianus
agttgccaaattccggagttatagc

SEQ ID NO: 151758 - DNA, 25 bp, Saccharomyces pastorianus
ttagctataacggagttgccaaatt

SEQ ID NO: 151759 - DNA, 25 bp, Saccharomyces pastorianus
agcgtagatataccgctacagacac

SEQ ID NO: 151760 - DNA, 25 bp, Saccharomyces pastorianus
taacggagttgccaaattccggagt

SEQ ID NO: 151761 - DNA, 25 bp, Saccharomyces pastorianus
ggagttgccaaattccggagttata

SEQ ID NO: 151762 - DNA, 25 bp, Saccharomyces pastorianus
ttccggagttatagcgtagatatac

SEQ ID NO: 151763 - DNA, 25 bp, Saccharomyces pastorianus
gctacagacacattacagactggaa

SEQ ID NO: 151764 - DNA, 25 bp, Saccharomyces pastorianus
ataccgctacagacacattacagac

SEQ ID NO: 151765 - DNA, 25 bp, Saccharomyces pastorianus
gccaaattccggagttatagcgtag

SEQ ID NO: 151766 - DNA, 25 bp, Saccharomyces pastorianus
aaattccggagttatagcgtagata

SEQ ID NO: 151767 - DNA, 25 bp, Saccharomyces pastorianus
ggcaggtttactaatcctcaacaac

SEQ ID NO: 151768 - DNA, 25 bp, Saccharomyces pastorianus
aactcggcaggtttactaatcctca

SEQ ID NO: 151769 - DNA, 25 bp, Saccharomyces pastorianus
taacggtctgactctgaattctcta

SEQ ID NO: 151770 - DNA, 25 bp, Saccharomyces pastorianus
caacaaccgagggaggatatacgga

SEQ ID NO: 151771 - DNA, 25 bp, Saccharomyces pastorianus
aaagttcaggataaataacggtctg

SEQ ID NO: 151772 - DNA, 25 bp, Saccharomyces pastorianus
gagggaggatatacggaagatttta

SEQ ID NO: 151773 - DNA, 25 bp, Saccharomyces pastorianus
tgactctgaattctctatcattgta

SEQ ID NO: 151774 - DNA, 25 bp, Saccharomyces pastorianus
atcattgtactttagaaatttaacg

SEQ ID NO: 151775 - DNA, 25 bp, Saccharomyces pastorianus
ggtctgactctgaattctctatcat

SEQ ID NO: 151776 - DNA, 25 bp, Saccharomyces pastorianus
atgtgatcgtggcataaaactcggc

SEQ ID NO: 151777 - DNA, 25 bp, Saccharomyces pastorianus
atcgtggcataaaactcggcaggtt

SEQ ID NO: 151778 - DNA, 25 bp, Saccharomyces pastorianus
ttctccatcatcttcttcaaaacta

SEQ ID NO: 151779 - DNA, 25 bp, Saccharomyces pastorianus
ctgcgctagcgccaattaacatgtt

SEQ ID NO: 151780 - DNA, 25 bp, Saccharomyces pastorianus
caaaactagctgaacgacctcgtct

SEQ ID NO: 151781 - DNA, 25 bp, Saccharomyces pastorianus
taacatgttcccgagcttaagtaat

SEQ ID NO: 151782 - DNA, 25 bp, Saccharomyces pastorianus
agcagtttcagcattctccagattt

SEQ ID NO: 151783 - DNA, 25 bp, Saccharomyces pastorianus
gactccactactagcatgcctgaaa

SEQ ID NO: 151784 - DNA, 25 bp, Saccharomyces pastorianus
tggtgagtctccctatagcaaacgc

SEQ ID NO: 151785 - DNA, 25 bp, Saccharomyces pastorianus
atgcctgaaagtcccaccgaggtag

SEQ ID NO: 151786 - DNA, 25 bp, Saccharomyces pastorianus
tagattacccctttcgacgttggct

SEQ ID NO: 151787 - DNA, 25 bp, Saccharomyces pastorianus
ggctaacacagctgtcacggaatct

SEQ ID NO: 151788 - DNA, 25 bp, Saccharomyces pastorianus
cggctcttgattccttacttacaaa

SEQ ID NO: 151789 - DNA, 25 bp, Saccharomyces pastorianus
ttctgcctgaaatcatacctactca

SEQ ID NO: 151790 - DNA, 25 bp, Saccharomyces pastorianus
atttacctgatttggcttcgcattc

SEQ ID NO: 151791 - DNA, 25 bp, Saccharomyces pastorianus
agactcatggaagcgctgtctcctt

SEQ ID NO: 151792 - DNA, 25 bp, Saccharomyces pastorianus
gaaagatttccaaatgtccagcgaa

SEQ ID NO: 151793 - DNA, 25 bp, Saccharomyces pastorianus
ggttcctttcataaatcttctgggt

SEQ ID NO: 151794 - DNA, 25 bp, Saccharomyces pastorianus
aaaaggctttgctgaggacattaca

SEQ ID NO: 151795 - DNA, 25 bp, Saccharomyces pastorianus
ggaagttatcttttcccatcgtcca

SEQ ID NO: 151796 - DNA, 25 bp, Saccharomyces pastorianus
aacaggcggccttttcagattaacg

SEQ ID NO: 151797 - DNA, 25 bp, Saccharomyces pastorianus
tactggagagactttctgcctgaaa

SEQ ID NO: 151798 - DNA, 25 bp, Saccharomyces pastorianus
tcgacaccaattcattggcctacac

SEQ ID NO: 151799 - DNA, 25 bp, Saccharomyces pastorianus
aattctaagaattctcctgttgagg

SEQ ID NO: 151800 - DNA, 25 bp, Saccharomyces pastorianus
gaatttgcattctattaacctggta

SEQ ID NO: 151801 - DNA, 25 bp, Saccharomyces pastorianus
aacacagcgttgcaaactacggcga

SEQ ID NO: 151802 - DNA, 25 bp, Saccharomyces pastorianus
gcaaaaaggaaccaaccttcgcctg

SEQ ID NO: 151803 - DNA, 25 bp, Saccharomyces pastorianus
cggcgaattcgctgacacttaatag

SEQ ID NO: 151804 - DNA, 25 bp, Saccharomyces pastorianus
gagaggaaacctccatttagccacc

SEQ ID NO: 151805 - DNA, 25 bp, Saccharomyces pastorianus
aataattctctggtatggccccata

SEQ ID NO: 151806 - DNA, 25 bp, Saccharomyces pastorianus
gacatcatccatgagatagcgaatt

SEQ ID NO: 151807 - DNA, 25 bp, Saccharomyces pastorianus
aacaattgccatacaaacaacacag

SEQ ID NO: 151808 - DNA, 25 bp, Saccharomyces pastorianus
gcactgcctaccacaatgacatcat

SEQ ID NO: 151809 - DNA, 25 bp, Saccharomyces pastorianus
gtatggccccataaaagcagattta

SEQ ID NO: 151810 - DNA, 25 bp, Saccharomyces pastorianus
cttcgcctggccaatctttaattaa

SEQ ID NO: 151811 - DNA, 25 bp, Saccharomyces pastorianus
gaaatttttggaccagttgtcactg

SEQ ID NO: 151812 - DNA, 25 bp, Saccharomyces pastorianus
aggtgtcgaaatggctaacagctct

SEQ ID NO: 151813 - DNA, 25 bp, Saccharomyces pastorianus
cagaatctttgagcacaggtttgaa

SEQ ID NO: 151814 - DNA, 25 bp, Saccharomyces pastorianus
cggtctaggttctggtatcgaaaca

SEQ ID NO: 151815 - DNA, 25 bp, Saccharomyces pastorianus
cggtaccgtctggatcaacacatac

SEQ ID NO: 151816 - DNA, 25 bp, Saccharomyces pastorianus
cagctctgaattcggtctaggttct

SEQ ID NO: 151817 - DNA, 25 bp, Saccharomyces pastorianus
agaaggcgccaagatcttaactggt

SEQ ID NO: 151818 - DNA, 25 bp, Saccharomyces pastorianus
cagaccaaccgttttctacgatgtt

SEQ ID NO: 151819 - DNA, 25 bp, Saccharomyces pastorianus
agttgtcactgtcgcaaagttcaag

SEQ ID NO: 151820 - DNA, 25 bp, Saccharomyces pastorianus
caagatgttgaaggccggtaccgtc

SEQ ID NO: 151821 - DNA, 25 bp, Saccharomyces pastorianus
atacaacgattttgactccagagtt

SEQ ID NO: 151822 - DNA, 25 bp, Saccharomyces pastorianus
tgccctatactttgcttctttatgt

SEQ ID NO: 151823 - DNA, 25 bp, Saccharomyces pastorianus
atgttggcttggaagatcgccccag

SEQ ID NO: 151824 - DNA, 25 bp, Saccharomyces pastorianus
accttagagccaatcggtgtctgtg

SEQ ID NO: 151825 - DNA, 25 bp, Saccharomyces pastorianus
tgtcacacctttaaatgccctatac

SEQ ID NO: 151826 - DNA, 25 bp, Saccharomyces pastorianus
agatccttccactgaaaacaccgtt

SEQ ID NO: 151827 - DNA, 25 bp, Saccharomyces pastorianus
ggtaagacctatcccgtcgaagatc

SEQ ID NO: 151828 - DNA, 25 bp, Saccharomyces pastorianus
actgtctaagagatgctgctgccta

SEQ ID NO: 151829 - DNA, 25 bp, Saccharomyces pastorianus
aacgtctgtatcttgaaacccgctg

SEQ ID NO: 151830 - DNA, 25 bp, Saccharomyces pastorianus
gtgctttccacgacactgaatgggc

SEQ ID NO: 151831 - DNA, 25 bp, Saccharomyces pastorianus
aacaccgtttgtgaggtctcttctg

SEQ ID NO: 151832 - DNA, 25 bp, Saccharomyces pastorianus
tatgctatcgaatgtgccgaccgtg

SEQ ID NO: 151833 - DNA, 25 bp, Saccharomyces pastorianus
aaaccgggacaggagttcatggcat

SEQ ID NO: 151834 - DNA, 25 bp, Saccharomyces pastorianus
gatcaagtgcgaatgccaatcctac

SEQ ID NO: 151835 - DNA, 25 bp, Saccharomyces pastorianus
gcagcaattacctagtcttcttcaa

SEQ ID NO: 151836 - DNA, 25 bp, Saccharomyces pastorianus
tcgcatatttttgccttcgagttcc

SEQ ID NO: 151837 - DNA, 25 bp, Saccharomyces pastorianus
aaggtggcaacgctaggccctacga

SEQ ID NO: 151838 - DNA, 25 bp, Saccharomyces pastorianus
cggatctacgcccagcagatatgat

SEQ ID NO: 151839 - DNA, 25 bp, Saccharomyces pastorianus
aagagggtacggacttggccatcga

SEQ ID NO: 151840 - DNA, 25 bp, Saccharomyces pastorianus
gaaatccgactctcatcgcatattt

SEQ ID NO: 151841 - DNA, 25 bp, Saccharomyces pastorianus
agtggcaccgcttccactgggaaaa

SEQ ID NO: 151842 - DNA, 25 bp, Saccharomyces pastorianus
tatgattcgcctttgagtggcaccg

SEQ ID NO: 151843 - DNA, 25 bp, Saccharomyces pastorianus
tgaacgggatgcattactctcggcc

SEQ ID NO: 151844 - DNA, 25 bp, Saccharomyces pastorianus
aggattctgagacagccactgcgaa

SEQ ID NO: 151845 - DNA, 25 bp, Saccharomyces pastorianus
acattttcctcctgttgctaatcaa

SEQ ID NO: 151846 - DNA, 25 bp, Saccharomyces pastorianus
attaaggacggcaacttggcttcgt

SEQ ID NO: 151847 - DNA, 25 bp, Saccharomyces pastorianus
ttggcttcgtctaactctgcacatt

SEQ ID NO: 151848 - DNA, 25 bp, Saccharomyces pastorianus
gaacgactgccgaggatacatccat

SEQ ID NO: 151849 - DNA, 25 bp, Saccharomyces pastorianus
tcaaaacgtgaaaagcgcgcccgca

SEQ ID NO: 151850 - DNA, 25 bp, Saccharomyces pastorianus
agtcggagctagagcatgtccctga

SEQ ID NO: 151851 - DNA, 25 bp, Saccharomyces pastorianus
agtcccggcgcctttgaatttatcg

SEQ ID NO: 151852 - DNA, 25 bp, Saccharomyces pastorianus
tgtccctgaggaggatgactctggt

SEQ ID NO: 151853 - DNA, 25 bp, Saccharomyces pastorianus
atggccgtatcagcccgtttgagaa

SEQ ID NO: 151854 - DNA, 25 bp, Saccharomyces pastorianus
ttcgccagacggaaacagcgttggt

SEQ ID NO: 151855 - DNA, 25 bp, Saccharomyces pastorianus
gggttttcgtgatgcaattcaacta

SEQ ID NO: 151856 - DNA, 25 bp, Saccharomyces pastorianus
atgactttagatcaaacgctttcga

SEQ ID NO: 151857 - DNA, 25 bp, Saccharomyces pastorianus
gatacctggcctttcgtatcaggaa

SEQ ID NO: 151858 - DNA, 25 bp, Saccharomyces pastorianus
tggttacatgcctttctacacatac

SEQ ID NO: 151859 - DNA, 25 bp, Saccharomyces pastorianus
cacagctttttaccgcaaattaagg

SEQ ID NO: 151860 - DNA, 25 bp, Saccharomyces pastorianus
ttataccacctaatgagccggaatt

SEQ ID NO: 151861 - DNA, 25 bp, Saccharomyces pastorianus
tactacagtttgctcagtcgcggaa

SEQ ID NO: 151862 - DNA, 25 bp, Saccharomyces pastorianus
taaggacctttatagccaagttcaa

SEQ ID NO: 151863 - DNA, 25 bp, Saccharomyces pastorianus
agtcgcggaaatcaccaattggtta

SEQ ID NO: 151864 - DNA, 25 bp, Saccharomyces pastorianus
tgttaatatgatacctggcctttcg

SEQ ID NO: 151865 - DNA, 25 bp, Saccharomyces pastorianus
gacttggctcacgtattactgcagc

SEQ ID NO: 151866 - DNA, 25 bp, Saccharomyces pastorianus
ttatagaagcagagccattggcgaa

SEQ ID NO: 151867 - DNA, 25 bp, Saccharomyces pastorianus
acgagaagctgatattggtcacgaa

SEQ ID NO: 151868 - DNA, 25 bp, Saccharomyces pastorianus
tgaaaaaccctagcttcgactggga

SEQ ID NO: 151869 - DNA, 25 bp, Saccharomyces pastorianus
gaggagttcaaatgtgccttgtcat

SEQ ID NO: 151870 - DNA, 25 bp, Saccharomyces pastorianus
attattttgggcagctgttaggcaa

SEQ ID NO: 151871 - DNA, 25 bp, Saccharomyces pastorianus
gtgccttgtcattaactgttatcgc

SEQ ID NO: 151872 - DNA, 25 bp, Saccharomyces pastorianus
aaggttggtcgccactgacgataga

SEQ ID NO: 151873 - DNA, 25 bp, Saccharomyces pastorianus
gacgatagaaagtgtcccattacag

SEQ ID NO: 151874 - DNA, 25 bp, Saccharomyces pastorianus
attaaaatggccaactcagtacgag

SEQ ID NO: 151875 - DNA, 25 bp, Saccharomyces pastorianus
ggtcacgaaaagctccatcaaaatt

SEQ ID NO: 151876 - DNA, 25 bp, Saccharomyces pastorianus
actgttatcgcggttgaaattcaag

SEQ ID NO: 151877 - DNA, 25 bp, Saccharomyces pastorianus
gttctgacgagctttgcgacatatt

SEQ ID NO: 151878 - DNA, 25 bp, Saccharomyces pastorianus
ccgatgcgtggaaaatggccgtttt

SEQ ID NO: 151879 - DNA, 25 bp, Saccharomyces pastorianus
atatagacattaatccgatgcgtgg

SEQ ID NO: 151880 - DNA, 25 bp, Saccharomyces pastorianus
atggccgtttttggactcaaatacg

SEQ ID NO: 151881 - DNA, 25 bp, Saccharomyces pastorianus
acatagtcacgttaccattttcacc

SEQ ID NO: 151882 - DNA, 25 bp, Saccharomyces pastorianus
atcacctcccattcagttctgacga

SEQ ID NO: 151883 - DNA, 25 bp, Saccharomyces pastorianus
atcgtcacctcctttgaaaactttg

SEQ ID NO: 151884 - DNA, 25 bp, Saccharomyces pastorianus
aaggcacaactgtcccagatgttgg

SEQ ID NO: 151885 - DNA, 25 bp, Saccharomyces pastorianus
gacatattgcaatcatctgctgttg

SEQ ID NO: 151886 - DNA, 25 bp, Saccharomyces pastorianus
gttggaaggccaactcagccgaaga

SEQ ID NO: 151887 - DNA, 25 bp, Saccharomyces pastorianus
aatacggaaatcgtcacctcctttg

SEQ ID NO: 151888 - DNA, 25 bp, Saccharomyces pastorianus
cttaggcttaccagctttgggtgtt

SEQ ID NO: 151889 - DNA, 25 bp, Saccharomyces pastorianus
actgtcgttctcaagatactatgga

SEQ ID NO: 151890 - DNA, 25 bp, Saccharomyces pastorianus
aattcagaaattttggcacatgcca

SEQ ID NO: 151891 - DNA, 25 bp, Saccharomyces pastorianus
tgggtcgtcatggagagtgatcaaa

SEQ ID NO: 151892 - DNA, 25 bp, Saccharomyces pastorianus
ggttgccagaaaaatatcacgacgt

SEQ ID NO: 151893 - DNA, 25 bp, Saccharomyces pastorianus
gcttaaagttgtcaaaactcccatc

SEQ ID NO: 151894 - DNA, 25 bp, Saccharomyces pastorianus
gaaatacaatttctcccgaagcaat

SEQ ID NO: 151895 - DNA, 25 bp, Saccharomyces pastorianus
gtagcgcatgaatactgtcgttctc

SEQ ID NO: 151896 - DNA, 25 bp, Saccharomyces pastorianus
aggcgatgaaaacttaggcttacca

SEQ ID NO: 151897 - DNA, 25 bp, Saccharomyces pastorianus
gtgattactcatggttttaccctag

SEQ ID NO: 151898 - DNA, 25 bp, Saccharomyces pastorianus
gtaccaagtttgtctagaaggatct

SEQ ID NO: 151899 - DNA, 25 bp, Saccharomyces pastorianus
ctcgtccactgtctacttgagggaa

SEQ ID NO: 151900 - DNA, 25 bp, Saccharomyces pastorianus
gagtatctcgaaacatctcgtccac

SEQ ID NO: 151901 - DNA, 25 bp, Saccharomyces pastorianus
ggaagagactttccccgagtatctc

SEQ ID NO: 151902 - DNA, 25 bp, Saccharomyces pastorianus
aaccgtgcaaatcaggaacacattt

SEQ ID NO: 151903 - DNA, 25 bp, Saccharomyces pastorianus
ggtataaactctttccacgatggaa

SEQ ID NO: 151904 - DNA, 25 bp, Saccharomyces pastorianus
agtgctcattaacaacatgcaggag

SEQ ID NO: 151905 - DNA, 25 bp, Saccharomyces pastorianus
gattgcatatttacccagttttgaa

SEQ ID NO: 151906 - DNA, 25 bp, Saccharomyces pastorianus
tatggtgatacaattctcgaaagca

SEQ ID NO: 151907 - DNA, 25 bp, Saccharomyces pastorianus
agaaataattcctacagtgctcatt

SEQ ID NO: 151908 - DNA, 25 bp, Saccharomyces pastorianus
gttctgcttgagtaacatttttcca

SEQ ID NO: 151909 - DNA, 25 bp, Saccharomyces pastorianus
ggaatcgaatcgactcttctcaaag

SEQ ID NO: 151910 - DNA, 25 bp, Saccharomyces pastorianus
gtaagcctttgtttcctggcaccaa

SEQ ID NO: 151911 - DNA, 25 bp, Saccharomyces pastorianus
gctcctgatgtgctaatgggttcta

SEQ ID NO: 151912 - DNA, 25 bp, Saccharomyces pastorianus
gactcttgcaacttaatccggatat

SEQ ID NO: 151913 - DNA, 25 bp, Saccharomyces pastorianus
ggtattccggtcaacacattttcaa

SEQ ID NO: 151914 - DNA, 25 bp, Saccharomyces pastorianus
aaacaagattctccaccgtgattta

SEQ ID NO: 151915 - DNA, 25 bp, Saccharomyces pastorianus
caagggctggccttttgccatgaaa

SEQ ID NO: 151916 - DNA, 25 bp, Saccharomyces pastorianus
taacgttgtggtaccgtgctcctga

SEQ ID NO: 151917 - DNA, 25 bp, Saccharomyces pastorianus
aattgatcttcgacaccatgggcac

SEQ ID NO: 151918 - DNA, 25 bp, Saccharomyces pastorianus
taatgagtccttatggcccagtgta

SEQ ID NO: 151919 - DNA, 25 bp, Saccharomyces pastorianus
atgggttctaggacgtactccacat

SEQ ID NO: 151920 - DNA, 25 bp, Saccharomyces pastorianus
atggatttcttacacggactcttgc

SEQ ID NO: 151921 - DNA, 25 bp, Saccharomyces pastorianus
actaatgacacaattcccaccagga

SEQ ID NO: 151922 - DNA, 25 bp, Saccharomyces pastorianus
gatatcccatttttcgacaagctga

SEQ ID NO: 151923 - DNA, 25 bp, Saccharomyces pastorianus
tgtcctgctgcagactatttcagat

SEQ ID NO: 151924 - DNA, 25 bp, Saccharomyces pastorianus
ggtcacaaaggcgttcaccaaattt

SEQ ID NO: 151925 - DNA, 25 bp, Saccharomyces pastorianus
gtctactgtcataccgattaccttt

SEQ ID NO: 151926 - DNA, 25 bp, Saccharomyces pastorianus
gcaacaggtacccaaactacttcat

SEQ ID NO: 151927 - DNA, 25 bp, Saccharomyces pastorianus
actgcggttacatggcccacagatg

SEQ ID NO: 151928 - DNA, 25 bp, Saccharomyces pastorianus
gacaacctgttcacgttatctgatt

SEQ ID NO: 151929 - DNA, 25 bp, Saccharomyces pastorianus
attactctatacttctggctcagca

SEQ ID NO: 151930 - DNA, 25 bp, Saccharomyces pastorianus
aatgcgcccgtgaaggacatgccta

SEQ ID NO: 151931 - DNA, 25 bp, Saccharomyces pastorianus
gcacataagccctttggttctacaa

SEQ ID NO: 151932 - DNA, 25 bp, Saccharomyces pastorianus
tccatcttacagcaagaaggaggta

SEQ ID NO: 151933 - DNA, 25 bp, Saccharomyces pastorianus
ttctggtgctagagtggttgttaca

SEQ ID NO: 151934 - DNA, 25 bp, Saccharomyces pastorianus
acactgctatccatcttacagcaag

SEQ ID NO: 151935 - DNA, 25 bp, Saccharomyces pastorianus
gttgttacactgctatccatcttac

SEQ ID NO: 151936 - DNA, 25 bp, Saccharomyces pastorianus
actgctatccatcttacagcaagaa

SEQ ID NO: 151937 - DNA, 25 bp, Saccharomyces pastorianus
gctatccatcttacagcaagaagga

SEQ ID NO: 151938 - DNA, 25 bp, Saccharomyces pastorianus
ggttgttacactgctatccatctta

SEQ ID NO: 151939 - DNA, 25 bp, Saccharomyces pastorianus
gttacactgctatccatcttacagc

SEQ ID NO: 151940 - DNA, 25 bp, Saccharomyces pastorianus
gtgctagagtggttgttacactgct

SEQ ID NO: 151941 - DNA, 25 bp, Saccharomyces pastorianus
agagtggttgttacactgctatcca

SEQ ID NO: 151942 - DNA, 25 bp, Saccharomyces pastorianus
gtggttgttacactgctatccatct

SEQ ID NO: 151943 - DNA, 25 bp, Saccharomyces pastorianus
tccatcttacagcaagaaggaggta

SEQ ID NO: 151944 - DNA, 25 bp, Saccharomyces pastorianus
ttctggtgctagagtggttgttaca

SEQ ID NO: 151945 - DNA, 25 bp, Saccharomyces pastorianus
aggtaagatcggtgttgccgccatt

SEQ ID NO: 151946 - DNA, 25 bp, Saccharomyces pastorianus
gttgttacactgctatccatcttac

SEQ ID NO: 151947 - DNA, 25 bp, Saccharomyces pastorianus
acactgctatccatcttacagcaag

SEQ ID NO: 151948 - DNA, 25 bp, Saccharomyces pastorianus
gctatccatcttacagcaagaagga

SEQ ID NO: 151949 - DNA, 25 bp, Saccharomyces pastorianus
ggttgttacactgctatccatctta

SEQ ID NO: 151950 - DNA, 25 bp, Saccharomyces pastorianus
gttacactgctatccatcttacagc

SEQ ID NO: 151951 - DNA, 25 bp, Saccharomyces pastorianus
cggtgttgccgccatttgtaatggt

SEQ ID NO: 151952 - DNA, 25 bp, Saccharomyces pastorianus
agagtggttgttacactgctatcca

SEQ ID NO: 151953 - DNA, 25 bp, Saccharomyces pastorianus
gtggttgttacactgctatccatct

SEQ ID NO: 151954 - DNA, 25 bp, Saccharomyces pastorianus
gttaacaaggtctgtgcatccgcta

SEQ ID NO: 151955 - DNA, 25 bp, Saccharomyces pastorianus
tggtctagccatgggtgtacacgca

SEQ ID NO: 151956 - DNA, 25 bp, Saccharomyces pastorianus
ggtaagcctgatactcaagtcacga

SEQ ID NO: 151957 - DNA, 25 bp, Saccharomyces pastorianus
agctccggccagacaagttgctttg

SEQ ID NO: 151958 - DNA, 25 bp, Saccharomyces pastorianus
aatttggccaaactgttcttgttga

SEQ ID NO: 151959 - DNA, 25 bp, Saccharomyces pastorianus
aacggtactgttactgccgctaacg

SEQ ID NO: 151960 - DNA, 25 bp, Saccharomyces pastorianus
aacgatgcgtacgatggtctagcca

SEQ ID NO: 151961 - DNA, 25 bp, Saccharomyces pastorianus
gtaatcatatcgttgcaagcacagt

SEQ ID NO: 151962 - DNA, 25 bp, Saccharomyces pastorianus
gacaattttgccatcgaatcctacc

SEQ ID NO: 151963 - DNA, 25 bp, Saccharomyces pastorianus
taatgctgatgttgtcgtggctggt

SEQ ID NO: 151964 - DNA, 25 bp, Saccharomyces pastorianus
ttggctgccggtttgagtaatcata

SEQ ID NO: 151965 - DNA, 25 bp, Saccharomyces pastorianus
aacttcctcaatggacagtacacct

SEQ ID NO: 151966 - DNA, 25 bp, Saccharomyces pastorianus
atgaaaacctatttttgagcgattt

SEQ ID NO: 151967 - DNA, 25 bp, Saccharomyces pastorianus
cttaccaatctgatatcgatgacgt

SEQ ID NO: 151968 - DNA, 25 bp, Saccharomyces pastorianus
gatgctgaaccggagagtgatattc

SEQ ID NO: 151969 - DNA, 25 bp, Saccharomyces pastorianus
gatgacgttagtgcttccaaagatt

SEQ ID NO: 151970 - DNA, 25 bp, Saccharomyces pastorianus
tatcacatttttctgcagaccaaga

SEQ ID NO: 151971 - DNA, 25 bp, Saccharomyces pastorianus
gtatgaatacactaacaaccacaat

SEQ ID NO: 151972 - DNA, 25 bp, Saccharomyces pastorianus
gagcgatttatcacatttttctgca

SEQ ID NO: 151973 - DNA, 25 bp, Saccharomyces pastorianus
ggagagtgatattccatcaacgtat

SEQ ID NO: 151974 - DNA, 25 bp, Saccharomyces pastorianus
gatatcgatgacgttagtgcttcca

SEQ ID NO: 151975 - DNA, 25 bp, Saccharomyces pastorianus
tagtacctttttaacttcctcaatg

SEQ ID NO: 151976 - DNA, 25 bp, Saccharomyces pastorianus
atcactgtcatcgtctcggtatata

SEQ ID NO: 151977 - DNA, 25 bp, Saccharomyces pastorianus
ttcgggctttccactaaatctaaat

SEQ ID NO: 151978 - DNA, 25 bp, Saccharomyces pastorianus
ctctcttacttctttcaccagggaa

SEQ ID NO: 151979 - DNA, 25 bp, Saccharomyces pastorianus
ttgctccgcattagatcactgtcat

SEQ ID NO: 151980 - DNA, 25 bp, Saccharomyces pastorianus
cagggaagggcccttgtctcaagtt

SEQ ID NO: 151981 - DNA, 25 bp, Saccharomyces pastorianus
atatatggtctctaggcatcatcct

SEQ ID NO: 151982 - DNA, 25 bp, Saccharomyces pastorianus
aaagtttttctgcagctttgctccg

SEQ ID NO: 151983 - DNA, 25 bp, Saccharomyces pastorianus
ttgatgtccgaagtttcctctctta

SEQ ID NO: 151984 - DNA, 25 bp, Saccharomyces pastorianus
ggatcgcaatgacaacgcttatctt

SEQ ID NO: 151985 - DNA, 25 bp, Saccharomyces pastorianus
ttgtttgaataccaccaccaacggc

SEQ ID NO: 151986 - DNA, 25 bp, Saccharomyces pastorianus
tcaagttccaatccctatcgagcga

SEQ ID NO: 151987 - DNA, 25 bp, Saccharomyces pastorianus
gtcggaacaaaagggcagtatacag

SEQ ID NO: 151988 - DNA, 25 bp, Saccharomyces pastorianus
atacagggccggcagtaccttctgt

SEQ ID NO: 151989 - DNA, 25 bp, Saccharomyces pastorianus
tctgttcctaccacaaaccttaacg

SEQ ID NO: 151990 - DNA, 25 bp, Saccharomyces pastorianus
gggccggcagtaccttctgttccta

SEQ ID NO: 151991 - DNA, 25 bp, Saccharomyces pastorianus
tgttcctaccacaaaccttaacgat

SEQ ID NO: 151992 - DNA, 25 bp, Saccharomyces pastorianus
tacagggccggcagtaccttctgtt

SEQ ID NO: 151993 - DNA, 25 bp, Saccharomyces pastorianus
aaaagggcagtatacagggccggca

SEQ ID NO: 151994 - DNA, 25 bp, Saccharomyces pastorianus
cagtaccttctgttcctaccacaaa

SEQ ID NO: 151995 - DNA, 25 bp, Saccharomyces pastorianus
acagggccggcagtaccttctgttc

SEQ ID NO: 151996 - DNA, 25 bp, Saccharomyces pastorianus
agggccggcagtaccttctgttcct

SEQ ID NO: 151997 - DNA, 25 bp, Saccharomyces pastorianus
ggcagtaccttctgttcctaccaca

SEQ ID NO: 151998 - DNA, 25 bp, Saccharomyces pastorianus
tgaatctcctggtaagaccactgat

SEQ ID NO: 151999 - DNA, 25 bp, Saccharomyces pastorianus
taatagcactgcaaagggcctgaag

SEQ ID NO: 152000 - DNA, 25 bp, Saccharomyces pastorianus
tgaaggacagtcgttttctttagaa

SEQ ID NO: 152001 - DNA, 25 bp, Saccharomyces pastorianus
tgcggtttcccactttaaagattat

SEQ ID NO: 152002 - DNA, 25 bp, Saccharomyces pastorianus
gccaaattagtattgcggtttccca

SEQ ID NO: 152003 - DNA, 25 bp, Saccharomyces pastorianus
gactgttgaatgttcctggagtgtc

SEQ ID NO: 152004 - DNA, 25 bp, Saccharomyces pastorianus
aagattatatggtcttcctcacccc

SEQ ID NO: 152005 - DNA, 25 bp, Saccharomyces pastorianus
gacgtgagcaacctgaccctagtaa

SEQ ID NO: 152006 - DNA, 25 bp, Saccharomyces pastorianus
gcatatccgacactattgattgagt

SEQ ID NO: 152007 - DNA, 25 bp, Saccharomyces pastorianus
agaccactgatgataacgctttaca

SEQ ID NO: 152008 - DNA, 25 bp, Saccharomyces pastorianus
aactgttcatcctatatcaagcaag

SEQ ID NO: 152009 - DNA, 25 bp, Saccharomyces pastorianus
aaggccatagtgaaggatttgcaac

SEQ ID NO: 152010 - DNA, 25 bp, Saccharomyces pastorianus
gtcaggacgaaattttaatctctac

SEQ ID NO: 152011 - DNA, 25 bp, Saccharomyces pastorianus
gcagcacatcacaactcatttcaat

SEQ ID NO: 152012 - DNA, 25 bp, Saccharomyces pastorianus
atgacaattgctcattgcaggagat

SEQ ID NO: 152013 - DNA, 25 bp, Saccharomyces pastorianus
gaaaatgccgcaaacgattcaaaga

SEQ ID NO: 152014 - DNA, 25 bp, Saccharomyces pastorianus
gtatacttcatgtactacggtgaaa

SEQ ID NO: 152015 - DNA, 25 bp, Saccharomyces pastorianus
aagaggtgcttcacaagttgcggcc

SEQ ID NO: 152016 - DNA, 25 bp, Saccharomyces pastorianus
caagttgcggccgttgaaaagctaa

SEQ ID NO: 152017 - DNA, 25 bp, Saccharomyces pastorianus
atgaatatgttgatcgtcaggacga

SEQ ID NO: 152018 - DNA, 25 bp, Saccharomyces pastorianus
attagagtatgtgggcgaccttccg

SEQ ID NO: 152019 - DNA, 25 bp, Saccharomyces pastorianus
ggagatgatgccctcttacattata

SEQ ID NO: 152020 - DNA, 25 bp, Saccharomyces pastorianus
caaatggctacgactgtggaatata

SEQ ID NO: 152021 - DNA, 25 bp, Saccharomyces pastorianus
gtatgaatactctctatggaagtgc

SEQ ID NO: 152022 - DNA, 25 bp, Saccharomyces pastorianus
atgcaccattggattttgattataa

SEQ ID NO: 152023 - DNA, 25 bp, Saccharomyces pastorianus
ttcatttagattgtccgcagcaacc

SEQ ID NO: 152024 - DNA, 25 bp, Saccharomyces pastorianus
agtgcagatgcaccattggattttg

SEQ ID NO: 152025 - DNA, 25 bp, Saccharomyces pastorianus
actctctatggaagtgcagatgcac

SEQ ID NO: 152026 - DNA, 25 bp, Saccharomyces pastorianus
catacaataggagaagactttgatt

SEQ ID NO: 152027 - DNA, 25 bp, Saccharomyces pastorianus
gatgcgattaggatgagaagattta

SEQ ID NO: 152028 - DNA, 25 bp, Saccharomyces pastorianus
ttagattgtccgcagcaaccaaatg

SEQ ID NO: 152029 - DNA, 25 bp, Saccharomyces pastorianus
gcaaccaaatggctacgactgtgga

SEQ ID NO: 152030 - DNA, 25 bp, Saccharomyces pastorianus
ggctacgactgtggaatatatgttt

SEQ ID NO: 152031 - DNA, 25 bp, Saccharomyces pastorianus
tcactagccgtttatccctttgcgt

SEQ ID NO: 152032 - DNA, 25 bp, Saccharomyces pastorianus
aatccaagctggcagagcatcctat

SEQ ID NO: 152033 - DNA, 25 bp, Saccharomyces pastorianus
aacgattcagagtggcttcgtgaaa

SEQ ID NO: 152034 - DNA, 25 bp, Saccharomyces pastorianus
ttggcgaagatctaccggattcctt

SEQ ID NO: 152035 - DNA, 25 bp, Saccharomyces pastorianus
gagtttgccgagcaactcgttgaag

SEQ ID NO: 152036 - DNA, 25 bp, Saccharomyces pastorianus
gaaaagatacttacggcccaaggtg

SEQ ID NO: 152037 - DNA, 25 bp, Saccharomyces pastorianus
agcagcctcttgtcatcgtcgttgg

SEQ ID NO: 152038 - DNA, 25 bp, Saccharomyces pastorianus
gaagctacagcgtctcaatgaccat

SEQ ID NO: 152039 - DNA, 25 bp, Saccharomyces pastorianus
gtctggaaaacatcctcagcagcct

SEQ ID NO: 152040 - DNA, 25 bp, Saccharomyces pastorianus
ccccacaggttttcaaatccaagct

SEQ ID NO: 152041 - DNA, 25 bp, Saccharomyces pastorianus
aagctaacaagaggcctacagattt

SEQ ID NO: 152042 - DNA, 25 bp, Saccharomyces pastorianus
ggtaacaagattggcaaacataata

SEQ ID NO: 152043 - DNA, 25 bp, Saccharomyces pastorianus
tcaaggtaacaagattggcaaacat

SEQ ID NO: 152044 - DNA, 25 bp, Saccharomyces pastorianus
caagattggcaaacataataagaaa

SEQ ID NO: 152045 - DNA, 25 bp, Saccharomyces pastorianus
caaggtaacaagattggcaaacata

SEQ ID NO: 152046 - DNA, 25 bp, Saccharomyces pastorianus
gaggaagagtaaatcaaggtaacaa

SEQ ID NO: 152047 - DNA, 25 bp, Saccharomyces pastorianus
gagaggaagagtaaatcaaggtaac

SEQ ID NO: 152048 - DNA, 25 bp, Saccharomyces pastorianus
aggtaacaagattggcaaacataat

SEQ ID NO: 152049 - DNA, 25 bp, Saccharomyces pastorianus
aatcaaggtaacaagattggcaaac

SEQ ID NO: 152050 - DNA, 25 bp, Saccharomyces pastorianus
aaggtaacaagattggcaaacataa

SEQ ID NO: 152051 - DNA, 25 bp, Saccharomyces pastorianus
atcaaggtaacaagattggcaaaca

SEQ ID NO: 152052 - DNA, 25 bp, Saccharomyces pastorianus
ggaagagtaaatcaaggtaacaaga

SEQ ID NO: 152053 - DNA, 25 bp, Saccharomyces pastorianus
gaacacactggtcatttcaaagcca

SEQ ID NO: 152054 - DNA, 25 bp, Saccharomyces pastorianus
gcgccattgggtttaccaaggtttg

SEQ ID NO: 152055 - DNA, 25 bp, Saccharomyces pastorianus
gatgtagctgccacaaagggttcaa

SEQ ID NO: 152056 - DNA, 25 bp, Saccharomyces pastorianus
agatggtctcacgaacacactggtc

SEQ ID NO: 152057 - DNA, 25 bp, Saccharomyces pastorianus
aactcgattccggtatactaatgga

SEQ ID NO: 152058 - DNA, 25 bp, Saccharomyces pastorianus
ttgtacttaacttctaactctaggg

SEQ ID NO: 152059 - DNA, 25 bp, Saccharomyces pastorianus
gaagctgtttatgggtctgatgaag

SEQ ID NO: 152060 - DNA, 25 bp, Saccharomyces pastorianus
gccaaaggtgccagagttacttcta

SEQ ID NO: 152061 - DNA, 25 bp, Saccharomyces pastorianus
atgtctgcattcgatgaagctgttt

SEQ ID NO: 152062 - DNA, 25 bp, Saccharomyces pastorianus
tacattgaagccaacttccctgaag

SEQ ID NO: 152063 - DNA, 25 bp, Saccharomyces pastorianus
gttcaattacgggttatgcttgttt

SEQ ID NO: 152064 - DNA, 25 bp, Saccharomyces pastorianus
agaatctcaaaatgtaccggcttta

SEQ ID NO: 152065 - DNA, 25 bp, Saccharomyces pastorianus
gaaggccctaaccaaaagtctcaag

SEQ ID NO: 152066 - DNA, 25 bp, Saccharomyces pastorianus
taaatcttccattctaagccgccat

SEQ ID NO: 152067 - DNA, 25 bp, Saccharomyces pastorianus
aatataaccctttcctttgaggatg

SEQ ID NO: 152068 - DNA, 25 bp, Saccharomyces pastorianus
gaggatgccttaacagagacccaag

SEQ ID NO: 152069 - DNA, 25 bp, Saccharomyces pastorianus
gataggatgccttcggcgatgaccc

SEQ ID NO: 152070 - DNA, 25 bp, Saccharomyces pastorianus
gaggagcttgaatcacttggcgaag

SEQ ID NO: 152071 - DNA, 25 bp, Saccharomyces pastorianus
agtctcctcatggtgatgaccgtga

SEQ ID NO: 152072 - DNA, 25 bp, Saccharomyces pastorianus
tatggacagcacatttcaacgtcga

SEQ ID NO: 152073 - DNA, 25 bp, Saccharomyces pastorianus
atgaccccaagagatgaggatgcct

SEQ ID NO: 152074 - DNA, 25 bp, Saccharomyces pastorianus
ggctttaccacatattgcaggctat

SEQ ID NO: 152075 - DNA, 25 bp, Saccharomyces pastorianus
gggtctcttttgctggctattgttg

SEQ ID NO: 152076 - DNA, 25 bp, Saccharomyces pastorianus
atctggatattctgattcggtagca

SEQ ID NO: 152077 - DNA, 25 bp, Saccharomyces pastorianus
gacggcgatgatattctatctggat

SEQ ID NO: 152078 - DNA, 25 bp, Saccharomyces pastorianus
ggtgcgagattctatcaattccgaa

SEQ ID NO: 152079 - DNA, 25 bp, Saccharomyces pastorianus
acacatcaggtcatttcttcaacac

SEQ ID NO: 152080 - DNA, 25 bp, Saccharomyces pastorianus
atttggcgcatgtaattcagtgctg

SEQ ID NO: 152081 - DNA, 25 bp, Saccharomyces pastorianus
aaaggaagcatttggccgctaaaat

SEQ ID NO: 152082 - DNA, 25 bp, Saccharomyces pastorianus
aaaattgtcacgttgggtgcgagat

SEQ ID NO: 152083 - DNA, 25 bp, Saccharomyces pastorianus
gtgcgatataataggcccaatttcc

SEQ ID NO: 152084 - DNA, 25 bp, Saccharomyces pastorianus
acatttacttgctcgatgtgcgata

SEQ ID NO: 152085 - DNA, 25 bp, Saccharomyces pastorianus
tgttggacgtgctatacggcatgca

SEQ ID NO: 152086 - DNA, 25 bp, Saccharomyces pastorianus
gaatttgtccctattacgcctcgag

SEQ ID NO: 152087 - DNA, 25 bp, Saccharomyces pastorianus
aaacgaatggcgtcattgtcctgat

SEQ ID NO: 152088 - DNA, 25 bp, Saccharomyces pastorianus
aattgacacgtataacccagcacta

SEQ ID NO: 152089 - DNA, 25 bp, Saccharomyces pastorianus
ggaggcacttcctattgcggaggta

SEQ ID NO: 152090 - DNA, 25 bp, Saccharomyces pastorianus
cattgtcctgatacgttagctctca

SEQ ID NO: 152091 - DNA, 25 bp, Saccharomyces pastorianus
atatattcctctcagatctcgttgg

SEQ ID NO: 152092 - DNA, 25 bp, Saccharomyces pastorianus
ttaagtccaggctcaatcccggtaa

SEQ ID NO: 152093 - DNA, 25 bp, Saccharomyces pastorianus
tattgaagatttagttcccctggga

SEQ ID NO: 152094 - DNA, 25 bp, Saccharomyces pastorianus
agtccacccgttcaagtcttcaaat

SEQ ID NO: 152095 - DNA, 25 bp, Saccharomyces pastorianus
gcggaggtagtgactttgccatatc

SEQ ID NO: 152096 - DNA, 25 bp, Saccharomyces pastorianus
aatacttactttctgagtccacccg

SEQ ID NO: 152097 - DNA, 25 bp, Saccharomyces pastorianus
ataccataggtgagtccgtcatcaa

SEQ ID NO: 152098 - DNA, 25 bp, Saccharomyces pastorianus
attgcatgctctcctatttttacct

SEQ ID NO: 152099 - DNA, 25 bp, Saccharomyces pastorianus
cattcttactggctttggtcgttac

SEQ ID NO: 152100 - DNA, 25 bp, Saccharomyces pastorianus
taggatatcaagttctttccccgaa

SEQ ID NO: 152101 - DNA, 25 bp, Saccharomyces pastorianus
gaatatgcgcagctcattcttactg

SEQ ID NO: 152102 - DNA, 25 bp, Saccharomyces pastorianus
atatgtttgcatactcgccgtttta

SEQ ID NO: 152103 - DNA, 25 bp, Saccharomyces pastorianus
tggtgctttgatggccctactaggt

SEQ ID NO: 152104 - DNA, 25 bp, Saccharomyces pastorianus
gggagtgccattatcctaatttttt

SEQ ID NO: 152105 - DNA, 25 bp, Saccharomyces pastorianus
agtttgtgtacttgcattcgcccaa

SEQ ID NO: 152106 - DNA, 25 bp, Saccharomyces pastorianus
tactaggtatctcactcaacgctgt

SEQ ID NO: 152107 - DNA, 25 bp, Saccharomyces pastorianus
agatcatttacagtggtccccagtg

SEQ ID NO: 152108 - DNA, 25 bp, Saccharomyces pastorianus
attgttccagaatcaggttccttag

SEQ ID NO: 152109 - DNA, 25 bp, Saccharomyces pastorianus
ttccctttctgttctgatcttttac

SEQ ID NO: 152110 - DNA, 25 bp, Saccharomyces pastorianus
acacaatctgtgcactttttgcatt

SEQ ID NO: 152111 - DNA, 25 bp, Saccharomyces pastorianus
aaatgtgtgtgttctgattgtcaag

SEQ ID NO: 152112 - DNA, 25 bp, Saccharomyces pastorianus
gtttatgcttgcgatgatgctcaat

SEQ ID NO: 152113 - DNA, 25 bp, Saccharomyces pastorianus
taaattttctgctaccaacggttat

SEQ ID NO: 152114 - DNA, 25 bp, Saccharomyces pastorianus
gcatttatgtggtattatctctgta

SEQ ID NO: 152115 - DNA, 25 bp, Saccharomyces pastorianus
ctaaacctatgcttggtggatcccc

SEQ ID NO: 152116 - DNA, 25 bp, Saccharomyces pastorianus
catgaattcgtcttgggcatctgaa

SEQ ID NO: 152117 - DNA, 25 bp, Saccharomyces pastorianus
gcgtgtgtaaagttggccctctgcc

SEQ ID NO: 152118 - DNA, 25 bp, Saccharomyces pastorianus
caacggttatgcgatggacctaatc

SEQ ID NO: 152119 - DNA, 25 bp, Saccharomyces pastorianus
gtcattgctatgtcaaaccggatgc

SEQ ID NO: 152120 - DNA, 25 bp, Saccharomyces pastorianus
acagctaacagcgtatgtgtccatt

SEQ ID NO: 152121 - DNA, 25 bp, Saccharomyces pastorianus
aaccggatgcttcttgatagctgca

SEQ ID NO: 152122 - DNA, 25 bp, Saccharomyces pastorianus
gttttggcttctattgtttgtgcag

SEQ ID NO: 152123 - DNA, 25 bp, Saccharomyces pastorianus
tgctatatattccacagtttctgtt

SEQ ID NO: 152124 - DNA, 25 bp, Saccharomyces pastorianus
attggctgttccacaggattcctac

SEQ ID NO: 152125 - DNA, 25 bp, Saccharomyces pastorianus
gtgcagccggatttttaactctttt

SEQ ID NO: 152126 - DNA, 25 bp, Saccharomyces pastorianus
tgtgtccattttgtctctctacgaa

SEQ ID NO: 152127 - DNA, 25 bp, Saccharomyces pastorianus
gggagaatgtctccttccattttaa

SEQ ID NO: 152128 - DNA, 25 bp, Saccharomyces pastorianus
ggattcctacctggttgactatttt

SEQ ID NO: 152129 - DNA, 25 bp, Saccharomyces pastorianus
aatcattatcttctcggcttggttt

SEQ ID NO: 152130 - DNA, 25 bp, Saccharomyces pastorianus
gggcagtcctacagtatatcaaaga

SEQ ID NO: 152131 - DNA, 25 bp, Saccharomyces pastorianus
ggttgtatccccactactttacgct

SEQ ID NO: 152132 - DNA, 25 bp, Saccharomyces pastorianus
agatcatcagaagcccacaaaccta

SEQ ID NO: 152133 - DNA, 25 bp, Saccharomyces pastorianus
gattgcggacaacttattggagaca

SEQ ID NO: 152134 - DNA, 25 bp, Saccharomyces pastorianus
aatagccacaaaggctgctttggaa

SEQ ID NO: 152135 - DNA, 25 bp, Saccharomyces pastorianus
aatcgggttaaagcaatagccacaa

SEQ ID NO: 152136 - DNA, 25 bp, Saccharomyces pastorianus
gcaacctgattgcttccgagggtga

SEQ ID NO: 152137 - DNA, 25 bp, Saccharomyces pastorianus
gcaccaatacagcacaagatcatca

SEQ ID NO: 152138 - DNA, 25 bp, Saccharomyces pastorianus
actactttacgctgcaccaatacag

SEQ ID NO: 152139 - DNA, 25 bp, Saccharomyces pastorianus
tccgagggtgagttctcttggaaaa

SEQ ID NO: 152140 - DNA, 25 bp, Saccharomyces pastorianus
ggtagtcctaatacgctatcagaaa

SEQ ID NO: 152141 - DNA, 25 bp, Saccharomyces pastorianus
ggaacaacttgaaaccgcatctaaa

SEQ ID NO: 152142 - DNA, 25 bp, Saccharomyces pastorianus
gacatgttataactttcttcgtgat

SEQ ID NO: 152143 - DNA, 25 bp, Saccharomyces pastorianus
gaagcaccctgacgatgaggtcctt

SEQ ID NO: 152144 - DNA, 25 bp, Saccharomyces pastorianus
ttagcagcaaattcactaccgattt

SEQ ID NO: 152145 - DNA, 25 bp, Saccharomyces pastorianus
gaatcatttcatgcgggtatttgct

SEQ ID NO: 152146 - DNA, 25 bp, Saccharomyces pastorianus
gatgaggtccttttttatcttagaa

SEQ ID NO: 152147 - DNA, 25 bp, Saccharomyces pastorianus
gaagtgatttggcattcctttgcta

SEQ ID NO: 152148 - DNA, 25 bp, Saccharomyces pastorianus
cccgtaagacgttctatttgtgcat

SEQ ID NO: 152149 - DNA, 25 bp, Saccharomyces pastorianus
agactcggaggcaatgaatcatttc

SEQ ID NO: 152150 - DNA, 25 bp, Saccharomyces pastorianus
acttgactatggttttcagcacttg

SEQ ID NO: 152151 - DNA, 25 bp, Saccharomyces pastorianus
ggcattcctttgctataatacttgt

SEQ ID NO: 152152 - DNA, 25 bp, Saccharomyces pastorianus
aagcctctgttcaaccttcgagaga

SEQ ID NO: 152153 - DNA, 25 bp, Saccharomyces pastorianus
gctatgaagcttctcgccaaattat

SEQ ID NO: 152154 - DNA, 25 bp, Saccharomyces pastorianus
caaaccaactctttcatttcatcag

SEQ ID NO: 152155 - DNA, 25 bp, Saccharomyces pastorianus
gagatatccccggtcaagtagtcga

SEQ ID NO: 152156 - DNA, 25 bp, Saccharomyces pastorianus
gttcgtgccgaagctgaatctttgg

SEQ ID NO: 152157 - DNA, 25 bp, Saccharomyces pastorianus
gaatcggccttggaatcttggaccc

SEQ ID NO: 152158 - DNA, 25 bp, Saccharomyces pastorianus
gaatctttggttgcggaggctcaat

SEQ ID NO: 152159 - DNA, 25 bp, Saccharomyces pastorianus
agctagaccagcgtacgatggctat

SEQ ID NO: 152160 - DNA, 25 bp, Saccharomyces pastorianus
ttgctggatacggaaaggccttatt

SEQ ID NO: 152161 - DNA, 25 bp, Saccharomyces pastorianus
gagctgctagatgactctcctgtca

SEQ ID NO: 152162 - DNA, 25 bp, Saccharomyces pastorianus
gaccctagacatggctgcagtcaaa

SEQ ID NO: 152163 - DNA, 25 bp, Saccharomyces pastorianus
gagttggctcgtaaattatctcaat

SEQ ID NO: 152164 - DNA, 25 bp, Saccharomyces pastorianus
taaccgacaaattaggcgtcttaat

SEQ ID NO: 152165 - DNA, 25 bp, Saccharomyces pastorianus
aactttgggccagagttggctcgta

SEQ ID NO: 152166 - DNA, 25 bp, Saccharomyces pastorianus
gcgaacgccgtgaagctgcaaagca

SEQ ID NO: 152167 - DNA, 25 bp, Saccharomyces pastorianus
gatgatgtttccgacgtaaccgaca

SEQ ID NO: 152168 - DNA, 25 bp, Saccharomyces pastorianus
gaagttgttgccagcgaacgccgtg

SEQ ID NO: 152169 - DNA, 25 bp, Saccharomyces pastorianus
aaaggcctctattgcgtctagtttt

SEQ ID NO: 152170 - DNA, 25 bp, Saccharomyces pastorianus
caccatcctcaacgaagtccaagtt

SEQ ID NO: 152171 - DNA, 25 bp, Saccharomyces pastorianus
aaatgcggctggtaactttgggcca

SEQ ID NO: 152172 - DNA, 25 bp, Saccharomyces pastorianus
gctgcaaagcaactgtctctatggg

SEQ ID NO: 152173 - DNA, 25 bp, Saccharomyces pastorianus
gtccaagttcttcggaaaggcctct

SEQ ID NO: 152174 - DNA, 25 bp, Saccharomyces pastorianus
gaattcaaaccgtgtgatccccggt

SEQ ID NO: 152175 - DNA, 25 bp, Saccharomyces pastorianus
ggtggtaatgtttctgctcacacca

SEQ ID NO: 152176 - DNA, 25 bp, Saccharomyces pastorianus
tagcgggtcctttgcatgggttagc

SEQ ID NO: 152177 - DNA, 25 bp, Saccharomyces pastorianus
tctaatatttccagcattgcacgag

SEQ ID NO: 152178 - DNA, 25 bp, Saccharomyces pastorianus
atttcccaatgttgactctgcatcg

SEQ ID NO: 152179 - DNA, 25 bp, Saccharomyces pastorianus
acccgtatctcagctattcatctgg

SEQ ID NO: 152180 - DNA, 25 bp, Saccharomyces pastorianus
gggatcgcattctaggtttaccaat

SEQ ID NO: 152181 - DNA, 25 bp, Saccharomyces pastorianus
gttttgcgtaaaccggatcctcgat

SEQ ID NO: 152182 - DNA, 25 bp, Saccharomyces pastorianus
gatccccggttatgggcacgcagtt

SEQ ID NO: 152183 - DNA, 25 bp, Saccharomyces pastorianus
gaagtgcgttgagtgacccgtatct

SEQ ID NO: 152184 - DNA, 25 bp, Saccharomyces pastorianus
atgggacccttgacacaacttgttt

SEQ ID NO: 152185 - DNA, 25 bp, Saccharomyces pastorianus
aggtggtgtgccaactttccagcaa

SEQ ID NO: 152186 - DNA, 25 bp, Saccharomyces pastorianus
taccgggcgcacatatatgcagaag

SEQ ID NO: 152187 - DNA, 25 bp, Saccharomyces pastorianus
gcagcacgtttgtcggaccgattac

SEQ ID NO: 152188 - DNA, 25 bp, Saccharomyces pastorianus
ggcgataatttcctgccagaatcaa

SEQ ID NO: 152189 - DNA, 25 bp, Saccharomyces pastorianus
gattaccatttcatcagttctaggt

SEQ ID NO: 152190 - DNA, 25 bp, Saccharomyces pastorianus
attagatcccgaacatggcattaaa

SEQ ID NO: 152191 - DNA, 25 bp, Saccharomyces pastorianus
agaaggtccttcaattcgtctgcaa

SEQ ID NO: 152192 - DNA, 25 bp, Saccharomyces pastorianus
cagcaagctgcttctttaaggacag

SEQ ID NO: 152193 - DNA, 25 bp, Saccharomyces pastorianus
gaaggcctgttatggcagcacgttt

SEQ ID NO: 152194 - DNA, 25 bp, Saccharomyces pastorianus
aagtcttctgcattgactctcaagg

SEQ ID NO: 152195 - DNA, 25 bp, Saccharomyces pastorianus
tggtacaaaggcttctaccgggcgc

SEQ ID NO: 152196 - DNA, 25 bp, Saccharomyces pastorianus
gaactttacgaatcttgacgactac

SEQ ID NO: 152197 - DNA, 25 bp, Saccharomyces pastorianus
gaatccaaattctggctagggtagc

SEQ ID NO: 152198 - DNA, 25 bp, Saccharomyces pastorianus
gagcctctcacatttacaaacagcg

SEQ ID NO: 152199 - DNA, 25 bp, Saccharomyces pastorianus
ggtgggatgacctcaatagattctt

SEQ ID NO: 152200 - DNA, 25 bp, Saccharomyces pastorianus
aatagattcttcagccgcccaagtg

SEQ ID NO: 152201 - DNA, 25 bp, Saccharomyces pastorianus
ggcgcaatgtctttatttaccttgt

SEQ ID NO: 152202 - DNA, 25 bp, Saccharomyces pastorianus
gagagacatatctccgtacttcgat

SEQ ID NO: 152203 - DNA, 25 bp, Saccharomyces pastorianus
gtacggttcgtctaagatacatcct

SEQ ID NO: 152204 - DNA, 25 bp, Saccharomyces pastorianus
gattgttagaatacctgagcctctc

SEQ ID NO: 152205 - DNA, 25 bp, Saccharomyces pastorianus
gaactctctggatgttgagggcaca

SEQ ID NO: 152206 - DNA, 25 bp, Saccharomyces pastorianus
atgcatcggatgtgtctattcaatt

SEQ ID NO: 152207 - DNA, 25 bp, Saccharomyces pastorianus
cagcggatgttgcttgattgtcctc

SEQ ID NO: 152208 - DNA, 25 bp, Saccharomyces pastorianus
gattgtcctctttttaacgcgtcta

SEQ ID NO: 152209 - DNA, 25 bp, Saccharomyces pastorianus
aagagcgcaatattttttccagata

SEQ ID NO: 152210 - DNA, 25 bp, Saccharomyces pastorianus
gcaaggcacttctacgaggtttcat

SEQ ID NO: 152211 - DNA, 25 bp, Saccharomyces pastorianus
ataccaacggcaatattcagcggat

SEQ ID NO: 152212 - DNA, 25 bp, Saccharomyces pastorianus
atgcggactatattctttggctatt

SEQ ID NO: 152213 - DNA, 25 bp, Saccharomyces pastorianus
ggcactatcctacttttttctggta

SEQ ID NO: 152214 - DNA, 25 bp, Saccharomyces pastorianus
ttcctcagatgatagttgggcccga

SEQ ID NO: 152215 - DNA, 25 bp, Saccharomyces pastorianus
tagtaagcttgcctcaacactacca

SEQ ID NO: 152216 - DNA, 25 bp, Saccharomyces pastorianus
gtgcaatttccttggtcgtgggaca

SEQ ID NO: 152217 - DNA, 25 bp, Saccharomyces pastorianus
ggtatcttaggttctgttcctcaga

SEQ ID NO: 152218 - DNA, 25 bp, Saccharomyces pastorianus
gtcagcagacagatagccgccagtg

SEQ ID NO: 152219 - DNA, 25 bp, Saccharomyces pastorianus
gaagacgattccagcaacagttgtt

SEQ ID NO: 152220 - DNA, 25 bp, Saccharomyces pastorianus
gagagtcgggccatctgaacagaat

SEQ ID NO: 152221 - DNA, 25 bp, Saccharomyces pastorianus
gaatatcctgttgcagatgcggtaa

SEQ ID NO: 152222 - DNA, 25 bp, Saccharomyces pastorianus
tgccttcctatccttactgaatttg

SEQ ID NO: 152223 - DNA, 25 bp, Saccharomyces pastorianus
gaagatatagttggtgccctcagaa

SEQ ID NO: 152224 - DNA, 25 bp, Saccharomyces pastorianus
acagttgtttttctgatggctctca

SEQ ID NO: 152225 - DNA, 25 bp, Saccharomyces pastorianus
gaatctacctccttcaagttttgga

SEQ ID NO: 152226 - DNA, 25 bp, Saccharomyces pastorianus
gatgctgttggttgacatcatccca

SEQ ID NO: 152227 - DNA, 25 bp, Saccharomyces pastorianus
gctccaatccgcctttcaagagaaa

SEQ ID NO: 152228 - DNA, 25 bp, Saccharomyces pastorianus
ttgtcggaagaacaacgcgctccaa

SEQ ID NO: 152229 - DNA, 25 bp, Saccharomyces pastorianus
catcgcgccgatgtaggtgggcaat

SEQ ID NO: 152230 - DNA, 25 bp, Saccharomyces pastorianus
ttctaacaggttcgagcttcatggg

SEQ ID NO: 152231 - DNA, 25 bp, Saccharomyces pastorianus
gatgtggactttaacctggacttag

SEQ ID NO: 152232 - DNA, 25 bp, Saccharomyces pastorianus
agaaattcttttccgctggatgaaa

SEQ ID NO: 152233 - DNA, 25 bp, Saccharomyces pastorianus
taggctctcactcaagttcacagaa

SEQ ID NO: 152234 - DNA, 25 bp, Saccharomyces pastorianus
gacgcgcaaagtaatctaggatcta

SEQ ID NO: 152235 - DNA, 25 bp, Saccharomyces pastorianus
ggacatgactaactcagacgcgcaa

SEQ ID NO: 152236 - DNA, 25 bp, Saccharomyces pastorianus
gccaaaattttctcacctctaacat

SEQ ID NO: 152237 - DNA, 25 bp, Saccharomyces pastorianus
ggtgggcaattttctaaggtacaat

SEQ ID NO: 152238 - DNA, 25 bp, Saccharomyces pastorianus
gggccggtagccaatctcaaagact

SEQ ID NO: 152239 - DNA, 25 bp, Saccharomyces pastorianus
aatgcaaagaggacatcgcgccgat

SEQ ID NO: 152240 - DNA, 25 bp, Saccharomyces pastorianus
atctgatatgaacgtattttccaag

SEQ ID NO: 152241 - DNA, 25 bp, Saccharomyces pastorianus
gtgccttttctcgagaggatttaca

SEQ ID NO: 152242 - DNA, 25 bp, Saccharomyces pastorianus
tgtgatgggcacatatgaagtcata

SEQ ID NO: 152243 - DNA, 25 bp, Saccharomyces pastorianus
gcacctcttgcagtagaagaaacca

SEQ ID NO: 152244 - DNA, 25 bp, Saccharomyces pastorianus
aaactgcctgatgtgatgggcacat

SEQ ID NO: 152245 - DNA, 25 bp, Saccharomyces pastorianus
tgaagtcataaaacaccttgataaa

SEQ ID NO: 152246 - DNA, 25 bp, Saccharomyces pastorianus
aatggaaagtgccttttctcgagag

SEQ ID NO: 152247 - DNA, 25 bp, Saccharomyces pastorianus
aagtatcttcgagatgactgtcgat

SEQ ID NO: 152248 - DNA, 25 bp, Saccharomyces pastorianus
aaagcctgcacctcttgcagtagaa

SEQ ID NO: 152249 - DNA, 25 bp, Saccharomyces pastorianus
aatagtccttttcaaagcctgcacc

SEQ ID NO: 152250 - DNA, 25 bp, Saccharomyces pastorianus
atgaagtttttcaggaaactgcctg

SEQ ID NO: 152251 - DNA, 25 bp, Saccharomyces pastorianus
ggttctattttgaccacgcaacaga

SEQ ID NO: 152252 - DNA, 25 bp, Saccharomyces pastorianus
gggcatggtacatcttttctattac

SEQ ID NO: 152253 - DNA, 25 bp, Saccharomyces pastorianus
gatttccaccgtttgttgtcgtcgt

SEQ ID NO: 152254 - DNA, 25 bp, Saccharomyces pastorianus
tcgttccactggtcctgtcaatagt

SEQ ID NO: 152255 - DNA, 25 bp, Saccharomyces pastorianus
aactaccacggtaatgagccaatgt

SEQ ID NO: 152256 - DNA, 25 bp, Saccharomyces pastorianus
attgaagtacttggactctgagcta

SEQ ID NO: 152257 - DNA, 25 bp, Saccharomyces pastorianus
cgtatgtcgcgagtgtggttctatt

SEQ ID NO: 152258 - DNA, 25 bp, Saccharomyces pastorianus
agactacacacaggcatccgtatgt

SEQ ID NO: 152259 - DNA, 25 bp, Saccharomyces pastorianus
gacgctttgattgggcatggtacat

SEQ ID NO: 152260 - DNA, 25 bp, Saccharomyces pastorianus
gactctgagctatccgcaatgggta

SEQ ID NO: 152261 - DNA, 25 bp, Saccharomyces pastorianus
gaaacaactacggtggccataccat

SEQ ID NO: 152262 - DNA, 25 bp, Saccharomyces pastorianus
taccacagtcagaaagttgctacct

SEQ ID NO: 152263 - DNA, 25 bp, Saccharomyces pastorianus
atctgacgtctcaagaattccttct

SEQ ID NO: 152264 - DNA, 25 bp, Saccharomyces pastorianus
agtttctggttatactgtggttgca

SEQ ID NO: 152265 - DNA, 25 bp, Saccharomyces pastorianus
tggtaacctagtgtcccagtctggg

SEQ ID NO: 152266 - DNA, 25 bp, Saccharomyces pastorianus
atattaaccgtggtatggccattaa

SEQ ID NO: 152267 - DNA, 25 bp, Saccharomyces pastorianus
tcccagtctgggttagatttacaac

SEQ ID NO: 152268 - DNA, 25 bp, Saccharomyces pastorianus
cttccctgtgttgtgtccaattgat

SEQ ID NO: 152269 - DNA, 25 bp, Saccharomyces pastorianus
cagataacccagatgctacgcaaca

SEQ ID NO: 152270 - DNA, 25 bp, Saccharomyces pastorianus
actcacttggtgttgctccggcttt

SEQ ID NO: 152271 - DNA, 25 bp, Saccharomyces pastorianus
tgtgccctgttcatacgccagatgg

SEQ ID NO: 152272 - DNA, 25 bp, Saccharomyces pastorianus
gtttattaaaccattttgcgcacaa

SEQ ID NO: 152273 - DNA, 25 bp, Saccharomyces pastorianus
ggatgcgctcgtgacaatcggcaga

SEQ ID NO: 152274 - DNA, 25 bp, Saccharomyces pastorianus
cagaaggcgttagcggttactacaa

SEQ ID NO: 152275 - DNA, 25 bp, Saccharomyces pastorianus
gcgttagcggttactacaaaggctt

SEQ ID NO: 152276 - DNA, 25 bp, Saccharomyces pastorianus
ggttactacaaaggcttagctgcaa

SEQ ID NO: 152277 - DNA, 25 bp, Saccharomyces pastorianus
aatgaactgggatttagatacacga

SEQ ID NO: 152278 - DNA, 25 bp, Saccharomyces pastorianus
ggcttagctgcaaacctttttaaag

SEQ ID NO: 152279 - DNA, 25 bp, Saccharomyces pastorianus
gttgttccttcaactgcagtgagtt

SEQ ID NO: 152280 - DNA, 25 bp, Saccharomyces pastorianus
aaagttgttccttcaactgcagtga

SEQ ID NO: 152281 - DNA, 25 bp, Saccharomyces pastorianus
tgggatgcgctcgtgacaatcggca

SEQ ID NO: 152282 - DNA, 25 bp, Saccharomyces pastorianus
tttagatacacgagtgtctgggatg

SEQ ID NO: 152283 - DNA, 25 bp, Saccharomyces pastorianus
aactgcagtgagttggctagtttac

SEQ ID NO: 152284 - DNA, 25 bp, Saccharomyces pastorianus
acatcgtctctaccatccaaaagaa

SEQ ID NO: 152285 - DNA, 25 bp, Saccharomyces pastorianus
agaccgctagccaatctcaaagtcc

SEQ ID NO: 152286 - DNA, 25 bp, Saccharomyces pastorianus
gacgcacaaaactgggagaatcttc

SEQ ID NO: 152287 - DNA, 25 bp, Saccharomyces pastorianus
gacgggccaatcgatccattcaaag

SEQ ID NO: 152288 - DNA, 25 bp, Saccharomyces pastorianus
gggttcaagacagcacgttttcttt

SEQ ID NO: 152289 - DNA, 25 bp, Saccharomyces pastorianus
gttatcatagaaaccgacgggccaa

SEQ ID NO: 152290 - DNA, 25 bp, Saccharomyces pastorianus
atttgccccgcaaatgggtaatcaa

SEQ ID NO: 152291 - DNA, 25 bp, Saccharomyces pastorianus
taattccgacttacaggcacagacc

SEQ ID NO: 152292 - DNA, 25 bp, Saccharomyces pastorianus
aatgattacagaccccatggactta

SEQ ID NO: 152293 - DNA, 25 bp, Saccharomyces pastorianus
ttctttgggtactgtgactgaaata

SEQ ID NO: 152294 - DNA, 25 bp, Saccharomyces pastorianus
catggacttacttcgactttttgat

SEQ ID NO: 152295 - DNA, 25 bp, Saccharomyces pastorianus
caaatagaagtgacgatgctctgta

SEQ ID NO: 152296 - DNA, 25 bp, Saccharomyces pastorianus
gacgatgctctgtatgtaaatacgt

SEQ ID NO: 152297 - DNA, 25 bp, Saccharomyces pastorianus
gaagtgacgatgctctgtatgtaaa

SEQ ID NO: 152298 - DNA, 25 bp, Saccharomyces pastorianus
aagtgacgatgctctgtatgtaaat

SEQ ID NO: 152299 - DNA, 25 bp, Saccharomyces pastorianus
gacaaggatccaaatagaagtgacg

SEQ ID NO: 152300 - DNA, 25 bp, Saccharomyces pastorianus
atccaaatagaagtgacgatgctct

SEQ ID NO: 152301 - DNA, 25 bp, Saccharomyces pastorianus
gcatatggacgaatacttcaatgac

SEQ ID NO: 152302 - DNA, 25 bp, Saccharomyces pastorianus
cttcaatgacaaggatccaaataga

SEQ ID NO: 152303 - DNA, 25 bp, Saccharomyces pastorianus
cgatgctctgtatgtaaatacgtct

SEQ ID NO: 152304 - DNA, 25 bp, Saccharomyces pastorianus
atagaagtgacgatgctctgtatgt

SEQ ID NO: 152305 - DNA, 25 bp, Saccharomyces pastorianus
agaagtgacgatgctctgtatgtaa

SEQ ID NO: 152306 - DNA, 25 bp, Saccharomyces pastorianus
gccagggtcccagtcacagttgagt

SEQ ID NO: 152307 - DNA, 25 bp, Saccharomyces pastorianus
gctcgtcatccgaccaaaatgggaa

SEQ ID NO: 152308 - DNA, 25 bp, Saccharomyces pastorianus
aaagaagctctccactagcctggga

SEQ ID NO: 152309 - DNA, 25 bp, Saccharomyces pastorianus
aagaattggaatcgccagggtccca

SEQ ID NO: 152310 - DNA, 25 bp, Saccharomyces pastorianus
gtaagagcacttcacagagttcctt

SEQ ID NO: 152311 - DNA, 25 bp, Saccharomyces pastorianus
atcttcttcgctatcgccaaatatg

SEQ ID NO: 152312 - DNA, 25 bp, Saccharomyces pastorianus
caagatttcccttcaaattcccata

SEQ ID NO: 152313 - DNA, 25 bp, Saccharomyces pastorianus
ggagacagccgctcgaatgctagta

SEQ ID NO: 152314 - DNA, 25 bp, Saccharomyces pastorianus
atgctacatcacattgccggttatc

SEQ ID NO: 152315 - DNA, 25 bp, Saccharomyces pastorianus
gagttccttaacatcttcagtgagc

SEQ ID NO: 152316 - DNA, 25 bp, Saccharomyces pastorianus
aaatttgcagactacccgctgatgt

SEQ ID NO: 152317 - DNA, 25 bp, Saccharomyces pastorianus
ggctgccatatgacagacttctgag

SEQ ID NO: 152318 - DNA, 25 bp, Saccharomyces pastorianus
ggatcaaaagccactagtaccaatt

SEQ ID NO: 152319 - DNA, 25 bp, Saccharomyces pastorianus
atccatctgttaaggttgataagtg

SEQ ID NO: 152320 - DNA, 25 bp, Saccharomyces pastorianus
aagccactagtaccaattaggattt

SEQ ID NO: 152321 - DNA, 25 bp, Saccharomyces pastorianus
agtgttttaccagagctgacctcgt

SEQ ID NO: 152322 - DNA, 25 bp, Saccharomyces pastorianus
gggctatccatctgttaaggttgat

SEQ ID NO: 152323 - DNA, 25 bp, Saccharomyces pastorianus
gctgacctcgtctactactatggat

SEQ ID NO: 152324 - DNA, 25 bp, Saccharomyces pastorianus
gccatatgacagacttctgagaaaa

SEQ ID NO: 152325 - DNA, 25 bp, Saccharomyces pastorianus
agagctgacctcgtctactactatg

SEQ ID NO: 152326 - DNA, 25 bp, Saccharomyces pastorianus
gttttaccagagctgacctcgtcta

SEQ ID NO: 152327 - DNA, 25 bp, Saccharomyces pastorianus
gataagtgttttaccagagctgacc

SEQ ID NO: 152328 - DNA, 25 bp, Saccharomyces pastorianus
tgtgggtctgacttgcaaagcgcca

SEQ ID NO: 152329 - DNA, 25 bp, Saccharomyces pastorianus
gggtattacttttcaattgccagaa

SEQ ID NO: 152330 - DNA, 25 bp, Saccharomyces pastorianus
gaaaacttccaccaatacagtcgta

SEQ ID NO: 152331 - DNA, 25 bp, Saccharomyces pastorianus
gaatatgaaactctagatgcccacg

SEQ ID NO: 152332 - DNA, 25 bp, Saccharomyces pastorianus
tgagctacatagacttgcgcaaggt

SEQ ID NO: 152333 - DNA, 25 bp, Saccharomyces pastorianus
acagcaagggctatggttactcaat

SEQ ID NO: 152334 - DNA, 25 bp, Saccharomyces pastorianus
gatgcccacgaaatcgaacaagttt

SEQ ID NO: 152335 - DNA, 25 bp, Saccharomyces pastorianus
gattgaacttttgaaggactccgag

SEQ ID NO: 152336 - DNA, 25 bp, Saccharomyces pastorianus
taccccgctatacaaggccacgata

SEQ ID NO: 152337 - DNA, 25 bp, Saccharomyces pastorianus
caagccagactggacgtgtgcatgg

SEQ ID NO: 152338 - DNA, 25 bp, Saccharomyces pastorianus
tgtaggacccgttaacttgtcagaa

SEQ ID NO: 152339 - DNA, 25 bp, Saccharomyces pastorianus
gcagccttttacaaacttctcttac

SEQ ID NO: 152340 - DNA, 25 bp, Saccharomyces pastorianus
gcagttaacccatcattggcgtcat

SEQ ID NO: 152341 - DNA, 25 bp, Saccharomyces pastorianus
gagccactacatgttgtcgtatctg

SEQ ID NO: 152342 - DNA, 25 bp, Saccharomyces pastorianus
ttacaatcaaactacccgcaatacg

SEQ ID NO: 152343 - DNA, 25 bp, Saccharomyces pastorianus
gagtcctgatgcacaagcagccttt

SEQ ID NO: 152344 - DNA, 25 bp, Saccharomyces pastorianus
tggaactgtacatggaggccctgca

SEQ ID NO: 152345 - DNA, 25 bp, Saccharomyces pastorianus
attctccgctttatggatctcgcaa

SEQ ID NO: 152346 - DNA, 25 bp, Saccharomyces pastorianus
aactttccatcgatgtattctccgc

SEQ ID NO: 152347 - DNA, 25 bp, Saccharomyces pastorianus
gtcatcttcatcaaaccagtcaggt

SEQ ID NO: 152348 - DNA, 25 bp, Saccharomyces pastorianus
ggtatcttaacctactctttttctg

SEQ ID NO: 152349 - DNA, 25 bp, Saccharomyces pastorianus
aaagtggctgcttgttttcggtatc

SEQ ID NO: 152350 - DNA, 25 bp, Saccharomyces pastorianus
ggataacgtgccagtgagcccaagt

SEQ ID NO: 152351 - DNA, 25 bp, Saccharomyces pastorianus
gcaagccttattgcactggaagaag

SEQ ID NO: 152352 - DNA, 25 bp, Saccharomyces pastorianus
gaggcccgcaaaaaacatttccata

SEQ ID NO: 152353 - DNA, 25 bp, Saccharomyces pastorianus
gtcgttaatcgagatattacccagt

SEQ ID NO: 152354 - DNA, 25 bp, Saccharomyces pastorianus
catatctattttgcctcattctgaa

SEQ ID NO: 152355 - DNA, 25 bp, Saccharomyces pastorianus
gaatctttggatgatgtgcaagcct

SEQ ID NO: 152356 - DNA, 25 bp, Saccharomyces pastorianus
ttcatcgtgcgaagctattgattga

SEQ ID NO: 152357 - DNA, 25 bp, Saccharomyces pastorianus
tgccggaattcctgtcgagaacgtt

SEQ ID NO: 152358 - DNA, 25 bp, Saccharomyces pastorianus
gaagcaagtcgcaaccagtcgttaa

SEQ ID NO: 152359 - DNA, 25 bp, Saccharomyces pastorianus
agtgagcccaagtgagccatactac

SEQ ID NO: 152360 - DNA, 25 bp, Saccharomyces pastorianus
ggtcaacttttagataatgccggaa

SEQ ID NO: 152361 - DNA, 25 bp, Saccharomyces pastorianus
ctattgcctttcttcccaaatgtgg

SEQ ID NO: 152362 - DNA, 25 bp, Saccharomyces pastorianus
tttgtcatcagattcctacggtggt

SEQ ID NO: 152363 - DNA, 25 bp, Saccharomyces pastorianus
gagaaatatggataccccggagcaa

SEQ ID NO: 152364 - DNA, 25 bp, Saccharomyces pastorianus
tggtatgacctttacaacgacgcct

SEQ ID NO: 152365 - DNA, 25 bp, Saccharomyces pastorianus
agcaatatacccctggacatctggt

SEQ ID NO: 152366 - DNA, 25 bp, Saccharomyces pastorianus
aattgtacttctacgggaccttgtg

SEQ ID NO: 152367 - DNA, 25 bp, Saccharomyces pastorianus
atggatggaacctgccctattgcct

SEQ ID NO: 152368 - DNA, 25 bp, Saccharomyces pastorianus
cgtgggagtttctggtttgtcatca

SEQ ID NO: 152369 - DNA, 25 bp, Saccharomyces pastorianus
aagatcgtccctattccatttacta

SEQ ID NO: 152370 - DNA, 25 bp, Saccharomyces pastorianus
gaaatgctacacattcgcaggcaaa

SEQ ID NO: 152371 - DNA, 25 bp, Saccharomyces pastorianus
acgacgccttcattgaaattccttc

SEQ ID NO: 152372 - DNA, 25 bp, Saccharomyces pastorianus
tggtccaataattcatccgggtcct

SEQ ID NO: 152373 - DNA, 25 bp, Saccharomyces pastorianus
gagaccgcggccacgctatttaaaa

SEQ ID NO: 152374 - DNA, 25 bp, Saccharomyces pastorianus
gcggccacgctatttaaaagagaca

SEQ ID NO: 152375 - DNA, 25 bp, Saccharomyces pastorianus
tatagtccgcgcacttttaccaata

SEQ ID NO: 152376 - DNA, 25 bp, Saccharomyces pastorianus
gcacttttaccaataccgactacaa

SEQ ID NO: 152377 - DNA, 25 bp, Saccharomyces pastorianus
gggaatgaaaataacgcctatagca

SEQ ID NO: 152378 - DNA, 25 bp, Saccharomyces pastorianus
taacgcctatagcaatatggacggt

SEQ ID NO: 152379 - DNA, 25 bp, Saccharomyces pastorianus
accacggtatagtccgcgcactttt

SEQ ID NO: 152380 - DNA, 25 bp, Saccharomyces pastorianus
atctttgaacaggagaccgcggcca

SEQ ID NO: 152381 - DNA, 25 bp, Saccharomyces pastorianus
tatggacggtttgctttcgcaggat

SEQ ID NO: 152382 - DNA, 25 bp, Saccharomyces pastorianus
ttgctttcgcaggatatctttgaac

SEQ ID NO: 152383 - DNA, 25 bp, Saccharomyces pastorianus
agtcctgccaccaacttttgaagag

SEQ ID NO: 152384 - DNA, 25 bp, Saccharomyces pastorianus
ggtatcgatcttttcgacccaataa

SEQ ID NO: 152385 - DNA, 25 bp, Saccharomyces pastorianus
atggccaccactgaatcttctaaag

SEQ ID NO: 152386 - DNA, 25 bp, Saccharomyces pastorianus
gcaaactagctcgaatgttcccatt

SEQ ID NO: 152387 - DNA, 25 bp, Saccharomyces pastorianus
gatcttctgtatcttattatcccga

SEQ ID NO: 152388 - DNA, 25 bp, Saccharomyces pastorianus
tgatttctgacctttgtaacacttc

SEQ ID NO: 152389 - DNA, 25 bp, Saccharomyces pastorianus
aacagggcttccaagacagttcata

SEQ ID NO: 152390 - DNA, 25 bp, Saccharomyces pastorianus
ttaccgacttatgacatggccacca

SEQ ID NO: 152391 - DNA, 25 bp, Saccharomyces pastorianus
tgtattgggctttctagtgggtcgc

SEQ ID NO: 152392 - DNA, 25 bp, Saccharomyces pastorianus
gaagtggacgctaccaaagctgcaa

SEQ ID NO: 152393 - DNA, 25 bp, Saccharomyces pastorianus
aaagctgcaagtctaccaccatatg

SEQ ID NO: 152394 - DNA, 25 bp, Saccharomyces pastorianus
aacaatgaacgaggctgttgagcag

SEQ ID NO: 152395 - DNA, 25 bp, Saccharomyces pastorianus
gaaacaatgaacgaggctgttgagc

SEQ ID NO: 152396 - DNA, 25 bp, Saccharomyces pastorianus
tgggagaaacaatgaacgaggctgt

SEQ ID NO: 152397 - DNA, 25 bp, Saccharomyces pastorianus
gaacgaggctgttgagcagactgga

SEQ ID NO: 152398 - DNA, 25 bp, Saccharomyces pastorianus
gggagaaacaatgaacgaggctgtt

SEQ ID NO: 152399 - DNA, 25 bp, Saccharomyces pastorianus
atgaacgaggctgttgagcagactg

SEQ ID NO: 152400 - DNA, 25 bp, Saccharomyces pastorianus
gagaaacaatgaacgaggctgttga

SEQ ID NO: 152401 - DNA, 25 bp, Saccharomyces pastorianus
aaacaatgaacgaggctgttgagca

SEQ ID NO: 152402 - DNA, 25 bp, Saccharomyces pastorianus
atgggagaaacaatgaacgaggctg

SEQ ID NO: 152403 - DNA, 25 bp, Saccharomyces pastorianus
caatgaacgaggctgttgagcagac

SEQ ID NO: 152404 - DNA, 25 bp, Saccharomyces pastorianus
aatgaacgaggctgttgagcagact

SEQ ID NO: 152405 - DNA, 25 bp, Saccharomyces pastorianus
gacacagatgcatccttagactgga

SEQ ID NO: 152406 - DNA, 25 bp, Saccharomyces pastorianus
gctccaggaggcgacttctcagaaa

SEQ ID NO: 152407 - DNA, 25 bp, Saccharomyces pastorianus
agggatcaactttcttccttcaaat

SEQ ID NO: 152408 - DNA, 25 bp, Saccharomyces pastorianus
gttccacaacctgattacatacgcg

SEQ ID NO: 152409 - DNA, 25 bp, Saccharomyces pastorianus
agactggatgctaatcggccttcaa

SEQ ID NO: 152410 - DNA, 25 bp, Saccharomyces pastorianus
gttattcagtccttatatcacccta

SEQ ID NO: 152411 - DNA, 25 bp, Saccharomyces pastorianus
caattccttggttttctgggatgct

SEQ ID NO: 152412 - DNA, 25 bp, Saccharomyces pastorianus
atatcaccctaattcactgcacatt

SEQ ID NO: 152413 - DNA, 25 bp, Saccharomyces pastorianus
gcgattctagtactaatgctgccaa

SEQ ID NO: 152414 - DNA, 25 bp, Saccharomyces pastorianus
gaattaccaccttttgctccaggag

SEQ ID NO: 152415 - DNA, 25 bp, Saccharomyces pastorianus
aagctcattttttccggctgcaaga

SEQ ID NO: 152416 - DNA, 25 bp, Saccharomyces pastorianus
tacaaaattcttcctgcatcaggtg

SEQ ID NO: 152417 - DNA, 25 bp, Saccharomyces pastorianus
tagcgccagtttctgacacactgta

SEQ ID NO: 152418 - DNA, 25 bp, Saccharomyces pastorianus
gaatttcaggcgtcactattttcta

SEQ ID NO: 152419 - DNA, 25 bp, Saccharomyces pastorianus
ttgccgcgacaggtttatcttacat

SEQ ID NO: 152420 - DNA, 25 bp, Saccharomyces pastorianus
aaggaacaggatacgctagcgccag

SEQ ID NO: 152421 - DNA, 25 bp, Saccharomyces pastorianus
aggtttcaaatacccgcttgccgcg

SEQ ID NO: 152422 - DNA, 25 bp, Saccharomyces pastorianus
gagtttttactattccagatttcaa

SEQ ID NO: 152423 - DNA, 25 bp, Saccharomyces pastorianus
gtaaaggcctttgcattcctggtat

SEQ ID NO: 152424 - DNA, 25 bp, Saccharomyces pastorianus
tattccatttccaattgccgcaaaa

SEQ ID NO: 152425 - DNA, 25 bp, Saccharomyces pastorianus
ttaccagtaagggtccgatacacaa

SEQ ID NO: 152426 - DNA, 25 bp, Saccharomyces pastorianus
gtttatcttacatctcaaccgttga

SEQ ID NO: 152427 - DNA, 25 bp, Saccharomyces pastorianus
acattgccgtaatcctcggtaagga

SEQ ID NO: 152428 - DNA, 25 bp, Saccharomyces pastorianus
gcagccggtggtcgatatgataatt

SEQ ID NO: 152429 - DNA, 25 bp, Saccharomyces pastorianus
tcagaattcgttggtgtcggctcta

SEQ ID NO: 152430 - DNA, 25 bp, Saccharomyces pastorianus
ggccaaatctgcagaagacgcgtca

SEQ ID NO: 152431 - DNA, 25 bp, Saccharomyces pastorianus
gaatatgtctataaggccaaggcta

SEQ ID NO: 152432 - DNA, 25 bp, Saccharomyces pastorianus
atgttctctgaagcttccggcaaaa

SEQ ID NO: 152433 - DNA, 25 bp, Saccharomyces pastorianus
aaagcgggttgtcacattgccgtaa

SEQ ID NO: 152434 - DNA, 25 bp, Saccharomyces pastorianus
aaagccaacggctacacaggtgttc

SEQ ID NO: 152435 - DNA, 25 bp, Saccharomyces pastorianus
acacaggtgttcgttatggcttttg

SEQ ID NO: 152436 - DNA, 25 bp, Saccharomyces pastorianus
ttagtgcggctgacattgttcctat

SEQ ID NO: 152437 - DNA, 25 bp, Saccharomyces pastorianus
atctgctccaccagagaatgcttca

SEQ ID NO: 152438 - DNA, 25 bp, Saccharomyces pastorianus
ggacgagcctactcctgaagaaaga

SEQ ID NO: 152439 - DNA, 25 bp, Saccharomyces pastorianus
gtatcccgtacagacatctagcagg

SEQ ID NO: 152440 - DNA, 25 bp, Saccharomyces pastorianus
tgctggcccgttttccggacgagcc

SEQ ID NO: 152441 - DNA, 25 bp, Saccharomyces pastorianus
aactgcacacgtttattgggttgta

SEQ ID NO: 152442 - DNA, 25 bp, Saccharomyces pastorianus
gctaccatcctggaggactacgatt

SEQ ID NO: 152443 - DNA, 25 bp, Saccharomyces pastorianus
gggatgccacattcacaacaaggtg

SEQ ID NO: 152444 - DNA, 25 bp, Saccharomyces pastorianus
acatctagcaggacggctgccgcaa

SEQ ID NO: 152445 - DNA, 25 bp, Saccharomyces pastorianus
aagttgattgagaagtatcccgtac

SEQ ID NO: 152446 - DNA, 25 bp, Saccharomyces pastorianus
ggatgtagtgacagcgacggtaaac

SEQ ID NO: 152447 - DNA, 25 bp, Saccharomyces pastorianus
tatatgactgtgctaccatcctgga

SEQ ID NO: 152448 - DNA, 25 bp, Saccharomyces pastorianus
gggttgtatgcagaactctatccat

SEQ ID NO: 152449 - DNA, 25 bp, Saccharomyces pastorianus
agccatgccatcagaatagttgcag

SEQ ID NO: 152450 - DNA, 25 bp, Saccharomyces pastorianus
aagaagccatgccatcagaatagtt

SEQ ID NO: 152451 - DNA, 25 bp, Saccharomyces pastorianus
ccatgccatcagaatagttgcagca

SEQ ID NO: 152452 - DNA, 25 bp, Saccharomyces pastorianus
agatagtcaaaagaagccatgccat

SEQ ID NO: 152453 - DNA, 25 bp, Saccharomyces pastorianus
gaatagttgcagcattaggaatcat

SEQ ID NO: 152454 - DNA, 25 bp, Saccharomyces pastorianus
gaagccatgccatcagaatagttgc

SEQ ID NO: 152455 - DNA, 25 bp, Saccharomyces pastorianus
aaaagaagccatgccatcagaatag

SEQ ID NO: 152456 - DNA, 25 bp, Saccharomyces pastorianus
gccatcagaatagttgcagcattag

SEQ ID NO: 152457 - DNA, 25 bp, Saccharomyces pastorianus
ccatcagaatagttgcagcattagg

SEQ ID NO: 152458 - DNA, 25 bp, Saccharomyces pastorianus
tagtcaaaagaagccatgccatcag

SEQ ID NO: 152459 - DNA, 25 bp, Saccharomyces pastorianus
gtcaaaagaagccatgccatcagaa

SEQ ID NO: 152460 - DNA, 25 bp, Saccharomyces pastorianus
tgatggcatggcttcttttgactat

SEQ ID NO: 152461 - DNA, 25 bp, Saccharomyces pastorianus
ctattctgatggcatggcttctttt

SEQ ID NO: 152462 - DNA, 25 bp, Saccharomyces pastorianus
ctgatggcatggcttcttttgacta

SEQ ID NO: 152463 - DNA, 25 bp, Saccharomyces pastorianus
attctgatggcatggcttcttttga

SEQ ID NO: 152464 - DNA, 25 bp, Saccharomyces pastorianus
ttctgatggcatggcttcttttgac

SEQ ID NO: 152465 - DNA, 25 bp, Saccharomyces pastorianus
gcaactattctgatggcatggcttc

SEQ ID NO: 152466 - DNA, 25 bp, Saccharomyces pastorianus
ctaatgctgcaactattctgatggc

SEQ ID NO: 152467 - DNA, 25 bp, Saccharomyces pastorianus
gctgcaactattctgatggcatggc

SEQ ID NO: 152468 - DNA, 25 bp, Saccharomyces pastorianus
aactattctgatggcatggcttctt

SEQ ID NO: 152469 - DNA, 25 bp, Saccharomyces pastorianus
attcctaatgctgcaactattctga

SEQ ID NO: 152470 - DNA, 25 bp, Saccharomyces pastorianus
aatgctgcaactattctgatggcat

SEQ ID NO: 152471 - DNA, 25 bp, Saccharomyces pastorianus
tgtccagactgtcctctttacgaat

SEQ ID NO: 152472 - DNA, 25 bp, Saccharomyces pastorianus
tgataaagccttttgtcctttattt

SEQ ID NO: 152473 - DNA, 25 bp, Saccharomyces pastorianus
agccttcccgtcttcttgtcttcat

SEQ ID NO: 152474 - DNA, 25 bp, Saccharomyces pastorianus
tcttcttgtcttcatcacccacgtt

SEQ ID NO: 152475 - DNA, 25 bp, Saccharomyces pastorianus
agactgtcctctttacgaatcacca

SEQ ID NO: 152476 - DNA, 25 bp, Saccharomyces pastorianus
atcacccacgtttattgtttaatga

SEQ ID NO: 152477 - DNA, 25 bp, Saccharomyces pastorianus
tgactatctgtttcatcccgtcgta

SEQ ID NO: 152478 - DNA, 25 bp, Saccharomyces pastorianus
gtcctctttacgaatcaccagcctt

SEQ ID NO: 152479 - DNA, 25 bp, Saccharomyces pastorianus
ttcatcccgtcgtaccttgcacaat

SEQ ID NO: 152480 - DNA, 25 bp, Saccharomyces pastorianus
taccttgcacaatctgtccagactg

SEQ ID NO: 152481 - DNA, 25 bp, Saccharomyces pastorianus
gcttcttttgactatctgtttcatc

SEQ ID NO: 152482 - DNA, 25 bp, Saccharomyces pastorianus
attaggcccggcgtagcgatggata

SEQ ID NO: 152483 - DNA, 25 bp, Saccharomyces pastorianus
tctttcaaccgagcgtcgttcttct

SEQ ID NO: 152484 - DNA, 25 bp, Saccharomyces pastorianus
aaccgagcgtcgttcttctcagcag

SEQ ID NO: 152485 - DNA, 25 bp, Saccharomyces pastorianus
tataccagacttcgccttgattagg

SEQ ID NO: 152486 - DNA, 25 bp, Saccharomyces pastorianus
agacttcgccttgattaggcccggc

SEQ ID NO: 152487 - DNA, 25 bp, Saccharomyces pastorianus
cttgcacttcatctataccagactt

SEQ ID NO: 152488 - DNA, 25 bp, Saccharomyces pastorianus
gcccggcgtagcgatggatagttca

SEQ ID NO: 152489 - DNA, 25 bp, Saccharomyces pastorianus
atctataccagacttcgccttgatt

SEQ ID NO: 152490 - DNA, 25 bp, Saccharomyces pastorianus
gagcgtcgttcttctcagcagccgc

SEQ ID NO: 152491 - DNA, 25 bp, Saccharomyces pastorianus
cggcgtagcgatggatagttcatta

SEQ ID NO: 152492 - DNA, 25 bp, Saccharomyces pastorianus
tgcacttcatctataccagacttcg

SEQ ID NO: 152493 - DNA, 25 bp, Saccharomyces pastorianus
gctaagccattcattacgtggttag

SEQ ID NO: 152494 - DNA, 25 bp, Saccharomyces pastorianus
gctgctaagccattcattacgtggt

SEQ ID NO: 152495 - DNA, 25 bp, Saccharomyces pastorianus
gggctgctaagccattcattacgtg

SEQ ID NO: 152496 - DNA, 25 bp, Saccharomyces pastorianus
tgtacctaaggaggtatccaaaaag

SEQ ID NO: 152497 - DNA, 25 bp, Saccharomyces pastorianus
aagccattcattacgtggttagaaa

SEQ ID NO: 152498 - DNA, 25 bp, Saccharomyces pastorianus
atccaaaaaggttcgtagggctgct

SEQ ID NO: 152499 - DNA, 25 bp, Saccharomyces pastorianus
tccaagaaatttgtacctaaggagg

SEQ ID NO: 152500 - DNA, 25 bp, Saccharomyces pastorianus
ctgctaagccattcattacgtggtt

SEQ ID NO: 152501 - DNA, 25 bp, Saccharomyces pastorianus
gccattcattacgtggttagaaacc

SEQ ID NO: 152502 - DNA, 25 bp, Saccharomyces pastorianus
caaaaaggttcgtagggctgctaag

SEQ ID NO: 152503 - DNA, 25 bp, Saccharomyces pastorianus
tccaaaaaggttcgtagggctgcta

SEQ ID NO: 152504 - DNA, 25 bp, Saccharomyces pastorianus
gaacataaggatctaatcccactat

SEQ ID NO: 152505 - DNA, 25 bp, Saccharomyces pastorianus
ggatctaatcccactattaccaaaa

SEQ ID NO: 152506 - DNA, 25 bp, Saccharomyces pastorianus
taaggagaacttaccatcagatgtg

SEQ ID NO: 152507 - DNA, 25 bp, Saccharomyces pastorianus
gcgcaatgtctattcgatgaggata

SEQ ID NO: 152508 - DNA, 25 bp, Saccharomyces pastorianus
agaaggctgcagaactagacgtctt

SEQ ID NO: 152509 - DNA, 25 bp, Saccharomyces pastorianus
tgcagaactagacgtcttgaatgat

SEQ ID NO: 152510 - DNA, 25 bp, Saccharomyces pastorianus
attttagtcactccagaatacgaaa

SEQ ID NO: 152511 - DNA, 25 bp, Saccharomyces pastorianus
gtgtcttggcgcaatgtctattcga

SEQ ID NO: 152512 - DNA, 25 bp, Saccharomyces pastorianus
gagctcactcaactggatgaatatg

SEQ ID NO: 152513 - DNA, 25 bp, Saccharomyces pastorianus
atatggtgaatggattttggagcag

SEQ ID NO: 152514 - DNA, 25 bp, Saccharomyces pastorianus
catcagatgtggagctttataagaa

SEQ ID NO: 152515 - DNA, 25 bp, Saccharomyces pastorianus
tgacatctctcacgcgctaaataga

SEQ ID NO: 152516 - DNA, 25 bp, Saccharomyces pastorianus
ttttgaacgtcgctgacatctctca

SEQ ID NO: 152517 - DNA, 25 bp, Saccharomyces pastorianus
aaacttccatctctgttgacaaaga

SEQ ID NO: 152518 - DNA, 25 bp, Saccharomyces pastorianus
cctgctccatatattgtcaagtatt

SEQ ID NO: 152519 - DNA, 25 bp, Saccharomyces pastorianus
agacgtattggatggctttattaac

SEQ ID NO: 152520 - DNA, 25 bp, Saccharomyces pastorianus
ggagatcatcataccgacctgcagg

SEQ ID NO: 152521 - DNA, 25 bp, Saccharomyces pastorianus
aattaggtgctcaaacttccatctc

SEQ ID NO: 152522 - DNA, 25 bp, Saccharomyces pastorianus
tttaccgttacaaaatgcctcccat

SEQ ID NO: 152523 - DNA, 25 bp, Saccharomyces pastorianus
aagactgccgttttgaacgtcgctg

SEQ ID NO: 152524 - DNA, 25 bp, Saccharomyces pastorianus
gcgctaaatagacctgctccatata

SEQ ID NO: 152525 - DNA, 25 bp, Saccharomyces pastorianus
aacaagtttgttctctgtggaagct

SEQ ID NO: 152526 - DNA, 25 bp, Saccharomyces pastorianus
tcagcaggaatatcacccaaacaat

SEQ ID NO: 152527 - DNA, 25 bp, Saccharomyces pastorianus
acaagtggtgtactccggaaatcaa

SEQ ID NO: 152528 - DNA, 25 bp, Saccharomyces pastorianus
aatttacaaagtcgccagttactgg

SEQ ID NO: 152529 - DNA, 25 bp, Saccharomyces pastorianus
gtaacaaatttatccctacctatag

SEQ ID NO: 152530 - DNA, 25 bp, Saccharomyces pastorianus
aaatgaatcctctaagccgctcagt

SEQ ID NO: 152531 - DNA, 25 bp, Saccharomyces pastorianus
aggtccaacgccagcattgaacttt

SEQ ID NO: 152532 - DNA, 25 bp, Saccharomyces pastorianus
gtttcattctcctggtcgcgccaga

SEQ ID NO: 152533 - DNA, 25 bp, Saccharomyces pastorianus
aacaatcctccaagaatcatcgtaa

SEQ ID NO: 152534 - DNA, 25 bp, Saccharomyces pastorianus
gccagaggcgtttctgtttccagtg

SEQ ID NO: 152535 - DNA, 25 bp, Saccharomyces pastorianus
gaagttgggctatcatcagcaggaa

SEQ ID NO: 152536 - DNA, 25 bp, Saccharomyces pastorianus
attgaactttaacccagccccgatg

SEQ ID NO: 152537 - DNA, 25 bp, Saccharomyces pastorianus
gaagttaacactttgcaagacatgg

SEQ ID NO: 152538 - DNA, 25 bp, Saccharomyces pastorianus
aatggacagaaatttgacaaacgcc

SEQ ID NO: 152539 - DNA, 25 bp, Saccharomyces pastorianus
gcaagacatggtgtgttctaaattg

SEQ ID NO: 152540 - DNA, 25 bp, Saccharomyces pastorianus
gccgaagttaacactttgcaagaca

SEQ ID NO: 152541 - DNA, 25 bp, Saccharomyces pastorianus
cagaaatttgacaaacgccgaagtt

SEQ ID NO: 152542 - DNA, 25 bp, Saccharomyces pastorianus
aacgccgaagttaacactttgcaag

SEQ ID NO: 152543 - DNA, 25 bp, Saccharomyces pastorianus
gatcaactatcaatcaatggacaga

SEQ ID NO: 152544 - DNA, 25 bp, Saccharomyces pastorianus
actttgcaagacatggtgtgttcta

SEQ ID NO: 152545 - DNA, 25 bp, Saccharomyces pastorianus
tacaggatcaactatcaatcaatgg

SEQ ID NO: 152546 - DNA, 25 bp, Saccharomyces pastorianus
gacaaacgccgaagttaacactttg

SEQ ID NO: 152547 - DNA, 25 bp, Saccharomyces pastorianus
ttgacaaacgccgaagttaacactt

SEQ ID NO: 152548 - DNA, 25 bp, Saccharomyces pastorianus
ttattcaaaacacccgggatcattt

SEQ ID NO: 152549 - DNA, 25 bp, Saccharomyces pastorianus
tctggaggttgatttgtgctctcaa

SEQ ID NO: 152550 - DNA, 25 bp, Saccharomyces pastorianus
tggcagggcgaatggctcgaactct

SEQ ID NO: 152551 - DNA, 25 bp, Saccharomyces pastorianus
ggatgttgcgttttggttaccagaa

SEQ ID NO: 152552 - DNA, 25 bp, Saccharomyces pastorianus
agtcgatagctttacgcatccgaaa

SEQ ID NO: 152553 - DNA, 25 bp, Saccharomyces pastorianus
ccttctgaaacaattgggtgggctt

SEQ ID NO: 152554 - DNA, 25 bp, Saccharomyces pastorianus
aagagccggatataaaccttctgaa

SEQ ID NO: 152555 - DNA, 25 bp, Saccharomyces pastorianus
tttggaccgcattgctatgcttctt

SEQ ID NO: 152556 - DNA, 25 bp, Saccharomyces pastorianus
ttttggcttgggtttggaccgcatt

SEQ ID NO: 152557 - DNA, 25 bp, Saccharomyces pastorianus
ggaccgcgccctcatgggaaataga

SEQ ID NO: 152558 - DNA, 25 bp, Saccharomyces pastorianus
cgaactctgcggatgcggattgatt

SEQ ID NO: 152559 - DNA, 25 bp, Saccharomyces pastorianus
gcccacgaattagagtgctttcaaa

SEQ ID NO: 152560 - DNA, 25 bp, Saccharomyces pastorianus
aactcagtcgacaacacatttaaga

SEQ ID NO: 152561 - DNA, 25 bp, Saccharomyces pastorianus
atttcaagcccgtggtaaccacaat

SEQ ID NO: 152562 - DNA, 25 bp, Saccharomyces pastorianus
gacccacagactaccaatgttacag

SEQ ID NO: 152563 - DNA, 25 bp, Saccharomyces pastorianus
gcttaccgacagatcattacatttg

SEQ ID NO: 152564 - DNA, 25 bp, Saccharomyces pastorianus
gtaggcattcttcgcgatctaattg

SEQ ID NO: 152565 - DNA, 25 bp, Saccharomyces pastorianus
catacttcagcccacgaattagagt

SEQ ID NO: 152566 - DNA, 25 bp, Saccharomyces pastorianus
gaaagaatcacatccagtaggcatt

SEQ ID NO: 152567 - DNA, 25 bp, Saccharomyces pastorianus
tgagacgcacctactgagaacacat

SEQ ID NO: 152568 - DNA, 25 bp, Saccharomyces pastorianus
ataaaatacaagaccgacccacaga

SEQ ID NO: 152569 - DNA, 25 bp, Saccharomyces pastorianus
tcaacccttaaagttccacatgtag

SEQ ID NO: 152570 - DNA, 25 bp, Saccharomyces pastorianus
gaggtacactgaagctttggagaaa

SEQ ID NO: 152571 - DNA, 25 bp, Saccharomyces pastorianus
aatttttactctttatgcggctcca

SEQ ID NO: 152572 - DNA, 25 bp, Saccharomyces pastorianus
aactccatatttattggtcttgata

SEQ ID NO: 152573 - DNA, 25 bp, Saccharomyces pastorianus
atgcggctccagtgaagctgaacta

SEQ ID NO: 152574 - DNA, 25 bp, Saccharomyces pastorianus
gatatagtcaacaactacgccttga

SEQ ID NO: 152575 - DNA, 25 bp, Saccharomyces pastorianus
gaaggagcccgcaccaagattggaa

SEQ ID NO: 152576 - DNA, 25 bp, Saccharomyces pastorianus
tgaaaaccatattgaggctgcagtt

SEQ ID NO: 152577 - DNA, 25 bp, Saccharomyces pastorianus
aatatagcttctctaatttccgaat

SEQ ID NO: 152578 - DNA, 25 bp, Saccharomyces pastorianus
actacgccttgattaagggtgccaa

SEQ ID NO: 152579 - DNA, 25 bp, Saccharomyces pastorianus
gaattaccgcattgttctgtcgaag

SEQ ID NO: 152580 - DNA, 25 bp, Saccharomyces pastorianus
gagacaaagcactagctcaactaag

SEQ ID NO: 152581 - DNA, 25 bp, Saccharomyces pastorianus
gaagaatattttggtacggctggaa

SEQ ID NO: 152582 - DNA, 25 bp, Saccharomyces pastorianus
atcgtcggctgcaagattggctatt

SEQ ID NO: 152583 - DNA, 25 bp, Saccharomyces pastorianus
agcattcctttcctgagaaggcaga

SEQ ID NO: 152584 - DNA, 25 bp, Saccharomyces pastorianus
tatgcccagcaaatgtactacagtt

SEQ ID NO: 152585 - DNA, 25 bp, Saccharomyces pastorianus
acaaccagtggttccaataccttat

SEQ ID NO: 152586 - DNA, 25 bp, Saccharomyces pastorianus
agtgtcctaaatcagcattcctttc

SEQ ID NO: 152587 - DNA, 25 bp, Saccharomyces pastorianus
acctctaagcaactttgggttctga

SEQ ID NO: 152588 - DNA, 25 bp, Saccharomyces pastorianus
gattggctattctacatactggtac

SEQ ID NO: 152589 - DNA, 25 bp, Saccharomyces pastorianus
tgaatgttgagataccagccgcggt

SEQ ID NO: 152590 - DNA, 25 bp, Saccharomyces pastorianus
aggaaggcattatcgtcggctgcaa

SEQ ID NO: 152591 - DNA, 25 bp, Saccharomyces pastorianus
gaaccgcagcatactacttttcatg

SEQ ID NO: 152592 - DNA, 25 bp, Saccharomyces pastorianus
gggcccttaaaaggcacgccatctc

SEQ ID NO: 152593 - DNA, 25 bp, Saccharomyces pastorianus
agaggacgcgtcacaaatcaagcat

SEQ ID NO: 152594 - DNA, 25 bp, Saccharomyces pastorianus
atctgattcttcagtgaatcctgat

SEQ ID NO: 152595 - DNA, 25 bp, Saccharomyces pastorianus
cgccatccttgattaggcttcaaag

SEQ ID NO: 152596 - DNA, 25 bp, Saccharomyces pastorianus
gaatcctgatgtcattgaatatctt

SEQ ID NO: 152597 - DNA, 25 bp, Saccharomyces pastorianus
gaatctgcaaaagaggacgcgtcac

SEQ ID NO: 152598 - DNA, 25 bp, Saccharomyces pastorianus
gccatctttggtcaatctcgtgcat

SEQ ID NO: 152599 - DNA, 25 bp, Saccharomyces pastorianus
gcgtcacaaatcaagcatgtacgat

SEQ ID NO: 152600 - DNA, 25 bp, Saccharomyces pastorianus
gtgcatttgcactatctgattcttc

SEQ ID NO: 152601 - DNA, 25 bp, Saccharomyces pastorianus
catctcgccatccttgattaggctt

SEQ ID NO: 152602 - DNA, 25 bp, Saccharomyces pastorianus
caagaagcactaagaaccaacgcca

SEQ ID NO: 152603 - DNA, 25 bp, Saccharomyces pastorianus
ttttggagcattgtctggcactgcc

SEQ ID NO: 152604 - DNA, 25 bp, Saccharomyces pastorianus
ttagatgtcatcaagtctgtcatgc

SEQ ID NO: 152605 - DNA, 25 bp, Saccharomyces pastorianus
aaggacattcctgcatggaaacttt

SEQ ID NO: 152606 - DNA, 25 bp, Saccharomyces pastorianus
gtagccaagactttatatgccaatg

SEQ ID NO: 152607 - DNA, 25 bp, Saccharomyces pastorianus
aatggagggataggcgcttttttca

SEQ ID NO: 152608 - DNA, 25 bp, Saccharomyces pastorianus
ggaaactttgtatttttggagcatt

SEQ ID NO: 152609 - DNA, 25 bp, Saccharomyces pastorianus
agtctgtcatgcaaacggataattt

SEQ ID NO: 152610 - DNA, 25 bp, Saccharomyces pastorianus
gtctggcactgccttatggttgatg

SEQ ID NO: 152611 - DNA, 25 bp, Saccharomyces pastorianus
atgctaagagctgctcccgccaatg

SEQ ID NO: 152612 - DNA, 25 bp, Saccharomyces pastorianus
ttctatttccagtgtagccaagact

SEQ ID NO: 152613 - DNA, 25 bp, Saccharomyces pastorianus
tgctcccgccaatggtgccactttt

SEQ ID NO: 152614 - DNA, 25 bp, Saccharomyces pastorianus
tattgcgcaagtgctagtggccagc

SEQ ID NO: 152615 - DNA, 25 bp, Saccharomyces pastorianus
tgaagaatttccatctcctcaacta

SEQ ID NO: 152616 - DNA, 25 bp, Saccharomyces pastorianus
tggccagccctttgatacgacaaaa

SEQ ID NO: 152617 - DNA, 25 bp, Saccharomyces pastorianus
atttccatctcctcaactaatcgat

SEQ ID NO: 152618 - DNA, 25 bp, Saccharomyces pastorianus
tagtggccagccctttgatacgaca

SEQ ID NO: 152619 - DNA, 25 bp, Saccharomyces pastorianus
tccatctcctcaactaatcgatgat

SEQ ID NO: 152620 - DNA, 25 bp, Saccharomyces pastorianus
gccagccctttgatacgacaaaagt

SEQ ID NO: 152621 - DNA, 25 bp, Saccharomyces pastorianus
gtctgaagaatttccatctcctcaa

SEQ ID NO: 152622 - DNA, 25 bp, Saccharomyces pastorianus
atgtctgaagaatttccatctcctc

SEQ ID NO: 152623 - DNA, 25 bp, Saccharomyces pastorianus
agccctttgatacgacaaaagttag

SEQ ID NO: 152624 - DNA, 25 bp, Saccharomyces pastorianus
aagaatttccatctcctcaactaat

SEQ ID NO: 152625 - DNA, 25 bp, Saccharomyces pastorianus
aatttactcatgacgaaagtggatt

SEQ ID NO: 152626 - DNA, 25 bp, Saccharomyces pastorianus
gcgttgttagccaaaatccaggagt

SEQ ID NO: 152627 - DNA, 25 bp, Saccharomyces pastorianus
ctagctatatgcatcgaagggactg

SEQ ID NO: 152628 - DNA, 25 bp, Saccharomyces pastorianus
caaattttccagattgaggcggttc

SEQ ID NO: 152629 - DNA, 25 bp, Saccharomyces pastorianus
ggtcttgatactgacaaattttcca

SEQ ID NO: 152630 - DNA, 25 bp, Saccharomyces pastorianus
acacgaattatggtcttgatactga

SEQ ID NO: 152631 - DNA, 25 bp, Saccharomyces pastorianus
ttcagtcatacacgaattatggtct

SEQ ID NO: 152632 - DNA, 25 bp, Saccharomyces pastorianus
gaagggactgcgttgttagccaaaa

SEQ ID NO: 152633 - DNA, 25 bp, Saccharomyces pastorianus
acgaaagtggattacatttgattca

SEQ ID NO: 152634 - DNA, 25 bp, Saccharomyces pastorianus
gtctctgagcaaggccgaatttact

SEQ ID NO: 152635 - DNA, 25 bp, Saccharomyces pastorianus
ggactttacaagtcgaaagaggatt

SEQ ID NO: 152636 - DNA, 25 bp, Saccharomyces pastorianus
ttatcatgtgtagaaaagtgtcccc

SEQ ID NO: 152637 - DNA, 25 bp, Saccharomyces pastorianus
aatggcaatagaaaacttacgataa

SEQ ID NO: 152638 - DNA, 25 bp, Saccharomyces pastorianus
ccccacaaatcacttttatagctaa

SEQ ID NO: 152639 - DNA, 25 bp, Saccharomyces pastorianus
agctaagtatgttacagcgaacgat

SEQ ID NO: 152640 - DNA, 25 bp, Saccharomyces pastorianus
cttacgataagggatgaacaatggc

SEQ ID NO: 152641 - DNA, 25 bp, Saccharomyces pastorianus
caatggcctgagttggcagatccaa

SEQ ID NO: 152642 - DNA, 25 bp, Saccharomyces pastorianus
ctccctatgatatttttggcattcc

SEQ ID NO: 152643 - DNA, 25 bp, Saccharomyces pastorianus
gcagatccaactccctatgatattt

SEQ ID NO: 152644 - DNA, 25 bp, Saccharomyces pastorianus
tttggcattccaaaggccggatctg

SEQ ID NO: 152645 - DNA, 25 bp, Saccharomyces pastorianus
tacaccataagttcgtatacccatt

SEQ ID NO: 152646 - DNA, 25 bp, Saccharomyces pastorianus
ttcaagtggcacttatcatgtgtag

SEQ ID NO: 152647 - DNA, 25 bp, Saccharomyces pastorianus
gaattcaagaaaacatcaacccatg

SEQ ID NO: 152648 - DNA, 25 bp, Saccharomyces pastorianus
caagaaaacatcaacccatggaccg

SEQ ID NO: 152649 - DNA, 25 bp, Saccharomyces pastorianus
attcaagaaaacatcaacccatgga

SEQ ID NO: 152650 - DNA, 25 bp, Saccharomyces pastorianus
ttcaagaaaacatcaacccatggac

SEQ ID NO: 152651 - DNA, 25 bp, Saccharomyces pastorianus
gaaagaattcaagaaaacatcaacc

SEQ ID NO: 152652 - DNA, 25 bp, Saccharomyces pastorianus
aagaattcaagaaaacatcaaccca

SEQ ID NO: 152653 - DNA, 25 bp, Saccharomyces pastorianus
cgaaagaattcaagaaaacatcaac

SEQ ID NO: 152654 - DNA, 25 bp, Saccharomyces pastorianus
tcaagaaaacatcaacccatggacc

SEQ ID NO: 152655 - DNA, 25 bp, Saccharomyces pastorianus
agaattcaagaaaacatcaacccat

SEQ ID NO: 152656 - DNA, 25 bp, Saccharomyces pastorianus
aattcaagaaaacatcaacccatgg

SEQ ID NO: 152657 - DNA, 25 bp, Saccharomyces pastorianus
aaatagctcaaccatcgtctagcgg

SEQ ID NO: 152658 - DNA, 25 bp, Saccharomyces pastorianus
ttaatcgggttatgcgtgtgttaca

SEQ ID NO: 152659 - DNA, 25 bp, Saccharomyces pastorianus
aaccatcgtctagcggctctaaaga

SEQ ID NO: 152660 - DNA, 25 bp, Saccharomyces pastorianus
ctggttctccctgattcagagtgta

SEQ ID NO: 152661 - DNA, 25 bp, Saccharomyces pastorianus
gaagacatcatcgttgcctataagg

SEQ ID NO: 152662 - DNA, 25 bp, Saccharomyces pastorianus
tatggccgctattttcttgaggaac

SEQ ID NO: 152663 - DNA, 25 bp, Saccharomyces pastorianus
tcctgcaatcaagctattcatgagt

SEQ ID NO: 152664 - DNA, 25 bp, Saccharomyces pastorianus
taaggcaccatctccaatggaccag

SEQ ID NO: 152665 - DNA, 25 bp, Saccharomyces pastorianus
ttttccctcaacaaatagctcaacc

SEQ ID NO: 152666 - DNA, 25 bp, Saccharomyces pastorianus
gtgtacactactacctgaacaccga

SEQ ID NO: 152667 - DNA, 25 bp, Saccharomyces pastorianus
gttacatgaacttagttttccctca

SEQ ID NO: 152668 - DNA, 25 bp, Saccharomyces pastorianus
ggtgtgttacaaagcagttttccaa

SEQ ID NO: 152669 - DNA, 25 bp, Saccharomyces pastorianus
agtacatctctacgagcctggtttt

SEQ ID NO: 152670 - DNA, 25 bp, Saccharomyces pastorianus
ggtgacaataattcgttccaaatcg

SEQ ID NO: 152671 - DNA, 25 bp, Saccharomyces pastorianus
cgagcgcacatattcctacttggag

SEQ ID NO: 152672 - DNA, 25 bp, Saccharomyces pastorianus
agaaagacacgaacctgaggcctta

SEQ ID NO: 152673 - DNA, 25 bp, Saccharomyces pastorianus
gagggctttctcgaatcatcataaa

SEQ ID NO: 152674 - DNA, 25 bp, Saccharomyces pastorianus
atgggcttctgggtgatagattcaa

SEQ ID NO: 152675 - DNA, 25 bp, Saccharomyces pastorianus
atcgcatccaaaatcgtcaatcctc

SEQ ID NO: 152676 - DNA, 25 bp, Saccharomyces pastorianus
gaaaagttatcctcgagcgcacata

SEQ ID NO: 152677 - DNA, 25 bp, Saccharomyces pastorianus
aaatcgatccatttgatgtctgtga

SEQ ID NO: 152678 - DNA, 25 bp, Saccharomyces pastorianus
gacaactacttggaattgatcgcat

SEQ ID NO: 152679 - DNA, 25 bp, Saccharomyces pastorianus
caactggtacgattggttttatggt

SEQ ID NO: 152680 - DNA, 25 bp, Saccharomyces pastorianus
gaaagcctgttctgaagttttccca

SEQ ID NO: 152681 - DNA, 25 bp, Saccharomyces pastorianus
aacttgcaatgtcaagaagccacta

SEQ ID NO: 152682 - DNA, 25 bp, Saccharomyces pastorianus
gaggctgaattatacagatactata

SEQ ID NO: 152683 - DNA, 25 bp, Saccharomyces pastorianus
acgattggttttatggtttgctcca

SEQ ID NO: 152684 - DNA, 25 bp, Saccharomyces pastorianus
ttcacttgccaatcattaaggactt

SEQ ID NO: 152685 - DNA, 25 bp, Saccharomyces pastorianus
gaaaattcacgaagcttcctttgtt

SEQ ID NO: 152686 - DNA, 25 bp, Saccharomyces pastorianus
atgtggattcacttgccaatcatta

SEQ ID NO: 152687 - DNA, 25 bp, Saccharomyces pastorianus
ggttttatggtttgctccaaagata

SEQ ID NO: 152688 - DNA, 25 bp, Saccharomyces pastorianus
tgaaatctctgatgagaaggaggct

SEQ ID NO: 152689 - DNA, 25 bp, Saccharomyces pastorianus
aaggacttaaagaaagcctgttctg

SEQ ID NO: 152690 - DNA, 25 bp, Saccharomyces pastorianus
gaaagttttacaccatgagaagtca

SEQ ID NO: 152691 - DNA, 25 bp, Saccharomyces pastorianus
cttgaattcccatccaaatcctaag

SEQ ID NO: 152692 - DNA, 25 bp, Saccharomyces pastorianus
gacccatattggtgatggtttccaa

SEQ ID NO: 152693 - DNA, 25 bp, Saccharomyces pastorianus
tagactatcaaaggagtacctacca

SEQ ID NO: 152694 - DNA, 25 bp, Saccharomyces pastorianus
tagataatgtaattcaagccaccga

SEQ ID NO: 152695 - DNA, 25 bp, Saccharomyces pastorianus
gattccgttgaggaagcctggttat

SEQ ID NO: 152696 - DNA, 25 bp, Saccharomyces pastorianus
gcctcttattctcacccaaaggtta

SEQ ID NO: 152697 - DNA, 25 bp, Saccharomyces pastorianus
aagccaccgaaagggatgaatttgc

SEQ ID NO: 152698 - DNA, 25 bp, Saccharomyces pastorianus
gaggttgtcaagcatgattccgttg

SEQ ID NO: 152699 - DNA, 25 bp, Saccharomyces pastorianus
caggccaggccatgactttaaaagt

SEQ ID NO: 152700 - DNA, 25 bp, Saccharomyces pastorianus
ttgatcttcaaatccactacatatg

SEQ ID NO: 152701 - DNA, 25 bp, Saccharomyces pastorianus
attctccacctcgactaaagacaaa

SEQ ID NO: 152702 - DNA, 25 bp, Saccharomyces pastorianus
gatggtgccaatgacctcggattca

SEQ ID NO: 152703 - DNA, 25 bp, Saccharomyces pastorianus
gtctccacacctagttcaaattcaa

SEQ ID NO: 152704 - DNA, 25 bp, Saccharomyces pastorianus
gaaattttatctgaacccgcaatag

SEQ ID NO: 152705 - DNA, 25 bp, Saccharomyces pastorianus
gatcatggtgtactgcaaggcacta

SEQ ID NO: 152706 - DNA, 25 bp, Saccharomyces pastorianus
caccgcctctgtttcgaatcaagaa

SEQ ID NO: 152707 - DNA, 25 bp, Saccharomyces pastorianus
gaatcgtcggtcttacaactaattg

SEQ ID NO: 152708 - DNA, 25 bp, Saccharomyces pastorianus
gaagatcatatcattctcgacacta

SEQ ID NO: 152709 - DNA, 25 bp, Saccharomyces pastorianus
gaaagacgtcagttctaagcctagt

SEQ ID NO: 152710 - DNA, 25 bp, Saccharomyces pastorianus
tgaacctgactatcaagctccattc

SEQ ID NO: 152711 - DNA, 25 bp, Saccharomyces pastorianus
taagcctagtaaacctgaatcgtcg

SEQ ID NO: 152712 - DNA, 25 bp, Saccharomyces pastorianus
gacggcatctaaaattatcgtgata

SEQ ID NO: 152713 - DNA, 25 bp, Saccharomyces pastorianus
gactcttatgtggagactttagact

SEQ ID NO: 152714 - DNA, 25 bp, Saccharomyces pastorianus
ggagaatataacacgactttgtcaa

SEQ ID NO: 152715 - DNA, 25 bp, Saccharomyces pastorianus
gacagaattcaagacgttaaactcg

SEQ ID NO: 152716 - DNA, 25 bp, Saccharomyces pastorianus
gttaaactcgtactagcatctaatt

SEQ ID NO: 152717 - DNA, 25 bp, Saccharomyces pastorianus
gggtctcgagtccttcacagaagaa

SEQ ID NO: 152718 - DNA, 25 bp, Saccharomyces pastorianus
gactttgtcaaactttgggtctcga

SEQ ID NO: 152719 - DNA, 25 bp, Saccharomyces pastorianus
tatcgtgatagatgttgactacaat

SEQ ID NO: 152720 - DNA, 25 bp, Saccharomyces pastorianus
tcaaggattacaaacctggttccat

SEQ ID NO: 152721 - DNA, 25 bp, Saccharomyces pastorianus
acctggttccataactttggagaat

SEQ ID NO: 152722 - DNA, 25 bp, Saccharomyces pastorianus
gaactttcaagattatcgacggcat

SEQ ID NO: 152723 - DNA, 25 bp, Saccharomyces pastorianus
ctggttccgaagtgtctttgagtgt

SEQ ID NO: 152724 - DNA, 25 bp, Saccharomyces pastorianus
tttgacaaacaacccctagaataca

SEQ ID NO: 152725 - DNA, 25 bp, Saccharomyces pastorianus
tattttagtggctactggttccgaa

SEQ ID NO: 152726 - DNA, 25 bp, Saccharomyces pastorianus
gaaagcgcttctaagggtggttacg

SEQ ID NO: 152727 - DNA, 25 bp, Saccharomyces pastorianus
ttctctaccagatttcttcactttt

SEQ ID NO: 152728 - DNA, 25 bp, Saccharomyces pastorianus
ttgacagatttggtgcctccggtaa

SEQ ID NO: 152729 - DNA, 25 bp, Saccharomyces pastorianus
cgctcatcaatccttcggtattgac

SEQ ID NO: 152730 - DNA, 25 bp, Saccharomyces pastorianus
atcaaggctcgtgttgtttctctac

SEQ ID NO: 152731 - DNA, 25 bp, Saccharomyces pastorianus
tgaagttttggctaccacatgttgg

SEQ ID NO: 152732 - DNA, 25 bp, Saccharomyces pastorianus
ggtagctctattgaaagcgcttcta

SEQ ID NO: 152733 - DNA, 25 bp, Saccharomyces pastorianus
gaagctgctaagactttggccgcaa

SEQ ID NO: 152734 - DNA, 25 bp, Saccharomyces pastorianus
ttaaagccaggtgtcgaagccaaca

SEQ ID NO: 152735 - DNA, 25 bp, Saccharomyces pastorianus
cctatgttttcttgggtgacggttg

SEQ ID NO: 152736 - DNA, 25 bp, Saccharomyces pastorianus
gtgctaccagtatctcattcgatga

SEQ ID NO: 152737 - DNA, 25 bp, Saccharomyces pastorianus
tgcacggtgccccattgaaagcaga

SEQ ID NO: 152738 - DNA, 25 bp, Saccharomyces pastorianus
tgctcaagctaagttatccaaggac

SEQ ID NO: 152739 - DNA, 25 bp, Saccharomyces pastorianus
aaccattggttacggttccttgcat

SEQ ID NO: 152740 - DNA, 25 bp, Saccharomyces pastorianus
gatcactatcgatggtgctaccagt

SEQ ID NO: 152741 - DNA, 25 bp, Saccharomyces pastorianus
taaccttgctgccacttacaacaag

SEQ ID NO: 152742 - DNA, 25 bp, Saccharomyces pastorianus
aagccaggctttaccttgtctgaca

SEQ ID NO: 152743 - DNA, 25 bp, Saccharomyces pastorianus
ttgtctgacaactacacctatgttt

SEQ ID NO: 152744 - DNA, 25 bp, Saccharomyces pastorianus
agaagcttcctccttggctggtcat

SEQ ID NO: 152745 - DNA, 25 bp, Saccharomyces pastorianus
aatcaagaagtcacgatcaagtatg

SEQ ID NO: 152746 - DNA, 25 bp, Saccharomyces pastorianus
atgaatcatgcctacgatcgtacct

SEQ ID NO: 152747 - DNA, 25 bp, Saccharomyces pastorianus
aatcatgcctacgatcgtaccttct

SEQ ID NO: 152748 - DNA, 25 bp, Saccharomyces pastorianus
gaagtcacgatcaagtatgtaggta

SEQ ID NO: 152749 - DNA, 25 bp, Saccharomyces pastorianus
ctacgatcgtaccttcttggctttc

SEQ ID NO: 152750 - DNA, 25 bp, Saccharomyces pastorianus
tggctttcccaagaaaatttttcat

SEQ ID NO: 152751 - DNA, 25 bp, Saccharomyces pastorianus
tcgtaccttcttggctttcccaaga

SEQ ID NO: 152752 - DNA, 25 bp, Saccharomyces pastorianus
aaagagtttatatatgaatcatgcc

SEQ ID NO: 152753 - DNA, 25 bp, Saccharomyces pastorianus
gtcacgatcaagtatgtaggtaaaa

SEQ ID NO: 152754 - DNA, 25 bp, Saccharomyces pastorianus
atgcctacgatcgtaccttcttggc

SEQ ID NO: 152755 - DNA, 25 bp, Saccharomyces pastorianus
gatcgtaccttcttggctttcccaa

SEQ ID NO: 152756 - DNA, 25 bp, Saccharomyces pastorianus
gatgaaacctgccaaattcactccg

SEQ ID NO: 152757 - DNA, 25 bp, Saccharomyces pastorianus
gaaataccgatatgtcaggacttct

SEQ ID NO: 152758 - DNA, 25 bp, Saccharomyces pastorianus
acagggcaagacaccatattttagt

SEQ ID NO: 152759 - DNA, 25 bp, Saccharomyces pastorianus
attatatcacccttaacacctgacg

SEQ ID NO: 152760 - DNA, 25 bp, Saccharomyces pastorianus
ttctgaacctgagaagacctccata

SEQ ID NO: 152761 - DNA, 25 bp, Saccharomyces pastorianus
cacccttaacacctgacgattttga

SEQ ID NO: 152762 - DNA, 25 bp, Saccharomyces pastorianus
gaaagcattattagcgggcctcctt

SEQ ID NO: 152763 - DNA, 25 bp, Saccharomyces pastorianus
ttcactccgcttctgaacctgagaa

SEQ ID NO: 152764 - DNA, 25 bp, Saccharomyces pastorianus
gacctccataagtcccacatttggg

SEQ ID NO: 152765 - DNA, 25 bp, Saccharomyces pastorianus
agcgggcctcctttgcaagagaata

SEQ ID NO: 152766 - DNA, 25 bp, Saccharomyces pastorianus
aagactcttttgaaataccgatatg

SEQ ID NO: 152767 - DNA, 25 bp, Saccharomyces pastorianus
accaccatgcattatcgtctgttct

SEQ ID NO: 152768 - DNA, 25 bp, Saccharomyces pastorianus
gatatttactcattggtttacagcc

SEQ ID NO: 152769 - DNA, 25 bp, Saccharomyces pastorianus
cgtctgttctcacgttaatcatgaa

SEQ ID NO: 152770 - DNA, 25 bp, Saccharomyces pastorianus
aaatccatcgagttagacccctcat

SEQ ID NO: 152771 - DNA, 25 bp, Saccharomyces pastorianus
gtttacagcctgagacatctatgga

SEQ ID NO: 152772 - DNA, 25 bp, Saccharomyces pastorianus
gtcagcgatggtggatttgaactat

SEQ ID NO: 152773 - DNA, 25 bp, Saccharomyces pastorianus
tcatgaactcgcaagcccaatgttg

SEQ ID NO: 152774 - DNA, 25 bp, Saccharomyces pastorianus
gaagctactggtttctaattccaat

SEQ ID NO: 152775 - DNA, 25 bp, Saccharomyces pastorianus
actgcatactagatgcttggactga

SEQ ID NO: 152776 - DNA, 25 bp, Saccharomyces pastorianus
tcgatgtggcggttagcttactaat

SEQ ID NO: 152777 - DNA, 25 bp, Saccharomyces pastorianus
gagcaattgagatcctataatacca

SEQ ID NO: 152778 - DNA, 25 bp, Saccharomyces pastorianus
ggtatctaggctactgtctaatatc

SEQ ID NO: 152779 - DNA, 25 bp, Saccharomyces pastorianus
tcccggtatctaggctactgtctaa

SEQ ID NO: 152780 - DNA, 25 bp, Saccharomyces pastorianus
gtctaatatcgtccacgagggtcag

SEQ ID NO: 152781 - DNA, 25 bp, Saccharomyces pastorianus
atatcgtccacgagggtcagtatcc

SEQ ID NO: 152782 - DNA, 25 bp, Saccharomyces pastorianus
aggctactgtctaatatcgtccacg

SEQ ID NO: 152783 - DNA, 25 bp, Saccharomyces pastorianus
gtccacgagggtcagtatcccataa

SEQ ID NO: 152784 - DNA, 25 bp, Saccharomyces pastorianus
ccacgagggtcagtatcccataagg

SEQ ID NO: 152785 - DNA, 25 bp, Saccharomyces pastorianus
gctactgtctaatatcgtccacgag

SEQ ID NO: 152786 - DNA, 25 bp, Saccharomyces pastorianus
agaccgtcccggtatctaggctact

SEQ ID NO: 152787 - DNA, 25 bp, Saccharomyces pastorianus
tactgtctaatatcgtccacgaggg

SEQ ID NO: 152788 - DNA, 25 bp, Saccharomyces pastorianus
ccggtatctaggctactgtctaata

SEQ ID NO: 152789 - DNA, 25 bp, Saccharomyces pastorianus
acaacagtcacaaccgctactaatg

SEQ ID NO: 152790 - DNA, 25 bp, Saccharomyces pastorianus
atcttgttgacgcatctggagtagc

SEQ ID NO: 152791 - DNA, 25 bp, Saccharomyces pastorianus
tgagaattttccagttccaccgtcg

SEQ ID NO: 152792 - DNA, 25 bp, Saccharomyces pastorianus
ctaatgatgatgtttccagttctga

SEQ ID NO: 152793 - DNA, 25 bp, Saccharomyces pastorianus
ggtgatccccatgtgaaagcttcaa

SEQ ID NO: 152794 - DNA, 25 bp, Saccharomyces pastorianus
ttctgtatcctcaaatgattctcag

SEQ ID NO: 152795 - DNA, 25 bp, Saccharomyces pastorianus
ttccaccgtcggcttcaaatatgaa

SEQ ID NO: 152796 - DNA, 25 bp, Saccharomyces pastorianus
gataatcctatccttacatccaatc

SEQ ID NO: 152797 - DNA, 25 bp, Saccharomyces pastorianus
gagaccagtaccaagaaggccttca

SEQ ID NO: 152798 - DNA, 25 bp, Saccharomyces pastorianus
gaagacctctcagaatcgttttaat

SEQ ID NO: 152799 - DNA, 25 bp, Saccharomyces pastorianus
gattctcagaattcgctcaaaaatg

SEQ ID NO: 152800 - DNA, 25 bp, Saccharomyces pastorianus
tttttaatcaaaccacctccatcta

SEQ ID NO: 152801 - DNA, 25 bp, Saccharomyces pastorianus
tattcacctctcctgagttattaga

SEQ ID NO: 152802 - DNA, 25 bp, Saccharomyces pastorianus
gaattgtctcctgagggttcgacta

SEQ ID NO: 152803 - DNA, 25 bp, Saccharomyces pastorianus
gatcctaatgtttcagctaacgcag

SEQ ID NO: 152804 - DNA, 25 bp, Saccharomyces pastorianus
aagtggctgaatgctcttcttggga

SEQ ID NO: 152805 - DNA, 25 bp, Saccharomyces pastorianus
agtaattccctctcaactggtttat

SEQ ID NO: 152806 - DNA, 25 bp, Saccharomyces pastorianus
gtcgacgtgggtgatagtgctccat

SEQ ID NO: 152807 - DNA, 25 bp, Saccharomyces pastorianus
agaatttggtatgcttttcgcaccg

SEQ ID NO: 152808 - DNA, 25 bp, Saccharomyces pastorianus
gactaagattgctatcgacgttcaa

SEQ ID NO: 152809 - DNA, 25 bp, Saccharomyces pastorianus
aaccccagggttcttggatgatttg

SEQ ID NO: 152810 - DNA, 25 bp, Saccharomyces pastorianus
agattatttctttctctgcaacaaa

SEQ ID NO: 152811 - DNA, 25 bp, Saccharomyces pastorianus
gaaacatgtctacgcgggctagctt

SEQ ID NO: 152812 - DNA, 25 bp, Saccharomyces pastorianus
aacttgctagttacgattccaggaa

SEQ ID NO: 152813 - DNA, 25 bp, Saccharomyces pastorianus
tgctgcgcttcaaggatgcctacaa

SEQ ID NO: 152814 - DNA, 25 bp, Saccharomyces pastorianus
agtacctgcctgaccagtacgatta

SEQ ID NO: 152815 - DNA, 25 bp, Saccharomyces pastorianus
agatgtttctcgattaagcctgtat

SEQ ID NO: 152816 - DNA, 25 bp, Saccharomyces pastorianus
ttgtaccgtctctctgacaacaagt

SEQ ID NO: 152817 - DNA, 25 bp, Saccharomyces pastorianus
tacgattacgactctttagcccgaa

SEQ ID NO: 152818 - DNA, 25 bp, Saccharomyces pastorianus
gcaagtatcccgcaagttgtaccgt

SEQ ID NO: 152819 - DNA, 25 bp, Saccharomyces pastorianus
taagcctgtattgccaagactgcga

SEQ ID NO: 152820 - DNA, 25 bp, Saccharomyces pastorianus
aaatgcattgctcgagctgcgcatg

SEQ ID NO: 152821 - DNA, 25 bp, Saccharomyces pastorianus
aaatccagatgcacgtgcgacgagc

SEQ ID NO: 152822 - DNA, 25 bp, Saccharomyces pastorianus
gcactctgatgcttatgggaaaatg

SEQ ID NO: 152823 - DNA, 25 bp, Saccharomyces pastorianus
gaagtgactcgcaagcaggctgaaa

SEQ ID NO: 152824 - DNA, 25 bp, Saccharomyces pastorianus
gaagcgagctgtttgtaagtatcat

SEQ ID NO: 152825 - DNA, 25 bp, Saccharomyces pastorianus
aaagcttcttattcaacgaggacag

SEQ ID NO: 152826 - DNA, 25 bp, Saccharomyces pastorianus
ggacgagtatccgattttcgaagac

SEQ ID NO: 152827 - DNA, 25 bp, Saccharomyces pastorianus
aatgccgattgtctattatacttac

SEQ ID NO: 152828 - DNA, 25 bp, Saccharomyces pastorianus
acgaggacagtttgcaagtgtgcgt

SEQ ID NO: 152829 - DNA, 25 bp, Saccharomyces pastorianus
gacttaggtctataaaatcagccaa

SEQ ID NO: 152830 - DNA, 25 bp, Saccharomyces pastorianus
taaaccgcataagacagctggctgt

SEQ ID NO: 152831 - DNA, 25 bp, Saccharomyces pastorianus
gggacaactggatcgattctatcaa

SEQ ID NO: 152832 - DNA, 25 bp, Saccharomyces pastorianus
gaatggactggttaatctacgaaat

SEQ ID NO: 152833 - DNA, 25 bp, Saccharomyces pastorianus
gtataatacccaaggaagcttccct

SEQ ID NO: 152834 - DNA, 25 bp, Saccharomyces pastorianus
atagccggtctggatgcaagaactc

SEQ ID NO: 152835 - DNA, 25 bp, Saccharomyces pastorianus
gacattaacgtttattcgcacatta

SEQ ID NO: 152836 - DNA, 25 bp, Saccharomyces pastorianus
gggtatttacgctttcacaacagtc

SEQ ID NO: 152837 - DNA, 25 bp, Saccharomyces pastorianus
tcttgcccaccaagtacgtcgggta

SEQ ID NO: 152838 - DNA, 25 bp, Saccharomyces pastorianus
catataatccaagctctagttctag

SEQ ID NO: 152839 - DNA, 25 bp, Saccharomyces pastorianus
cccaatcttttatccgctaacgaat

SEQ ID NO: 152840 - DNA, 25 bp, Saccharomyces pastorianus
ttagtgcatctggtatagccccatc

SEQ ID NO: 152841 - DNA, 25 bp, Saccharomyces pastorianus
aatagcaatagaccggcttctaact

SEQ ID NO: 152842 - DNA, 25 bp, Saccharomyces pastorianus
gaattcgatgtattctcccatagac

SEQ ID NO: 152843 - DNA, 25 bp, Saccharomyces pastorianus
gccaacctcggaacggctaacagta

SEQ ID NO: 152844 - DNA, 25 bp, Saccharomyces pastorianus
cacacagttcgatgtcgtggaagaa

SEQ ID NO: 152845 - DNA, 25 bp, Saccharomyces pastorianus
aggaccgagtgaaaggattgacttc

SEQ ID NO: 152846 - DNA, 25 bp, Saccharomyces pastorianus
ttggatctcgatacaggtgattacg

SEQ ID NO: 152847 - DNA, 25 bp, Saccharomyces pastorianus
acaggtgattacgattttttacata

SEQ ID NO: 152848 - DNA, 25 bp, Saccharomyces pastorianus
ttgaacgattcagagggcatttttg

SEQ ID NO: 152849 - DNA, 25 bp, Saccharomyces pastorianus
acgctgctggcatacttcaaaagaa

SEQ ID NO: 152850 - DNA, 25 bp, Saccharomyces pastorianus
atttggtggatttggatctcgatac

SEQ ID NO: 152851 - DNA, 25 bp, Saccharomyces pastorianus
gagatctcaagttttcgcacaggaa

SEQ ID NO: 152852 - DNA, 25 bp, Saccharomyces pastorianus
attggttatgccatccagctctgga

SEQ ID NO: 152853 - DNA, 25 bp, Saccharomyces pastorianus
aaaatagcaagcacgctgctggcat

SEQ ID NO: 152854 - DNA, 25 bp, Saccharomyces pastorianus
cagctctggatcttttggacttgga

SEQ ID NO: 152855 - DNA, 25 bp, Saccharomyces pastorianus
tatggcacaacccttcggtggtcat

SEQ ID NO: 152856 - DNA, 25 bp, Saccharomyces pastorianus
gattgaattatttatggcacaaccc

SEQ ID NO: 152857 - DNA, 25 bp, Saccharomyces pastorianus
actaatccaatagcaatcatgaggg

SEQ ID NO: 152858 - DNA, 25 bp, Saccharomyces pastorianus
ttatttatggcacaacccttcggtg

SEQ ID NO: 152859 - DNA, 25 bp, Saccharomyces pastorianus
gatcatgaaatttactaatccaata

SEQ ID NO: 152860 - DNA, 25 bp, Saccharomyces pastorianus
agtaatgggacagatcatgaaattt

SEQ ID NO: 152861 - DNA, 25 bp, Saccharomyces pastorianus
ggcacaacccttcggtggtcattcg

SEQ ID NO: 152862 - DNA, 25 bp, Saccharomyces pastorianus
tatttatggcacaacccttcggtgg

SEQ ID NO: 152863 - DNA, 25 bp, Saccharomyces pastorianus
aattatttatggcacaacccttcgg

SEQ ID NO: 152864 - DNA, 25 bp, Saccharomyces pastorianus
atttatggcacaacccttcggtggt

SEQ ID NO: 152865 - DNA, 25 bp, Saccharomyces pastorianus
tttatggcacaacccttcggtggtc

SEQ ID NO: 152866 - DNA, 25 bp, Saccharomyces pastorianus
atacgtttccaacagatggcgttag

SEQ ID NO: 152867 - DNA, 25 bp, Saccharomyces pastorianus
tgaagacctgtcaccacttttacaa

SEQ ID NO: 152868 - DNA, 25 bp, Saccharomyces pastorianus
tttaaagctgcaagactcaatgaaa

SEQ ID NO: 152869 - DNA, 25 bp, Saccharomyces pastorianus
aaatacttgatgagtctactaggag

SEQ ID NO: 152870 - DNA, 25 bp, Saccharomyces pastorianus
gatgcagaggtttctcaaagctcat

SEQ ID NO: 152871 - DNA, 25 bp, Saccharomyces pastorianus
atctgctacagaaacagtacttaca

SEQ ID NO: 152872 - DNA, 25 bp, Saccharomyces pastorianus
gatgacattagaaacagggctctga

SEQ ID NO: 152873 - DNA, 25 bp, Saccharomyces pastorianus
gcttcttcctaagtgggcctaattt

SEQ ID NO: 152874 - DNA, 25 bp, Saccharomyces pastorianus
aacagggctctgatagatgtaagta

SEQ ID NO: 152875 - DNA, 25 bp, Saccharomyces pastorianus
aaagctcatctattcgtcgcttctt

SEQ ID NO: 152876 - DNA, 25 bp, Saccharomyces pastorianus
ggagaaccaaatacgtttccaacag

SEQ ID NO: 152877 - DNA, 25 bp, Saccharomyces pastorianus
tttctatgtcgtcatgaacagacca

SEQ ID NO: 152878 - DNA, 25 bp, Saccharomyces pastorianus
acagaccaggtgctagagtcactag

SEQ ID NO: 152879 - DNA, 25 bp, Saccharomyces pastorianus
gaacagaccaggtgctagagtcact

SEQ ID NO: 152880 - DNA, 25 bp, Saccharomyces pastorianus
gttggtaactcccacaagacaacta

SEQ ID NO: 152881 - DNA, 25 bp, Saccharomyces pastorianus
aactcccacaagacaactaaggaag

SEQ ID NO: 152882 - DNA, 25 bp, Saccharomyces pastorianus
atggatttctatgtcgtcatgaaca

SEQ ID NO: 152883 - DNA, 25 bp, Saccharomyces pastorianus
agaccaggtgctagagtcactagaa

SEQ ID NO: 152884 - DNA, 25 bp, Saccharomyces pastorianus
tagagtcactagaagaaagagatgt

SEQ ID NO: 152885 - DNA, 25 bp, Saccharomyces pastorianus
ggtaactcccacaagacaactaagg

SEQ ID NO: 152886 - DNA, 25 bp, Saccharomyces pastorianus
ggatttctatgtcgtcatgaacaga

SEQ ID NO: 152887 - DNA, 25 bp, Saccharomyces pastorianus
caggtgctagagtcactagaagaaa

SEQ ID NO: 152888 - DNA, 25 bp, Saccharomyces pastorianus
gatcgaaaagttggtcttaaacatt

SEQ ID NO: 152889 - DNA, 25 bp, Saccharomyces pastorianus
ggtcttaaacatttctgttggtgaa

SEQ ID NO: 152890 - DNA, 25 bp, Saccharomyces pastorianus
agatcgaaaagttggtcttaaacat

SEQ ID NO: 152891 - DNA, 25 bp, Saccharomyces pastorianus
gttggtcttaaacatttctgttggt

SEQ ID NO: 152892 - DNA, 25 bp, Saccharomyces pastorianus
atgtctgccaaagctcaaaacccta

SEQ ID NO: 152893 - DNA, 25 bp, Saccharomyces pastorianus
taaacatttctgttggtgaatctgg

SEQ ID NO: 152894 - DNA, 25 bp, Saccharomyces pastorianus
tggtcttaaacatttctgttggtga

SEQ ID NO: 152895 - DNA, 25 bp, Saccharomyces pastorianus
agttggtcttaaacatttctgttgg

SEQ ID NO: 152896 - DNA, 25 bp, Saccharomyces pastorianus
aagttggtcttaaacatttctgttg

SEQ ID NO: 152897 - DNA, 25 bp, Saccharomyces pastorianus
tgccaaagctcaaaaccctatgcgt

SEQ ID NO: 152898 - DNA, 25 bp, Saccharomyces pastorianus
gaaaagttggtcttaaacatttctg

SEQ ID NO: 152899 - DNA, 25 bp, Saccharomyces pastorianus
gcatcatcccatcccaataattact

SEQ ID NO: 152900 - DNA, 25 bp, Saccharomyces pastorianus
gttgatgcacaacccaaacctaagc

SEQ ID NO: 152901 - DNA, 25 bp, Saccharomyces pastorianus
ggttcgtttgatccttcgtccttgt

SEQ ID NO: 152902 - DNA, 25 bp, Saccharomyces pastorianus
aaatgccagggctacatcctctgtg

SEQ ID NO: 152903 - DNA, 25 bp, Saccharomyces pastorianus
atcctctgtggcagctacgtcagtt

SEQ ID NO: 152904 - DNA, 25 bp, Saccharomyces pastorianus
atctcagttatctgcgtcggcatca

SEQ ID NO: 152905 - DNA, 25 bp, Saccharomyces pastorianus
tgcatgataaacaaccgggttcgtt

SEQ ID NO: 152906 - DNA, 25 bp, Saccharomyces pastorianus
tccagacgccgcatgtaccagatag

SEQ ID NO: 152907 - DNA, 25 bp, Saccharomyces pastorianus
cggcggctgcttctcaaaatgttga

SEQ ID NO: 152908 - DNA, 25 bp, Saccharomyces pastorianus
tcgtccttgtctcgattttttcaac

SEQ ID NO: 152909 - DNA, 25 bp, Saccharomyces pastorianus
accagataggcctccatctcagtta

SEQ ID NO: 152910 - DNA, 25 bp, Saccharomyces pastorianus
gaactaattgatagctcctccgatc

SEQ ID NO: 152911 - DNA, 25 bp, Saccharomyces pastorianus
gcagcatgagccttacaacgaactt

SEQ ID NO: 152912 - DNA, 25 bp, Saccharomyces pastorianus
gtcagaactagcattattgtccaga

SEQ ID NO: 152913 - DNA, 25 bp, Saccharomyces pastorianus
ggattttgacttctaccttgctgac

SEQ ID NO: 152914 - DNA, 25 bp, Saccharomyces pastorianus
gcagtgtcacataagctttcgttga

SEQ ID NO: 152915 - DNA, 25 bp, Saccharomyces pastorianus
atcctctccaggtattggcagttca

SEQ ID NO: 152916 - DNA, 25 bp, Saccharomyces pastorianus
taccttgctgactttacgtcggcat

SEQ ID NO: 152917 - DNA, 25 bp, Saccharomyces pastorianus
acgtcggcatttcacattaaccaaa

SEQ ID NO: 152918 - DNA, 25 bp, Saccharomyces pastorianus
aattctggttgacagactgcctcta

SEQ ID NO: 152919 - DNA, 25 bp, Saccharomyces pastorianus
cctccgatcatgttcctacatttga

SEQ ID NO: 152920 - DNA, 25 bp, Saccharomyces pastorianus
gttagtgtcgcatggatcctctcca

SEQ ID NO: 152921 - DNA, 25 bp, Saccharomyces pastorianus
tagtaaggattttgcttatcgccaa

SEQ ID NO: 152922 - DNA, 25 bp, Saccharomyces pastorianus
tttccatccataagtaacaatagta

SEQ ID NO: 152923 - DNA, 25 bp, Saccharomyces pastorianus
gtttctgatggttcctttccatcca

SEQ ID NO: 152924 - DNA, 25 bp, Saccharomyces pastorianus
gatggttcctttccatccataagta

SEQ ID NO: 152925 - DNA, 25 bp, Saccharomyces pastorianus
gttaccagggtttctgatggttcct

SEQ ID NO: 152926 - DNA, 25 bp, Saccharomyces pastorianus
cacccgttaccagggtttctgatgg

SEQ ID NO: 152927 - DNA, 25 bp, Saccharomyces pastorianus
ggttcctttccatccataagtaaca

SEQ ID NO: 152928 - DNA, 25 bp, Saccharomyces pastorianus
cagggtttctgatggttcctttcca

SEQ ID NO: 152929 - DNA, 25 bp, Saccharomyces pastorianus
atgaacagtacacctcctacgtcac

SEQ ID NO: 152930 - DNA, 25 bp, Saccharomyces pastorianus
tctgatggttcctttccatccataa

SEQ ID NO: 152931 - DNA, 25 bp, Saccharomyces pastorianus
gtcacccgttaccagggtttctgat

SEQ ID NO: 152932 - DNA, 25 bp, Saccharomyces pastorianus
tccggcaagcgcgtattcagatagt

SEQ ID NO: 152933 - DNA, 25 bp, Saccharomyces pastorianus
gtcccactaacatctactgtatcga

SEQ ID NO: 152934 - DNA, 25 bp, Saccharomyces pastorianus
aggtgtttcacccagttgtctagca

SEQ ID NO: 152935 - DNA, 25 bp, Saccharomyces pastorianus
gtagtcataaatcgtctcgtgcctc

SEQ ID NO: 152936 - DNA, 25 bp, Saccharomyces pastorianus
gagggtcagatctttcaccttttga

SEQ ID NO: 152937 - DNA, 25 bp, Saccharomyces pastorianus
atgactcacgattgatctacggcaa

SEQ ID NO: 152938 - DNA, 25 bp, Saccharomyces pastorianus
ggtgttgaagctccttacagcagtt

SEQ ID NO: 152939 - DNA, 25 bp, Saccharomyces pastorianus
aaagttcagcttgtcatattcccca

SEQ ID NO: 152940 - DNA, 25 bp, Saccharomyces pastorianus
tcaaaactgcagtggctctcgcaaa

SEQ ID NO: 152941 - DNA, 25 bp, Saccharomyces pastorianus
gaatgataagtctcttcactcgcgc

SEQ ID NO: 152942 - DNA, 25 bp, Saccharomyces pastorianus
ggttgatttttatccttcgccatta

SEQ ID NO: 152943 - DNA, 25 bp, Saccharomyces pastorianus
gggcaaatcgtcctcgttatataga

SEQ ID NO: 152944 - DNA, 25 bp, Saccharomyces pastorianus
ggcaaacatcaacgtacgccttcag

SEQ ID NO: 152945 - DNA, 25 bp, Saccharomyces pastorianus
tcttcctctgttaccacgttaaaca

SEQ ID NO: 152946 - DNA, 25 bp, Saccharomyces pastorianus
gatggtgtccgttccgaaatttcta

SEQ ID NO: 152947 - DNA, 25 bp, Saccharomyces pastorianus
atatcactccagtagacagttttgt

SEQ ID NO: 152948 - DNA, 25 bp, Saccharomyces pastorianus
tcaagcacgacctcaaatttggcat

SEQ ID NO: 152949 - DNA, 25 bp, Saccharomyces pastorianus
aaaaagtaacgccatcttcctctgt

SEQ ID NO: 152950 - DNA, 25 bp, Saccharomyces pastorianus
ggcatgtccaacaaagacgcttgct

SEQ ID NO: 152951 - DNA, 25 bp, Saccharomyces pastorianus
taaagagttcttccgtgcccaagga

SEQ ID NO: 152952 - DNA, 25 bp, Saccharomyces pastorianus
gcaagtcttgaaccaactccagagg

SEQ ID NO: 152953 - DNA, 25 bp, Saccharomyces pastorianus
gctagttatcattcaccagaggaca

SEQ ID NO: 152954 - DNA, 25 bp, Saccharomyces pastorianus
tcacacagccttttgaccgatgtta

SEQ ID NO: 152955 - DNA, 25 bp, Saccharomyces pastorianus
gggacttgcgtagtatccagagcaa

SEQ ID NO: 152956 - DNA, 25 bp, Saccharomyces pastorianus
cgattactaagtccagattctcaaa

SEQ ID NO: 152957 - DNA, 25 bp, Saccharomyces pastorianus
tccacgcactcttcagatatcagat

SEQ ID NO: 152958 - DNA, 25 bp, Saccharomyces pastorianus
agacgttgactcttgggacttgcgt

SEQ ID NO: 152959 - DNA, 25 bp, Saccharomyces pastorianus
ttatctgtgtacgacgcgaaagacg

SEQ ID NO: 152960 - DNA, 25 bp, Saccharomyces pastorianus
gtgttataagggttcacacagcctt

SEQ ID NO: 152961 - DNA, 25 bp, Saccharomyces pastorianus
taattcattttatagctccacgcac

SEQ ID NO: 152962 - DNA, 25 bp, Saccharomyces pastorianus
aattcacatatccttgaagtcgaag

SEQ ID NO: 152963 - DNA, 25 bp, Saccharomyces pastorianus
acctgattgttagagtccctgtttt

SEQ ID NO: 152964 - DNA, 25 bp, Saccharomyces pastorianus
gtcagcatcactttttgtgcaacct

SEQ ID NO: 152965 - DNA, 25 bp, Saccharomyces pastorianus
gagttaaactgacccatacgaacca

SEQ ID NO: 152966 - DNA, 25 bp, Saccharomyces pastorianus
gaacatcttttatccacatgtcatt

SEQ ID NO: 152967 - DNA, 25 bp, Saccharomyces pastorianus
atgtcatttggtgtctattcttctg

SEQ ID NO: 152968 - DNA, 25 bp, Saccharomyces pastorianus
gaggttccttccaaataggccacat

SEQ ID NO: 152969 - DNA, 25 bp, Saccharomyces pastorianus
ggttacgcatatttatcggcatatt

SEQ ID NO: 152970 - DNA, 25 bp, Saccharomyces pastorianus
gcaccttacgctttaacacatttct

SEQ ID NO: 152971 - DNA, 25 bp, Saccharomyces pastorianus
tattcttctgagcacggatccataa

SEQ ID NO: 152972 - DNA, 25 bp, Saccharomyces pastorianus
gacaaagtttggtcgctcattattt

SEQ ID NO: 152973 - DNA, 25 bp, Saccharomyces pastorianus
tcaactctgtttgatcaggaagcag

SEQ ID NO: 152974 - DNA, 25 bp, Saccharomyces pastorianus
aaatagtctttatctcgcaccttac

SEQ ID NO: 152975 - DNA, 25 bp, Saccharomyces pastorianus
atatacatctggtcctattaggcaa

SEQ ID NO: 152976 - DNA, 25 bp, Saccharomyces pastorianus
gcggaaatgctcacttcatatcgta

SEQ ID NO: 152977 - DNA, 25 bp, Saccharomyces pastorianus
atttgcattcggagcctgttgagcc

SEQ ID NO: 152978 - DNA, 25 bp, Saccharomyces pastorianus
caattcgcatatcaagtgttcaact

SEQ ID NO: 152979 - DNA, 25 bp, Saccharomyces pastorianus
agtgttcaactttacttggaatcaa

SEQ ID NO: 152980 - DNA, 25 bp, Saccharomyces pastorianus
cactacccactgaaaactttgaaca

SEQ ID NO: 152981 - DNA, 25 bp, Saccharomyces pastorianus
cacacccacacgatgataccataaa

SEQ ID NO: 152982 - DNA, 25 bp, Saccharomyces pastorianus
ttacccttaaataagcccacatggg

SEQ ID NO: 152983 - DNA, 25 bp, Saccharomyces pastorianus
agaggcatttttgcatgattttacc

SEQ ID NO: 152984 - DNA, 25 bp, Saccharomyces pastorianus
agatgctaaagccttttcactaccc

SEQ ID NO: 152985 - DNA, 25 bp, Saccharomyces pastorianus
tgagcctttttctgctggtgatgat

SEQ ID NO: 152986 - DNA, 25 bp, Saccharomyces pastorianus
taatgtctccgctttggaactttta

SEQ ID NO: 152987 - DNA, 25 bp, Saccharomyces pastorianus
tctagtgagtccaattgttcatgat

SEQ ID NO: 152988 - DNA, 25 bp, Saccharomyces pastorianus
atctagtgagtccaattgttcatga

SEQ ID NO: 152989 - DNA, 25 bp, Saccharomyces pastorianus
gattatctagtgagtccaattgttc

SEQ ID NO: 152990 - DNA, 25 bp, Saccharomyces pastorianus
ctataatttccgtccaatgggcttt

SEQ ID NO: 152991 - DNA, 25 bp, Saccharomyces pastorianus
ttatctagtgagtccaattgttcat

SEQ ID NO: 152992 - DNA, 25 bp, Saccharomyces pastorianus
gtgagtccaattgttcatgatgaat

SEQ ID NO: 152993 - DNA, 25 bp, Saccharomyces pastorianus
ggattatctagtgagtccaattgtt

SEQ ID NO: 152994 - DNA, 25 bp, Saccharomyces pastorianus
gtccaattgttcatgatgaatttca

SEQ ID NO: 152995 - DNA, 25 bp, Saccharomyces pastorianus
aaagcttctataatttccgtccaat

SEQ ID NO: 152996 - DNA, 25 bp, Saccharomyces pastorianus
tagtgagtccaattgttcatgatga

SEQ ID NO: 152997 - DNA, 25 bp, Saccharomyces pastorianus
gagtccaattgttcatgatgaattt

SEQ ID NO: 152998 - DNA, 25 bp, Saccharomyces pastorianus
catttcgcatcagagacagacggtg

SEQ ID NO: 152999 - DNA, 25 bp, Saccharomyces pastorianus
gcactgaggtagtccataactcggt

SEQ ID NO: 153000 - DNA, 25 bp, Saccharomyces pastorianus
gaatatctccaccaactagaggtta

SEQ ID NO: 153001 - DNA, 25 bp, Saccharomyces pastorianus
accggagactttgtatcttgccatt

SEQ ID NO: 153002 - DNA, 25 bp, Saccharomyces pastorianus
gaaggaagatctctatccgcataga

SEQ ID NO: 153003 - DNA, 25 bp, Saccharomyces pastorianus
taaattcggcttattaccggagact

SEQ ID NO: 153004 - DNA, 25 bp, Saccharomyces pastorianus
atccattcatggtcagcgagtacgt

SEQ ID NO: 153005 - DNA, 25 bp, Saccharomyces pastorianus
aggcgttggatcaagcactgaggta

SEQ ID NO: 153006 - DNA, 25 bp, Saccharomyces pastorianus
gaagaggtctattctcctagtataa

SEQ ID NO: 153007 - DNA, 25 bp, Saccharomyces pastorianus
attggttggcacatcatgccttttc

SEQ ID NO: 153008 - DNA, 25 bp, Saccharomyces pastorianus
gcatgatcccctaaaaggcgttgga

SEQ ID NO: 153009 - DNA, 25 bp, Saccharomyces pastorianus
tagggttttcttcccaagatggtga

SEQ ID NO: 153010 - DNA, 25 bp, Saccharomyces pastorianus
cgacacaagtccgattgttcctctt

SEQ ID NO: 153011 - DNA, 25 bp, Saccharomyces pastorianus
tacggctctatattagggttttctt

SEQ ID NO: 153012 - DNA, 25 bp, Saccharomyces pastorianus
aacgacacaagtccgattgttcctc

SEQ ID NO: 153013 - DNA, 25 bp, Saccharomyces pastorianus
ggaacaacgacacaagtccgattgt

SEQ ID NO: 153014 - DNA, 25 bp, Saccharomyces pastorianus
ccaagatggtgaaggacaagaaata

SEQ ID NO: 153015 - DNA, 25 bp, Saccharomyces pastorianus
gaatcttaagcagagatacggctct

SEQ ID NO: 153016 - DNA, 25 bp, Saccharomyces pastorianus
gagatacggctctatattagggttt

SEQ ID NO: 153017 - DNA, 25 bp, Saccharomyces pastorianus
tattagggttttcttcccaagatgg

SEQ ID NO: 153018 - DNA, 25 bp, Saccharomyces pastorianus
tttggaacaacgacacaagtccgat

SEQ ID NO: 153019 - DNA, 25 bp, Saccharomyces pastorianus
gggttttcttcccaagatggtgaag

SEQ ID NO: 153020 - DNA, 25 bp, Saccharomyces pastorianus
ttggcgcacctttgtgagcacatga

SEQ ID NO: 153021 - DNA, 25 bp, Saccharomyces pastorianus
atgaagtctcgttttacatcccgtt

SEQ ID NO: 153022 - DNA, 25 bp, Saccharomyces pastorianus
atatcggatccaacagatacttcaa

SEQ ID NO: 153023 - DNA, 25 bp, Saccharomyces pastorianus
actgccaaacggaattttagcatta

SEQ ID NO: 153024 - DNA, 25 bp, Saccharomyces pastorianus
tgtcttacagcagcaggactcataa

SEQ ID NO: 153025 - DNA, 25 bp, Saccharomyces pastorianus
gtttgcacaggttcccataacgatc

SEQ ID NO: 153026 - DNA, 25 bp, Saccharomyces pastorianus
gagcacatgattctttctgccggtt

SEQ ID NO: 153027 - DNA, 25 bp, Saccharomyces pastorianus
aggatattgccggtttggcgcacct

SEQ ID NO: 153028 - DNA, 25 bp, Saccharomyces pastorianus
catgctcactgactgtttgcacagg

SEQ ID NO: 153029 - DNA, 25 bp, Saccharomyces pastorianus
tttacatcccgttgtcttacagcag

SEQ ID NO: 153030 - DNA, 25 bp, Saccharomyces pastorianus
gatacttcaagctcatgctcactga

SEQ ID NO: 153031 - DNA, 25 bp, Saccharomyces pastorianus
gggtacattgttttgggaggactca

SEQ ID NO: 153032 - DNA, 25 bp, Saccharomyces pastorianus
aatgttccttcagctagaggccttt

SEQ ID NO: 153033 - DNA, 25 bp, Saccharomyces pastorianus
acagtttgaagggtcggctggtcct

SEQ ID NO: 153034 - DNA, 25 bp, Saccharomyces pastorianus
gaggactcagggttttaacagacac

SEQ ID NO: 153035 - DNA, 25 bp, Saccharomyces pastorianus
aggatacttctagagccgttcttaa

SEQ ID NO: 153036 - DNA, 25 bp, Saccharomyces pastorianus
tataaccgtaatgtctggcagctcg

SEQ ID NO: 153037 - DNA, 25 bp, Saccharomyces pastorianus
tcggctggtcctgtagacctattaa

SEQ ID NO: 153038 - DNA, 25 bp, Saccharomyces pastorianus
aatatttagcattcttcgagtccaa

SEQ ID NO: 153039 - DNA, 25 bp, Saccharomyces pastorianus
gattcaccgagtttgattttcgaag

SEQ ID NO: 153040 - DNA, 25 bp, Saccharomyces pastorianus
aaatctctatatattccgctcaaag

SEQ ID NO: 153041 - DNA, 25 bp, Saccharomyces pastorianus
tacttatcttacttgcagctgcagg

SEQ ID NO: 153042 - DNA, 25 bp, Saccharomyces pastorianus
atggcgtccatattcatgctgctac

SEQ ID NO: 153043 - DNA, 25 bp, Saccharomyces pastorianus
cgttttgctggcactagacatcgca

SEQ ID NO: 153044 - DNA, 25 bp, Saccharomyces pastorianus
actcgatgctattgtcttgctggcg

SEQ ID NO: 153045 - DNA, 25 bp, Saccharomyces pastorianus
ccatactcgatgctattgtcttgct

SEQ ID NO: 153046 - DNA, 25 bp, Saccharomyces pastorianus
ggatgcactagacatggcgtccata

SEQ ID NO: 153047 - DNA, 25 bp, Saccharomyces pastorianus
cataccttccattttgaatgtcaaa

SEQ ID NO: 153048 - DNA, 25 bp, Saccharomyces pastorianus
atgctcgatgctattgtcttgctgg

SEQ ID NO: 153049 - DNA, 25 bp, Saccharomyces pastorianus
catactcgatgctactgtcttggat

SEQ ID NO: 153050 - DNA, 25 bp, Saccharomyces pastorianus
tacccatattcataccttccatttt

SEQ ID NO: 153051 - DNA, 25 bp, Saccharomyces pastorianus
atatcgttttgctggcactagacat

SEQ ID NO: 153052 - DNA, 25 bp, Saccharomyces pastorianus
gatgacatgctcgataatatcgttt

SEQ ID NO: 153053 - DNA, 25 bp, Saccharomyces pastorianus
aatgtggtagacatcccgaacccag

SEQ ID NO: 153054 - DNA, 25 bp, Saccharomyces pastorianus
actgggttagctttatcggaagtct

SEQ ID NO: 153055 - DNA, 25 bp, Saccharomyces pastorianus
tgttgccgataccacttccggaagt

SEQ ID NO: 153056 - DNA, 25 bp, Saccharomyces pastorianus
aagagctgtcctggcttcggtaact

SEQ ID NO: 153057 - DNA, 25 bp, Saccharomyces pastorianus
taattgtgccacagactcaggaaag

SEQ ID NO: 153058 - DNA, 25 bp, Saccharomyces pastorianus
caagttgcaggaacagtccgggaat

SEQ ID NO: 153059 - DNA, 25 bp, Saccharomyces pastorianus
gagcgcgacatccttgagaattcca

SEQ ID NO: 153060 - DNA, 25 bp, Saccharomyces pastorianus
agcaaacatagagcgcgacatcctt

SEQ ID NO: 153061 - DNA, 25 bp, Saccharomyces pastorianus
ggaagtcttcttcaatagatgcaaa

SEQ ID NO: 153062 - DNA, 25 bp, Saccharomyces pastorianus
agccctgatccaattgctgttgccg

SEQ ID NO: 153063 - DNA, 25 bp, Saccharomyces pastorianus
agggcgttcttagtattcacctcta

SEQ ID NO: 153064 - DNA, 25 bp, Saccharomyces pastorianus
gccatgtctagtgcatccaagacag

SEQ ID NO: 153065 - DNA, 25 bp, Saccharomyces pastorianus
cagtagcatcgagtatggcgtcgat

SEQ ID NO: 153066 - DNA, 25 bp, Saccharomyces pastorianus
tagtgccagcaaaacgatattatcg

SEQ ID NO: 153067 - DNA, 25 bp, Saccharomyces pastorianus
tgcgatgtctagtgccagcaaaacg

SEQ ID NO: 153068 - DNA, 25 bp, Saccharomyces pastorianus
aagacagtagcatcgagtatggcgt

SEQ ID NO: 153069 - DNA, 25 bp, Saccharomyces pastorianus
gcatccaagacagtagcatcgagta

SEQ ID NO: 153070 - DNA, 25 bp, Saccharomyces pastorianus
aaaacgatattatcgagcatgtcat

SEQ ID NO: 153071 - DNA, 25 bp, Saccharomyces pastorianus
gaaggtatgaatatgggtagcagca

SEQ ID NO: 153072 - DNA, 25 bp, Saccharomyces pastorianus
tatggacgccatgtctagtgcatcc

SEQ ID NO: 153073 - DNA, 25 bp, Saccharomyces pastorianus
gtagcagcatgaatatggacgccat

SEQ ID NO: 153074 - DNA, 25 bp, Saccharomyces pastorianus
gacgccatgtctagtgcatccaaga

SEQ ID NO: 153075 - DNA, 25 bp, Saccharomyces pastorianus
acagtagcatcgagtatggcgtcga

SEQ ID NO: 153076 - DNA, 25 bp, Saccharomyces pastorianus
agcatggacgcaatgtccagcgcca

SEQ ID NO: 153077 - DNA, 25 bp, Saccharomyces pastorianus
tccagcgccagcaagacaatagcat

SEQ ID NO: 153078 - DNA, 25 bp, Saccharomyces pastorianus
tagtgccagcaaaacgatattatcg

SEQ ID NO: 153079 - DNA, 25 bp, Saccharomyces pastorianus
tgcgatgtctagtgccagcaaaacg

SEQ ID NO: 153080 - DNA, 25 bp, Saccharomyces pastorianus
gcatccaagacagtagcatcgagta

SEQ ID NO: 153081 - DNA, 25 bp, Saccharomyces pastorianus
agacaatagcatcgagtatggcgtc

SEQ ID NO: 153082 - DNA, 25 bp, Saccharomyces pastorianus
gaaggtatgaatatgggtagcagca

SEQ ID NO: 153083 - DNA, 25 bp, Saccharomyces pastorianus
tatggacgccatgtctagtgcatcc

SEQ ID NO: 153084 - DNA, 25 bp, Saccharomyces pastorianus
gtagcagcatgaatatggacgccat

SEQ ID NO: 153085 - DNA, 25 bp, Saccharomyces pastorianus
gacgccatgtctagtgcatccaaga

SEQ ID NO: 153086 - DNA, 25 bp, Saccharomyces pastorianus
gtgctaaggctttcggtattttctt

SEQ ID NO: 153087 - DNA, 25 bp, Saccharomyces pastorianus
cagttttgttcaccatttgcatgca

SEQ ID NO: 153088 - DNA, 25 bp, Saccharomyces pastorianus
aacaatagtgctaaggctttcggta

SEQ ID NO: 153089 - DNA, 25 bp, Saccharomyces pastorianus
tgctgtcgtctacaaattactgctt

SEQ ID NO: 153090 - DNA, 25 bp, Saccharomyces pastorianus
atttgttgtgtctgctgtcgtctac

SEQ ID NO: 153091 - DNA, 25 bp, Saccharomyces pastorianus
actcccacatatctaactatcagtt

SEQ ID NO: 153092 - DNA, 25 bp, Saccharomyces pastorianus
tattatttgttgtgtctgctgtcgt

SEQ ID NO: 153093 - DNA, 25 bp, Saccharomyces pastorianus
tttgttcaccatttgcatgcaaaca

SEQ ID NO: 153094 - DNA, 25 bp, Saccharomyces pastorianus
actatcagttttgttcaccatttgc

SEQ ID NO: 153095 - DNA, 25 bp, Saccharomyces pastorianus
gctttcggtattttcttattatttg

SEQ ID NO: 153096 - DNA, 25 bp, Saccharomyces pastorianus
gtgtctgctgtcgtctacaaattac

SEQ ID NO: 153097 - DNA, 25 bp, Saccharomyces pastorianus
gtgacgttttaatcggtatccctga

SEQ ID NO: 153098 - DNA, 25 bp, Saccharomyces pastorianus
agatgcggctgctccagacgtaaaa

SEQ ID NO: 153099 - DNA, 25 bp, Saccharomyces pastorianus
ttgaaaacagcatgcgcctccagag

SEQ ID NO: 153100 - DNA, 25 bp, Saccharomyces pastorianus
acgctgttaatcatggctactgcct

SEQ ID NO: 153101 - DNA, 25 bp, Saccharomyces pastorianus
gaatttgcaaccattcggcactgat

SEQ ID NO: 153102 - DNA, 25 bp, Saccharomyces pastorianus
actgatgtgatgctacgttaccgta

SEQ ID NO: 153103 - DNA, 25 bp, Saccharomyces pastorianus
ggctactgcctataactacggtaat

SEQ ID NO: 153104 - DNA, 25 bp, Saccharomyces pastorianus
aactctccctctctgaattgaaaac

SEQ ID NO: 153105 - DNA, 25 bp, Saccharomyces pastorianus
ataagatcccatccacgctgttaat

SEQ ID NO: 153106 - DNA, 25 bp, Saccharomyces pastorianus
aagatgaggcatccgctaagcaaaa

SEQ ID NO: 153107 - DNA, 25 bp, Saccharomyces pastorianus
gaccttacttgattgcattagcgaa

SEQ ID NO: 153108 - DNA, 25 bp, Saccharomyces pastorianus
atatcgttcggttggttccatttgc

SEQ ID NO: 153109 - DNA, 25 bp, Saccharomyces pastorianus
cggcaccaggaattactccaatttc

SEQ ID NO: 153110 - DNA, 25 bp, Saccharomyces pastorianus
tttctccccgtattatggtaagcag

SEQ ID NO: 153111 - DNA, 25 bp, Saccharomyces pastorianus
aatcgttggaactcttcggtgccag

SEQ ID NO: 153112 - DNA, 25 bp, Saccharomyces pastorianus
gtgcgagtaaggtctctccagtaaa

SEQ ID NO: 153113 - DNA, 25 bp, Saccharomyces pastorianus
aagagagcaatccatcatccggcac

SEQ ID NO: 153114 - DNA, 25 bp, Saccharomyces pastorianus
gctgaaatacaggtctttgccaatc

SEQ ID NO: 153115 - DNA, 25 bp, Saccharomyces pastorianus
tccatttgctgctttcctcattata

SEQ ID NO: 153116 - DNA, 25 bp, Saccharomyces pastorianus
gcaaaaagcccttcgtcattattgg

SEQ ID NO: 153117 - DNA, 25 bp, Saccharomyces pastorianus
attataccctttgctgaacttcttc

SEQ ID NO: 153118 - DNA, 25 bp, Saccharomyces pastorianus
gcaggctacccattgacgagacgag

SEQ ID NO: 153119 - DNA, 25 bp, Saccharomyces pastorianus
aacagtccattctgcagagtctgcc

SEQ ID NO: 153120 - DNA, 25 bp, Saccharomyces pastorianus
aagcgctggctctaaattcactact

SEQ ID NO: 153121 - DNA, 25 bp, Saccharomyces pastorianus
gcaactttttactagtcccatggct

SEQ ID NO: 153122 - DNA, 25 bp, Saccharomyces pastorianus
tttttccatgaccattccaacgatg

SEQ ID NO: 153123 - DNA, 25 bp, Saccharomyces pastorianus
ataaatccttccatcacatatgcct

SEQ ID NO: 153124 - DNA, 25 bp, Saccharomyces pastorianus
gcaacccttgattgtcgctaaagca

SEQ ID NO: 153125 - DNA, 25 bp, Saccharomyces pastorianus
gagtctgccaaatttaccaacgtta

SEQ ID NO: 153126 - DNA, 25 bp, Saccharomyces pastorianus
gcagctgccagtatatcgcaacttt

SEQ ID NO: 153127 - DNA, 25 bp, Saccharomyces pastorianus
aagggagttcttcctcaattgacaa

SEQ ID NO: 153128 - DNA, 25 bp, Saccharomyces pastorianus
gatttcgactctagttacgcaaccc

SEQ ID NO: 153129 - DNA, 25 bp, Saccharomyces pastorianus
agtgcaaaatttcatcccgggtgtc

SEQ ID NO: 153130 - DNA, 25 bp, Saccharomyces pastorianus
gactgttgatcctacgtttaagcat

SEQ ID NO: 153131 - DNA, 25 bp, Saccharomyces pastorianus
gtgacagtagctccaagattccgcc

SEQ ID NO: 153132 - DNA, 25 bp, Saccharomyces pastorianus
gcaagaccacggagtggcacactca

SEQ ID NO: 153133 - DNA, 25 bp, Saccharomyces pastorianus
aattcagccttttgaacctgtcgat

SEQ ID NO: 153134 - DNA, 25 bp, Saccharomyces pastorianus
acatgataatatggccagacctttt

SEQ ID NO: 153135 - DNA, 25 bp, Saccharomyces pastorianus
gttactttatgcatgtcctttttat

SEQ ID NO: 153136 - DNA, 25 bp, Saccharomyces pastorianus
agattccgccgaatatcgctagctt

SEQ ID NO: 153137 - DNA, 25 bp, Saccharomyces pastorianus
atcgatcttttcgtcaagtgcaata

SEQ ID NO: 153138 - DNA, 25 bp, Saccharomyces pastorianus
agtgcaataaccaattggccatcaa

SEQ ID NO: 153139 - DNA, 25 bp, Saccharomyces pastorianus
aatactttggagaccatgaccgatg

SEQ ID NO: 153140 - DNA, 25 bp, Saccharomyces pastorianus
atgaccgatgtcatgccccatgaag

SEQ ID NO: 153141 - DNA, 25 bp, Saccharomyces pastorianus
aaaaggctctttcgcttgctcatga

SEQ ID NO: 153142 - DNA, 25 bp, Saccharomyces pastorianus
gcaagcatatatggcccgagtttcc

SEQ ID NO: 153143 - DNA, 25 bp, Saccharomyces pastorianus
tgagctgccctctctcgttaaaaaa

SEQ ID NO: 153144 - DNA, 25 bp, Saccharomyces pastorianus
gtatctgcgcagcaaggttttgtca

SEQ ID NO: 153145 - DNA, 25 bp, Saccharomyces pastorianus
gttacgtttatttgcgtctgcatgc

SEQ ID NO: 153146 - DNA, 25 bp, Saccharomyces pastorianus
cttccgttgccatccgaaatggata

SEQ ID NO: 153147 - DNA, 25 bp, Saccharomyces pastorianus
acagattcctgtttctatggcggcg

SEQ ID NO: 153148 - DNA, 25 bp, Saccharomyces pastorianus
gaacgaaattggagctgacaccgaa

SEQ ID NO: 153149 - DNA, 25 bp, Saccharomyces pastorianus
agatatacatgtctggcccttggct

SEQ ID NO: 153150 - DNA, 25 bp, Saccharomyces pastorianus
ttggctttggcgtatgacacattga

SEQ ID NO: 153151 - DNA, 25 bp, Saccharomyces pastorianus
gatagagcacttactgcagccgtta

SEQ ID NO: 153152 - DNA, 25 bp, Saccharomyces pastorianus
aaagccaaaatcagagggtgccgaa

SEQ ID NO: 153153 - DNA, 25 bp, Saccharomyces pastorianus
ggacattagcgcaaacactaccacc

SEQ ID NO: 153154 - DNA, 25 bp, Saccharomyces pastorianus
gacagttctgaaattctgggcttaa

SEQ ID NO: 153155 - DNA, 25 bp, Saccharomyces pastorianus
taccacctcttttgacgaaacgcct

SEQ ID NO: 153156 - DNA, 25 bp, Saccharomyces pastorianus
aatgatgagccaccgattgaagaat

SEQ ID NO: 153157 - DNA, 25 bp, Saccharomyces pastorianus
ggtccatgacctgcgcaaaaaagtg

SEQ ID NO: 153158 - DNA, 25 bp, Saccharomyces pastorianus
gaagccacaggagaagcacatagca

SEQ ID NO: 153159 - DNA, 25 bp, Saccharomyces pastorianus
ttccagaatttccagttggtttact

SEQ ID NO: 153160 - DNA, 25 bp, Saccharomyces pastorianus
gaaacgccttctaccgaggatgaaa

SEQ ID NO: 153161 - DNA, 25 bp, Saccharomyces pastorianus
agaagcgaatgagcctactgttgat

SEQ ID NO: 153162 - DNA, 25 bp, Saccharomyces pastorianus
gcctactgttgatgacgttgctgat

SEQ ID NO: 153163 - DNA, 25 bp, Saccharomyces pastorianus
ggtggtctctcaataaagatggctg

SEQ ID NO: 153164 - DNA, 25 bp, Saccharomyces pastorianus
atcgcgaactagatttgttcaggaa

SEQ ID NO: 153165 - DNA, 25 bp, Saccharomyces pastorianus
gaagtagagggctacgactatccac

SEQ ID NO: 153166 - DNA, 25 bp, Saccharomyces pastorianus
gtaaaaggattctactggtgtccaa

SEQ ID NO: 153167 - DNA, 25 bp, Saccharomyces pastorianus
accacagtaccaattcttggagaga

SEQ ID NO: 153168 - DNA, 25 bp, Saccharomyces pastorianus
aagacccaagacactttgaacaatg

SEQ ID NO: 153169 - DNA, 25 bp, Saccharomyces pastorianus
aaggctatcaattaaatcgcgaact

SEQ ID NO: 153170 - DNA, 25 bp, Saccharomyces pastorianus
tactggtgtccaaaacgttcgaagt

SEQ ID NO: 153171 - DNA, 25 bp, Saccharomyces pastorianus
aggaatcattgggtactgtatcaga

SEQ ID NO: 153172 - DNA, 25 bp, Saccharomyces pastorianus
gggttttctctaaacaagatcaccg

SEQ ID NO: 153173 - DNA, 25 bp, Saccharomyces pastorianus
taaatgaccctcaaacaaggctatc

SEQ ID NO: 153174 - DNA, 25 bp, Saccharomyces pastorianus
aaccgcatttgcagtgccttgtcaa

SEQ ID NO: 153175 - DNA, 25 bp, Saccharomyces pastorianus
aggactttctcttcttatctctgaa

SEQ ID NO: 153176 - DNA, 25 bp, Saccharomyces pastorianus
acattactggcctgtatccgctata

SEQ ID NO: 153177 - DNA, 25 bp, Saccharomyces pastorianus
gcgtttgttttctcgttcattgtta

SEQ ID NO: 153178 - DNA, 25 bp, Saccharomyces pastorianus
acagctcattgggtacggtgggatt

SEQ ID NO: 153179 - DNA, 25 bp, Saccharomyces pastorianus
gcgggttttccttcactgggtacat

SEQ ID NO: 153180 - DNA, 25 bp, Saccharomyces pastorianus
cggcttcaactttctcatcatatat

SEQ ID NO: 153181 - DNA, 25 bp, Saccharomyces pastorianus
gattgtacttccatgtaccgttcac

SEQ ID NO: 153182 - DNA, 25 bp, Saccharomyces pastorianus
atgttcttgtgctttttctcatcga

SEQ ID NO: 153183 - DNA, 25 bp, Saccharomyces pastorianus
ctccctagcttccaaatactgtgta

SEQ ID NO: 153184 - DNA, 25 bp, Saccharomyces pastorianus
agaatatcgcgggtgagctccctag

SEQ ID NO: 153185 - DNA, 25 bp, Saccharomyces pastorianus
ggctgagaggaattctaagatttct

SEQ ID NO: 153186 - DNA, 25 bp, Saccharomyces pastorianus
tgtggtgtcctactctatagaatca

SEQ ID NO: 153187 - DNA, 25 bp, Saccharomyces pastorianus
gataattgtggtgtcctactctata

SEQ ID NO: 153188 - DNA, 25 bp, Saccharomyces pastorianus
atgggtgataattgtggtgtcctac

SEQ ID NO: 153189 - DNA, 25 bp, Saccharomyces pastorianus
aattgtggtgtcctactctatagaa

SEQ ID NO: 153190 - DNA, 25 bp, Saccharomyces pastorianus
gaattctaagatttctaatgtggag

SEQ ID NO: 153191 - DNA, 25 bp, Saccharomyces pastorianus
gaccaaaatggctgagaggaattct

SEQ ID NO: 153192 - DNA, 25 bp, Saccharomyces pastorianus
gtgataattgtggtgtcctactcta

SEQ ID NO: 153193 - DNA, 25 bp, Saccharomyces pastorianus
tctatagaatcagaccaaaatggct

SEQ ID NO: 153194 - DNA, 25 bp, Saccharomyces pastorianus
ggtgtcctactctatagaatcagac

SEQ ID NO: 153195 - DNA, 25 bp, Saccharomyces pastorianus
gtcctactctatagaatcagaccaa

SEQ ID NO: 153196 - DNA, 25 bp, Saccharomyces pastorianus
gtgctagaggcacgcatgctaatta

SEQ ID NO: 153197 - DNA, 25 bp, Saccharomyces pastorianus
taaggcgcctgctattctgatcgta

SEQ ID NO: 153198 - DNA, 25 bp, Saccharomyces pastorianus
ggaaacgcatatccccagtagcgag

SEQ ID NO: 153199 - DNA, 25 bp, Saccharomyces pastorianus
taaatggttgctcggtcatctaccc

SEQ ID NO: 153200 - DNA, 25 bp, Saccharomyces pastorianus
aacggcaattctatatccactcatg

SEQ ID NO: 153201 - DNA, 25 bp, Saccharomyces pastorianus
tgatgcgttctggtttttcttctac

SEQ ID NO: 153202 - DNA, 25 bp, Saccharomyces pastorianus
tacccattcaatcatggccctttta

SEQ ID NO: 153203 - DNA, 25 bp, Saccharomyces pastorianus
gatgagtgcgcattccagtggaaca

SEQ ID NO: 153204 - DNA, 25 bp, Saccharomyces pastorianus
tgctaattatgcatccgctgggcag

SEQ ID NO: 153205 - DNA, 25 bp, Saccharomyces pastorianus
tggacgatttcgacaaggaccctaa

SEQ ID NO: 153206 - DNA, 25 bp, Saccharomyces pastorianus
tacggaacaggctacaactctaagg

SEQ ID NO: 153207 - DNA, 25 bp, Saccharomyces pastorianus
ttttttggccacatcttgcaagaag

SEQ ID NO: 153208 - DNA, 25 bp, Saccharomyces pastorianus
gccaaagaggccgacgggccatttt

SEQ ID NO: 153209 - DNA, 25 bp, Saccharomyces pastorianus
atgtctgggtagcaaatggccaaag

SEQ ID NO: 153210 - DNA, 25 bp, Saccharomyces pastorianus
ctgggtagcaaatggccaaagaggc

SEQ ID NO: 153211 - DNA, 25 bp, Saccharomyces pastorianus
agaaccagttgatatcatatataat

SEQ ID NO: 153212 - DNA, 25 bp, Saccharomyces pastorianus
atttccaaatgtctgggtagcaaat

SEQ ID NO: 153213 - DNA, 25 bp, Saccharomyces pastorianus
gaattttttggccacatcttgcaag

SEQ ID NO: 153214 - DNA, 25 bp, Saccharomyces pastorianus
aattttttggccacatcttgcaaga

SEQ ID NO: 153215 - DNA, 25 bp, Saccharomyces pastorianus
agaggccgacgggccatttttccag

SEQ ID NO: 153216 - DNA, 25 bp, Saccharomyces pastorianus
tataatttccaaatgtctgggtagc

SEQ ID NO: 153217 - DNA, 25 bp, Saccharomyces pastorianus
aaatgtctgggtagcaaatggccaa

SEQ ID NO: 153218 - DNA, 25 bp, Saccharomyces pastorianus
gccaagcgaccccataataacatga

SEQ ID NO: 153219 - DNA, 25 bp, Saccharomyces pastorianus
attaagcactcctttgtaccaagta

SEQ ID NO: 153220 - DNA, 25 bp, Saccharomyces pastorianus
agcaacgactcttccgctaatcaga

SEQ ID NO: 153221 - DNA, 25 bp, Saccharomyces pastorianus
tgtaccaagtatttcggccaagcga

SEQ ID NO: 153222 - DNA, 25 bp, Saccharomyces pastorianus
gagcatatccagtaactaaccaacc

SEQ ID NO: 153223 - DNA, 25 bp, Saccharomyces pastorianus
ataacaatatccaaggccgccagaa

SEQ ID NO: 153224 - DNA, 25 bp, Saccharomyces pastorianus
gacggtgaagcttatgtgttgtaca

SEQ ID NO: 153225 - DNA, 25 bp, Saccharomyces pastorianus
aagtgattcaattccacttcctcca

SEQ ID NO: 153226 - DNA, 25 bp, Saccharomyces pastorianus
gtttctcggacaatggatgttccaa

SEQ ID NO: 153227 - DNA, 25 bp, Saccharomyces pastorianus
ttccgctaatcagagtcgccattga

SEQ ID NO: 153228 - DNA, 25 bp, Saccharomyces pastorianus
gtactcttcattgcatatatgtctg

SEQ ID NO: 153229 - DNA, 25 bp, Saccharomyces pastorianus
ggagaactctctcagtcaataggtt

SEQ ID NO: 153230 - DNA, 25 bp, Saccharomyces pastorianus
gttggatctggtttatttacgctaa

SEQ ID NO: 153231 - DNA, 25 bp, Saccharomyces pastorianus
ttctccctggaatagcttttggtag

SEQ ID NO: 153232 - DNA, 25 bp, Saccharomyces pastorianus
acatcagacgatccagactttcaaa

SEQ ID NO: 153233 - DNA, 25 bp, Saccharomyces pastorianus
aacgttattaagctcccaggtgcag

SEQ ID NO: 153234 - DNA, 25 bp, Saccharomyces pastorianus
agatgcgctcttcccaattaaacat

SEQ ID NO: 153235 - DNA, 25 bp, Saccharomyces pastorianus
aggatgctatgctctttcattcttc

SEQ ID NO: 153236 - DNA, 25 bp, Saccharomyces pastorianus
tgggatcatcaaaccggcaattgtt

SEQ ID NO: 153237 - DNA, 25 bp, Saccharomyces pastorianus
ggtagtattttccaagcaacgttat

SEQ ID NO: 153238 - DNA, 25 bp, Saccharomyces pastorianus
aaatccttgggctttgcgtttggag

SEQ ID NO: 153239 - DNA, 25 bp, Saccharomyces pastorianus
tgacgttttttactgcgccttagga

SEQ ID NO: 153240 - DNA, 25 bp, Saccharomyces pastorianus
ggtcgcttggccgaaatacttggta

SEQ ID NO: 153241 - DNA, 25 bp, Saccharomyces pastorianus
gttagttactggatatgctctttct

SEQ ID NO: 153242 - DNA, 25 bp, Saccharomyces pastorianus
ggcattaagttccatgacttcggca

SEQ ID NO: 153243 - DNA, 25 bp, Saccharomyces pastorianus
gctctttctaatgctgttttcatgt

SEQ ID NO: 153244 - DNA, 25 bp, Saccharomyces pastorianus
ttctggcggccttggatattgttat

SEQ ID NO: 153245 - DNA, 25 bp, Saccharomyces pastorianus
aatagggtctttgatttctgctctt

SEQ ID NO: 153246 - DNA, 25 bp, Saccharomyces pastorianus
aggagtgcttaatgatttctgttat

SEQ ID NO: 153247 - DNA, 25 bp, Saccharomyces pastorianus
ttctgctctttcgaattcaatggcg

SEQ ID NO: 153248 - DNA, 25 bp, Saccharomyces pastorianus
aactttatgtgttatatcgcttcta

SEQ ID NO: 153249 - DNA, 25 bp, Saccharomyces pastorianus
atcgcttctattaaccctttttctg

SEQ ID NO: 153250 - DNA, 25 bp, Saccharomyces pastorianus
ttcaatggcgactctgattagcgga

SEQ ID NO: 153251 - DNA, 25 bp, Saccharomyces pastorianus
gtgaagtttccgctttcggtcataa

SEQ ID NO: 153252 - DNA, 25 bp, Saccharomyces pastorianus
cggaagaaatatttccatctcttga

SEQ ID NO: 153253 - DNA, 25 bp, Saccharomyces pastorianus
gcttccgcggaagaaatatttccat

SEQ ID NO: 153254 - DNA, 25 bp, Saccharomyces pastorianus
ccatctcttgaaatccgtacaagat

SEQ ID NO: 153255 - DNA, 25 bp, Saccharomyces pastorianus
ccgcggaagaaatatttccatctct

SEQ ID NO: 153256 - DNA, 25 bp, Saccharomyces pastorianus
cgcggaagaaatatttccatctctt

SEQ ID NO: 153257 - DNA, 25 bp, Saccharomyces pastorianus
ttccatctcttgaaatccgtacaag

SEQ ID NO: 153258 - DNA, 25 bp, Saccharomyces pastorianus
ttccgcggaagaaatatttccatct

SEQ ID NO: 153259 - DNA, 25 bp, Saccharomyces pastorianus
tttccatctcttgaaatccgtacaa

SEQ ID NO: 153260 - DNA, 25 bp, Saccharomyces pastorianus
tccgcggaagaaatatttccatctc

SEQ ID NO: 153261 - DNA, 25 bp, Saccharomyces pastorianus
cttccgcggaagaaatatttccatc

SEQ ID NO: 153262 - DNA, 25 bp, Saccharomyces pastorianus
gtcctatttccaccacagaatcgaa

SEQ ID NO: 153263 - DNA, 25 bp, Saccharomyces pastorianus
gccattgtgtctacaagcactgcta

SEQ ID NO: 153264 - DNA, 25 bp, Saccharomyces pastorianus
gccattgtttcgacggccacggcta

SEQ ID NO: 153265 - DNA, 25 bp, Saccharomyces pastorianus
gttgttacggtctatcctacatgga

SEQ ID NO: 153266 - DNA, 25 bp, Saccharomyces pastorianus
gaatgaacagtctgtcagctctaaa

SEQ ID NO: 153267 - DNA, 25 bp, Saccharomyces pastorianus
atcgaagcaacaaactacgctagtt

SEQ ID NO: 153268 - DNA, 25 bp, Saccharomyces pastorianus
aaaaacagcagtcacctcttcactt

SEQ ID NO: 153269 - DNA, 25 bp, Saccharomyces pastorianus
gcgaatctggtgtgtgttccgaaac

SEQ ID NO: 153270 - DNA, 25 bp, Saccharomyces pastorianus
gctagttactgttacttcctgcgaa

SEQ ID NO: 153271 - DNA, 25 bp, Saccharomyces pastorianus
gaaactacttcacctgccattgttt

SEQ ID NO: 153272 - DNA, 25 bp, Saccharomyces pastorianus
gacggccacggctactgtgaatgat

SEQ ID NO: 153273 - DNA, 25 bp, Saccharomyces pastorianus
acggtctcaacgttcttgatgatat

SEQ ID NO: 153274 - DNA, 25 bp, Saccharomyces pastorianus
aacgtgggtctcgttggccacagaa

SEQ ID NO: 153275 - DNA, 25 bp, Saccharomyces pastorianus
aaactgttgtattgcatggtgggtc

SEQ ID NO: 153276 - DNA, 25 bp, Saccharomyces pastorianus
tgttgaccaattttactcggagaat

SEQ ID NO: 153277 - DNA, 25 bp, Saccharomyces pastorianus
gtggcacttctttgcaatgtgacaa

SEQ ID NO: 153278 - DNA, 25 bp, Saccharomyces pastorianus
gcatggtgggtctaacggtctcaac

SEQ ID NO: 153279 - DNA, 25 bp, Saccharomyces pastorianus
tagtagttggtgtcggtggcacttc

SEQ ID NO: 153280 - DNA, 25 bp, Saccharomyces pastorianus
ggcggattgatatctagacggagca

SEQ ID NO: 153281 - DNA, 25 bp, Saccharomyces pastorianus
gaacacaattgatttaagcacgcag

SEQ ID NO: 153282 - DNA, 25 bp, Saccharomyces pastorianus
atgagtctcctcgaaaacgcaaggt

SEQ ID NO: 153283 - DNA, 25 bp, Saccharomyces pastorianus
caaggtcgatacattaccgttgggt

SEQ ID NO: 153284 - DNA, 25 bp, Saccharomyces pastorianus
gaaaacctgtctttgccagggaaga

SEQ ID NO: 153285 - DNA, 25 bp, Saccharomyces pastorianus
gactctgctaaaaaccatctgcgtt

SEQ ID NO: 153286 - DNA, 25 bp, Saccharomyces pastorianus
agacgttcgtcccaatttgattcaa

SEQ ID NO: 153287 - DNA, 25 bp, Saccharomyces pastorianus
aaccatctgcgttatgacactagtg

SEQ ID NO: 153288 - DNA, 25 bp, Saccharomyces pastorianus
gacaccctgaagtatctgaacgtaa

SEQ ID NO: 153289 - DNA, 25 bp, Saccharomyces pastorianus
tttctgcccaatttgactctgctaa

SEQ ID NO: 153290 - DNA, 25 bp, Saccharomyces pastorianus
aagcctgctaacaagggcgaagctg

SEQ ID NO: 153291 - DNA, 25 bp, Saccharomyces pastorianus
gtatgccttgaatccagcccaaata

SEQ ID NO: 153292 - DNA, 25 bp, Saccharomyces pastorianus
agatggaaattatgctttctgccca

SEQ ID NO: 153293 - DNA, 25 bp, Saccharomyces pastorianus
gcgaagctggagtaccgaacgaaat

SEQ ID NO: 153294 - DNA, 25 bp, Saccharomyces pastorianus
gttcaagttactattcgatttctgg

SEQ ID NO: 153295 - DNA, 25 bp, Saccharomyces pastorianus
tactctcgcgagatgatacagaatt

SEQ ID NO: 153296 - DNA, 25 bp, Saccharomyces pastorianus
tctactgatgacttaaccaccctat

SEQ ID NO: 153297 - DNA, 25 bp, Saccharomyces pastorianus
accaccctatcatatctgaacgaac

SEQ ID NO: 153298 - DNA, 25 bp, Saccharomyces pastorianus
atcccacgctacctgtactacgaaa

SEQ ID NO: 153299 - DNA, 25 bp, Saccharomyces pastorianus
ctggtattgtccttattgccgcaaa

SEQ ID NO: 153300 - DNA, 25 bp, Saccharomyces pastorianus
aaccggcagtgctgcatgccataaa

SEQ ID NO: 153301 - DNA, 25 bp, Saccharomyces pastorianus
attgccgcaaatccctttgataaag

SEQ ID NO: 153302 - DNA, 25 bp, Saccharomyces pastorianus
aacccacctattttagagtctactg

SEQ ID NO: 153303 - DNA, 25 bp, Saccharomyces pastorianus
tatctgaacgaaccggcagtgctgc

SEQ ID NO: 153304 - DNA, 25 bp, Saccharomyces pastorianus
tgatgatgatcatcccacgctacct

SEQ ID NO: 153305 - DNA, 25 bp, Saccharomyces pastorianus
atatacttactctggtattgtcctt

SEQ ID NO: 153306 - DNA, 25 bp, Saccharomyces pastorianus
aaacgcattcattgggcgcgcgatt

SEQ ID NO: 153307 - DNA, 25 bp, Saccharomyces pastorianus
gattgtattttggtcacctgtcgcg

SEQ ID NO: 153308 - DNA, 25 bp, Saccharomyces pastorianus
actggcgatcgcaacaatgctgtca

SEQ ID NO: 153309 - DNA, 25 bp, Saccharomyces pastorianus
gtcgcggcaacttactactatgtgt

SEQ ID NO: 153310 - DNA, 25 bp, Saccharomyces pastorianus
agatttcaattctgagggccttcct

SEQ ID NO: 153311 - DNA, 25 bp, Saccharomyces pastorianus
ttcctcggaggactgccatactgat

SEQ ID NO: 153312 - DNA, 25 bp, Saccharomyces pastorianus
ttctgccgccgaactacttaacaaa

SEQ ID NO: 153313 - DNA, 25 bp, Saccharomyces pastorianus
cttttgggccaaacgcttcgtgaga

SEQ ID NO: 153314 - DNA, 25 bp, Saccharomyces pastorianus
atccggatcggtttgaccatggtgc

SEQ ID NO: 153315 - DNA, 25 bp, Saccharomyces pastorianus
gaaggtttcgccgtagaacgtgctg

SEQ ID NO: 153316 - DNA, 25 bp, Saccharomyces pastorianus
caattgtagcgcagacggagccact

SEQ ID NO: 153317 - DNA, 25 bp, Saccharomyces pastorianus
atgaaatcagtcaagagctagtgga

SEQ ID NO: 153318 - DNA, 25 bp, Saccharomyces pastorianus
gatatcaattaatgaaatcagtcaa

SEQ ID NO: 153319 - DNA, 25 bp, Saccharomyces pastorianus
taatgaaatcagtcaagagctagtg

SEQ ID NO: 153320 - DNA, 25 bp, Saccharomyces pastorianus
ggttataaactgatatcaattaatg

SEQ ID NO: 153321 - DNA, 25 bp, Saccharomyces pastorianus
gaaatcagtcaagagctagtggatt

SEQ ID NO: 153322 - DNA, 25 bp, Saccharomyces pastorianus
atatcaattaatgaaatcagtcaag

SEQ ID NO: 153323 - DNA, 25 bp, Saccharomyces pastorianus
aatcagtcaagagctagtggattat

SEQ ID NO: 153324 - DNA, 25 bp, Saccharomyces pastorianus
tgaaatcagtcaagagctagtggat

SEQ ID NO: 153325 - DNA, 25 bp, Saccharomyces pastorianus
aaatcagtcaagagctagtggatta

SEQ ID NO: 153326 - DNA, 25 bp, Saccharomyces pastorianus
gttataaactgatatcaattaatga

SEQ ID NO: 153327 - DNA, 25 bp, Saccharomyces pastorianus
aatgaaatcagtcaagagctagtgg

SEQ ID NO: 153328 - DNA, 25 bp, Saccharomyces pastorianus
gacttagccacgttccgaacgaaat

SEQ ID NO: 153329 - DNA, 25 bp, Saccharomyces pastorianus
tagccacgttccgaacgaaatgttt

SEQ ID NO: 153330 - DNA, 25 bp, Saccharomyces pastorianus
acactacatccaatgcgacttagcc

SEQ ID NO: 153331 - DNA, 25 bp, Saccharomyces pastorianus
caatgcgacttagccacgttccgaa

SEQ ID NO: 153332 - DNA, 25 bp, Saccharomyces pastorianus
agaagacattgaaggtatatacgag

SEQ ID NO: 153333 - DNA, 25 bp, Saccharomyces pastorianus
acgagaattattttacacactacat

SEQ ID NO: 153334 - DNA, 25 bp, Saccharomyces pastorianus
ttacacactacatccaatgcgactt

SEQ ID NO: 153335 - DNA, 25 bp, Saccharomyces pastorianus
tcaaacacgcaatagagaagacatt

SEQ ID NO: 153336 - DNA, 25 bp, Saccharomyces pastorianus
acatccaatgcgacttagccacgtt

SEQ ID NO: 153337 - DNA, 25 bp, Saccharomyces pastorianus
tgcgacttagccacgttccgaacga

SEQ ID NO: 153338 - DNA, 25 bp, Saccharomyces pastorianus
tattttacacactacatccaatgcg

SEQ ID NO: 153339 - DNA, 25 bp, Saccharomyces pastorianus
gcaactgatttttcttccaaggtgt

SEQ ID NO: 153340 - DNA, 25 bp, Saccharomyces pastorianus
tccaaggtgtttccaacatcacagt

SEQ ID NO: 153341 - DNA, 25 bp, Saccharomyces pastorianus
gagtcaaaccccaacagtctggatt

SEQ ID NO: 153342 - DNA, 25 bp, Saccharomyces pastorianus
aaacatttattctttgcgcacggca

SEQ ID NO: 153343 - DNA, 25 bp, Saccharomyces pastorianus
ttcaacatccactctttcgagggtt

SEQ ID NO: 153344 - DNA, 25 bp, Saccharomyces pastorianus
aagcctcacactttataccatttcg

SEQ ID NO: 153345 - DNA, 25 bp, Saccharomyces pastorianus
gcgcacggcattttgtctgaattta

SEQ ID NO: 153346 - DNA, 25 bp, Saccharomyces pastorianus
gttttaacggacaccacgaatgtat

SEQ ID NO: 153347 - DNA, 25 bp, Saccharomyces pastorianus
ccctcagcatgtgtacaggcactat

SEQ ID NO: 153348 - DNA, 25 bp, Saccharomyces pastorianus
gacagatactccgaatttggttata

SEQ ID NO: 153349 - DNA, 25 bp, Saccharomyces pastorianus
taccatttcgagtctaagctgttaa

SEQ ID NO: 153350 - DNA, 25 bp, Saccharomyces pastorianus
gactttggtaaagccaacactgatt

SEQ ID NO: 153351 - DNA, 25 bp, Saccharomyces pastorianus
tttgactttggtaaagccaacactg

SEQ ID NO: 153352 - DNA, 25 bp, Saccharomyces pastorianus
ggtaaagccaacactgattgtaagc

SEQ ID NO: 153353 - DNA, 25 bp, Saccharomyces pastorianus
ttttgactttggtaaagccaacact

SEQ ID NO: 153354 - DNA, 25 bp, Saccharomyces pastorianus
tattttgactttggtaaagccaaca

SEQ ID NO: 153355 - DNA, 25 bp, Saccharomyces pastorianus
tttggtaaagccaacactgattgta

SEQ ID NO: 153356 - DNA, 25 bp, Saccharomyces pastorianus
tgactttggtaaagccaacactgat

SEQ ID NO: 153357 - DNA, 25 bp, Saccharomyces pastorianus
ttggtaaagccaacactgattgtaa

SEQ ID NO: 153358 - DNA, 25 bp, Saccharomyces pastorianus
ttgactttggtaaagccaacactga

SEQ ID NO: 153359 - DNA, 25 bp, Saccharomyces pastorianus
ctttggtaaagccaacactgattgt

SEQ ID NO: 153360 - DNA, 25 bp, Saccharomyces pastorianus
tggtaaagccaacactgattgtaag

SEQ ID NO: 153361 - DNA, 25 bp, Saccharomyces pastorianus
gctgacgataacttaaatccttttg

SEQ ID NO: 153362 - DNA, 25 bp, Saccharomyces pastorianus
attcgggagatatttctgctgctga

SEQ ID NO: 153363 - DNA, 25 bp, Saccharomyces pastorianus
gcctattcgggagatatttctgctg

SEQ ID NO: 153364 - DNA, 25 bp, Saccharomyces pastorianus
tgacgataacttaaatccttttgaa

SEQ ID NO: 153365 - DNA, 25 bp, Saccharomyces pastorianus
ctgctgacgataacttaaatccttt

SEQ ID NO: 153366 - DNA, 25 bp, Saccharomyces pastorianus
gggcctattcgggagatatttctgc

SEQ ID NO: 153367 - DNA, 25 bp, Saccharomyces pastorianus
ctattcgggagatatttctgctgct

SEQ ID NO: 153368 - DNA, 25 bp, Saccharomyces pastorianus
ttcgggagatatttctgctgctgac

SEQ ID NO: 153369 - DNA, 25 bp, Saccharomyces pastorianus
gagagggcctattcgggagatattt

SEQ ID NO: 153370 - DNA, 25 bp, Saccharomyces pastorianus
gatacaaacgaaatgttgttcctca

SEQ ID NO: 153371 - DNA, 25 bp, Saccharomyces pastorianus
taaatccttttgaaagatacaaacg

SEQ ID NO: 153372 - DNA, 25 bp, Saccharomyces pastorianus
aaggcctccaccttctaggtctagt

SEQ ID NO: 153373 - DNA, 25 bp, Saccharomyces pastorianus
aaatatgtgtctgcatcgggatcta

SEQ ID NO: 153374 - DNA, 25 bp, Saccharomyces pastorianus
tagtccaaagaaagtgccgcctgtt

SEQ ID NO: 153375 - DNA, 25 bp, Saccharomyces pastorianus
gcctgttgtcccaaaaaagaatgat

SEQ ID NO: 153376 - DNA, 25 bp, Saccharomyces pastorianus
gggatctattactccaccaaggcct

SEQ ID NO: 153377 - DNA, 25 bp, Saccharomyces pastorianus
tgccgcctgttgtcccaaaaaagaa

SEQ ID NO: 153378 - DNA, 25 bp, Saccharomyces pastorianus
gaatgataacctgaagaaaaagcca

SEQ ID NO: 153379 - DNA, 25 bp, Saccharomyces pastorianus
tccaccttctaggtctagtccaaag

SEQ ID NO: 153380 - DNA, 25 bp, Saccharomyces pastorianus
gtctgcatcgggatctattactcca

SEQ ID NO: 153381 - DNA, 25 bp, Saccharomyces pastorianus
atcgggatctattactccaccaagg

SEQ ID NO: 153382 - DNA, 25 bp, Saccharomyces pastorianus
agaaagtgccgcctgttgtcccaaa

SEQ ID NO: 153383 - DNA, 25 bp, Saccharomyces pastorianus
gagagcaatctcacgcaaatgcgca

SEQ ID NO: 153384 - DNA, 25 bp, Saccharomyces pastorianus
gtatgccaagctgaggagctctcct

SEQ ID NO: 153385 - DNA, 25 bp, Saccharomyces pastorianus
ggagctctcctcataaggatcagca

SEQ ID NO: 153386 - DNA, 25 bp, Saccharomyces pastorianus
cgaggtattgcatgacccggaaatc

SEQ ID NO: 153387 - DNA, 25 bp, Saccharomyces pastorianus
gacgggttcccacgagattttgaga

SEQ ID NO: 153388 - DNA, 25 bp, Saccharomyces pastorianus
acccggaaatcgcacttgacggtga

SEQ ID NO: 153389 - DNA, 25 bp, Saccharomyces pastorianus
aaacctggcacctacggagacgcaa

SEQ ID NO: 153390 - DNA, 25 bp, Saccharomyces pastorianus
aaatgcgcaagtcgcacgctcaact

SEQ ID NO: 153391 - DNA, 25 bp, Saccharomyces pastorianus
cacgctcaactactgcgattaatga

SEQ ID NO: 153392 - DNA, 25 bp, Saccharomyces pastorianus
ggatcagcataattctgccacgaat

SEQ ID NO: 153393 - DNA, 25 bp, Saccharomyces pastorianus
catggtctgaaatcgatacactgga

SEQ ID NO: 153394 - DNA, 25 bp, Saccharomyces pastorianus
tattgagcagaccatgcactcgcta

SEQ ID NO: 153395 - DNA, 25 bp, Saccharomyces pastorianus
atggacaacacggatatctccccaa

SEQ ID NO: 153396 - DNA, 25 bp, Saccharomyces pastorianus
tgcttatctaggatgctgcaccgtg

SEQ ID NO: 153397 - DNA, 25 bp, Saccharomyces pastorianus
atagggccaaagtccaacagtttag

SEQ ID NO: 153398 - DNA, 25 bp, Saccharomyces pastorianus
aattagcacgccagcaattccttgt

SEQ ID NO: 153399 - DNA, 25 bp, Saccharomyces pastorianus
acagatagacgtcctgaccgcaaat

SEQ ID NO: 153400 - DNA, 25 bp, Saccharomyces pastorianus
tacaacctcgttgccaaggactacg

SEQ ID NO: 153401 - DNA, 25 bp, Saccharomyces pastorianus
gaaccatttacgagccgttgagcag

SEQ ID NO: 153402 - DNA, 25 bp, Saccharomyces pastorianus
tcccctcgatacttttgtcaagcaa

SEQ ID NO: 153403 - DNA, 25 bp, Saccharomyces pastorianus
acgtgaactccatagcagtggccaa

SEQ ID NO: 153404 - DNA, 25 bp, Saccharomyces pastorianus
gtttagctcaacttcgcatgtggat

SEQ ID NO: 153405 - DNA, 25 bp, Saccharomyces pastorianus
gataccatcaaacgactggaaaatt

SEQ ID NO: 153406 - DNA, 25 bp, Saccharomyces pastorianus
ggagtcggaattctgatcgcgtttt

SEQ ID NO: 153407 - DNA, 25 bp, Saccharomyces pastorianus
cgttgtatatagttgtcacatgtat

SEQ ID NO: 153408 - DNA, 25 bp, Saccharomyces pastorianus
caatactggagtcggaattctgatc

SEQ ID NO: 153409 - DNA, 25 bp, Saccharomyces pastorianus
gattagtattgcacttcttacgttg

SEQ ID NO: 153410 - DNA, 25 bp, Saccharomyces pastorianus
gtgagtggcagagatagtaatattt

SEQ ID NO: 153411 - DNA, 25 bp, Saccharomyces pastorianus
tctgatcgcgtttttgatatttaca

SEQ ID NO: 153412 - DNA, 25 bp, Saccharomyces pastorianus
gtattgcacttcttacgttgtatat

SEQ ID NO: 153413 - DNA, 25 bp, Saccharomyces pastorianus
gtcggaattctgatcgcgtttttga

SEQ ID NO: 153414 - DNA, 25 bp, Saccharomyces pastorianus
aaacttaatcaatactggagtcgga

SEQ ID NO: 153415 - DNA, 25 bp, Saccharomyces pastorianus
atgctaggcgacaaaactggaaaaa

SEQ ID NO: 153416 - DNA, 25 bp, Saccharomyces pastorianus
taccctccgatgatactcatttatt

SEQ ID NO: 153417 - DNA, 25 bp, Saccharomyces pastorianus
gaaatcattaagctgcgatcgcatt

SEQ ID NO: 153418 - DNA, 25 bp, Saccharomyces pastorianus
ttacggtcgcattatcatggctggg

SEQ ID NO: 153419 - DNA, 25 bp, Saccharomyces pastorianus
tttagatccaactcgtttaccaagt

SEQ ID NO: 153420 - DNA, 25 bp, Saccharomyces pastorianus
aaatcgttgtctttaccctccgatg

SEQ ID NO: 153421 - DNA, 25 bp, Saccharomyces pastorianus
acaaatatttgtccctacggaatgg

SEQ ID NO: 153422 - DNA, 25 bp, Saccharomyces pastorianus
aaatccctggataacatttcgagat

SEQ ID NO: 153423 - DNA, 25 bp, Saccharomyces pastorianus
gatcgcattccaaacttggtccgga

SEQ ID NO: 153424 - DNA, 25 bp, Saccharomyces pastorianus
ctctgctccccaaaacgagtatcaa

SEQ ID NO: 153425 - DNA, 25 bp, Saccharomyces pastorianus
attcgctggatactgcaatctctgc

SEQ ID NO: 153426 - DNA, 25 bp, Saccharomyces pastorianus
caagtttgtttttgactgtgccaca

SEQ ID NO: 153427 - DNA, 25 bp, Saccharomyces pastorianus
gaatgagatcaaacttgtacttaac

SEQ ID NO: 153428 - DNA, 25 bp, Saccharomyces pastorianus
gatcaaacttgtacttaactcttac

SEQ ID NO: 153429 - DNA, 25 bp, Saccharomyces pastorianus
gatgatgaaagtacatccaagcatg

SEQ ID NO: 153430 - DNA, 25 bp, Saccharomyces pastorianus
gaatagtgccatgaatgagatcaaa

SEQ ID NO: 153431 - DNA, 25 bp, Saccharomyces pastorianus
gtacatccaagcatgaatagtgcca

SEQ ID NO: 153432 - DNA, 25 bp, Saccharomyces pastorianus
gagatcaaacttgtacttaactctt

SEQ ID NO: 153433 - DNA, 25 bp, Saccharomyces pastorianus
tcaaacttgtacttaactcttacaa

SEQ ID NO: 153434 - DNA, 25 bp, Saccharomyces pastorianus
gaaagtacatccaagcatgaatagt

SEQ ID NO: 153435 - DNA, 25 bp, Saccharomyces pastorianus
acagattgttgtggatgatgaaagt

SEQ ID NO: 153436 - DNA, 25 bp, Saccharomyces pastorianus
atccaagcatgaatagtgccatgaa

SEQ ID NO: 153437 - DNA, 25 bp, Saccharomyces pastorianus
gtgccatgaatgagatcaaacttgt

SEQ ID NO: 153438 - DNA, 25 bp, Saccharomyces pastorianus
gagaaatcaaccaccaccaagatcg

SEQ ID NO: 153439 - DNA, 25 bp, Saccharomyces pastorianus
cggcattgaatttgacgacgacgaa

SEQ ID NO: 153440 - DNA, 25 bp, Saccharomyces pastorianus
gtccaataagcttaccaatgcatgt

SEQ ID NO: 153441 - DNA, 25 bp, Saccharomyces pastorianus
atggcaaggtttcttttcgagagac

SEQ ID NO: 153442 - DNA, 25 bp, Saccharomyces pastorianus
gagacctcgcacaacgacgatggca

SEQ ID NO: 153443 - DNA, 25 bp, Saccharomyces pastorianus
gaatctgcacgatacttctacaaca

SEQ ID NO: 153444 - DNA, 25 bp, Saccharomyces pastorianus
tatcgacagatttgcgacagtctct

SEQ ID NO: 153445 - DNA, 25 bp, Saccharomyces pastorianus
gatagaaggaattcgctgccagatt

SEQ ID NO: 153446 - DNA, 25 bp, Saccharomyces pastorianus
gctgccagattcctcatttgataaa

SEQ ID NO: 153447 - DNA, 25 bp, Saccharomyces pastorianus
gacagtctctgtcaggtccaataag

SEQ ID NO: 153448 - DNA, 25 bp, Saccharomyces pastorianus
aagatcgtccaagaggccttcatta

SEQ ID NO: 153449 - DNA, 25 bp, Saccharomyces pastorianus
tcacttttgaagatgcgttcgccgt

SEQ ID NO: 153450 - DNA, 25 bp, Saccharomyces pastorianus
agacacagactctccagtttggttt

SEQ ID NO: 153451 - DNA, 25 bp, Saccharomyces pastorianus
gtacaactaccagtcgatttccaag

SEQ ID NO: 153452 - DNA, 25 bp, Saccharomyces pastorianus
gaatccgtggacaactgctgaacct

SEQ ID NO: 153453 - DNA, 25 bp, Saccharomyces pastorianus
tgctgaaccttccttttctatcaaa

SEQ ID NO: 153454 - DNA, 25 bp, Saccharomyces pastorianus
tggtatggatccttactctcgatga

SEQ ID NO: 153455 - DNA, 25 bp, Saccharomyces pastorianus
tcttggtcacaatttctttatcttt

SEQ ID NO: 153456 - DNA, 25 bp, Saccharomyces pastorianus
gtcgatttccaagtcccaatgatag

SEQ ID NO: 153457 - DNA, 25 bp, Saccharomyces pastorianus
tcgatgatcattttcatgtgcgtgc

SEQ ID NO: 153458 - DNA, 25 bp, Saccharomyces pastorianus
tggccaattacgttagacacagact

SEQ ID NO: 153459 - DNA, 25 bp, Saccharomyces pastorianus
atcttcacaatgagtccacacttca

SEQ ID NO: 153460 - DNA, 25 bp, Saccharomyces pastorianus
ttgacgaacagttagtagcgttatc

SEQ ID NO: 153461 - DNA, 25 bp, Saccharomyces pastorianus
atatttcgtatccatcagatgttga

SEQ ID NO: 153462 - DNA, 25 bp, Saccharomyces pastorianus
acagttagtagcgttatcatttgaa

SEQ ID NO: 153463 - DNA, 25 bp, Saccharomyces pastorianus
gttatcatttgaagatgtcgcgtca

SEQ ID NO: 153464 - DNA, 25 bp, Saccharomyces pastorianus
tttcgtatccatcagatgttgacga

SEQ ID NO: 153465 - DNA, 25 bp, Saccharomyces pastorianus
gcgttatcatttgaagatgtcgcgt

SEQ ID NO: 153466 - DNA, 25 bp, Saccharomyces pastorianus
gacgaacagttagtagcgttatcat

SEQ ID NO: 153467 - DNA, 25 bp, Saccharomyces pastorianus
agtagcgttatcatttgaagatgtc

SEQ ID NO: 153468 - DNA, 25 bp, Saccharomyces pastorianus
agttagtagcgttatcatttgaaga

SEQ ID NO: 153469 - DNA, 25 bp, Saccharomyces pastorianus
gatatttcgtatccatcagatgttg

SEQ ID NO: 153470 - DNA, 25 bp, Saccharomyces pastorianus
tccatcagatgttgacgaacagtta

SEQ ID NO: 153471 - DNA, 25 bp, Saccharomyces pastorianus
ttttaactaccacgctatgtccctt

SEQ ID NO: 153472 - DNA, 25 bp, Saccharomyces pastorianus
agccttttatcttcgagttctgttt

SEQ ID NO: 153473 - DNA, 25 bp, Saccharomyces pastorianus
aggagcacgctcctggtacaataag

SEQ ID NO: 153474 - DNA, 25 bp, Saccharomyces pastorianus
gaatcctcaatgttttcctaaatta

SEQ ID NO: 153475 - DNA, 25 bp, Saccharomyces pastorianus
aagctcgtgaaccaaggctggccta

SEQ ID NO: 153476 - DNA, 25 bp, Saccharomyces pastorianus
gactttgacagctcctacgttagca

SEQ ID NO: 153477 - DNA, 25 bp, Saccharomyces pastorianus
tgtcccttttccatagtagcctata

SEQ ID NO: 153478 - DNA, 25 bp, Saccharomyces pastorianus
gggtcaccagtgactgttccaattt

SEQ ID NO: 153479 - DNA, 25 bp, Saccharomyces pastorianus
cttctggatttttattctcaacctt

SEQ ID NO: 153480 - DNA, 25 bp, Saccharomyces pastorianus
gctggcctacaatgttcttctggat

SEQ ID NO: 153481 - DNA, 25 bp, Saccharomyces pastorianus
caagagttttctttccgaggaagct

SEQ ID NO: 153482 - DNA, 25 bp, Saccharomyces pastorianus
tttcttcctcgtccctagggaccag

SEQ ID NO: 153483 - DNA, 25 bp, Saccharomyces pastorianus
tttactatttcttcctcgtccctag

SEQ ID NO: 153484 - DNA, 25 bp, Saccharomyces pastorianus
ttcatcaatatcttcgtcttcctca

SEQ ID NO: 153485 - DNA, 25 bp, Saccharomyces pastorianus
gttgtcatttactatttcttcctcg

SEQ ID NO: 153486 - DNA, 25 bp, Saccharomyces pastorianus
aagacatcttctccttcttcttcat

SEQ ID NO: 153487 - DNA, 25 bp, Saccharomyces pastorianus
gagtcaaagacatcttctccttctt

SEQ ID NO: 153488 - DNA, 25 bp, Saccharomyces pastorianus
tgtcatttactatttcttcctcgtc

SEQ ID NO: 153489 - DNA, 25 bp, Saccharomyces pastorianus
ttcgtcttcctcagaggagtcaaag

SEQ ID NO: 153490 - DNA, 25 bp, Saccharomyces pastorianus
tcgtcttcatcaatatcttcgtctt

SEQ ID NO: 153491 - DNA, 25 bp, Saccharomyces pastorianus
aatatcttcgtcttcctcagaggag

SEQ ID NO: 153492 - DNA, 25 bp, Saccharomyces pastorianus
atcttcgtcttcatcaatatcttcg

SEQ ID NO: 153493 - DNA, 25 bp, Saccharomyces pastorianus
gaatctgccttgatgcagcgacgtt

SEQ ID NO: 153494 - DNA, 25 bp, Saccharomyces pastorianus
ggtttcgtcgtcctcatcagaaaat

SEQ ID NO: 153495 - DNA, 25 bp, Saccharomyces pastorianus
tgttcctaccgttgcgtaaaccaga

SEQ ID NO: 153496 - DNA, 25 bp, Saccharomyces pastorianus
gatcctcctttgtctggtttcgtcg

SEQ ID NO: 153497 - DNA, 25 bp, Saccharomyces pastorianus
atcacgcccatattcattgttccta

SEQ ID NO: 153498 - DNA, 25 bp, Saccharomyces pastorianus
gaagtcatccaattcgtccaagatt

SEQ ID NO: 153499 - DNA, 25 bp, Saccharomyces pastorianus
aagattccacctttgtcagctgttc

SEQ ID NO: 153500 - DNA, 25 bp, Saccharomyces pastorianus
acgttgtcactttctgattctgcag

SEQ ID NO: 153501 - DNA, 25 bp, Saccharomyces pastorianus
attttcatggtcttcttcatcacgc

SEQ ID NO: 153502 - DNA, 25 bp, Saccharomyces pastorianus
tcagctgttctgttcctattttcat

SEQ ID NO: 153503 - DNA, 25 bp, Saccharomyces pastorianus
aagcttcttttcttggatcctcctt

SEQ ID NO: 153504 - DNA, 25 bp, Saccharomyces pastorianus
gatacaccatctacagacccaaagg

SEQ ID NO: 153505 - DNA, 25 bp, Saccharomyces pastorianus
gggcgtagaattgacaaatcttaga

SEQ ID NO: 153506 - DNA, 25 bp, Saccharomyces pastorianus
aagtatattgcactatatccgaatg

SEQ ID NO: 153507 - DNA, 25 bp, Saccharomyces pastorianus
tagctgaaagaatggatgcgaacac

SEQ ID NO: 153508 - DNA, 25 bp, Saccharomyces pastorianus
tacgtgataaattttcccaaaactg

SEQ ID NO: 153509 - DNA, 25 bp, Saccharomyces pastorianus
ctggcgcagatgataaagatttaca

SEQ ID NO: 153510 - DNA, 25 bp, Saccharomyces pastorianus
tatgttacgtgataaattttcccaa

SEQ ID NO: 153511 - DNA, 25 bp, Saccharomyces pastorianus
gacccaaagggcgtagaattgacaa

SEQ ID NO: 153512 - DNA, 25 bp, Saccharomyces pastorianus
gttgagagccactaaaattgaatta

SEQ ID NO: 153513 - DNA, 25 bp, Saccharomyces pastorianus
tatccgaatgatacaccatctacag

SEQ ID NO: 153514 - DNA, 25 bp, Saccharomyces pastorianus
acaacaaaagttgagagccactaaa

SEQ ID NO: 153515 - DNA, 25 bp, Saccharomyces pastorianus
acgccgtttatcacttcagcaatag

SEQ ID NO: 153516 - DNA, 25 bp, Saccharomyces pastorianus
ggatggtgttctgccttggaaatct

SEQ ID NO: 153517 - DNA, 25 bp, Saccharomyces pastorianus
ggagctgcgaccatgacggtatgta

SEQ ID NO: 153518 - DNA, 25 bp, Saccharomyces pastorianus
gctgcctagtgttttcgtattttta

SEQ ID NO: 153519 - DNA, 25 bp, Saccharomyces pastorianus
tatgtgttcctgtttatcccagaaa

SEQ ID NO: 153520 - DNA, 25 bp, Saccharomyces pastorianus
ccaccttcttttcactatattctat

SEQ ID NO: 153521 - DNA, 25 bp, Saccharomyces pastorianus
aagtgtcttttactgggagctgcga

SEQ ID NO: 153522 - DNA, 25 bp, Saccharomyces pastorianus
tcgtaaattttgcatccaccttctt

SEQ ID NO: 153523 - DNA, 25 bp, Saccharomyces pastorianus
tatcttttcttttttgcctgcacct

SEQ ID NO: 153524 - DNA, 25 bp, Saccharomyces pastorianus
gaaatctaactcttgggttccctct

SEQ ID NO: 153525 - DNA, 25 bp, Saccharomyces pastorianus
gtatgtatgctcatctatgcctctg

SEQ ID NO: 153526 - DNA, 25 bp, Saccharomyces pastorianus
acgctggcggctggtcgataacgaa

SEQ ID NO: 153527 - DNA, 25 bp, Saccharomyces pastorianus
aattacctcatccagtttcgcaaat

SEQ ID NO: 153528 - DNA, 25 bp, Saccharomyces pastorianus
ctgttatacctttcaccgttactga

SEQ ID NO: 153529 - DNA, 25 bp, Saccharomyces pastorianus
aaccgcaactgctgtttctcagatt

SEQ ID NO: 153530 - DNA, 25 bp, Saccharomyces pastorianus
aagttactatttcttcagccagtag

SEQ ID NO: 153531 - DNA, 25 bp, Saccharomyces pastorianus
ttctggcaccttggcaataacgtta

SEQ ID NO: 153532 - DNA, 25 bp, Saccharomyces pastorianus
ggtgttcttattgactccagtggta

SEQ ID NO: 153533 - DNA, 25 bp, Saccharomyces pastorianus
acaggcgggcgctatttacgctggc

SEQ ID NO: 153534 - DNA, 25 bp, Saccharomyces pastorianus
gaaggtgcctccagtagtgtcacat

SEQ ID NO: 153535 - DNA, 25 bp, Saccharomyces pastorianus
gtagtagttctgtgctttccaagag

SEQ ID NO: 153536 - DNA, 25 bp, Saccharomyces pastorianus
aaagtccacaattgctgttccaagt

SEQ ID NO: 153537 - DNA, 25 bp, Saccharomyces pastorianus
ggttccacctctataccaatgattg

SEQ ID NO: 153538 - DNA, 25 bp, Saccharomyces pastorianus
gtaaagtcgagtttctggagcccgt

SEQ ID NO: 153539 - DNA, 25 bp, Saccharomyces pastorianus
aaagttcccggcctattgagcaacg

SEQ ID NO: 153540 - DNA, 25 bp, Saccharomyces pastorianus
tgatgaaagcactcctgatcctcaa

SEQ ID NO: 153541 - DNA, 25 bp, Saccharomyces pastorianus
tactcctttggatactttatgcggg

SEQ ID NO: 153542 - DNA, 25 bp, Saccharomyces pastorianus
ataactactacatttcaccttccat

SEQ ID NO: 153543 - DNA, 25 bp, Saccharomyces pastorianus
aaaagcacattctcctcagactgac

SEQ ID NO: 153544 - DNA, 25 bp, Saccharomyces pastorianus
gtgactttatattcctgttttccta

SEQ ID NO: 153545 - DNA, 25 bp, Saccharomyces pastorianus
gggatcttgtcacctttggaccaaa

SEQ ID NO: 153546 - DNA, 25 bp, Saccharomyces pastorianus
ctggagcccgttgatttgttgaata

SEQ ID NO: 153547 - DNA, 25 bp, Saccharomyces pastorianus
gagcaacgacgttacctttttcaag

SEQ ID NO: 153548 - DNA, 25 bp, Saccharomyces pastorianus
ctccactaccggctcattatttgga

SEQ ID NO: 153549 - DNA, 25 bp, Saccharomyces pastorianus
ggagtggaaacagtctatttggaac

SEQ ID NO: 153550 - DNA, 25 bp, Saccharomyces pastorianus
atttggaactaaacctgcctccact

SEQ ID NO: 153551 - DNA, 25 bp, Saccharomyces pastorianus
cactaccggctcattatttggaaac

SEQ ID NO: 153552 - DNA, 25 bp, Saccharomyces pastorianus
gtctatttggaactaaacctgcctc

SEQ ID NO: 153553 - DNA, 25 bp, Saccharomyces pastorianus
gtcagggagtggaaacagtctattt

SEQ ID NO: 153554 - DNA, 25 bp, Saccharomyces pastorianus
ttggaactaaacctgcctccactac

SEQ ID NO: 153555 - DNA, 25 bp, Saccharomyces pastorianus
cagtcagggagtggaaacagtctat

SEQ ID NO: 153556 - DNA, 25 bp, Saccharomyces pastorianus
actgcaaaccagtcagggagtggaa

SEQ ID NO: 153557 - DNA, 25 bp, Saccharomyces pastorianus
taccggctcattatttggaaacaac

SEQ ID NO: 153558 - DNA, 25 bp, Saccharomyces pastorianus
ggctcattatttggaaacaacacag

SEQ ID NO: 153559 - DNA, 25 bp, Saccharomyces pastorianus
taactctcttttcggtactgccaat

SEQ ID NO: 153560 - DNA, 25 bp, Saccharomyces pastorianus
tagtagtggacttttcgggcagaat

SEQ ID NO: 153561 - DNA, 25 bp, Saccharomyces pastorianus
gaagtagtctttttggtgccacgaa

SEQ ID NO: 153562 - DNA, 25 bp, Saccharomyces pastorianus
gtccgggctgtttggtcaaaattct

SEQ ID NO: 153563 - DNA, 25 bp, Saccharomyces pastorianus
cacaggttctcttttcggtggtaat

SEQ ID NO: 153564 - DNA, 25 bp, Saccharomyces pastorianus
aacaacacagcttctacgacagtac

SEQ ID NO: 153565 - DNA, 25 bp, Saccharomyces pastorianus
gtggtaattcttcaacccagcctaa

SEQ ID NO: 153566 - DNA, 25 bp, Saccharomyces pastorianus
acgacagtaccttccacgaatgggt

SEQ ID NO: 153567 - DNA, 25 bp, Saccharomyces pastorianus
ctgccaatgtacctacgtctaatac

SEQ ID NO: 153568 - DNA, 25 bp, Saccharomyces pastorianus
agccgaatgcttttacccaatctaa

SEQ ID NO: 153569 - DNA, 25 bp, Saccharomyces pastorianus
ttttcggtgcaaagcctaattctca

SEQ ID NO: 153570 - DNA, 25 bp, Saccharomyces pastorianus
gtccccgctgcaattgtcgagagag

SEQ ID NO: 153571 - DNA, 25 bp, Saccharomyces pastorianus
agaccagcgtgttactagaactctt

SEQ ID NO: 153572 - DNA, 25 bp, Saccharomyces pastorianus
agaaccaccgtctttctaatggcac

SEQ ID NO: 153573 - DNA, 25 bp, Saccharomyces pastorianus
cgctctgcctataattcctgaattt

SEQ ID NO: 153574 - DNA, 25 bp, Saccharomyces pastorianus
ctcatccctagcttgtactgtattg

SEQ ID NO: 153575 - DNA, 25 bp, Saccharomyces pastorianus
gtgatccgtatatttttggccgtgg

SEQ ID NO: 153576 - DNA, 25 bp, Saccharomyces pastorianus
gatacccgctactcaacgtgatata

SEQ ID NO: 153577 - DNA, 25 bp, Saccharomyces pastorianus
gagagaggatcgtgcccagaccagc

SEQ ID NO: 153578 - DNA, 25 bp, Saccharomyces pastorianus
atattcctgtggttttaccgggcat

SEQ ID NO: 153579 - DNA, 25 bp, Saccharomyces pastorianus
gcgccaacgttctgatcacggaatt

SEQ ID NO: 153580 - DNA, 25 bp, Saccharomyces pastorianus
tactgtattggctcagatacccgct

SEQ ID NO: 153581 - DNA, 25 bp, Saccharomyces pastorianus
tagccgtaagctcccaatcagatga

SEQ ID NO: 153582 - DNA, 25 bp, Saccharomyces pastorianus
gcgctgtttaacactagaatctctt

SEQ ID NO: 153583 - DNA, 25 bp, Saccharomyces pastorianus
gaataatttccatatccgttcgaaa

SEQ ID NO: 153584 - DNA, 25 bp, Saccharomyces pastorianus
gatacggttattcaattttgtgcaa

SEQ ID NO: 153585 - DNA, 25 bp, Saccharomyces pastorianus
ggaaagcctatcttcaaacacatca

SEQ ID NO: 153586 - DNA, 25 bp, Saccharomyces pastorianus
atgcaatttcattcgttcttacaac

SEQ ID NO: 153587 - DNA, 25 bp, Saccharomyces pastorianus
cgagtatgaggtacgattcaccata

SEQ ID NO: 153588 - DNA, 25 bp, Saccharomyces pastorianus
attcaacaaacaccgttctcatgca

SEQ ID NO: 153589 - DNA, 25 bp, Saccharomyces pastorianus
aaagcttgccatgggcggatttcaa

SEQ ID NO: 153590 - DNA, 25 bp, Saccharomyces pastorianus
aacagaccaacagcaagtgatcaat

SEQ ID NO: 153591 - DNA, 25 bp, Saccharomyces pastorianus
acagtcagcggttgtccaattacga

SEQ ID NO: 153592 - DNA, 25 bp, Saccharomyces pastorianus
gcatcattgagattcgacggttcat

SEQ ID NO: 153593 - DNA, 25 bp, Saccharomyces pastorianus
tagggccgtctgtatgttgtcaaat

SEQ ID NO: 153594 - DNA, 25 bp, Saccharomyces pastorianus
aaactcacaattggccactgtggat

SEQ ID NO: 153595 - DNA, 25 bp, Saccharomyces pastorianus
caaaggcattccatgagtccaactc

SEQ ID NO: 153596 - DNA, 25 bp, Saccharomyces pastorianus
tgttgtcaaataccacatccattgc

SEQ ID NO: 153597 - DNA, 25 bp, Saccharomyces pastorianus
tggttgattggtgtccaactggttt

SEQ ID NO: 153598 - DNA, 25 bp, Saccharomyces pastorianus
acatggctacttgtctgttatacag

SEQ ID NO: 153599 - DNA, 25 bp, Saccharomyces pastorianus
accagatggtcaagtgtgatccaag

SEQ ID NO: 153600 - DNA, 25 bp, Saccharomyces pastorianus
ccactgtggatagggccgtctgtat

SEQ ID NO: 153601 - DNA, 25 bp, Saccharomyces pastorianus
gagtccaactctgtgtcagaaatta

SEQ ID NO: 153602 - DNA, 25 bp, Saccharomyces pastorianus
aagaagaccgtccaattggttgatt

SEQ ID NO: 153603 - DNA, 25 bp, Saccharomyces pastorianus
caaaaggagctttcagttcaaaact

SEQ ID NO: 153604 - DNA, 25 bp, Saccharomyces pastorianus
attgtaatcatagggcaagcctgat

SEQ ID NO: 153605 - DNA, 25 bp, Saccharomyces pastorianus
ttacatttcaactgctgcttccatt

SEQ ID NO: 153606 - DNA, 25 bp, Saccharomyces pastorianus
tatgtttccacacccgtgatttcaa

SEQ ID NO: 153607 - DNA, 25 bp, Saccharomyces pastorianus
aaaggcctgcttacatttcaactgc

SEQ ID NO: 153608 - DNA, 25 bp, Saccharomyces pastorianus
actgctgcttccattgataacaagg

SEQ ID NO: 153609 - DNA, 25 bp, Saccharomyces pastorianus
aaagttggcgtcaagaatgcatgaa

SEQ ID NO: 153610 - DNA, 25 bp, Saccharomyces pastorianus
aagcctgattactccaggttgcatt

SEQ ID NO: 153611 - DNA, 25 bp, Saccharomyces pastorianus
ggatcgcattgacgagttagtactt

SEQ ID NO: 153612 - DNA, 25 bp, Saccharomyces pastorianus
gcatgttacctaatttcacaagcta

SEQ ID NO: 153613 - DNA, 25 bp, Saccharomyces pastorianus
tcttttgaaaagttgtctgctgaac

SEQ ID NO: 153614 - DNA, 25 bp, Saccharomyces pastorianus
aaatatcttcatcctcatcgccatt

SEQ ID NO: 153615 - DNA, 25 bp, Saccharomyces pastorianus
atagcctcttcatcatctgtggaga

SEQ ID NO: 153616 - DNA, 25 bp, Saccharomyces pastorianus
agccttcaggcgtcatttgtagcca

SEQ ID NO: 153617 - DNA, 25 bp, Saccharomyces pastorianus
gcactagaattctgcaaaaccgcaa

SEQ ID NO: 153618 - DNA, 25 bp, Saccharomyces pastorianus
cagtcatcaacaaagatagcctctt

SEQ ID NO: 153619 - DNA, 25 bp, Saccharomyces pastorianus
caaaatacaggaatctcaactcggg

SEQ ID NO: 153620 - DNA, 25 bp, Saccharomyces pastorianus
gcgtcatttgtagccattataacag

SEQ ID NO: 153621 - DNA, 25 bp, Saccharomyces pastorianus
ctcttcatcatctgtggagacacaa

SEQ ID NO: 153622 - DNA, 25 bp, Saccharomyces pastorianus
aaatctttcaaacagccttcaggcg

SEQ ID NO: 153623 - DNA, 25 bp, Saccharomyces pastorianus
ggatccccaataccagcactagaat

SEQ ID NO: 153624 - DNA, 25 bp, Saccharomyces pastorianus
gccattacccaataaagcgatcggt

SEQ ID NO: 153625 - DNA, 25 bp, Saccharomyces pastorianus
aggcaataaacgtggaggaggcttc

SEQ ID NO: 153626 - DNA, 25 bp, Saccharomyces pastorianus
ggcttcatttatgcccgtcgtaaaa

SEQ ID NO: 153627 - DNA, 25 bp, Saccharomyces pastorianus
ttctaaaggcgacaagacacagagt

SEQ ID NO: 153628 - DNA, 25 bp, Saccharomyces pastorianus
aaggacgtttcaaatgtttcacaga

SEQ ID NO: 153629 - DNA, 25 bp, Saccharomyces pastorianus
tccgagcgagattctaaaggcgaca

SEQ ID NO: 153630 - DNA, 25 bp, Saccharomyces pastorianus
gaaagtgactccgagcgagattcta

SEQ ID NO: 153631 - DNA, 25 bp, Saccharomyces pastorianus
ttatgcccgtcgtaaaaatcgataa

SEQ ID NO: 153632 - DNA, 25 bp, Saccharomyces pastorianus
ctgatggactgggaattggtgccaa

SEQ ID NO: 153633 - DNA, 25 bp, Saccharomyces pastorianus
ggaggaggcttcatttatgcccgtc

SEQ ID NO: 153634 - DNA, 25 bp, Saccharomyces pastorianus
gtttcacagatacatcctgatggac

SEQ ID NO: 153635 - DNA, 25 bp, Saccharomyces pastorianus
gacacagagtcgaaacaaggacgtt

SEQ ID NO: 153636 - DNA, 25 bp, Saccharomyces pastorianus
ccacttctagggaacggctgtatca

SEQ ID NO: 153637 - DNA, 25 bp, Saccharomyces pastorianus
atgaggctgaactggccacttctag

SEQ ID NO: 153638 - DNA, 25 bp, Saccharomyces pastorianus
gaaaagatacttctgctggttcgaa

SEQ ID NO: 153639 - DNA, 25 bp, Saccharomyces pastorianus
gttacgactctaattcgcattcatg

SEQ ID NO: 153640 - DNA, 25 bp, Saccharomyces pastorianus
ggacaatacgacaggactccattcc

SEQ ID NO: 153641 - DNA, 25 bp, Saccharomyces pastorianus
tacagcttagccttcgtaataacga

SEQ ID NO: 153642 - DNA, 25 bp, Saccharomyces pastorianus
aaaggacatgcagcgggacaattat

SEQ ID NO: 153643 - DNA, 25 bp, Saccharomyces pastorianus
gaaaaaggtccttgatcaaacgatc

SEQ ID NO: 153644 - DNA, 25 bp, Saccharomyces pastorianus
agactatccgatttagagctgaaat

SEQ ID NO: 153645 - DNA, 25 bp, Saccharomyces pastorianus
gagcagcgtgagcaattccacagga

SEQ ID NO: 153646 - DNA, 25 bp, Saccharomyces pastorianus
attcgcattcatgggacactgatta

SEQ ID NO: 153647 - DNA, 25 bp, Saccharomyces pastorianus
actcatatcattattacctatacaa

SEQ ID NO: 153648 - DNA, 25 bp, Saccharomyces pastorianus
tacagcttccgatacatcatgtata

SEQ ID NO: 153649 - DNA, 25 bp, Saccharomyces pastorianus
ttttctacaggctacgaattctttg

SEQ ID NO: 153650 - DNA, 25 bp, Saccharomyces pastorianus
gaattctttgcaggcttactttact

SEQ ID NO: 153651 - DNA, 25 bp, Saccharomyces pastorianus
gcaggcttactttactcatatcatt

SEQ ID NO: 153652 - DNA, 25 bp, Saccharomyces pastorianus
acaggctacgaattctttgcaggct

SEQ ID NO: 153653 - DNA, 25 bp, Saccharomyces pastorianus
agcatacagcttccgatacatcatg

SEQ ID NO: 153654 - DNA, 25 bp, Saccharomyces pastorianus
ggcttactttactcatatcattatt

SEQ ID NO: 153655 - DNA, 25 bp, Saccharomyces pastorianus
gcttgaaaagcatacagcttccgat

SEQ ID NO: 153656 - DNA, 25 bp, Saccharomyces pastorianus
tctttgcaggcttactttactcata

SEQ ID NO: 153657 - DNA, 25 bp, Saccharomyces pastorianus
gctacgaattctttgcaggcttact

SEQ ID NO: 153658 - DNA, 25 bp, Saccharomyces pastorianus
acgatgagatcgtttcttctgtgga

SEQ ID NO: 153659 - DNA, 25 bp, Saccharomyces pastorianus
tcccggagaggatcattcaattcag

SEQ ID NO: 153660 - DNA, 25 bp, Saccharomyces pastorianus
tctgtcccggagaggatcattcaat

SEQ ID NO: 153661 - DNA, 25 bp, Saccharomyces pastorianus
atgagatcgtttcttctgtggagga

SEQ ID NO: 153662 - DNA, 25 bp, Saccharomyces pastorianus
tgtggaggattccaaaatctttgaa

SEQ ID NO: 153663 - DNA, 25 bp, Saccharomyces pastorianus
gtttctgtcccggagaggatcattc

SEQ ID NO: 153664 - DNA, 25 bp, Saccharomyces pastorianus
gcaggcttacgatgagatcgtttct

SEQ ID NO: 153665 - DNA, 25 bp, Saccharomyces pastorianus
atcgtttcttctgtggaggattcca

SEQ ID NO: 153666 - DNA, 25 bp, Saccharomyces pastorianus
gcccttacaagggtggcctacgctt

SEQ ID NO: 153667 - DNA, 25 bp, Saccharomyces pastorianus
tttcagcaggcttacgatgagatcg

SEQ ID NO: 153668 - DNA, 25 bp, Saccharomyces pastorianus
cacagtataaaaaagtgttacctat

SEQ ID NO: 153669 - DNA, 25 bp, Saccharomyces pastorianus
gagagccttagagtatttcggtaaa

SEQ ID NO: 153670 - DNA, 25 bp, Saccharomyces pastorianus
agagccttagagtatttcggtaaag

SEQ ID NO: 153671 - DNA, 25 bp, Saccharomyces pastorianus
tcggtaaaggtaacatcagattcac

SEQ ID NO: 153672 - DNA, 25 bp, Saccharomyces pastorianus
gagccttagagtatttcggtaaagg

SEQ ID NO: 153673 - DNA, 25 bp, Saccharomyces pastorianus
tgagagccttagagtatttcggtaa

SEQ ID NO: 153674 - DNA, 25 bp, Saccharomyces pastorianus
tttcggtaaaggtaacatcagattc

SEQ ID NO: 153675 - DNA, 25 bp, Saccharomyces pastorianus
gtatttcggtaaaggtaacatcaga

SEQ ID NO: 153676 - DNA, 25 bp, Saccharomyces pastorianus
gtaaaggtaacatcagattcaccaa

SEQ ID NO: 153677 - DNA, 25 bp, Saccharomyces pastorianus
ggtaaaggtaacatcagattcacca

SEQ ID NO: 153678 - DNA, 25 bp, Saccharomyces pastorianus
atgagagccttagagtatttcggta

SEQ ID NO: 153679 - DNA, 25 bp, Saccharomyces pastorianus
gagtatttcggtaaaggtaacatca

SEQ ID NO: 153680 - DNA, 25 bp, Saccharomyces pastorianus
gtagttgtcgtctctttgattttct

SEQ ID NO: 153681 - DNA, 25 bp, Saccharomyces pastorianus
tgatcatcacgggacttctggttta

SEQ ID NO: 153682 - DNA, 25 bp, Saccharomyces pastorianus
tgaccggtattgtgtttttcctatt

SEQ ID NO: 153683 - DNA, 25 bp, Saccharomyces pastorianus
ggacgtcttgtccattagtgtgcaa

SEQ ID NO: 153684 - DNA, 25 bp, Saccharomyces pastorianus
aactctccagcgattgttgttgatg

SEQ ID NO: 153685 - DNA, 25 bp, Saccharomyces pastorianus
aggcacccttttcagattatctatc

SEQ ID NO: 153686 - DNA, 25 bp, Saccharomyces pastorianus
aattactcagccaagattctcgtgt

SEQ ID NO: 153687 - DNA, 25 bp, Saccharomyces pastorianus
aagtttctcttctggcgatttggga

SEQ ID NO: 153688 - DNA, 25 bp, Saccharomyces pastorianus
gaatctatacaccacctctgagaag

SEQ ID NO: 153689 - DNA, 25 bp, Saccharomyces pastorianus
gaatttactcaggtcaactctccag

SEQ ID NO: 153690 - DNA, 25 bp, Saccharomyces pastorianus
gtgctatctctatggcatcgtctag

SEQ ID NO: 153691 - DNA, 25 bp, Saccharomyces pastorianus
attgtcacctgtacactggcattac

SEQ ID NO: 153692 - DNA, 25 bp, Saccharomyces pastorianus
tcatctgcttctcgtactaatctag

SEQ ID NO: 153693 - DNA, 25 bp, Saccharomyces pastorianus
gttctgaacgcggtgtttgctctat

SEQ ID NO: 153694 - DNA, 25 bp, Saccharomyces pastorianus
aagcacctccagtttaatgaagcct

SEQ ID NO: 153695 - DNA, 25 bp, Saccharomyces pastorianus
accagcagtggtttcgtcagtgatg

SEQ ID NO: 153696 - DNA, 25 bp, Saccharomyces pastorianus
gactagttcatcctcttttaagcaa

SEQ ID NO: 153697 - DNA, 25 bp, Saccharomyces pastorianus
gctctattcctattactgttcacta

SEQ ID NO: 153698 - DNA, 25 bp, Saccharomyces pastorianus
tgttccgtgatgacactttcggcaa

SEQ ID NO: 153699 - DNA, 25 bp, Saccharomyces pastorianus
aagcctgaatcaagtctctacctgg

SEQ ID NO: 153700 - DNA, 25 bp, Saccharomyces pastorianus
gaccgtgtgtcattcattcctaaga

SEQ ID NO: 153701 - DNA, 25 bp, Saccharomyces pastorianus
ggcggttattctgttcgttctgaac

SEQ ID NO: 153702 - DNA, 25 bp, Saccharomyces pastorianus
gactgaagccgcctgtaaacacaat

SEQ ID NO: 153703 - DNA, 25 bp, Saccharomyces pastorianus
tagaaaaactatcgtcggccgctgc

SEQ ID NO: 153704 - DNA, 25 bp, Saccharomyces pastorianus
gcagttggtcagagcttggactaca

SEQ ID NO: 153705 - DNA, 25 bp, Saccharomyces pastorianus
gaaccattcggcaatgctgttccta

SEQ ID NO: 153706 - DNA, 25 bp, Saccharomyces pastorianus
gatggcatgcgatcacgttgcgaat

SEQ ID NO: 153707 - DNA, 25 bp, Saccharomyces pastorianus
caacagtggtttacgtcagggtcct

SEQ ID NO: 153708 - DNA, 25 bp, Saccharomyces pastorianus
ttgacttaaccaacggcgaaccatt

SEQ ID NO: 153709 - DNA, 25 bp, Saccharomyces pastorianus
gaataatactccttttccaggttat

SEQ ID NO: 153710 - DNA, 25 bp, Saccharomyces pastorianus
gagcaaacgccaatagccgggatga

SEQ ID NO: 153711 - DNA, 25 bp, Saccharomyces pastorianus
ctgttcctaccttcacaaagacatg

SEQ ID NO: 153712 - DNA, 25 bp, Saccharomyces pastorianus
tgttggctttattcgatgtcattgt

SEQ ID NO: 153713 - DNA, 25 bp, Saccharomyces pastorianus
agcatccaaacagcctggccaaaag

SEQ ID NO: 153714 - DNA, 25 bp, Saccharomyces pastorianus
agcatccccaagagtccagacagta

SEQ ID NO: 153715 - DNA, 25 bp, Saccharomyces pastorianus
agtgccccgttatgcagggagataa

SEQ ID NO: 153716 - DNA, 25 bp, Saccharomyces pastorianus
gaataaacccgctgaacaatatgcc

SEQ ID NO: 153717 - DNA, 25 bp, Saccharomyces pastorianus
atatgccggagttggcagcatccaa

SEQ ID NO: 153718 - DNA, 25 bp, Saccharomyces pastorianus
tatcatccatgtcagggtgcccagt

SEQ ID NO: 153719 - DNA, 25 bp, Saccharomyces pastorianus
agtatccttctccacaacagatgta

SEQ ID NO: 153720 - DNA, 25 bp, Saccharomyces pastorianus
aaagatggacttgcccgttgatcgg

SEQ ID NO: 153721 - DNA, 25 bp, Saccharomyces pastorianus
gtcgccgaagatgcagtggagtcca

SEQ ID NO: 153722 - DNA, 25 bp, Saccharomyces pastorianus
agtcatgcacgagtcgtcgtcgtcg

SEQ ID NO: 153723 - DNA, 25 bp, Saccharomyces pastorianus
gggcagcagtatcatccatgtcagg

SEQ ID NO: 153724 - DNA, 25 bp, Saccharomyces pastorianus
tgtcttcccattcgttttcgaaaag

SEQ ID NO: 153725 - DNA, 25 bp, Saccharomyces pastorianus
ttacttgccaaactacgatgacatg

SEQ ID NO: 153726 - DNA, 25 bp, Saccharomyces pastorianus
agaaactgtactccaaagccaacct

SEQ ID NO: 153727 - DNA, 25 bp, Saccharomyces pastorianus
aacccaagaccaaccagagctgaag

SEQ ID NO: 153728 - DNA, 25 bp, Saccharomyces pastorianus
tttcgaacaaaaggccaaggctatc

SEQ ID NO: 153729 - DNA, 25 bp, Saccharomyces pastorianus
ttgaagcccgtatcaacttcggtat

SEQ ID NO: 153730 - DNA, 25 bp, Saccharomyces pastorianus
acttgtacagaggtgtcttcccatt

SEQ ID NO: 153731 - DNA, 25 bp, Saccharomyces pastorianus
aacgctatcttggatggtgctgact

SEQ ID NO: 153732 - DNA, 25 bp, Saccharomyces pastorianus
aaggctatcattgtcttgtccactt

SEQ ID NO: 153733 - DNA, 25 bp, Saccharomyces pastorianus
tggtttccaagtacagaccaaactg

SEQ ID NO: 153734 - DNA, 25 bp, Saccharomyces pastorianus
catccaaggtttcaaggccggtgct

SEQ ID NO: 153735 - DNA, 25 bp, Saccharomyces pastorianus
gtatttccatcacaaacacagtccc

SEQ ID NO: 153736 - DNA, 25 bp, Saccharomyces pastorianus
tgagtacgagtttaccaccctggtt

SEQ ID NO: 153737 - DNA, 25 bp, Saccharomyces pastorianus
gtccccggtgtcattcgttataaag

SEQ ID NO: 153738 - DNA, 25 bp, Saccharomyces pastorianus
aaactccgccagatatcttgatcaa

SEQ ID NO: 153739 - DNA, 25 bp, Saccharomyces pastorianus
cgtcaagaagatacatgcctgccat

SEQ ID NO: 153740 - DNA, 25 bp, Saccharomyces pastorianus
atgcctgccatctatgtgttaaaca

SEQ ID NO: 153741 - DNA, 25 bp, Saccharomyces pastorianus
tattgccgtggcaagaacctgtaac

SEQ ID NO: 153742 - DNA, 25 bp, Saccharomyces pastorianus
attgccttcaggtgtgatgccactg

SEQ ID NO: 153743 - DNA, 25 bp, Saccharomyces pastorianus
atcagagccgttatgagcgagtaca

SEQ ID NO: 153744 - DNA, 25 bp, Saccharomyces pastorianus
gtgaacaaacccttgcatcataagc

SEQ ID NO: 153745 - DNA, 25 bp, Saccharomyces pastorianus
ataaatagcgctgagattgccttca

SEQ ID NO: 153746 - DNA, 25 bp, Saccharomyces pastorianus
ttatatctaagccttccaagcgacc

SEQ ID NO: 153747 - DNA, 25 bp, Saccharomyces pastorianus
cattcgcattcatcagacgggagtt

SEQ ID NO: 153748 - DNA, 25 bp, Saccharomyces pastorianus
gttacagagcttgctttaccatgat

SEQ ID NO: 153749 - DNA, 25 bp, Saccharomyces pastorianus
gtcagtggctgttgatcctcttgaa

SEQ ID NO: 153750 - DNA, 25 bp, Saccharomyces pastorianus
tgcaatgcatcgttttcgcagtcgt

SEQ ID NO: 153751 - DNA, 25 bp, Saccharomyces pastorianus
aagaaacatgtttcgccctcaagac

SEQ ID NO: 153752 - DNA, 25 bp, Saccharomyces pastorianus
agacgggagttctagcacgcagaca

SEQ ID NO: 153753 - DNA, 25 bp, Saccharomyces pastorianus
atcagcgtcatatcggattgcagtt

SEQ ID NO: 153754 - DNA, 25 bp, Saccharomyces pastorianus
atcccattgggctttcgccaaaaga

SEQ ID NO: 153755 - DNA, 25 bp, Saccharomyces pastorianus
atcgacgtcattctcacagtcagtg

SEQ ID NO: 153756 - DNA, 25 bp, Saccharomyces pastorianus
gatcctcttgaacctcctggaaata

SEQ ID NO: 153757 - DNA, 25 bp, Saccharomyces pastorianus
aatggagcaccatcatgctcgtcat

SEQ ID NO: 153758 - DNA, 25 bp, Saccharomyces pastorianus
gatgaagtcttctggactctcgcca

SEQ ID NO: 153759 - DNA, 25 bp, Saccharomyces pastorianus
gctcgtcataaactgcatcgtcaag

SEQ ID NO: 153760 - DNA, 25 bp, Saccharomyces pastorianus
gcaaatgattgacgctggaacacca

SEQ ID NO: 153761 - DNA, 25 bp, Saccharomyces pastorianus
gatggcaagcctctcacagtaattt

SEQ ID NO: 153762 - DNA, 25 bp, Saccharomyces pastorianus
gtatgttcaacgcagcaccagataa

SEQ ID NO: 153763 - DNA, 25 bp, Saccharomyces pastorianus
agttattccggattacacgtctgcc

SEQ ID NO: 153764 - DNA, 25 bp, Saccharomyces pastorianus
agagctcttctaaagacagcgggat

SEQ ID NO: 153765 - DNA, 25 bp, Saccharomyces pastorianus
ctcgaccgcaatgttcagcgattgt

SEQ ID NO: 153766 - DNA, 25 bp, Saccharomyces pastorianus
gatgttggccacaaatctactgttg

SEQ ID NO: 153767 - DNA, 25 bp, Saccharomyces pastorianus
gagacccctggaagatgtaaagcaa

SEQ ID NO: 153768 - DNA, 25 bp, Saccharomyces pastorianus
gatttccaaatcaacgttctgccca

SEQ ID NO: 153769 - DNA, 25 bp, Saccharomyces pastorianus
cagtcgaagcaaccccggaggaatg

SEQ ID NO: 153770 - DNA, 25 bp, Saccharomyces pastorianus
gaaatcatcagttccgtactcagca

SEQ ID NO: 153771 - DNA, 25 bp, Saccharomyces pastorianus
gcaggtcccaaaacgttattagcta

SEQ ID NO: 153772 - DNA, 25 bp, Saccharomyces pastorianus
gtgggagctcgacatattcatcaac

SEQ ID NO: 153773 - DNA, 25 bp, Saccharomyces pastorianus
gggacgctgatgacctggatacacc

SEQ ID NO: 153774 - DNA, 25 bp, Saccharomyces pastorianus
taatgcggtaacttctcacatccag

SEQ ID NO: 153775 - DNA, 25 bp, Saccharomyces pastorianus
agagttggtcattctactgatttcc

SEQ ID NO: 153776 - DNA, 25 bp, Saccharomyces pastorianus
gatgtacatgtgttgcataggccta

SEQ ID NO: 153777 - DNA, 25 bp, Saccharomyces pastorianus
gatcgccaatttaaggcactacttg

SEQ ID NO: 153778 - DNA, 25 bp, Saccharomyces pastorianus
gcccaaactttttgcaggtgccgat

SEQ ID NO: 153779 - DNA, 25 bp, Saccharomyces pastorianus
gattcagttcttcgagagatgatat

SEQ ID NO: 153780 - DNA, 25 bp, Saccharomyces pastorianus
ggcgaacccctttaatgacaataat

SEQ ID NO: 153781 - DNA, 25 bp, Saccharomyces pastorianus
atccatttgctgatggtaatcaaaa

SEQ ID NO: 153782 - DNA, 25 bp, Saccharomyces pastorianus
gcagaaccgttcattgaaaatccat

SEQ ID NO: 153783 - DNA, 25 bp, Saccharomyces pastorianus
gaacccctttaatgacaataatgta

SEQ ID NO: 153784 - DNA, 25 bp, Saccharomyces pastorianus
gttcattgaaaatccatttgctgat

SEQ ID NO: 153785 - DNA, 25 bp, Saccharomyces pastorianus
attacaagatgcttcggcgaacccc

SEQ ID NO: 153786 - DNA, 25 bp, Saccharomyces pastorianus
cgactttgaaagtgcagaaccgttc

SEQ ID NO: 153787 - DNA, 25 bp, Saccharomyces pastorianus
caaatagattcagttcttcgagaga

SEQ ID NO: 153788 - DNA, 25 bp, Saccharomyces pastorianus
ttcggcgaacccctttaatgacaat

SEQ ID NO: 153789 - DNA, 25 bp, Saccharomyces pastorianus
tgtactgggaagtaacgactttgaa

SEQ ID NO: 153790 - DNA, 25 bp, Saccharomyces pastorianus
atcacatttcatcacttgcgctttg

SEQ ID NO: 153791 - DNA, 25 bp, Saccharomyces pastorianus
gggtatccatatcctcatcgtgccc

SEQ ID NO: 153792 - DNA, 25 bp, Saccharomyces pastorianus
ttgcgctttggatctgcctgcatta

SEQ ID NO: 153793 - DNA, 25 bp, Saccharomyces pastorianus
tatcttcctgactattgctccatca

SEQ ID NO: 153794 - DNA, 25 bp, Saccharomyces pastorianus
atttgtcagcatcacgctgtggttc

SEQ ID NO: 153795 - DNA, 25 bp, Saccharomyces pastorianus
tgttatctccacatcctaccagatt

SEQ ID NO: 153796 - DNA, 25 bp, Saccharomyces pastorianus
agtgcttgcgcactatccagttctc

SEQ ID NO: 153797 - DNA, 25 bp, Saccharomyces pastorianus
agattcccgtcatttgtcagcatca

SEQ ID NO: 153798 - DNA, 25 bp, Saccharomyces pastorianus
gatacaagcctgttatagcctttaa

SEQ ID NO: 153799 - DNA, 25 bp, Saccharomyces pastorianus
gttgcctttgcccattggacccaaa

SEQ ID NO: 153800 - DNA, 25 bp, Saccharomyces pastorianus
aaacgcatacacacaactcatcgat

SEQ ID NO: 153801 - DNA, 25 bp, Saccharomyces pastorianus
atcagcatccacaataactgtcgtg

SEQ ID NO: 153802 - DNA, 25 bp, Saccharomyces pastorianus
cagcatccacaataactgtcgtgtc

SEQ ID NO: 153803 - DNA, 25 bp, Saccharomyces pastorianus
tgctcagtgaactcgtagcaaccgc

SEQ ID NO: 153804 - DNA, 25 bp, Saccharomyces pastorianus
acggccatcagcatccacaataact

SEQ ID NO: 153805 - DNA, 25 bp, Saccharomyces pastorianus
tcagtgaactcgtagcaaccgcctc

SEQ ID NO: 153806 - DNA, 25 bp, Saccharomyces pastorianus
tacacggccatcagcatccacaata

SEQ ID NO: 153807 - DNA, 25 bp, Saccharomyces pastorianus
tcagcatccacaataactgtcgtgt

SEQ ID NO: 153808 - DNA, 25 bp, Saccharomyces pastorianus
agtgaactcgtagcaaccgcctcct

SEQ ID NO: 153809 - DNA, 25 bp, Saccharomyces pastorianus
gctcagtgaactcgtagcaaccgcc

SEQ ID NO: 153810 - DNA, 25 bp, Saccharomyces pastorianus
ggccatcagcatccacaataactgt

SEQ ID NO: 153811 - DNA, 25 bp, Saccharomyces pastorianus
atacacggccatcagcatccacaat

SEQ ID NO: 153812 - DNA, 25 bp, Saccharomyces pastorianus
gagtccttagagtttgacgttgttg

SEQ ID NO: 153813 - DNA, 25 bp, Saccharomyces pastorianus
tcctttctgaccactcaattattct

SEQ ID NO: 153814 - DNA, 25 bp, Saccharomyces pastorianus
ccagacatatttcgctcctttctga

SEQ ID NO: 153815 - DNA, 25 bp, Saccharomyces pastorianus
agtattgttgctatctgccttcctt

SEQ ID NO: 153816 - DNA, 25 bp, Saccharomyces pastorianus
atgttttaactcatccataagcaga

SEQ ID NO: 153817 - DNA, 25 bp, Saccharomyces pastorianus
actcgttagagtctgagtccttaga

SEQ ID NO: 153818 - DNA, 25 bp, Saccharomyces pastorianus
taagttccacgttagtattgttgct

SEQ ID NO: 153819 - DNA, 25 bp, Saccharomyces pastorianus
gttgttgatcttgctccagacatat

SEQ ID NO: 153820 - DNA, 25 bp, Saccharomyces pastorianus
agccaagggatataatgactcgtta

SEQ ID NO: 153821 - DNA, 25 bp, Saccharomyces pastorianus
gataccagttgttatagtcgtcgaa

SEQ ID NO: 153822 - DNA, 25 bp, Saccharomyces pastorianus
acggcacctgccgttgttgatcttg

SEQ ID NO: 153823 - DNA, 25 bp, Saccharomyces pastorianus
gactctttgttacctgccataacag

SEQ ID NO: 153824 - DNA, 25 bp, Saccharomyces pastorianus
atttggctctgattggtgtcgtgat

SEQ ID NO: 153825 - DNA, 25 bp, Saccharomyces pastorianus
taacaattttcttccgattttactg

SEQ ID NO: 153826 - DNA, 25 bp, Saccharomyces pastorianus
aagcgatttatgtctttcatggttg

SEQ ID NO: 153827 - DNA, 25 bp, Saccharomyces pastorianus
gagtacatacctatcttggcagaac

SEQ ID NO: 153828 - DNA, 25 bp, Saccharomyces pastorianus
gatcttacctgctgtgcagaatttg

SEQ ID NO: 153829 - DNA, 25 bp, Saccharomyces pastorianus
gggtttgccaagttcctaaatgatc

SEQ ID NO: 153830 - DNA, 25 bp, Saccharomyces pastorianus
gacgttcgtttaaatatcattgcca

SEQ ID NO: 153831 - DNA, 25 bp, Saccharomyces pastorianus
catggttgtgggatactgtttattc

SEQ ID NO: 153832 - DNA, 25 bp, Saccharomyces pastorianus
attgagctgctatcagactctttgt

SEQ ID NO: 153833 - DNA, 25 bp, Saccharomyces pastorianus
aagagatgagttccctgacgttcgt

SEQ ID NO: 153834 - DNA, 25 bp, Saccharomyces pastorianus
ggcctcgacgaaagtcccttacaag

SEQ ID NO: 153835 - DNA, 25 bp, Saccharomyces pastorianus
agaagaggttgtccctcaacccgtg

SEQ ID NO: 153836 - DNA, 25 bp, Saccharomyces pastorianus
aagaccgctggtaaagactgaaact

SEQ ID NO: 153837 - DNA, 25 bp, Saccharomyces pastorianus
tatcgactgggttaaatcgctgcca

SEQ ID NO: 153838 - DNA, 25 bp, Saccharomyces pastorianus
gaaacggcaatgtgcccaacaggtg

SEQ ID NO: 153839 - DNA, 25 bp, Saccharomyces pastorianus
gcagtacttcgaatggattgtggtt

SEQ ID NO: 153840 - DNA, 25 bp, Saccharomyces pastorianus
atcgctgccaaataagcagtacttc

SEQ ID NO: 153841 - DNA, 25 bp, Saccharomyces pastorianus
caattctgaggaaaagaccgctggt

SEQ ID NO: 153842 - DNA, 25 bp, Saccharomyces pastorianus
caacaggtgggccacaccattggac

SEQ ID NO: 153843 - DNA, 25 bp, Saccharomyces pastorianus
aaatactcatctatggcaattctga

SEQ ID NO: 153844 - DNA, 25 bp, Saccharomyces pastorianus
tgggccagaatcagaactcctaccg

SEQ ID NO: 153845 - DNA, 25 bp, Saccharomyces pastorianus
cgcagacctggtacgatatcaacaa

SEQ ID NO: 153846 - DNA, 25 bp, Saccharomyces pastorianus
aatcgctaccaggacattcattcac

SEQ ID NO: 153847 - DNA, 25 bp, Saccharomyces pastorianus
gaaggcctgcgcaaatatttccact

SEQ ID NO: 153848 - DNA, 25 bp, Saccharomyces pastorianus
aggagcgccgcgatatggatatagt

SEQ ID NO: 153849 - DNA, 25 bp, Saccharomyces pastorianus
ttgaacccgcttagagactccgaaa

SEQ ID NO: 153850 - DNA, 25 bp, Saccharomyces pastorianus
acgagctttcatgcatcaacacaga

SEQ ID NO: 153851 - DNA, 25 bp, Saccharomyces pastorianus
gaagattgccgcgatccgtgactac

SEQ ID NO: 153852 - DNA, 25 bp, Saccharomyces pastorianus
gtcatcccagatgtcaattaccacg

SEQ ID NO: 153853 - DNA, 25 bp, Saccharomyces pastorianus
tgcaggtctaccactcgaagattgc

SEQ ID NO: 153854 - DNA, 25 bp, Saccharomyces pastorianus
gtgactacaagctacaccgagcgta

SEQ ID NO: 153855 - DNA, 25 bp, Saccharomyces pastorianus
ggtcacacccggaattgcaggtcta

SEQ ID NO: 153856 - DNA, 25 bp, Saccharomyces pastorianus
gtgaagcaagagacgcccaccgaga

SEQ ID NO: 153857 - DNA, 25 bp, Saccharomyces pastorianus
aagctatccagcctggtgaagcaag

SEQ ID NO: 153858 - DNA, 25 bp, Saccharomyces pastorianus
ccagtgacgcaggaacagagaagat

SEQ ID NO: 153859 - DNA, 25 bp, Saccharomyces pastorianus
agttgaagtacgctcccaagctatc

SEQ ID NO: 153860 - DNA, 25 bp, Saccharomyces pastorianus
gaatactgtatatccagtgacgcag

SEQ ID NO: 153861 - DNA, 25 bp, Saccharomyces pastorianus
gacgcccaccgagagcttgaaaaga

SEQ ID NO: 153862 - DNA, 25 bp, Saccharomyces pastorianus
gaccacagcgaaagaacaggacctt

SEQ ID NO: 153863 - DNA, 25 bp, Saccharomyces pastorianus
cgacgaggagaagtcgttggccaat

SEQ ID NO: 153864 - DNA, 25 bp, Saccharomyces pastorianus
aacaggaccttgatcaagagagcgt

SEQ ID NO: 153865 - DNA, 25 bp, Saccharomyces pastorianus
ggaaagtgaacagaccacagcgaaa

SEQ ID NO: 153866 - DNA, 25 bp, Saccharomyces pastorianus
gttggccaatctgccggagttgaag

SEQ ID NO: 153867 - DNA, 25 bp, Saccharomyces pastorianus
agcaaatttatctccatggctcaaa

SEQ ID NO: 153868 - DNA, 25 bp, Saccharomyces pastorianus
gaaagtccttcgaccactagaaatg

SEQ ID NO: 153869 - DNA, 25 bp, Saccharomyces pastorianus
gatctggttccattaggccaaacat

SEQ ID NO: 153870 - DNA, 25 bp, Saccharomyces pastorianus
gattttggtgtagcttttcagtata

SEQ ID NO: 153871 - DNA, 25 bp, Saccharomyces pastorianus
tgttatcaatcaagagccgtccgat

SEQ ID NO: 153872 - DNA, 25 bp, Saccharomyces pastorianus
ggaggccggaaacgctattgttatc

SEQ ID NO: 153873 - DNA, 25 bp, Saccharomyces pastorianus
attcgcacagtgatccggtccatat

SEQ ID NO: 153874 - DNA, 25 bp, Saccharomyces pastorianus
aagtctgctgtcaaagttccactgg

SEQ ID NO: 153875 - DNA, 25 bp, Saccharomyces pastorianus
gtccgatatatcctcttgggtttta

SEQ ID NO: 153876 - DNA, 25 bp, Saccharomyces pastorianus
gagaaatgttcgacctttaacgtat

SEQ ID NO: 153877 - DNA, 25 bp, Saccharomyces pastorianus
gttccactgggcaaaccattttctc

SEQ ID NO: 153878 - DNA, 25 bp, Saccharomyces pastorianus
caactttcgaagggcgattttcata

SEQ ID NO: 153879 - DNA, 25 bp, Saccharomyces pastorianus
tcgaagggcgattttcatagcatct

SEQ ID NO: 153880 - DNA, 25 bp, Saccharomyces pastorianus
gaagggcgattttcatagcatcttc

SEQ ID NO: 153881 - DNA, 25 bp, Saccharomyces pastorianus
ctttcgaagggcgattttcatagca

SEQ ID NO: 153882 - DNA, 25 bp, Saccharomyces pastorianus
aactttcgaagggcgattttcatag

SEQ ID NO: 153883 - DNA, 25 bp, Saccharomyces pastorianus
tttcgaagggcgattttcatagcat

SEQ ID NO: 153884 - DNA, 25 bp, Saccharomyces pastorianus
ttcgaagggcgattttcatagcatc

SEQ ID NO: 153885 - DNA, 25 bp, Saccharomyces pastorianus
cgaagggcgattttcatagcatctt

SEQ ID NO: 153886 - DNA, 25 bp, Saccharomyces pastorianus
tcaactttcgaagggcgattttcat

SEQ ID NO: 153887 - DNA, 25 bp, Saccharomyces pastorianus
tggtgtgttatctggaactttgcct

SEQ ID NO: 153888 - DNA, 25 bp, Saccharomyces pastorianus
actgcagcacagcaaaatgtatttt

SEQ ID NO: 153889 - DNA, 25 bp, Saccharomyces pastorianus
gatcacatcaaacttctaaggaaat

SEQ ID NO: 153890 - DNA, 25 bp, Saccharomyces pastorianus
aactttgcctactgcagcacagcaa

SEQ ID NO: 153891 - DNA, 25 bp, Saccharomyces pastorianus
ccgctagtatttgacatagatcaca

SEQ ID NO: 153892 - DNA, 25 bp, Saccharomyces pastorianus
gtgtgttatctggaactttgcctac

SEQ ID NO: 153893 - DNA, 25 bp, Saccharomyces pastorianus
ttttgtcggtacctttgaggcttat

SEQ ID NO: 153894 - DNA, 25 bp, Saccharomyces pastorianus
tgcctactgcagcacagcaaaatgt

SEQ ID NO: 153895 - DNA, 25 bp, Saccharomyces pastorianus
gtcggtacctttgaggcttatgtta

SEQ ID NO: 153896 - DNA, 25 bp, Saccharomyces pastorianus
ggtatttgtggtgtgttatctggaa

SEQ ID NO: 153897 - DNA, 25 bp, Saccharomyces pastorianus
gacatagatcacatcaaacttctaa

SEQ ID NO: 153898 - DNA, 25 bp, Saccharomyces pastorianus
gctacggatcgtatctctgcatatg

SEQ ID NO: 153899 - DNA, 25 bp, Saccharomyces pastorianus
gtatctctgcatatgacgttattat

SEQ ID NO: 153900 - DNA, 25 bp, Saccharomyces pastorianus
aactggacggtatattgccattggt

SEQ ID NO: 153901 - DNA, 25 bp, Saccharomyces pastorianus
ctgaactggacggtatattgccatt

SEQ ID NO: 153902 - DNA, 25 bp, Saccharomyces pastorianus
atgtcaattacgaagactgaactgg

SEQ ID NO: 153903 - DNA, 25 bp, Saccharomyces pastorianus
ctggacggtatattgccattggtgg

SEQ ID NO: 153904 - DNA, 25 bp, Saccharomyces pastorianus
ggatcgtatctctgcatatgacgtt

SEQ ID NO: 153905 - DNA, 25 bp, Saccharomyces pastorianus
ctctgcatatgacgttattatggaa

SEQ ID NO: 153906 - DNA, 25 bp, Saccharomyces pastorianus
tacggatcgtatctctgcatatgac

SEQ ID NO: 153907 - DNA, 25 bp, Saccharomyces pastorianus
acgaagactgaactggacggtatat

SEQ ID NO: 153908 - DNA, 25 bp, Saccharomyces pastorianus
aagactgaactggacggtatattgc

SEQ ID NO: 153909 - DNA, 25 bp, Saccharomyces pastorianus
atgtgtgttttgtccttcctcgagc

SEQ ID NO: 153910 - DNA, 25 bp, Saccharomyces pastorianus
attgcacggatttctcagatgccct

SEQ ID NO: 153911 - DNA, 25 bp, Saccharomyces pastorianus
tcctcgagcctccaagtagaagata

SEQ ID NO: 153912 - DNA, 25 bp, Saccharomyces pastorianus
ataccttttgtgaggcagatctccc

SEQ ID NO: 153913 - DNA, 25 bp, Saccharomyces pastorianus
ctcccaatgacctgcttcaagtggt

SEQ ID NO: 153914 - DNA, 25 bp, Saccharomyces pastorianus
gacctgcttcaagtggtattgcacg

SEQ ID NO: 153915 - DNA, 25 bp, Saccharomyces pastorianus
gatgccctctggatgggagtcaagt

SEQ ID NO: 153916 - DNA, 25 bp, Saccharomyces pastorianus
ggcagatctcccgtatacaaaaata

SEQ ID NO: 153917 - DNA, 25 bp, Saccharomyces pastorianus
ggtatcggccatactgttcatggta

SEQ ID NO: 153918 - DNA, 25 bp, Saccharomyces pastorianus
agtgcttatgtgtgttttgtccttc

SEQ ID NO: 153919 - DNA, 25 bp, Saccharomyces pastorianus
caagttgactctatcggtatcggcc

SEQ ID NO: 153920 - DNA, 25 bp, Saccharomyces pastorianus
ttgcatttagtgaaccgatcggtga

SEQ ID NO: 153921 - DNA, 25 bp, Saccharomyces pastorianus
tattggatatatgaagttactcgtc

SEQ ID NO: 153922 - DNA, 25 bp, Saccharomyces pastorianus
ttgcgttgcctttgagatactattg

SEQ ID NO: 153923 - DNA, 25 bp, Saccharomyces pastorianus
caggaacatgcatggttgtaattgc

SEQ ID NO: 153924 - DNA, 25 bp, Saccharomyces pastorianus
atacggaattttgcgttgcctttga

SEQ ID NO: 153925 - DNA, 25 bp, Saccharomyces pastorianus
tttgctcgtacttattgtgacttca

SEQ ID NO: 153926 - DNA, 25 bp, Saccharomyces pastorianus
gatggaaattatcacacgtaaaccg

SEQ ID NO: 153927 - DNA, 25 bp, Saccharomyces pastorianus
taaagttaagcttctgatggaaatt

SEQ ID NO: 153928 - DNA, 25 bp, Saccharomyces pastorianus
aaagcggcagtaattttgctcgtac

SEQ ID NO: 153929 - DNA, 25 bp, Saccharomyces pastorianus
gaagttactcgtcataaagcggcag

SEQ ID NO: 153930 - DNA, 25 bp, Saccharomyces pastorianus
gatactattgttttccttttgcttt

SEQ ID NO: 153931 - DNA, 25 bp, Saccharomyces pastorianus
gtaccgacgccaagtcggattttct

SEQ ID NO: 153932 - DNA, 25 bp, Saccharomyces pastorianus
tactccctactacttttaccgtgat

SEQ ID NO: 153933 - DNA, 25 bp, Saccharomyces pastorianus
taccgtgatgaagattgccaccgtt

SEQ ID NO: 153934 - DNA, 25 bp, Saccharomyces pastorianus
gctatgggatactccctactacttt

SEQ ID NO: 153935 - DNA, 25 bp, Saccharomyces pastorianus
atgggctatgggatactccctacta

SEQ ID NO: 153936 - DNA, 25 bp, Saccharomyces pastorianus
gccaccgttattttctaagtcttat

SEQ ID NO: 153937 - DNA, 25 bp, Saccharomyces pastorianus
aaccagtatttatttgatcatgggc

SEQ ID NO: 153938 - DNA, 25 bp, Saccharomyces pastorianus
taaactgggcatgcaaacatcttca

SEQ ID NO: 153939 - DNA, 25 bp, Saccharomyces pastorianus
tccctactacttttaccgtgatgaa

SEQ ID NO: 153940 - DNA, 25 bp, Saccharomyces pastorianus
ttgccaccgttattttctaagtctt

SEQ ID NO: 153941 - DNA, 25 bp, Saccharomyces pastorianus
taacatccttcaacaccatagcaga

SEQ ID NO: 153942 - DNA, 25 bp, Saccharomyces pastorianus
tgttgagtggagatggtgccaattt

SEQ ID NO: 153943 - DNA, 25 bp, Saccharomyces pastorianus
aaaatattagactggatgtgttgag

SEQ ID NO: 153944 - DNA, 25 bp, Saccharomyces pastorianus
gcaatcgcaaccacaaaataaaaat

SEQ ID NO: 153945 - DNA, 25 bp, Saccharomyces pastorianus
gagggaaatgtggtccttcccaaag

SEQ ID NO: 153946 - DNA, 25 bp, Saccharomyces pastorianus
gaaatgtggtccttcccaaagacat

SEQ ID NO: 153947 - DNA, 25 bp, Saccharomyces pastorianus
gagtggagatggtgccaatttagtt

SEQ ID NO: 153948 - DNA, 25 bp, Saccharomyces pastorianus
atgcaatcgcaaccacaaaataaaa

SEQ ID NO: 153949 - DNA, 25 bp, Saccharomyces pastorianus
gatggtgccaatttagttgagggaa

SEQ ID NO: 153950 - DNA, 25 bp, Saccharomyces pastorianus
gttgagggaaatgtggtccttccca

SEQ ID NO: 153951 - DNA, 25 bp, Saccharomyces pastorianus
aaatgtggtccttcccaaagacatg

SEQ ID NO: 153952 - DNA, 25 bp, Saccharomyces pastorianus
ggaaatgtggtccttcccaaagaca

SEQ ID NO: 153953 - DNA, 25 bp, Saccharomyces pastorianus
ggatctatgaaatcgctcgctatac

SEQ ID NO: 153954 - DNA, 25 bp, Saccharomyces pastorianus
aaatcgctcgctatacaccagtcat

SEQ ID NO: 153955 - DNA, 25 bp, Saccharomyces pastorianus
attctgcatactacgcttatctttc

SEQ ID NO: 153956 - DNA, 25 bp, Saccharomyces pastorianus
tatgaaatcgctcgctatacaccag

SEQ ID NO: 153957 - DNA, 25 bp, Saccharomyces pastorianus
gttttcaattctgcatactacgctt

SEQ ID NO: 153958 - DNA, 25 bp, Saccharomyces pastorianus
tactacgcttatctttctcttgtag

SEQ ID NO: 153959 - DNA, 25 bp, Saccharomyces pastorianus
tacaccagtcatgattttgtccctg

SEQ ID NO: 153960 - DNA, 25 bp, Saccharomyces pastorianus
attggatctatgaaatcgctcgcta

SEQ ID NO: 153961 - DNA, 25 bp, Saccharomyces pastorianus
accagtcatgattttgtccctggta

SEQ ID NO: 153962 - DNA, 25 bp, Saccharomyces pastorianus
tgcatactacgcttatctttctctt

SEQ ID NO: 153963 - DNA, 25 bp, Saccharomyces pastorianus
gctcgctatacaccagtcatgattt

SEQ ID NO: 153964 - DNA, 25 bp, Saccharomyces pastorianus
atgcctctaggaacgtcaaacttac

SEQ ID NO: 153965 - DNA, 25 bp, Saccharomyces pastorianus
catatgtctcatgcctctaggaacg

SEQ ID NO: 153966 - DNA, 25 bp, Saccharomyces pastorianus
tatgtctcatgcctctaggaacgtc

SEQ ID NO: 153967 - DNA, 25 bp, Saccharomyces pastorianus
atgtctcatgcctctaggaacgtca

SEQ ID NO: 153968 - DNA, 25 bp, Saccharomyces pastorianus
tgccatatgtctcatgcctctagga

SEQ ID NO: 153969 - DNA, 25 bp, Saccharomyces pastorianus
gcctctaggaacgtcaaacttacct

SEQ ID NO: 153970 - DNA, 25 bp, Saccharomyces pastorianus
catgcctctaggaacgtcaaactta

SEQ ID NO: 153971 - DNA, 25 bp, Saccharomyces pastorianus
tgtgccatatgtctcatgcctctag

SEQ ID NO: 153972 - DNA, 25 bp, Saccharomyces pastorianus
gccatatgtctcatgcctctaggaa

SEQ ID NO: 153973 - DNA, 25 bp, Saccharomyces pastorianus
atgtgccatatgtctcatgcctcta

SEQ ID NO: 153974 - DNA, 25 bp, Saccharomyces pastorianus
gtctcatgcctctaggaacgtcaaa

SEQ ID NO: 153975 - DNA, 25 bp, Saccharomyces pastorianus
acactgtgggtcttcatttccaaga

SEQ ID NO: 153976 - DNA, 25 bp, Saccharomyces pastorianus
ggaattattctccatgcgagccagg

SEQ ID NO: 153977 - DNA, 25 bp, Saccharomyces pastorianus
aagccccggcaaatatatatccaat

SEQ ID NO: 153978 - DNA, 25 bp, Saccharomyces pastorianus
ttaactgcagacataaagccccggc

SEQ ID NO: 153979 - DNA, 25 bp, Saccharomyces pastorianus
aaaaccagcgatgttcagagtgccg

SEQ ID NO: 153980 - DNA, 25 bp, Saccharomyces pastorianus
gagtgccgcactgatatcaattttc

SEQ ID NO: 153981 - DNA, 25 bp, Saccharomyces pastorianus
ataagtattgttgcccacactgtgg

SEQ ID NO: 153982 - DNA, 25 bp, Saccharomyces pastorianus
gatatttccgcgaccaacgagtaga

SEQ ID NO: 153983 - DNA, 25 bp, Saccharomyces pastorianus
tcaattttcggctcccctagatatt

SEQ ID NO: 153984 - DNA, 25 bp, Saccharomyces pastorianus
gcgccgtctctactagtgctggaaa

SEQ ID NO: 153985 - DNA, 25 bp, Saccharomyces pastorianus
aatggtatcgatctactgcaatcat

SEQ ID NO: 153986 - DNA, 25 bp, Saccharomyces pastorianus
atcaccgactgcaagaactctacca

SEQ ID NO: 153987 - DNA, 25 bp, Saccharomyces pastorianus
cagtttcgttcaaattggcctcgtc

SEQ ID NO: 153988 - DNA, 25 bp, Saccharomyces pastorianus
ggtcttgcggccttggtagagttaa

SEQ ID NO: 153989 - DNA, 25 bp, Saccharomyces pastorianus
tcgtcggacacacccttaattcttt

SEQ ID NO: 153990 - DNA, 25 bp, Saccharomyces pastorianus
gttcaaattggcctcgtcggacaca

SEQ ID NO: 153991 - DNA, 25 bp, Saccharomyces pastorianus
ctgcaagaactctaccagtttcgtt

SEQ ID NO: 153992 - DNA, 25 bp, Saccharomyces pastorianus
acccttaattctttcctctaagatg

SEQ ID NO: 153993 - DNA, 25 bp, Saccharomyces pastorianus
cttctggtggaagccaaagcagcag

SEQ ID NO: 153994 - DNA, 25 bp, Saccharomyces pastorianus
tgcggccttggtagagttaattaga

SEQ ID NO: 153995 - DNA, 25 bp, Saccharomyces pastorianus
gagttaattagagttctcgatagag

SEQ ID NO: 153996 - DNA, 25 bp, Saccharomyces pastorianus
agccaaagcagcagcggcaggtctt

SEQ ID NO: 153997 - DNA, 25 bp, Saccharomyces pastorianus
agctccataggttggcggctcttgg

SEQ ID NO: 153998 - DNA, 25 bp, Saccharomyces pastorianus
ggcggctcttggtcgcactaatcaa

SEQ ID NO: 153999 - DNA, 25 bp, Saccharomyces pastorianus
atgtcaaccctctgcagctccatag

SEQ ID NO: 154000 - DNA, 25 bp, Saccharomyces pastorianus
tactgccctgttgactaatttaaat

SEQ ID NO: 154001 - DNA, 25 bp, Saccharomyces pastorianus
cactaatcaactccgctggcgtttg

SEQ ID NO: 154002 - DNA, 25 bp, Saccharomyces pastorianus
atcatcgggccacgcctttacaaac

SEQ ID NO: 154003 - DNA, 25 bp, Saccharomyces pastorianus
ctggcgtttgcggatcattcaatga

SEQ ID NO: 154004 - DNA, 25 bp, Saccharomyces pastorianus
gcaccaactcctaacgtaaaacctg

SEQ ID NO: 154005 - DNA, 25 bp, Saccharomyces pastorianus
tttacaaacgcaccaactcctaacg

SEQ ID NO: 154006 - DNA, 25 bp, Saccharomyces pastorianus
ggtaaaattactgccctgttgacta

SEQ ID NO: 154007 - DNA, 25 bp, Saccharomyces pastorianus
tggacatattggaactcaccctcga

SEQ ID NO: 154008 - DNA, 25 bp, Saccharomyces pastorianus
aaataatcatatacacctacccagt

SEQ ID NO: 154009 - DNA, 25 bp, Saccharomyces pastorianus
cctacccagtatccttatatgcagt

SEQ ID NO: 154010 - DNA, 25 bp, Saccharomyces pastorianus
acaagatgatttaatgggtccaaat

SEQ ID NO: 154011 - DNA, 25 bp, Saccharomyces pastorianus
ccatcagtgcacttggaattttgaa

SEQ ID NO: 154012 - DNA, 25 bp, Saccharomyces pastorianus
tattgaaatctgagcatggaggaaa

SEQ ID NO: 154013 - DNA, 25 bp, Saccharomyces pastorianus
gctcaacctgagcaaaacgttttcc

SEQ ID NO: 154014 - DNA, 25 bp, Saccharomyces pastorianus
tatatgcagtaaaagagctcaacct

SEQ ID NO: 154015 - DNA, 25 bp, Saccharomyces pastorianus
aaaacgttttccatcagtgcacttg

SEQ ID NO: 154016 - DNA, 25 bp, Saccharomyces pastorianus
agtaattccaaccagagtccagcga

SEQ ID NO: 154017 - DNA, 25 bp, Saccharomyces pastorianus
gggtccaaatcattttagcctacgt

SEQ ID NO: 154018 - DNA, 25 bp, Saccharomyces pastorianus
cattttagcctacgtatcatgtata

SEQ ID NO: 154019 - DNA, 25 bp, Saccharomyces pastorianus
aatcaattcagcaacgccaacgcga

SEQ ID NO: 154020 - DNA, 25 bp, Saccharomyces pastorianus
gttaatcattttcctgcgtccgttc

SEQ ID NO: 154021 - DNA, 25 bp, Saccharomyces pastorianus
attaacgggatacctctttccatgc

SEQ ID NO: 154022 - DNA, 25 bp, Saccharomyces pastorianus
aatttatccagtggcttctgtcccc

SEQ ID NO: 154023 - DNA, 25 bp, Saccharomyces pastorianus
tagtgtaattcctgatctctccatg

SEQ ID NO: 154024 - DNA, 25 bp, Saccharomyces pastorianus
tggaaccactgttaccactttagtt

SEQ ID NO: 154025 - DNA, 25 bp, Saccharomyces pastorianus
ctaatggcatgtcaattccctctaa

SEQ ID NO: 154026 - DNA, 25 bp, Saccharomyces pastorianus
aataggccaccctattccaagggag

SEQ ID NO: 154027 - DNA, 25 bp, Saccharomyces pastorianus
gtaagcactcccgttaatcattttc

SEQ ID NO: 154028 - DNA, 25 bp, Saccharomyces pastorianus
acggagattctgacggttctataat

SEQ ID NO: 154029 - DNA, 25 bp, Saccharomyces pastorianus
ttctgtccccgcttcgaataacaat

SEQ ID NO: 154030 - DNA, 25 bp, Saccharomyces pastorianus
gttgcaactgttgctgctccggttg

SEQ ID NO: 154031 - DNA, 25 bp, Saccharomyces pastorianus
atccttcaccatgacgagaatgcgt

SEQ ID NO: 154032 - DNA, 25 bp, Saccharomyces pastorianus
gaactggtgctgttgcaactgttgc

SEQ ID NO: 154033 - DNA, 25 bp, Saccharomyces pastorianus
ggtcttggtcagaatctcgattatc

SEQ ID NO: 154034 - DNA, 25 bp, Saccharomyces pastorianus
agaatctcgattatccttcaccatg

SEQ ID NO: 154035 - DNA, 25 bp, Saccharomyces pastorianus
cgattatccttcaccatgacgagaa

SEQ ID NO: 154036 - DNA, 25 bp, Saccharomyces pastorianus
ctgctccggttgtcttttcatgtga

SEQ ID NO: 154037 - DNA, 25 bp, Saccharomyces pastorianus
gccatataatctgtatacggacctt

SEQ ID NO: 154038 - DNA, 25 bp, Saccharomyces pastorianus
accatgacgagaatgcgtatacgca

SEQ ID NO: 154039 - DNA, 25 bp, Saccharomyces pastorianus
aaatcttggtcttggtcagaatctc

SEQ ID NO: 154040 - DNA, 25 bp, Saccharomyces pastorianus
gcgtatacgcagagccatataatct

SEQ ID NO: 154041 - DNA, 25 bp, Saccharomyces pastorianus
aaagttaggtgcatcgtcgtctagc

SEQ ID NO: 154042 - DNA, 25 bp, Saccharomyces pastorianus
gaagcgcatgtgacgattttgttca

SEQ ID NO: 154043 - DNA, 25 bp, Saccharomyces pastorianus
ggttggactacgacagatttcacta

SEQ ID NO: 154044 - DNA, 25 bp, Saccharomyces pastorianus
aaagatttgttgtcgggttcactga

SEQ ID NO: 154045 - DNA, 25 bp, Saccharomyces pastorianus
gtaatccatcttttgcacagggtaa

SEQ ID NO: 154046 - DNA, 25 bp, Saccharomyces pastorianus
gggacaaggctagcgcttctattga

SEQ ID NO: 154047 - DNA, 25 bp, Saccharomyces pastorianus
gcagcgtcaaagatcttagcccatt

SEQ ID NO: 154048 - DNA, 25 bp, Saccharomyces pastorianus
actcagcagctatccattgtttctg

SEQ ID NO: 154049 - DNA, 25 bp, Saccharomyces pastorianus
gcttctattgataacccttccatgg

SEQ ID NO: 154050 - DNA, 25 bp, Saccharomyces pastorianus
attcattcactggttctgcgataga

SEQ ID NO: 154051 - DNA, 25 bp, Saccharomyces pastorianus
cgtcgtctagcggattttacaaatt

SEQ ID NO: 154052 - DNA, 25 bp, Saccharomyces pastorianus
tataaatcagaacccagctcctatg

SEQ ID NO: 154053 - DNA, 25 bp, Saccharomyces pastorianus
atattcctgccttatcctcaaatga

SEQ ID NO: 154054 - DNA, 25 bp, Saccharomyces pastorianus
acgagttttcggctgctttgagaat

SEQ ID NO: 154055 - DNA, 25 bp, Saccharomyces pastorianus
gtcttccagggcaattactatcgca

SEQ ID NO: 154056 - DNA, 25 bp, Saccharomyces pastorianus
actcaactggcttctttttctataa

SEQ ID NO: 154057 - DNA, 25 bp, Saccharomyces pastorianus
gcaagtgtgggctaccgtcgatata

SEQ ID NO: 154058 - DNA, 25 bp, Saccharomyces pastorianus
tgcaaaatgctcctaaccaaccaat

SEQ ID NO: 154059 - DNA, 25 bp, Saccharomyces pastorianus
tggcgaggcagtcagaccgctcttc

SEQ ID NO: 154060 - DNA, 25 bp, Saccharomyces pastorianus
tttagaactccattatcctctcagg

SEQ ID NO: 154061 - DNA, 25 bp, Saccharomyces pastorianus
atgagagcacacctactcaactggc

SEQ ID NO: 154062 - DNA, 25 bp, Saccharomyces pastorianus
atttccgctgccctatatgagagca

SEQ ID NO: 154063 - DNA, 25 bp, Saccharomyces pastorianus
ccggttgcccatgcattatttgtga

SEQ ID NO: 154064 - DNA, 25 bp, Saccharomyces pastorianus
tatccggttgcccatgcattatttg

SEQ ID NO: 154065 - DNA, 25 bp, Saccharomyces pastorianus
aatgcaatgtatccggttgcccatg

SEQ ID NO: 154066 - DNA, 25 bp, Saccharomyces pastorianus
atgtatccggttgcccatgcattat

SEQ ID NO: 154067 - DNA, 25 bp, Saccharomyces pastorianus
gcaatgtatccggttgcccatgcat

SEQ ID NO: 154068 - DNA, 25 bp, Saccharomyces pastorianus
aatgtatccggttgcccatgcatta

SEQ ID NO: 154069 - DNA, 25 bp, Saccharomyces pastorianus
atttgtgatgttttcggatgtagtt

SEQ ID NO: 154070 - DNA, 25 bp, Saccharomyces pastorianus
gcccatgcattatttgtgatgtttt

SEQ ID NO: 154071 - DNA, 25 bp, Saccharomyces pastorianus
gttgcccatgcattatttgtgatgt

SEQ ID NO: 154072 - DNA, 25 bp, Saccharomyces pastorianus
aaactaaatgcaatgtatccggttg

SEQ ID NO: 154073 - DNA, 25 bp, Saccharomyces pastorianus
gcattatttgtgatgttttcggatg

SEQ ID NO: 154074 - DNA, 25 bp, Saccharomyces pastorianus
acgtggaagcgcacaatgctgccgt

SEQ ID NO: 154075 - DNA, 25 bp, Saccharomyces pastorianus
gtgatgttgacactctatcttccac

SEQ ID NO: 154076 - DNA, 25 bp, Saccharomyces pastorianus
atcaatacgcgttggccagtacggc

SEQ ID NO: 154077 - DNA, 25 bp, Saccharomyces pastorianus
gctcaccctgctattgaagatcaat

SEQ ID NO: 154078 - DNA, 25 bp, Saccharomyces pastorianus
aacgataacctgtctattgagcata

SEQ ID NO: 154079 - DNA, 25 bp, Saccharomyces pastorianus
gaccatggcaactactacgatttct

SEQ ID NO: 154080 - DNA, 25 bp, Saccharomyces pastorianus
aatgctaggagagacgccggcgtta

SEQ ID NO: 154081 - DNA, 25 bp, Saccharomyces pastorianus
gaggagtacgacttcgactgcgaca

SEQ ID NO: 154082 - DNA, 25 bp, Saccharomyces pastorianus
tacggcccgctctaaattggcgaga

SEQ ID NO: 154083 - DNA, 25 bp, Saccharomyces pastorianus
gagcgcgccgacaagacagaccatg

SEQ ID NO: 154084 - DNA, 25 bp, Saccharomyces pastorianus
gggccacgctaacctgctagataaa

SEQ ID NO: 154085 - DNA, 25 bp, Saccharomyces pastorianus
gacgcggttcttatatttgtgctct

SEQ ID NO: 154086 - DNA, 25 bp, Saccharomyces pastorianus
aaattgtctggtaactcgatccctg

SEQ ID NO: 154087 - DNA, 25 bp, Saccharomyces pastorianus
agtttactacggcactagcggcata

SEQ ID NO: 154088 - DNA, 25 bp, Saccharomyces pastorianus
agtgggagtttctgtgcctattggc

SEQ ID NO: 154089 - DNA, 25 bp, Saccharomyces pastorianus
atcagccgattacttcattgtcaga

SEQ ID NO: 154090 - DNA, 25 bp, Saccharomyces pastorianus
gtaccgatctgactgcattattgcc

SEQ ID NO: 154091 - DNA, 25 bp, Saccharomyces pastorianus
tcgttggttatctcattgcagcatt

SEQ ID NO: 154092 - DNA, 25 bp, Saccharomyces pastorianus
gtctccgcagcttatacattgtacg

SEQ ID NO: 154093 - DNA, 25 bp, Saccharomyces pastorianus
ggagtcccctagacattctgaacag

SEQ ID NO: 154094 - DNA, 25 bp, Saccharomyces pastorianus
catttttgcgtttgaccagctgggt

SEQ ID NO: 154095 - DNA, 25 bp, Saccharomyces pastorianus
tttgtgctctaatatcgttggcgat

SEQ ID NO: 154096 - DNA, 25 bp, Saccharomyces pastorianus
atttgcagcagacggcgacgcttta

SEQ ID NO: 154097 - DNA, 25 bp, Saccharomyces pastorianus
atcagaatactcttcggaggcgtca

SEQ ID NO: 154098 - DNA, 25 bp, Saccharomyces pastorianus
ggaggcgtcaaatacacccattgaa

SEQ ID NO: 154099 - DNA, 25 bp, Saccharomyces pastorianus
gaacccaaggtttttgattgtggtg

SEQ ID NO: 154100 - DNA, 25 bp, Saccharomyces pastorianus
ggtgataacatagtcatgtcggcga

SEQ ID NO: 154101 - DNA, 25 bp, Saccharomyces pastorianus
atggtggtacaatcctgggcattgc

SEQ ID NO: 154102 - DNA, 25 bp, Saccharomyces pastorianus
gaaatatcaccgattactcaattaa

SEQ ID NO: 154103 - DNA, 25 bp, Saccharomyces pastorianus
tgaagatttcgcagtgttagcaggc

SEQ ID NO: 154104 - DNA, 25 bp, Saccharomyces pastorianus
atgtcggcgaatggatttgcagcag

SEQ ID NO: 154105 - DNA, 25 bp, Saccharomyces pastorianus
ttaattctcgttatgaacccaaggt

SEQ ID NO: 154106 - DNA, 25 bp, Saccharomyces pastorianus
tgggcattgcaggtgaagatttcgc

SEQ ID NO: 154107 - DNA, 25 bp, Saccharomyces pastorianus
gaaagatcttatttccctcatctga

SEQ ID NO: 154108 - DNA, 25 bp, Saccharomyces pastorianus
ccaggatccatcaccaatgtactta

SEQ ID NO: 154109 - DNA, 25 bp, Saccharomyces pastorianus
gccactgttgttactgaacgctctg

SEQ ID NO: 154110 - DNA, 25 bp, Saccharomyces pastorianus
attccagaactgtatgtaggcgcca

SEQ ID NO: 154111 - DNA, 25 bp, Saccharomyces pastorianus
ggcgccattattggccgtggaatga

SEQ ID NO: 154112 - DNA, 25 bp, Saccharomyces pastorianus
cctcatctgaaaaagtcctccggtg

SEQ ID NO: 154113 - DNA, 25 bp, Saccharomyces pastorianus
ctctgattctgcttctttcttggaa

SEQ ID NO: 154114 - DNA, 25 bp, Saccharomyces pastorianus
gtcgtataatactgtggtcccgtcc

SEQ ID NO: 154115 - DNA, 25 bp, Saccharomyces pastorianus
aacttgctgagtccatgcttttgaa

SEQ ID NO: 154116 - DNA, 25 bp, Saccharomyces pastorianus
agctgccgaaggagatgccactgtt

SEQ ID NO: 154117 - DNA, 25 bp, Saccharomyces pastorianus
gacgttgacgtcagattcagcacag

SEQ ID NO: 154118 - DNA, 25 bp, Saccharomyces pastorianus
caatgatgttgagcccacgcgagat

SEQ ID NO: 154119 - DNA, 25 bp, Saccharomyces pastorianus
aagctccgcttctggaggtggacag

SEQ ID NO: 154120 - DNA, 25 bp, Saccharomyces pastorianus
aaggcggttgtgatatcggacgaaa

SEQ ID NO: 154121 - DNA, 25 bp, Saccharomyces pastorianus
tagcattaccaatagccagacggcc

SEQ ID NO: 154122 - DNA, 25 bp, Saccharomyces pastorianus
agcaaccctacattggcgctttcat

SEQ ID NO: 154123 - DNA, 25 bp, Saccharomyces pastorianus
ataactagcgctttcccgagtaaag

SEQ ID NO: 154124 - DNA, 25 bp, Saccharomyces pastorianus
tcgaaaaactccagaagctccgctt

SEQ ID NO: 154125 - DNA, 25 bp, Saccharomyces pastorianus
tttgctcggcatttcatggctacaa

SEQ ID NO: 154126 - DNA, 25 bp, Saccharomyces pastorianus
ggatgtaccagaagtatacccgcaa

SEQ ID NO: 154127 - DNA, 25 bp, Saccharomyces pastorianus
ggtggacagtcatcatccagtcgat

SEQ ID NO: 154128 - DNA, 25 bp, Saccharomyces pastorianus
atacgatgttggtgttctggctcaa

SEQ ID NO: 154129 - DNA, 25 bp, Saccharomyces pastorianus
ccggcctctgatttctctaaagaag

SEQ ID NO: 154130 - DNA, 25 bp, Saccharomyces pastorianus
tgttgcggtaccttgaaactgcccc

SEQ ID NO: 154131 - DNA, 25 bp, Saccharomyces pastorianus
tttggcctcgatggaactgtaattc

SEQ ID NO: 154132 - DNA, 25 bp, Saccharomyces pastorianus
acaacagccatgtggcgatggagta

SEQ ID NO: 154133 - DNA, 25 bp, Saccharomyces pastorianus
ctgtaattcgtagttttctgtgtgc

SEQ ID NO: 154134 - DNA, 25 bp, Saccharomyces pastorianus
aagtatcttcttggtagcgctaggc

SEQ ID NO: 154135 - DNA, 25 bp, Saccharomyces pastorianus
agcgctaggctcttggtagatgtat

SEQ ID NO: 154136 - DNA, 25 bp, Saccharomyces pastorianus
atgcggagccgcaacaaagatcacc

SEQ ID NO: 154137 - DNA, 25 bp, Saccharomyces pastorianus
gacgtcttgacgcttttggcctcga

SEQ ID NO: 154138 - DNA, 25 bp, Saccharomyces pastorianus
aagatcaccggtccctgttgcggta

SEQ ID NO: 154139 - DNA, 25 bp, Saccharomyces pastorianus
agatgtatgcctgatcagccgacgt

SEQ ID NO: 154140 - DNA, 25 bp, Saccharomyces pastorianus
tagagcagctttgcattctaacgtg

SEQ ID NO: 154141 - DNA, 25 bp, Saccharomyces pastorianus
gctttgcattctaacgtgcggtgga

SEQ ID NO: 154142 - DNA, 25 bp, Saccharomyces pastorianus
ttctaacgtgcggtggaaatggtgc

SEQ ID NO: 154143 - DNA, 25 bp, Saccharomyces pastorianus
atggtgcgaaaagtcgacacttgac

SEQ ID NO: 154144 - DNA, 25 bp, Saccharomyces pastorianus
gaaaaacatcgtgtgtctctagagc

SEQ ID NO: 154145 - DNA, 25 bp, Saccharomyces pastorianus
catcgtgtgtctctagagcagcttt

SEQ ID NO: 154146 - DNA, 25 bp, Saccharomyces pastorianus
gcagctttgcattctaacgtgcggt

SEQ ID NO: 154147 - DNA, 25 bp, Saccharomyces pastorianus
gtgtgtctctagagcagctttgcat

SEQ ID NO: 154148 - DNA, 25 bp, Saccharomyces pastorianus
aaacatcgtgtgtctctagagcagc

SEQ ID NO: 154149 - DNA, 25 bp, Saccharomyces pastorianus
gtctctagagcagctttgcattcta

SEQ ID NO: 154150 - DNA, 25 bp, Saccharomyces pastorianus
ttgcattctaacgtgcggtggaaat

SEQ ID NO: 154151 - DNA, 25 bp, Saccharomyces pastorianus
gatgaagccctcgtttggaaacttg

SEQ ID NO: 154152 - DNA, 25 bp, Saccharomyces pastorianus
ttatttggccttcttaccgttagat

SEQ ID NO: 154153 - DNA, 25 bp, Saccharomyces pastorianus
ggtgtttttgacactcttcctaatg

SEQ ID NO: 154154 - DNA, 25 bp, Saccharomyces pastorianus
agttgctgaaaatcacttcgtcgac

SEQ ID NO: 154155 - DNA, 25 bp, Saccharomyces pastorianus
atttggattactaccagcctcttct

SEQ ID NO: 154156 - DNA, 25 bp, Saccharomyces pastorianus
aaaagttatgctatcgattcctcaa

SEQ ID NO: 154157 - DNA, 25 bp, Saccharomyces pastorianus
gatacgttctcacatatttggtcaa

SEQ ID NO: 154158 - DNA, 25 bp, Saccharomyces pastorianus
ctagtatcctctttctttctcaaat

SEQ ID NO: 154159 - DNA, 25 bp, Saccharomyces pastorianus
agggtatgcaagtacctgacctcct

SEQ ID NO: 154160 - DNA, 25 bp, Saccharomyces pastorianus
tgacctcctttcttcatgtatggtt

SEQ ID NO: 154161 - DNA, 25 bp, Saccharomyces pastorianus
accgttagattctctccagtttgga

SEQ ID NO: 154162 - DNA, 25 bp, Saccharomyces pastorianus
atgcatgcgattatacgaaaaattc

SEQ ID NO: 154163 - DNA, 25 bp, Saccharomyces pastorianus
gaatattttttatcaactgttgtta

SEQ ID NO: 154164 - DNA, 25 bp, Saccharomyces pastorianus
gaaaaattcttcgtatccatatatt

SEQ ID NO: 154165 - DNA, 25 bp, Saccharomyces pastorianus
aggcctttgataatgcccttgaaaa

SEQ ID NO: 154166 - DNA, 25 bp, Saccharomyces pastorianus
actgttgttaactgtgaattacttt

SEQ ID NO: 154167 - DNA, 25 bp, Saccharomyces pastorianus
attaccattattactaaggcctttg

SEQ ID NO: 154168 - DNA, 25 bp, Saccharomyces pastorianus
acaggaagctttatcacagagtggg

SEQ ID NO: 154169 - DNA, 25 bp, Saccharomyces pastorianus
gtgagtcagacgctctttcaatgaa

SEQ ID NO: 154170 - DNA, 25 bp, Saccharomyces pastorianus
aaatctgcgccattttgtgagtcag

SEQ ID NO: 154171 - DNA, 25 bp, Saccharomyces pastorianus
aagccagaacaattacctacaaaga

SEQ ID NO: 154172 - DNA, 25 bp, Saccharomyces pastorianus
gaacaagctcaaagtaagccagaac

SEQ ID NO: 154173 - DNA, 25 bp, Saccharomyces pastorianus
aactgacaactctcttgacatcact

SEQ ID NO: 154174 - DNA, 25 bp, Saccharomyces pastorianus
aaatctaccgtcttatgctatgccc

SEQ ID NO: 154175 - DNA, 25 bp, Saccharomyces pastorianus
gatggacccaaatgacgattccgtt

SEQ ID NO: 154176 - DNA, 25 bp, Saccharomyces pastorianus
ggtgactttggaattggcgcatgta

SEQ ID NO: 154177 - DNA, 25 bp, Saccharomyces pastorianus
tccaaagttgtgagggatgtcttca

SEQ ID NO: 154178 - DNA, 25 bp, Saccharomyces pastorianus
gaaaatgtttccactactgaagtag

SEQ ID NO: 154179 - DNA, 25 bp, Saccharomyces pastorianus
gaagatcagttgacggccagtaaca

SEQ ID NO: 154180 - DNA, 25 bp, Saccharomyces pastorianus
aaatgattccttgagccggttaaat

SEQ ID NO: 154181 - DNA, 25 bp, Saccharomyces pastorianus
atgtcttcagacgtggcgatgcttg

SEQ ID NO: 154182 - DNA, 25 bp, Saccharomyces pastorianus
ggcgcatgtaggaactatggtacta

SEQ ID NO: 154183 - DNA, 25 bp, Saccharomyces pastorianus
aaattccaagggtttctgcgaagtg

SEQ ID NO: 154184 - DNA, 25 bp, Saccharomyces pastorianus
attgcacttcctagaatatccaccc

SEQ ID NO: 154185 - DNA, 25 bp, Saccharomyces pastorianus
caagattctaaaggcgctatcgctc

SEQ ID NO: 154186 - DNA, 25 bp, Saccharomyces pastorianus
aaaccaagttgccacattatctact

SEQ ID NO: 154187 - DNA, 25 bp, Saccharomyces pastorianus
gtaagggatcaagactcgctagatt

SEQ ID NO: 154188 - DNA, 25 bp, Saccharomyces pastorianus
actccagccccaatacttatgatgg

SEQ ID NO: 154189 - DNA, 25 bp, Saccharomyces pastorianus
gaggtgaaatcgctcctaaagaggt

SEQ ID NO: 154190 - DNA, 25 bp, Saccharomyces pastorianus
atatccacccgtggcacttgcaata

SEQ ID NO: 154191 - DNA, 25 bp, Saccharomyces pastorianus
ggcgctatcgctcaaattttggctg

SEQ ID NO: 154192 - DNA, 25 bp, Saccharomyces pastorianus
ggagaaacccaattgcaacggattt

SEQ ID NO: 154193 - DNA, 25 bp, Saccharomyces pastorianus
tgatagcggtatcgatgcaacaaca

SEQ ID NO: 154194 - DNA, 25 bp, Saccharomyces pastorianus
gatttagaaagtcactccagcccca

SEQ ID NO: 154195 - DNA, 25 bp, Saccharomyces pastorianus
gactcaaagtggttattcgactact

SEQ ID NO: 154196 - DNA, 25 bp, Saccharomyces pastorianus
gtagagaccacattcgagccagttg

SEQ ID NO: 154197 - DNA, 25 bp, Saccharomyces pastorianus
acatttcgcggccttactaatagga

SEQ ID NO: 154198 - DNA, 25 bp, Saccharomyces pastorianus
gaaaactcacgtcttttaatctaca

SEQ ID NO: 154199 - DNA, 25 bp, Saccharomyces pastorianus
aaggatcggagtacctcaagtgtta

SEQ ID NO: 154200 - DNA, 25 bp, Saccharomyces pastorianus
gattctatgatgctttcaatccata

SEQ ID NO: 154201 - DNA, 25 bp, Saccharomyces pastorianus
gtctcagagagcttcgaagtgtgac

SEQ ID NO: 154202 - DNA, 25 bp, Saccharomyces pastorianus
gaggaactttccgatttatctgata

SEQ ID NO: 154203 - DNA, 25 bp, Saccharomyces pastorianus
aatttatactatccccacatttcgc

SEQ ID NO: 154204 - DNA, 25 bp, Saccharomyces pastorianus
tgatgcgagcagtagctattcggat

SEQ ID NO: 154205 - DNA, 25 bp, Saccharomyces pastorianus
acacagtaggtgtagcccaattttt

SEQ ID NO: 154206 - DNA, 25 bp, Saccharomyces pastorianus
tgctgctgccggtaaggccaacaag

SEQ ID NO: 154207 - DNA, 25 bp, Saccharomyces pastorianus
tgccggtaaggccaacaagcaattt

SEQ ID NO: 154208 - DNA, 25 bp, Saccharomyces pastorianus
ccggtaaggccaacaagcaatttgc

SEQ ID NO: 154209 - DNA, 25 bp, Saccharomyces pastorianus
tgctgccggtaaggccaacaagcaa

SEQ ID NO: 154210 - DNA, 25 bp, Saccharomyces pastorianus
aaggtctctgctgctgccggtaagg

SEQ ID NO: 154211 - DNA, 25 bp, Saccharomyces pastorianus
cggtaaggccaacaagcaatttgct

SEQ ID NO: 154212 - DNA, 25 bp, Saccharomyces pastorianus
aggccaacaagcaatttgctaaatt

SEQ ID NO: 154213 - DNA, 25 bp, Saccharomyces pastorianus
gccggtaaggccaacaagcaatttg

SEQ ID NO: 154214 - DNA, 25 bp, Saccharomyces pastorianus
ctgctgccggtaaggccaacaagca

SEQ ID NO: 154215 - DNA, 25 bp, Saccharomyces pastorianus
gctgctgccggtaaggccaacaagc

SEQ ID NO: 154216 - DNA, 25 bp, Saccharomyces pastorianus
gactgttagattcaacgtcgtcaag

SEQ ID NO: 154217 - DNA, 25 bp, Saccharomyces pastorianus
acagcgcccttgttcaaagtctgaa

SEQ ID NO: 154218 - DNA, 25 bp, Saccharomyces pastorianus
tggagactatcagcgtgggcacgat

SEQ ID NO: 154219 - DNA, 25 bp, Saccharomyces pastorianus
gacgcaattattacgactgccgctg

SEQ ID NO: 154220 - DNA, 25 bp, Saccharomyces pastorianus
gctgccactgccattatcagtagta

SEQ ID NO: 154221 - DNA, 25 bp, Saccharomyces pastorianus
gtagtgtgctttgggttgactccga

SEQ ID NO: 154222 - DNA, 25 bp, Saccharomyces pastorianus
tgactccgatctcaagttatccaac

SEQ ID NO: 154223 - DNA, 25 bp, Saccharomyces pastorianus
gagaagctggtttaaggcacgcaaa

SEQ ID NO: 154224 - DNA, 25 bp, Saccharomyces pastorianus
gaattcgactgatgaacagcgccct

SEQ ID NO: 154225 - DNA, 25 bp, Saccharomyces pastorianus
agtctgaactagatccctgcattgg

SEQ ID NO: 154226 - DNA, 25 bp, Saccharomyces pastorianus
gggcacgatgttcgcgatgttccaa

SEQ ID NO: 154227 - DNA, 25 bp, Saccharomyces pastorianus
aaggcttccttctacacggttgaat

SEQ ID NO: 154228 - DNA, 25 bp, Saccharomyces pastorianus
tatctctctcccattatggcagaca

SEQ ID NO: 154229 - DNA, 25 bp, Saccharomyces pastorianus
atcacctggctcaaatcccgagttt

SEQ ID NO: 154230 - DNA, 25 bp, Saccharomyces pastorianus
gtcagttctcagcattggtaggcaa

SEQ ID NO: 154231 - DNA, 25 bp, Saccharomyces pastorianus
ctatgggatgcgatgtatctctctc

SEQ ID NO: 154232 - DNA, 25 bp, Saccharomyces pastorianus
gagaagcttcactgctcgagataat

SEQ ID NO: 154233 - DNA, 25 bp, Saccharomyces pastorianus
atggcagacaatacgcgcctggaaa

SEQ ID NO: 154234 - DNA, 25 bp, Saccharomyces pastorianus
gaagactgcctcaataatcgaagtg

SEQ ID NO: 154235 - DNA, 25 bp, Saccharomyces pastorianus
ggtgacgaacttttcctgactatgt

SEQ ID NO: 154236 - DNA, 25 bp, Saccharomyces pastorianus
gcctacgagctcacctaaaacagat

SEQ ID NO: 154237 - DNA, 25 bp, Saccharomyces pastorianus
atggtacattacttgatagcgcgaa

SEQ ID NO: 154238 - DNA, 25 bp, Saccharomyces pastorianus
acagaggtcttaacgcgatcacctg

SEQ ID NO: 154239 - DNA, 25 bp, Saccharomyces pastorianus
tatttgtgtctccatcacttacaga

SEQ ID NO: 154240 - DNA, 25 bp, Saccharomyces pastorianus
gtgtgccaattctgggtagccatcg

SEQ ID NO: 154241 - DNA, 25 bp, Saccharomyces pastorianus
gcaatattcttccttgtgtgccaat

SEQ ID NO: 154242 - DNA, 25 bp, Saccharomyces pastorianus
ttgtttcccttgtctttggatgcat

SEQ ID NO: 154243 - DNA, 25 bp, Saccharomyces pastorianus
aatgcccatcgttttgtttgcctat

SEQ ID NO: 154244 - DNA, 25 bp, Saccharomyces pastorianus
ccatggcaaagcaaggtcgttcgat

SEQ ID NO: 154245 - DNA, 25 bp, Saccharomyces pastorianus
ggatgcattgggtttgtagccacta

SEQ ID NO: 154246 - DNA, 25 bp, Saccharomyces pastorianus
tattggcaatttctagtctttcgca

SEQ ID NO: 154247 - DNA, 25 bp, Saccharomyces pastorianus
gtagccatcgcacctgttaatgaac

SEQ ID NO: 154248 - DNA, 25 bp, Saccharomyces pastorianus
aggttttcacctggttattggcaat

SEQ ID NO: 154249 - DNA, 25 bp, Saccharomyces pastorianus
aggcgtcttacctaaatgcttagca

SEQ ID NO: 154250 - DNA, 25 bp, Saccharomyces pastorianus
gatcgagtaaaaatgcctttcccag

SEQ ID NO: 154251 - DNA, 25 bp, Saccharomyces pastorianus
aaatgcctttcccagaagtagaagt

SEQ ID NO: 154252 - DNA, 25 bp, Saccharomyces pastorianus
catccatatttcaagccacatccat

SEQ ID NO: 154253 - DNA, 25 bp, Saccharomyces pastorianus
atgcctttcccagaagtagaagtag

SEQ ID NO: 154254 - DNA, 25 bp, Saccharomyces pastorianus
tgcatatattaacgcgatcgagtaa

SEQ ID NO: 154255 - DNA, 25 bp, Saccharomyces pastorianus
gagtaaaaatgcctttcccagaagt

SEQ ID NO: 154256 - DNA, 25 bp, Saccharomyces pastorianus
gtagaagtaggcaagacatccatat

SEQ ID NO: 154257 - DNA, 25 bp, Saccharomyces pastorianus
gtaaaaatgcctttcccagaagtag

SEQ ID NO: 154258 - DNA, 25 bp, Saccharomyces pastorianus
gtaggcaagacatccatatttcaag

SEQ ID NO: 154259 - DNA, 25 bp, Saccharomyces pastorianus
aacgcgatcgagtaaaaatgccttt

SEQ ID NO: 154260 - DNA, 25 bp, Saccharomyces pastorianus
agacatccatatttcaagccacatc

SEQ ID NO: 154261 - DNA, 25 bp, Saccharomyces pastorianus
acctgggtcacgtgcattcccctca

SEQ ID NO: 154262 - DNA, 25 bp, Saccharomyces pastorianus
ccgcacctgggtcacgtgcattccc

SEQ ID NO: 154263 - DNA, 25 bp, Saccharomyces pastorianus
cctgggtcacgtgcattcccctcac

SEQ ID NO: 154264 - DNA, 25 bp, Saccharomyces pastorianus
gtcacgtgcattcccctcacccgtt

SEQ ID NO: 154265 - DNA, 25 bp, Saccharomyces pastorianus
tggtacccgcacctgggtcacgtgc

SEQ ID NO: 154266 - DNA, 25 bp, Saccharomyces pastorianus
acccgcacctgggtcacgtgcattc

SEQ ID NO: 154267 - DNA, 25 bp, Saccharomyces pastorianus
gcacctgggtcacgtgcattcccct

SEQ ID NO: 154268 - DNA, 25 bp, Saccharomyces pastorianus
gtacccgcacctgggtcacgtgcat

SEQ ID NO: 154269 - DNA, 25 bp, Saccharomyces pastorianus
ggtacccgcacctgggtcacgtgca

SEQ ID NO: 154270 - DNA, 25 bp, Saccharomyces pastorianus
tgggtcacgtgcattcccctcaccc

SEQ ID NO: 154271 - DNA, 25 bp, Saccharomyces pastorianus
atggtacccgcacctgggtcacgtg

SEQ ID NO: 154272 - DNA, 25 bp, Saccharomyces pastorianus
gatccatatgcgtattccgtaactg

SEQ ID NO: 154273 - DNA, 25 bp, Saccharomyces pastorianus
aggctattttcgattcctttgacga

SEQ ID NO: 154274 - DNA, 25 bp, Saccharomyces pastorianus
aggttaacatttcccaattgcgcca

SEQ ID NO: 154275 - DNA, 25 bp, Saccharomyces pastorianus
aacgacgttttcttagctgctgtaa

SEQ ID NO: 154276 - DNA, 25 bp, Saccharomyces pastorianus
agaatgccacttgactaacacatgt

SEQ ID NO: 154277 - DNA, 25 bp, Saccharomyces pastorianus
aatccgttactattggcatctatgg

SEQ ID NO: 154278 - DNA, 25 bp, Saccharomyces pastorianus
cacataagatgttacgtcgtctgta

SEQ ID NO: 154279 - DNA, 25 bp, Saccharomyces pastorianus
gctctttgctgccaagccatttgtt

SEQ ID NO: 154280 - DNA, 25 bp, Saccharomyces pastorianus
gccatttgttcctctagatccatat

SEQ ID NO: 154281 - DNA, 25 bp, Saccharomyces pastorianus
gatagaatgctagcgctctttgctg

SEQ ID NO: 154282 - DNA, 25 bp, Saccharomyces pastorianus
aaatccatagcataacgaacgacgt

SEQ ID NO: 154283 - DNA, 25 bp, Saccharomyces pastorianus
aaacttctacttagtgcctcagacg

SEQ ID NO: 154284 - DNA, 25 bp, Saccharomyces pastorianus
cattcctggccctaaaggtgctata

SEQ ID NO: 154285 - DNA, 25 bp, Saccharomyces pastorianus
gatggtgtcccaatttttgctggaa

SEQ ID NO: 154286 - DNA, 25 bp, Saccharomyces pastorianus
ggcggtaacggcaattctcagaatt

SEQ ID NO: 154287 - DNA, 25 bp, Saccharomyces pastorianus
gttcgcctatggtcgctgaagcaga

SEQ ID NO: 154288 - DNA, 25 bp, Saccharomyces pastorianus
agaattgcttctacggacactcaca

SEQ ID NO: 154289 - DNA, 25 bp, Saccharomyces pastorianus
catagtatcggcatcatgggtcggt

SEQ ID NO: 154290 - DNA, 25 bp, Saccharomyces pastorianus
gggaccgtcatgcagcactttgaat

SEQ ID NO: 154291 - DNA, 25 bp, Saccharomyces pastorianus
ggacctatcagcgttttggagttca

SEQ ID NO: 154292 - DNA, 25 bp, Saccharomyces pastorianus
aatatcctgctcgatggatggctcc

SEQ ID NO: 154293 - DNA, 25 bp, Saccharomyces pastorianus
gcagaatacgctattggctctatca

SEQ ID NO: 154294 - DNA, 25 bp, Saccharomyces pastorianus
gttcttatactatcgacggacctga

SEQ ID NO: 154295 - DNA, 25 bp, Saccharomyces pastorianus
ctgtaacttcgtctattcaagcgca

SEQ ID NO: 154296 - DNA, 25 bp, Saccharomyces pastorianus
gagctcatatggaaacacagcctat

SEQ ID NO: 154297 - DNA, 25 bp, Saccharomyces pastorianus
gcgtgggcgtatagctaagcaccat

SEQ ID NO: 154298 - DNA, 25 bp, Saccharomyces pastorianus
aaagtcgatacctcctgtaacttcg

SEQ ID NO: 154299 - DNA, 25 bp, Saccharomyces pastorianus
gttgaaccatcgttgctacctcaat

SEQ ID NO: 154300 - DNA, 25 bp, Saccharomyces pastorianus
gcctcctcctgttgtaaagccaaaa

SEQ ID NO: 154301 - DNA, 25 bp, Saccharomyces pastorianus
cagccccatccagatctgagaagtt

SEQ ID NO: 154302 - DNA, 25 bp, Saccharomyces pastorianus
acagtctacgaagaaggcgcctcct

SEQ ID NO: 154303 - DNA, 25 bp, Saccharomyces pastorianus
ttaggcgttcacaatcgtccaattc

SEQ ID NO: 154304 - DNA, 25 bp, Saccharomyces pastorianus
atcgcaatcgcaatctcaattcaga

SEQ ID NO: 154305 - DNA, 25 bp, Saccharomyces pastorianus
ctttgtcgatttttgcatgctttga

SEQ ID NO: 154306 - DNA, 25 bp, Saccharomyces pastorianus
ttgcatgctttgactgtgactttcc

SEQ ID NO: 154307 - DNA, 25 bp, Saccharomyces pastorianus
ttaggccatatggttgatgttctca

SEQ ID NO: 154308 - DNA, 25 bp, Saccharomyces pastorianus
tgttgctaaaacaaggtcaatccaa

SEQ ID NO: 154309 - DNA, 25 bp, Saccharomyces pastorianus
ggttgatgttctcaggttctactta

SEQ ID NO: 154310 - DNA, 25 bp, Saccharomyces pastorianus
gggtgcttgaattcattaggccata

SEQ ID NO: 154311 - DNA, 25 bp, Saccharomyces pastorianus
gatatctttgtatggcttgttgcta

SEQ ID NO: 154312 - DNA, 25 bp, Saccharomyces pastorianus
gttctacttatgtttcctttgtcga

SEQ ID NO: 154313 - DNA, 25 bp, Saccharomyces pastorianus
gactttcctgtctgatatctttgta

SEQ ID NO: 154314 - DNA, 25 bp, Saccharomyces pastorianus
gtttcctttgtcgatttttgcatgc

SEQ ID NO: 154315 - DNA, 25 bp, Saccharomyces pastorianus
gactgtgactttcctgtctgatatc

SEQ ID NO: 154316 - DNA, 25 bp, Saccharomyces pastorianus
aaagcagcttctgtttctccttcta

SEQ ID NO: 154317 - DNA, 25 bp, Saccharomyces pastorianus
tctccttctacaaaaccgcttaata

SEQ ID NO: 154318 - DNA, 25 bp, Saccharomyces pastorianus
gtgagcaaccaatcgccagcagtag

SEQ ID NO: 154319 - DNA, 25 bp, Saccharomyces pastorianus
gtaaatactgctacctccattgaag

SEQ ID NO: 154320 - DNA, 25 bp, Saccharomyces pastorianus
aataccttcagtaattggcgcacag

SEQ ID NO: 154321 - DNA, 25 bp, Saccharomyces pastorianus
agagtcatctagtgtccaaccaacg

SEQ ID NO: 154322 - DNA, 25 bp, Saccharomyces pastorianus
gttcctgcagaagcaagccctgtag

SEQ ID NO: 154323 - DNA, 25 bp, Saccharomyces pastorianus
aagcatctgcaccttctactgaaga

SEQ ID NO: 154324 - DNA, 25 bp, Saccharomyces pastorianus
agcactgctgagaccatagaacttt

SEQ ID NO: 154325 - DNA, 25 bp, Saccharomyces pastorianus
ggaacctccacaggaagctagtctt

SEQ ID NO: 154326 - DNA, 25 bp, Saccharomyces pastorianus
gatgaaaccgctgctacaacgataa

SEQ ID NO: 154327 - DNA, 25 bp, Saccharomyces pastorianus
tgctccacctcctgtgattttacaa

SEQ ID NO: 154328 - DNA, 25 bp, Saccharomyces pastorianus
aagtcgttagaagcagatccctccg

SEQ ID NO: 154329 - DNA, 25 bp, Saccharomyces pastorianus
catggtaccatctcggtagagtgca

SEQ ID NO: 154330 - DNA, 25 bp, Saccharomyces pastorianus
gtaacgtacaattttatgaccctca

SEQ ID NO: 154331 - DNA, 25 bp, Saccharomyces pastorianus
gtaacaaccaattatctgacgccct

SEQ ID NO: 154332 - DNA, 25 bp, Saccharomyces pastorianus
atcttttggtgctcaatcggtgttt

SEQ ID NO: 154333 - DNA, 25 bp, Saccharomyces pastorianus
actgccgcatatgatgctttccaac

SEQ ID NO: 154334 - DNA, 25 bp, Saccharomyces pastorianus
tacagagacgccttagacgcgtaca

SEQ ID NO: 154335 - DNA, 25 bp, Saccharomyces pastorianus
gacgcgtacacaagagccataagat

SEQ ID NO: 154336 - DNA, 25 bp, Saccharomyces pastorianus
aaatcgaacggtgcgccaacgaatg

SEQ ID NO: 154337 - DNA, 25 bp, Saccharomyces pastorianus
atctgacgcccttgatgcgtataag

SEQ ID NO: 154338 - DNA, 25 bp, Saccharomyces pastorianus
gcaggcagcagttcctcagcagcca

SEQ ID NO: 154339 - DNA, 25 bp, Saccharomyces pastorianus
cagcagttcctcagcagccactgga

SEQ ID NO: 154340 - DNA, 25 bp, Saccharomyces pastorianus
aggcagcagttcctcagcagccact

SEQ ID NO: 154341 - DNA, 25 bp, Saccharomyces pastorianus
aataatggaacaacccgctcaacag

SEQ ID NO: 154342 - DNA, 25 bp, Saccharomyces pastorianus
gcaacagcaggcagcagttcctcag

SEQ ID NO: 154343 - DNA, 25 bp, Saccharomyces pastorianus
gcagcagttcctcagcagccactgg

SEQ ID NO: 154344 - DNA, 25 bp, Saccharomyces pastorianus
gcagccactggacccattaacacaa

SEQ ID NO: 154345 - DNA, 25 bp, Saccharomyces pastorianus
tggaacaacccgctcaacagcaaca

SEQ ID NO: 154346 - DNA, 25 bp, Saccharomyces pastorianus
agcagttcctcagcagccactggac

SEQ ID NO: 154347 - DNA, 25 bp, Saccharomyces pastorianus
ggacccattaacacaatcaactgcg

SEQ ID NO: 154348 - DNA, 25 bp, Saccharomyces pastorianus
atcaactgcggaaacttggctctct

SEQ ID NO: 154349 - DNA, 25 bp, Saccharomyces pastorianus
gaactgctgcctgctgttgctgtcg

SEQ ID NO: 154350 - DNA, 25 bp, Saccharomyces pastorianus
actgctgcctgctgttgctgtcgct

SEQ ID NO: 154351 - DNA, 25 bp, Saccharomyces pastorianus
ggaactgctgcctgctgttgctgtc

SEQ ID NO: 154352 - DNA, 25 bp, Saccharomyces pastorianus
ctgaggaactgctgcctgctgttgc

SEQ ID NO: 154353 - DNA, 25 bp, Saccharomyces pastorianus
tgctgcctgctgttgctgtcgctgc

SEQ ID NO: 154354 - DNA, 25 bp, Saccharomyces pastorianus
ctgcctgctgttgctgtcgctgctg

SEQ ID NO: 154355 - DNA, 25 bp, Saccharomyces pastorianus
tccagtggctgctgaggaactgctg

SEQ ID NO: 154356 - DNA, 25 bp, Saccharomyces pastorianus
aactgctgcctgctgttgctgtcgc

SEQ ID NO: 154357 - DNA, 25 bp, Saccharomyces pastorianus
tggctgctgaggaactgctgcctgc

SEQ ID NO: 154358 - DNA, 25 bp, Saccharomyces pastorianus
cagtggctgctgaggaactgctgcc

SEQ ID NO: 154359 - DNA, 25 bp, Saccharomyces pastorianus
agtggctgctgaggaactgctgcct

SEQ ID NO: 154360 - DNA, 25 bp, Saccharomyces pastorianus
gaactgctgcctgctgttgctgtcg

SEQ ID NO: 154361 - DNA, 25 bp, Saccharomyces pastorianus
actgctgcctgctgttgctgtcgct

SEQ ID NO: 154362 - DNA, 25 bp, Saccharomyces pastorianus
ggaactgctgcctgctgttgctgtc

SEQ ID NO: 154363 - DNA, 25 bp, Saccharomyces pastorianus
tcaccgcccggattcatttttccta

SEQ ID NO: 154364 - DNA, 25 bp, Saccharomyces pastorianus
ctgaggaactgctgcctgctgttgc

SEQ ID NO: 154365 - DNA, 25 bp, Saccharomyces pastorianus
ctgcctgctgttgctgtcgctgctg

SEQ ID NO: 154366 - DNA, 25 bp, Saccharomyces pastorianus
tccagtggctgctgaggaactgctg

SEQ ID NO: 154367 - DNA, 25 bp, Saccharomyces pastorianus
ctgttgagcgggttgttccattatt

SEQ ID NO: 154368 - DNA, 25 bp, Saccharomyces pastorianus
attattgtttgttcaccgcccggat

SEQ ID NO: 154369 - DNA, 25 bp, Saccharomyces pastorianus
tggctgctgaggaactgctgcctgc

SEQ ID NO: 154370 - DNA, 25 bp, Saccharomyces pastorianus
agtggctgctgaggaactgctgcct

SEQ ID NO: 154371 - DNA, 25 bp, Saccharomyces pastorianus
tatgcatatgcaaactgaacccttt

SEQ ID NO: 154372 - DNA, 25 bp, Saccharomyces pastorianus
agaagaggaacgtccgcacaattcc

SEQ ID NO: 154373 - DNA, 25 bp, Saccharomyces pastorianus
gcatatgcaaactgaaccctttgta

SEQ ID NO: 154374 - DNA, 25 bp, Saccharomyces pastorianus
gacaccaacaaatacgttgctatgc

SEQ ID NO: 154375 - DNA, 25 bp, Saccharomyces pastorianus
atgattaaagcctggtttgacacca

SEQ ID NO: 154376 - DNA, 25 bp, Saccharomyces pastorianus
acaaatacgttgctatgcatatgca

SEQ ID NO: 154377 - DNA, 25 bp, Saccharomyces pastorianus
aaagcctggtttgacaccaacaaat

SEQ ID NO: 154378 - DNA, 25 bp, Saccharomyces pastorianus
attaaagcctggtttgacaccaaca

SEQ ID NO: 154379 - DNA, 25 bp, Saccharomyces pastorianus
gcctggtttgacaccaacaaatacg

SEQ ID NO: 154380 - DNA, 25 bp, Saccharomyces pastorianus
aaaagaagaggaacgtccgcacaat

SEQ ID NO: 154381 - DNA, 25 bp, Saccharomyces pastorianus
gtttgacaccaacaaatacgttgct

SEQ ID NO: 154382 - DNA, 25 bp, Saccharomyces pastorianus
atagtcgccactgcttactgtgact

SEQ ID NO: 154383 - DNA, 25 bp, Saccharomyces pastorianus
atgtgttatacaggtctccgctatg

SEQ ID NO: 154384 - DNA, 25 bp, Saccharomyces pastorianus
gtaaagctgcaggtcgttgtcgtag

SEQ ID NO: 154385 - DNA, 25 bp, Saccharomyces pastorianus
gacgtgcataattatcctggctgtg

SEQ ID NO: 154386 - DNA, 25 bp, Saccharomyces pastorianus
ctccgctatgtcgaccagtatatga

SEQ ID NO: 154387 - DNA, 25 bp, Saccharomyces pastorianus
tgactctgcacttttggaaccgtac

SEQ ID NO: 154388 - DNA, 25 bp, Saccharomyces pastorianus
atacgatgccggtcatatggtgccc

SEQ ID NO: 154389 - DNA, 25 bp, Saccharomyces pastorianus
gaaacgctagggtccgacgtgcata

SEQ ID NO: 154390 - DNA, 25 bp, Saccharomyces pastorianus
actatggccctttcacctttttgag

SEQ ID NO: 154391 - DNA, 25 bp, Saccharomyces pastorianus
aagtttaccatgcatagtcgccact

SEQ ID NO: 154392 - DNA, 25 bp, Saccharomyces pastorianus
ggctgggaaaccatgcttggtccaa

SEQ ID NO: 154393 - DNA, 25 bp, Saccharomyces pastorianus
atccgtcatgaagatactacttgta

SEQ ID NO: 154394 - DNA, 25 bp, Saccharomyces pastorianus
tgaagatactacttgtaaaaaggta

SEQ ID NO: 154395 - DNA, 25 bp, Saccharomyces pastorianus
tgcttggatacactatgaatccgtc

SEQ ID NO: 154396 - DNA, 25 bp, Saccharomyces pastorianus
gcaaatgcttggatacactatgaat

SEQ ID NO: 154397 - DNA, 25 bp, Saccharomyces pastorianus
ttctgcaaaattttgggcaaatgct

SEQ ID NO: 154398 - DNA, 25 bp, Saccharomyces pastorianus
ttgggcaaatgcttggatacactat

SEQ ID NO: 154399 - DNA, 25 bp, Saccharomyces pastorianus
aattttgggcaaatgcttggataca

SEQ ID NO: 154400 - DNA, 25 bp, Saccharomyces pastorianus
gaatccgtcatgaagatactacttg

SEQ ID NO: 154401 - DNA, 25 bp, Saccharomyces pastorianus
gggcaaatgcttggatacactatga

SEQ ID NO: 154402 - DNA, 25 bp, Saccharomyces pastorianus
ccgtcatgaagatactacttgtaaa

SEQ ID NO: 154403 - DNA, 25 bp, Saccharomyces pastorianus
tttgggcaaatgcttggatacacta

SEQ ID NO: 154404 - DNA, 25 bp, Saccharomyces pastorianus
gcaccattatcctatacagaaaaca

SEQ ID NO: 154405 - DNA, 25 bp, Saccharomyces pastorianus
agagaacatatattgcgcccctgtc

SEQ ID NO: 154406 - DNA, 25 bp, Saccharomyces pastorianus
ggcgcaccattatcctatacagaaa

SEQ ID NO: 154407 - DNA, 25 bp, Saccharomyces pastorianus
gtcagagaacatatattgcgcccct

SEQ ID NO: 154408 - DNA, 25 bp, Saccharomyces pastorianus
aatggcgcaccattatcctatacag

SEQ ID NO: 154409 - DNA, 25 bp, Saccharomyces pastorianus
atcagtcatttttcgcgggacttga

SEQ ID NO: 154410 - DNA, 25 bp, Saccharomyces pastorianus
cgcgggacttgaatggcgcaccatt

SEQ ID NO: 154411 - DNA, 25 bp, Saccharomyces pastorianus
ctgtgtatcagtcatttttcgcggg

SEQ ID NO: 154412 - DNA, 25 bp, Saccharomyces pastorianus
gcccctgtcctgtgtatcagtcatt

SEQ ID NO: 154413 - DNA, 25 bp, Saccharomyces pastorianus
tatattgcgcccctgtcctgtgtat

SEQ ID NO: 154414 - DNA, 25 bp, Saccharomyces pastorianus
ttttcgcgggacttgaatggcgcac

SEQ ID NO: 154415 - DNA, 25 bp, Saccharomyces pastorianus
tagcagaacaaacacatgatatatt

SEQ ID NO: 154416 - DNA, 25 bp, Saccharomyces pastorianus
gctctgttagcgtacccttctacaa

SEQ ID NO: 154417 - DNA, 25 bp, Saccharomyces pastorianus
tgttagcgtacccttctacaagcag

SEQ ID NO: 154418 - DNA, 25 bp, Saccharomyces pastorianus
gcgtacccttctacaagcagatagc

SEQ ID NO: 154419 - DNA, 25 bp, Saccharomyces pastorianus
tagcgtacccttctacaagcagata

SEQ ID NO: 154420 - DNA, 25 bp, Saccharomyces pastorianus
aatgccgccggctctgttagcgtac

SEQ ID NO: 154421 - DNA, 25 bp, Saccharomyces pastorianus
atattcaaaaggtgcaatgtcagag

SEQ ID NO: 154422 - DNA, 25 bp, Saccharomyces pastorianus
gcagatagcagaacaaacacatgat

SEQ ID NO: 154423 - DNA, 25 bp, Saccharomyces pastorianus
acccttctacaagcagatagcagaa

SEQ ID NO: 154424 - DNA, 25 bp, Saccharomyces pastorianus
gtacccttctacaagcagatagcag

SEQ ID NO: 154425 - DNA, 25 bp, Saccharomyces pastorianus
ttagcgtacccttctacaagcagat

SEQ ID NO: 154426 - DNA, 25 bp, Saccharomyces pastorianus
tagcagaacaaacacatgatatatt

SEQ ID NO: 154427 - DNA, 25 bp, Saccharomyces pastorianus
gctctgttagcgtacccttctacaa

SEQ ID NO: 154428 - DNA, 25 bp, Saccharomyces pastorianus
tgttagcgtacccttctacaagcag

SEQ ID NO: 154429 - DNA, 25 bp, Saccharomyces pastorianus
agagaacatatattgcgcccctgtc

SEQ ID NO: 154430 - DNA, 25 bp, Saccharomyces pastorianus
gcgtacccttctacaagcagatagc

SEQ ID NO: 154431 - DNA, 25 bp, Saccharomyces pastorianus
tagcgtacccttctacaagcagata

SEQ ID NO: 154432 - DNA, 25 bp, Saccharomyces pastorianus
aatgccgccggctctgttagcgtac

SEQ ID NO: 154433 - DNA, 25 bp, Saccharomyces pastorianus
ctgtgtatcagtcatttttcgcggg

SEQ ID NO: 154434 - DNA, 25 bp, Saccharomyces pastorianus
atattcaaaaggtgcaatgtcagag

SEQ ID NO: 154435 - DNA, 25 bp, Saccharomyces pastorianus
gcagatagcagaacaaacacatgat

SEQ ID NO: 154436 - DNA, 25 bp, Saccharomyces pastorianus
gtacccttctacaagcagatagcag

SEQ ID NO: 154437 - DNA, 25 bp, Saccharomyces pastorianus
gagtattgaattcgcatctttgaca

SEQ ID NO: 154438 - DNA, 25 bp, Saccharomyces pastorianus
ttaggttcacatggcgcaccaaact

SEQ ID NO: 154439 - DNA, 25 bp, Saccharomyces pastorianus
gttctgctttatgcacgacattctg

SEQ ID NO: 154440 - DNA, 25 bp, Saccharomyces pastorianus
gctgccgacggtgactatttagaaa

SEQ ID NO: 154441 - DNA, 25 bp, Saccharomyces pastorianus
ggcactatcgtaattccaagatcct

SEQ ID NO: 154442 - DNA, 25 bp, Saccharomyces pastorianus
tcaccctcacttaccacaaatggaa

SEQ ID NO: 154443 - DNA, 25 bp, Saccharomyces pastorianus
gttaacagcatactcaccattaggt

SEQ ID NO: 154444 - DNA, 25 bp, Saccharomyces pastorianus
tcatcgtgtgagagccattggtgtc

SEQ ID NO: 154445 - DNA, 25 bp, Saccharomyces pastorianus
atttgcagccatccttccagagttt

SEQ ID NO: 154446 - DNA, 25 bp, Saccharomyces pastorianus
gaaaaacaatgtatgctgccgacgg

SEQ ID NO: 154447 - DNA, 25 bp, Saccharomyces pastorianus
actggtgaagactccggttgatgat

SEQ ID NO: 154448 - DNA, 25 bp, Saccharomyces pastorianus
aggcgaggaatatcatcatagtaat

SEQ ID NO: 154449 - DNA, 25 bp, Saccharomyces pastorianus
gacaatgacaacaatatcaaagatg

SEQ ID NO: 154450 - DNA, 25 bp, Saccharomyces pastorianus
gccaggcgaggaatatcatcatagt

SEQ ID NO: 154451 - DNA, 25 bp, Saccharomyces pastorianus
tggtaccaatactgataataacgag

SEQ ID NO: 154452 - DNA, 25 bp, Saccharomyces pastorianus
aataacgagactactggcgctgatg

SEQ ID NO: 154453 - DNA, 25 bp, Saccharomyces pastorianus
cttgagccaggcgaggaatatcatc

SEQ ID NO: 154454 - DNA, 25 bp, Saccharomyces pastorianus
atcatcatagtaatggtaccaatac

SEQ ID NO: 154455 - DNA, 25 bp, Saccharomyces pastorianus
agactactggcgctgatgatactga

SEQ ID NO: 154456 - DNA, 25 bp, Saccharomyces pastorianus
gagccaggcgaggaatatcatcata

SEQ ID NO: 154457 - DNA, 25 bp, Saccharomyces pastorianus
aacgagactactggcgctgatgata

SEQ ID NO: 154458 - DNA, 25 bp, Saccharomyces pastorianus
gataataacgagactactggcgctg

SEQ ID NO: 154459 - DNA, 25 bp, Saccharomyces pastorianus
gagtttctgtatttttctctcacaa

SEQ ID NO: 154460 - DNA, 25 bp, Saccharomyces pastorianus
gtactactattctattgcatctcag

SEQ ID NO: 154461 - DNA, 25 bp, Saccharomyces pastorianus
aaagttcccggcatgatatagctga

SEQ ID NO: 154462 - DNA, 25 bp, Saccharomyces pastorianus
gaacgctgtctttcagtacacaatc

SEQ ID NO: 154463 - DNA, 25 bp, Saccharomyces pastorianus
ttatctctggagtcttcgaagttag

SEQ ID NO: 154464 - DNA, 25 bp, Saccharomyces pastorianus
gtttatttgtcatatccatcattgg

SEQ ID NO: 154465 - DNA, 25 bp, Saccharomyces pastorianus
tctctcacaacggttttttccatgt

SEQ ID NO: 154466 - DNA, 25 bp, Saccharomyces pastorianus
gcgaaattgcatcgaggtacttaat

SEQ ID NO: 154467 - DNA, 25 bp, Saccharomyces pastorianus
gaatactaccctactgttcagaatg

SEQ ID NO: 154468 - DNA, 25 bp, Saccharomyces pastorianus
gacgatttgcctaccatattatcat

SEQ ID NO: 154469 - DNA, 25 bp, Saccharomyces pastorianus
acatacccgtatgcttggatctgaa

SEQ ID NO: 154470 - DNA, 25 bp, Saccharomyces pastorianus
tggcaagttctttcttggacaaaga

SEQ ID NO: 154471 - DNA, 25 bp, Saccharomyces pastorianus
ttcttcaccggatacttcatatacc

SEQ ID NO: 154472 - DNA, 25 bp, Saccharomyces pastorianus
aaacgcaagcggtagattcgggagt

SEQ ID NO: 154473 - DNA, 25 bp, Saccharomyces pastorianus
tttttgctcataaagtggaaactgg

SEQ ID NO: 154474 - DNA, 25 bp, Saccharomyces pastorianus
aatgtccccgaaaaacacaatcatg

SEQ ID NO: 154475 - DNA, 25 bp, Saccharomyces pastorianus
gcaaaatttttgctcataaagtgga

SEQ ID NO: 154476 - DNA, 25 bp, Saccharomyces pastorianus
gaatatcattcttcaccggatactt

SEQ ID NO: 154477 - DNA, 25 bp, Saccharomyces pastorianus
aacttcattggcaagttctttcttg

SEQ ID NO: 154478 - DNA, 25 bp, Saccharomyces pastorianus
caagcggtagattcgggagtttgaa

SEQ ID NO: 154479 - DNA, 25 bp, Saccharomyces pastorianus
ggatacttcatatacccaccaaatg

SEQ ID NO: 154480 - DNA, 25 bp, Saccharomyces pastorianus
acaattaagaagaaacgcaagcggt

SEQ ID NO: 154481 - DNA, 25 bp, Saccharomyces pastorianus
agtgttctttcatctgcagtgccct

SEQ ID NO: 154482 - DNA, 25 bp, Saccharomyces pastorianus
cttgccagacacattacgccagcaa

SEQ ID NO: 154483 - DNA, 25 bp, Saccharomyces pastorianus
agtatacaccgtgacatactactga

SEQ ID NO: 154484 - DNA, 25 bp, Saccharomyces pastorianus
ggaacagtatcgacaaatatttggc

SEQ ID NO: 154485 - DNA, 25 bp, Saccharomyces pastorianus
ggtgcagtacctctttccacacaat

SEQ ID NO: 154486 - DNA, 25 bp, Saccharomyces pastorianus
atatttggcattgccgaaccaatga

SEQ ID NO: 154487 - DNA, 25 bp, Saccharomyces pastorianus
aatcgtcaatcgtaccgacttcaac

SEQ ID NO: 154488 - DNA, 25 bp, Saccharomyces pastorianus
gacagacatccattagaatcaacat

SEQ ID NO: 154489 - DNA, 25 bp, Saccharomyces pastorianus
tccacacaattgaatgacagacatc

SEQ ID NO: 154490 - DNA, 25 bp, Saccharomyces pastorianus
gaactgggaaaccacacagcgccaa

SEQ ID NO: 154491 - DNA, 25 bp, Saccharomyces pastorianus
aagaaggcggtgcagtacctctttc

SEQ ID NO: 154492 - DNA, 25 bp, Saccharomyces pastorianus
ttcaccgacaatatgcgaaactgta

SEQ ID NO: 154493 - DNA, 25 bp, Saccharomyces pastorianus
aacttctgacatatcggaaactttt

SEQ ID NO: 154494 - DNA, 25 bp, Saccharomyces pastorianus
atgagctttgttttttacgcaacta

SEQ ID NO: 154495 - DNA, 25 bp, Saccharomyces pastorianus
gctattacttccagggacatccgat

SEQ ID NO: 154496 - DNA, 25 bp, Saccharomyces pastorianus
attgctggccatttggaaacttctg

SEQ ID NO: 154497 - DNA, 25 bp, Saccharomyces pastorianus
cattgtatccccaatggaatgggtt

SEQ ID NO: 154498 - DNA, 25 bp, Saccharomyces pastorianus
atggaaccattttcaccgacaatat

SEQ ID NO: 154499 - DNA, 25 bp, Saccharomyces pastorianus
gttttttacgcaactactatcaatg

SEQ ID NO: 154500 - DNA, 25 bp, Saccharomyces pastorianus
acatccgatatctgacgccttttaa

SEQ ID NO: 154501 - DNA, 25 bp, Saccharomyces pastorianus
aatactcgaggagctattacttcca

SEQ ID NO: 154502 - DNA, 25 bp, Saccharomyces pastorianus
gcgaaactgtaccattgtatcccca

SEQ ID NO: 154503 - DNA, 25 bp, Saccharomyces pastorianus
aaaaccttcttgatcgcagccttga

SEQ ID NO: 154504 - DNA, 25 bp, Saccharomyces pastorianus
tactgcagctactgatgcggagaca

SEQ ID NO: 154505 - DNA, 25 bp, Saccharomyces pastorianus
gcaggtattttattcttagtgttcg

SEQ ID NO: 154506 - DNA, 25 bp, Saccharomyces pastorianus
aaggcatctttaatagccctcctac

SEQ ID NO: 154507 - DNA, 25 bp, Saccharomyces pastorianus
gttgcttttctttctgaacgctata

SEQ ID NO: 154508 - DNA, 25 bp, Saccharomyces pastorianus
tatctccctcgctattatgaccatc

SEQ ID NO: 154509 - DNA, 25 bp, Saccharomyces pastorianus
cagccttgatggcaatgcgtcacaa

SEQ ID NO: 154510 - DNA, 25 bp, Saccharomyces pastorianus
tatgaccatcctttctggtgtggtg

SEQ ID NO: 154511 - DNA, 25 bp, Saccharomyces pastorianus
gaatctgggagttcttcacatttga

SEQ ID NO: 154512 - DNA, 25 bp, Saccharomyces pastorianus
agacttctggtattctcagcagcag

SEQ ID NO: 154513 - DNA, 25 bp, Saccharomyces pastorianus
tgtggtgggtcattcagccgttgct

SEQ ID NO: 154514 - DNA, 25 bp, Saccharomyces pastorianus
aaccagctgggcaaaacaggcaaaa

SEQ ID NO: 154515 - DNA, 25 bp, Saccharomyces pastorianus
gatttatcactagaaagggaccaag

SEQ ID NO: 154516 - DNA, 25 bp, Saccharomyces pastorianus
gtgattcaaacaggacagagctcta

SEQ ID NO: 154517 - DNA, 25 bp, Saccharomyces pastorianus
gaattaaatcagttacgagcccgta

SEQ ID NO: 154518 - DNA, 25 bp, Saccharomyces pastorianus
ttacgagcccgtatcaaccagctgg

SEQ ID NO: 154519 - DNA, 25 bp, Saccharomyces pastorianus
tatgacacggtgattcaaacaggac

SEQ ID NO: 154520 - DNA, 25 bp, Saccharomyces pastorianus
aacgcaacgaatagttttgtgcaag

SEQ ID NO: 154521 - DNA, 25 bp, Saccharomyces pastorianus
gccctctctgcgagatttatcacta

SEQ ID NO: 154522 - DNA, 25 bp, Saccharomyces pastorianus
caagtgaacctgtatatgacacggt

SEQ ID NO: 154523 - DNA, 25 bp, Saccharomyces pastorianus
aggacagagctctaacgcaacgaat

SEQ ID NO: 154524 - DNA, 25 bp, Saccharomyces pastorianus
gagtggtcagccatatatcatcccc

SEQ ID NO: 154525 - DNA, 25 bp, Saccharomyces pastorianus
ggttcacttaaaggcaaagagcgac

SEQ ID NO: 154526 - DNA, 25 bp, Saccharomyces pastorianus
gaaaccctcagctggttcacttaaa

SEQ ID NO: 154527 - DNA, 25 bp, Saccharomyces pastorianus
gcaaaccccaccagtccaggtgaaa

SEQ ID NO: 154528 - DNA, 25 bp, Saccharomyces pastorianus
gtaagcgacgcggattccaccaaca

SEQ ID NO: 154529 - DNA, 25 bp, Saccharomyces pastorianus
acagaaggaaatctagtagccagga

SEQ ID NO: 154530 - DNA, 25 bp, Saccharomyces pastorianus
gtagccaggaaggaaaccctcagct

SEQ ID NO: 154531 - DNA, 25 bp, Saccharomyces pastorianus
gacgcggattccaccaacagaagga

SEQ ID NO: 154532 - DNA, 25 bp, Saccharomyces pastorianus
ctcagctggttcacttaaaggcaaa

SEQ ID NO: 154533 - DNA, 25 bp, Saccharomyces pastorianus
taaaagaaagggatcttcagattcc

SEQ ID NO: 154534 - DNA, 25 bp, Saccharomyces pastorianus
ccaggtgaaagtaagcgacgcggat

SEQ ID NO: 154535 - DNA, 25 bp, Saccharomyces pastorianus
gggagtgaagcaaaccccaccagtc

SEQ ID NO: 154536 - DNA, 25 bp, Saccharomyces pastorianus
tgaccaagtcgaattttacccagtt

SEQ ID NO: 154537 - DNA, 25 bp, Saccharomyces pastorianus
gacttcccagaaggtgcagaaattg

SEQ ID NO: 154538 - DNA, 25 bp, Saccharomyces pastorianus
gattatcaagatttgccatggcaat

SEQ ID NO: 154539 - DNA, 25 bp, Saccharomyces pastorianus
gtgtcacagtcaaacctgacgagga

SEQ ID NO: 154540 - DNA, 25 bp, Saccharomyces pastorianus
agcattccaggagggccagcttggt

SEQ ID NO: 154541 - DNA, 25 bp, Saccharomyces pastorianus
gacaaactatgtctggccgcatctt

SEQ ID NO: 154542 - DNA, 25 bp, Saccharomyces pastorianus
aaagattccatcacagcattccagg

SEQ ID NO: 154543 - DNA, 25 bp, Saccharomyces pastorianus
gcatcttctgaggttccgtggttga

SEQ ID NO: 154544 - DNA, 25 bp, Saccharomyces pastorianus
atattctgagtattctgggcgtttt

SEQ ID NO: 154545 - DNA, 25 bp, Saccharomyces pastorianus
gattatatccgctcctaaatcgggt

SEQ ID NO: 154546 - DNA, 25 bp, Saccharomyces pastorianus
gaagcaggtcaagggctactaatta

SEQ ID NO: 154547 - DNA, 25 bp, Saccharomyces pastorianus
aacgcacatttctcggtagggctag

SEQ ID NO: 154548 - DNA, 25 bp, Saccharomyces pastorianus
gcacatttctcggtagggctaggaa

SEQ ID NO: 154549 - DNA, 25 bp, Saccharomyces pastorianus
catattggtttcattatagagcgtc

SEQ ID NO: 154550 - DNA, 25 bp, Saccharomyces pastorianus
aggcaccaaactataaacgcacatt

SEQ ID NO: 154551 - DNA, 25 bp, Saccharomyces pastorianus
tctcggtagggctaggaacgctttc

SEQ ID NO: 154552 - DNA, 25 bp, Saccharomyces pastorianus
gcgtcaatcaagaaagaggcaccaa

SEQ ID NO: 154553 - DNA, 25 bp, Saccharomyces pastorianus
aacgcatattggtttcattatagag

SEQ ID NO: 154554 - DNA, 25 bp, Saccharomyces pastorianus
taaacgcacatttctcggtagggct

SEQ ID NO: 154555 - DNA, 25 bp, Saccharomyces pastorianus
aactataaacgcacatttctcggta

SEQ ID NO: 154556 - DNA, 25 bp, Saccharomyces pastorianus
catttctcggtagggctaggaacgc

SEQ ID NO: 154557 - DNA, 25 bp, Saccharomyces pastorianus
ggtttcattatagagcgtcaatcaa

SEQ ID NO: 154558 - DNA, 25 bp, Saccharomyces pastorianus
atccggtattgttcagcgaagcctc

SEQ ID NO: 154559 - DNA, 25 bp, Saccharomyces pastorianus
gaatccaacggccaaatcacaaaag

SEQ ID NO: 154560 - DNA, 25 bp, Saccharomyces pastorianus
gtcgattaccaatctccagtgcaat

SEQ ID NO: 154561 - DNA, 25 bp, Saccharomyces pastorianus
gaggatactcttgtcatccggtatt

SEQ ID NO: 154562 - DNA, 25 bp, Saccharomyces pastorianus
gtggtatcagggttcttatatccat

SEQ ID NO: 154563 - DNA, 25 bp, Saccharomyces pastorianus
ttaagaccttttgcggaatccaacg

SEQ ID NO: 154564 - DNA, 25 bp, Saccharomyces pastorianus
gtcaatgctccggaaggtttacctt

SEQ ID NO: 154565 - DNA, 25 bp, Saccharomyces pastorianus
aacaagtcttctgccttaactgcat

SEQ ID NO: 154566 - DNA, 25 bp, Saccharomyces pastorianus
gattccaaggaatccgtcgccggat

SEQ ID NO: 154567 - DNA, 25 bp, Saccharomyces pastorianus
atgcgtgtgttcagcgggtttatca

SEQ ID NO: 154568 - DNA, 25 bp, Saccharomyces pastorianus
tcaactttcggtatttccgcattga

SEQ ID NO: 154569 - DNA, 25 bp, Saccharomyces pastorianus
gttggctatccccttaaagcggagg

SEQ ID NO: 154570 - DNA, 25 bp, Saccharomyces pastorianus
tggaaagctgttcaccagacgctgc

SEQ ID NO: 154571 - DNA, 25 bp, Saccharomyces pastorianus
aaatatacacctccataaatgcccc

SEQ ID NO: 154572 - DNA, 25 bp, Saccharomyces pastorianus
gtaacatttcccgagttggctatcc

SEQ ID NO: 154573 - DNA, 25 bp, Saccharomyces pastorianus
atttggtctctgtatccctggaaag

SEQ ID NO: 154574 - DNA, 25 bp, Saccharomyces pastorianus
aaagattattgccacgggacccatc

SEQ ID NO: 154575 - DNA, 25 bp, Saccharomyces pastorianus
gtttattctattctactgggaccaa

SEQ ID NO: 154576 - DNA, 25 bp, Saccharomyces pastorianus
ttagtgcccgttgattcagctgata

SEQ ID NO: 154577 - DNA, 25 bp, Saccharomyces pastorianus
gcgtgttctgtaactttaaccgagg

SEQ ID NO: 154578 - DNA, 25 bp, Saccharomyces pastorianus
gcaagttaatcttttcgcgaaccat

SEQ ID NO: 154579 - DNA, 25 bp, Saccharomyces pastorianus
cagccaagattgtagcttcgcaagt

SEQ ID NO: 154580 - DNA, 25 bp, Saccharomyces pastorianus
aggttatcggtatcctcgcacggga

SEQ ID NO: 154581 - DNA, 25 bp, Saccharomyces pastorianus
acgatattgggtcattctcgcctga

SEQ ID NO: 154582 - DNA, 25 bp, Saccharomyces pastorianus
cgcacgggagccttaaatctactac

SEQ ID NO: 154583 - DNA, 25 bp, Saccharomyces pastorianus
gatcagtataatgcgcaggccaccg

SEQ ID NO: 154584 - DNA, 25 bp, Saccharomyces pastorianus
aggccaccggcgatcgtacaaagga

SEQ ID NO: 154585 - DNA, 25 bp, Saccharomyces pastorianus
atggccacccgaaaaataactactg

SEQ ID NO: 154586 - DNA, 25 bp, Saccharomyces pastorianus
gacttcagaggattgccacatcgca

SEQ ID NO: 154587 - DNA, 25 bp, Saccharomyces pastorianus
aaatctactacgtggacgaccattt

SEQ ID NO: 154588 - DNA, 25 bp, Saccharomyces pastorianus
ggagagtttgaattcaccgctttta

SEQ ID NO: 154589 - DNA, 25 bp, Saccharomyces pastorianus
gcgccatcaaaagcacaggttatcg

SEQ ID NO: 154590 - DNA, 25 bp, Saccharomyces pastorianus
gacgaccatttaatatggccacccg

SEQ ID NO: 154591 - DNA, 25 bp, Saccharomyces pastorianus
ttcgcgcgtaggtttgcctaattac

SEQ ID NO: 154592 - DNA, 25 bp, Saccharomyces pastorianus
caaatcatttcaacacctctttttt

SEQ ID NO: 154593 - DNA, 25 bp, Saccharomyces pastorianus
gattaccattatacgtcgccgtttc

SEQ ID NO: 154594 - DNA, 25 bp, Saccharomyces pastorianus
attcctcatcaataaagccgccaac

SEQ ID NO: 154595 - DNA, 25 bp, Saccharomyces pastorianus
ctgggaactcggctaacgcttgtaa

SEQ ID NO: 154596 - DNA, 25 bp, Saccharomyces pastorianus
atgaagttcccagccgattaccatt

SEQ ID NO: 154597 - DNA, 25 bp, Saccharomyces pastorianus
actacacttcatatctttgcttctt

SEQ ID NO: 154598 - DNA, 25 bp, Saccharomyces pastorianus
gccgccaacaaagagcacagggtag

SEQ ID NO: 154599 - DNA, 25 bp, Saccharomyces pastorianus
tgcttcttatattttcgcgcgtagg

SEQ ID NO: 154600 - DNA, 25 bp, Saccharomyces pastorianus
gtcgccgtttcgttcatgtaaatat

SEQ ID NO: 154601 - DNA, 25 bp, Saccharomyces pastorianus
tagaaactctgctgtctgggaactc

SEQ ID NO: 154602 - DNA, 25 bp, Saccharomyces pastorianus
gacaagtcgaattccattttgccgg

SEQ ID NO: 154603 - DNA, 25 bp, Saccharomyces pastorianus
ggatttttcccaagttgctcaagtg

SEQ ID NO: 154604 - DNA, 25 bp, Saccharomyces pastorianus
aatatcaataccacagttcggcctc

SEQ ID NO: 154605 - DNA, 25 bp, Saccharomyces pastorianus
tatcgctggccattctagttttcac

SEQ ID NO: 154606 - DNA, 25 bp, Saccharomyces pastorianus
accgctgttcaaagcctggttgatc

SEQ ID NO: 154607 - DNA, 25 bp, Saccharomyces pastorianus
tactgaaagtcgtctgcctggattt

SEQ ID NO: 154608 - DNA, 25 bp, Saccharomyces pastorianus
tccaccaggtgtcatagtctatcgt

SEQ ID NO: 154609 - DNA, 25 bp, Saccharomyces pastorianus
agtgacgactctattatcgctggcc

SEQ ID NO: 154610 - DNA, 25 bp, Saccharomyces pastorianus
tgctcaagtggattcaaccgctgtt

SEQ ID NO: 154611 - DNA, 25 bp, Saccharomyces pastorianus
cgtaaagtgggttccgttcgatcat

SEQ ID NO: 154612 - DNA, 25 bp, Saccharomyces pastorianus
gaatagtgacccaccgatatcgaat

SEQ ID NO: 154613 - DNA, 25 bp, Saccharomyces pastorianus
gattccattccagcgtatgaagaga

SEQ ID NO: 154614 - DNA, 25 bp, Saccharomyces pastorianus
acagagacggacttcacaatggtga

SEQ ID NO: 154615 - DNA, 25 bp, Saccharomyces pastorianus
tactcgtgccccaatctatgtcata

SEQ ID NO: 154616 - DNA, 25 bp, Saccharomyces pastorianus
aagagctcgactgaatatgtgcata

SEQ ID NO: 154617 - DNA, 25 bp, Saccharomyces pastorianus
cgcacaaatcgctagtttatctcct

SEQ ID NO: 154618 - DNA, 25 bp, Saccharomyces pastorianus
atatattctttgtttgccacatcga

SEQ ID NO: 154619 - DNA, 25 bp, Saccharomyces pastorianus
attacagttggctgcgtactcgtgc

SEQ ID NO: 154620 - DNA, 25 bp, Saccharomyces pastorianus
cctcgtatctctttttcctattata

SEQ ID NO: 154621 - DNA, 25 bp, Saccharomyces pastorianus
tgtattcctcctttattggtgcgtt

SEQ ID NO: 154622 - DNA, 25 bp, Saccharomyces pastorianus
tcagatgtcctgtacgattccattc

SEQ ID NO: 154623 - DNA, 25 bp, Saccharomyces pastorianus
ggcaggaagttacctcgtatctctt

SEQ ID NO: 154624 - DNA, 25 bp, Saccharomyces pastorianus
gatccaaatcatgttacctacgtta

SEQ ID NO: 154625 - DNA, 25 bp, Saccharomyces pastorianus
aactttttataccttgcccagagcg

SEQ ID NO: 154626 - DNA, 25 bp, Saccharomyces pastorianus
tcttacgttgtttgtatcatcccac

SEQ ID NO: 154627 - DNA, 25 bp, Saccharomyces pastorianus
tttttataccttgcccagagcgcct

SEQ ID NO: 154628 - DNA, 25 bp, Saccharomyces pastorianus
tacgttgtttgtatcatcccacgat

SEQ ID NO: 154629 - DNA, 25 bp, Saccharomyces pastorianus
taccttgcccagagcgcctcaagaa

SEQ ID NO: 154630 - DNA, 25 bp, Saccharomyces pastorianus
ggaactttttataccttgcccagag

SEQ ID NO: 154631 - DNA, 25 bp, Saccharomyces pastorianus
catcttacgttgtttgtatcatccc

SEQ ID NO: 154632 - DNA, 25 bp, Saccharomyces pastorianus
ttataccttgcccagagcgcctcaa

SEQ ID NO: 154633 - DNA, 25 bp, Saccharomyces pastorianus
ccaaatcatgttacctacgttaggt

SEQ ID NO: 154634 - DNA, 25 bp, Saccharomyces pastorianus
gaactttttataccttgcccagagc

SEQ ID NO: 154635 - DNA, 25 bp, Saccharomyces pastorianus
atgcgggctctatcattgaatgtgg

SEQ ID NO: 154636 - DNA, 25 bp, Saccharomyces pastorianus
gaaatctatgcgggctctatcattg

SEQ ID NO: 154637 - DNA, 25 bp, Saccharomyces pastorianus
agaaatctatgcgggctctatcatt

SEQ ID NO: 154638 - DNA, 25 bp, Saccharomyces pastorianus
cgggctctatcattgaatgtggaac

SEQ ID NO: 154639 - DNA, 25 bp, Saccharomyces pastorianus
atctatgcgggctctatcattgaat

SEQ ID NO: 154640 - DNA, 25 bp, Saccharomyces pastorianus
tgcgggctctatcattgaatgtgga

SEQ ID NO: 154641 - DNA, 25 bp, Saccharomyces pastorianus
tatgcgggctctatcattgaatgtg

SEQ ID NO: 154642 - DNA, 25 bp, Saccharomyces pastorianus
tctatgcgggctctatcattgaatg

SEQ ID NO: 154643 - DNA, 25 bp, Saccharomyces pastorianus
ctatgcgggctctatcattgaatgt

SEQ ID NO: 154644 - DNA, 25 bp, Saccharomyces pastorianus
gcgggctctatcattgaatgtggaa

SEQ ID NO: 154645 - DNA, 25 bp, Saccharomyces pastorianus
aaatctatgcgggctctatcattga

SEQ ID NO: 154646 - DNA, 25 bp, Saccharomyces pastorianus
aagtctaccgaaaaggatcgccatt

SEQ ID NO: 154647 - DNA, 25 bp, Saccharomyces pastorianus
aagctgatgaagcaattcgccgtca

SEQ ID NO: 154648 - DNA, 25 bp, Saccharomyces pastorianus
aattcgccgtcagctgattgacaaa

SEQ ID NO: 154649 - DNA, 25 bp, Saccharomyces pastorianus
gaaagctgatgaaagtctaccgaaa

SEQ ID NO: 154650 - DNA, 25 bp, Saccharomyces pastorianus
ggagaggataccgacaaatttcaag

SEQ ID NO: 154651 - DNA, 25 bp, Saccharomyces pastorianus
gatctgacgactatgattctgacct

SEQ ID NO: 154652 - DNA, 25 bp, Saccharomyces pastorianus
atcagactctgataccgaagtcgaa

SEQ ID NO: 154653 - DNA, 25 bp, Saccharomyces pastorianus
gaagtcgaagccaaacccaaagaga

SEQ ID NO: 154654 - DNA, 25 bp, Saccharomyces pastorianus
gatcgccattaatctgggccattac

SEQ ID NO: 154655 - DNA, 25 bp, Saccharomyces pastorianus
agaggtgtcacaaacttctttgaag

SEQ ID NO: 154656 - DNA, 25 bp, Saccharomyces pastorianus
aatcccaccacgtgaaacatatcat

SEQ ID NO: 154657 - DNA, 25 bp, Saccharomyces pastorianus
attggcgatgatgcaaagcttgtta

SEQ ID NO: 154658 - DNA, 25 bp, Saccharomyces pastorianus
ggaggatttcgtaataaaagagcaa

SEQ ID NO: 154659 - DNA, 25 bp, Saccharomyces pastorianus
cgagcgcattttttgaaagtatggt

SEQ ID NO: 154660 - DNA, 25 bp, Saccharomyces pastorianus
acaatatcgtctcaaaaggagagaa

SEQ ID NO: 154661 - DNA, 25 bp, Saccharomyces pastorianus
aagtcgagcgcattttttgaaagta

SEQ ID NO: 154662 - DNA, 25 bp, Saccharomyces pastorianus
gttaaaaacccaaagtcgagcgcat

SEQ ID NO: 154663 - DNA, 25 bp, Saccharomyces pastorianus
agacgacgtactacaacaatatcgt

SEQ ID NO: 154664 - DNA, 25 bp, Saccharomyces pastorianus
acccaaagtcgagcgcattttttga

SEQ ID NO: 154665 - DNA, 25 bp, Saccharomyces pastorianus
atagcttagagctagaactaagtga

SEQ ID NO: 154666 - DNA, 25 bp, Saccharomyces pastorianus
gatgaagacgacgtactacaacaat

SEQ ID NO: 154667 - DNA, 25 bp, Saccharomyces pastorianus
gatgcaaagcttgttaaaaacccaa

SEQ ID NO: 154668 - DNA, 25 bp, Saccharomyces pastorianus
cagaacatggctcctgaatacgtta

SEQ ID NO: 154669 - DNA, 25 bp, Saccharomyces pastorianus
cgactctttccatgaataccttcag

SEQ ID NO: 154670 - DNA, 25 bp, Saccharomyces pastorianus
aagccgccgagactttagttgagaa

SEQ ID NO: 154671 - DNA, 25 bp, Saccharomyces pastorianus
gaatacgttaaagccgccgagactt

SEQ ID NO: 154672 - DNA, 25 bp, Saccharomyces pastorianus
tgtcgttcagttggccaccgactct

SEQ ID NO: 154673 - DNA, 25 bp, Saccharomyces pastorianus
gaaaaacattaccttggcccgatcg

SEQ ID NO: 154674 - DNA, 25 bp, Saccharomyces pastorianus
atgaataccttcagtcgcacgactt

SEQ ID NO: 154675 - DNA, 25 bp, Saccharomyces pastorianus
cacgacttggtgcttgcggagttat

SEQ ID NO: 154676 - DNA, 25 bp, Saccharomyces pastorianus
gttattagctccatggtgtggccac

SEQ ID NO: 154677 - DNA, 25 bp, Saccharomyces pastorianus
cttggcccgatcgactgtacttgca

SEQ ID NO: 154678 - DNA, 25 bp, Saccharomyces pastorianus
tgaagactccgctgtcgttcagttg

SEQ ID NO: 154679 - DNA, 25 bp, Saccharomyces pastorianus
atgttgttgggaattctcttctgcc

SEQ ID NO: 154680 - DNA, 25 bp, Saccharomyces pastorianus
gacgccttgggtcaactaaactgga

SEQ ID NO: 154681 - DNA, 25 bp, Saccharomyces pastorianus
ctcttctgcccatttttgtcaagga

SEQ ID NO: 154682 - DNA, 25 bp, Saccharomyces pastorianus
agatttattctctggctgggcttta

SEQ ID NO: 154683 - DNA, 25 bp, Saccharomyces pastorianus
gtatcccggtgagcaagacgccttg

SEQ ID NO: 154684 - DNA, 25 bp, Saccharomyces pastorianus
gtatctatgttcttagtcgcatcta

SEQ ID NO: 154685 - DNA, 25 bp, Saccharomyces pastorianus
aagtgccctcattgttcagatcgta

SEQ ID NO: 154686 - DNA, 25 bp, Saccharomyces pastorianus
aagagctgacgattctacatccgcc

SEQ ID NO: 154687 - DNA, 25 bp, Saccharomyces pastorianus
gatgatttttcttattgcgtggttt

SEQ ID NO: 154688 - DNA, 25 bp, Saccharomyces pastorianus
caagtggctgttcttttcgttggga

SEQ ID NO: 154689 - DNA, 25 bp, Saccharomyces pastorianus
catatggttgggtttcgcttttcga

SEQ ID NO: 154690 - DNA, 25 bp, Saccharomyces pastorianus
gataagtgttttgaccgttgtaaat

SEQ ID NO: 154691 - DNA, 25 bp, Saccharomyces pastorianus
gttttgaccgttgtaaatgcaatgc

SEQ ID NO: 154692 - DNA, 25 bp, Saccharomyces pastorianus
tttgaccgttgtaaatgcaatgctg

SEQ ID NO: 154693 - DNA, 25 bp, Saccharomyces pastorianus
taaatgcaatgctgggtgcctttat

SEQ ID NO: 154694 - DNA, 25 bp, Saccharomyces pastorianus
gtgttttgaccgttgtaaatgcaat

SEQ ID NO: 154695 - DNA, 25 bp, Saccharomyces pastorianus
ttgtaaatgcaatgctgggtgcctt

SEQ ID NO: 154696 - DNA, 25 bp, Saccharomyces pastorianus
taagtgttttgaccgttgtaaatgc

SEQ ID NO: 154697 - DNA, 25 bp, Saccharomyces pastorianus
tgaccgttgtaaatgcaatgctggg

SEQ ID NO: 154698 - DNA, 25 bp, Saccharomyces pastorianus
aaatgcaatgctgggtgcctttatg

SEQ ID NO: 154699 - DNA, 25 bp, Saccharomyces pastorianus
atgataagtgttttgaccgttgtaa

SEQ ID NO: 154700 - DNA, 25 bp, Saccharomyces pastorianus
gtaaatgcaatgctgggtgccttta

SEQ ID NO: 154701 - DNA, 25 bp, Saccharomyces pastorianus
tattgctcacagtacgatcgttctt

SEQ ID NO: 154702 - DNA, 25 bp, Saccharomyces pastorianus
ttgctgtcacaagccgaacacggta

SEQ ID NO: 154703 - DNA, 25 bp, Saccharomyces pastorianus
gacactcaagctctatgttccattg

SEQ ID NO: 154704 - DNA, 25 bp, Saccharomyces pastorianus
agagattcaagatgctgtccacaat

SEQ ID NO: 154705 - DNA, 25 bp, Saccharomyces pastorianus
agattgttctagctggtggtgccca

SEQ ID NO: 154706 - DNA, 25 bp, Saccharomyces pastorianus
tgccagctggcccaagtgaagtttt

SEQ ID NO: 154707 - DNA, 25 bp, Saccharomyces pastorianus
gtgactgccgccaaaatgtatgttc

SEQ ID NO: 154708 - DNA, 25 bp, Saccharomyces pastorianus
cgttgctgctatggcttacgggaca

SEQ ID NO: 154709 - DNA, 25 bp, Saccharomyces pastorianus
aagctttacaactgccacgtgtgga

SEQ ID NO: 154710 - DNA, 25 bp, Saccharomyces pastorianus
gaagcccttgaaatgtccaaccaat

SEQ ID NO: 154711 - DNA, 25 bp, Saccharomyces pastorianus
aagttggcgcttccaagattgttct

SEQ ID NO: 154712 - DNA, 25 bp, Saccharomyces pastorianus
aatgaaaatgctctcccggataagt

SEQ ID NO: 154713 - DNA, 25 bp, Saccharomyces pastorianus
aataacacgcctctggatgcaaatg

SEQ ID NO: 154714 - DNA, 25 bp, Saccharomyces pastorianus
taatgcctgacgaacgatcgcccat

SEQ ID NO: 154715 - DNA, 25 bp, Saccharomyces pastorianus
ggcaagaccccattcagtgatatac

SEQ ID NO: 154716 - DNA, 25 bp, Saccharomyces pastorianus
ttgtcacgttctaaaccattgccgc

SEQ ID NO: 154717 - DNA, 25 bp, Saccharomyces pastorianus
tccactatctcgatggttcttgagg

SEQ ID NO: 154718 - DNA, 25 bp, Saccharomyces pastorianus
gagttacgaatctccactatctcga

SEQ ID NO: 154719 - DNA, 25 bp, Saccharomyces pastorianus
tacggtactactgcacaacaaactt

SEQ ID NO: 154720 - DNA, 25 bp, Saccharomyces pastorianus
gattatggcttatcaaagacctctt

SEQ ID NO: 154721 - DNA, 25 bp, Saccharomyces pastorianus
acacgagttgataatacccacccca

SEQ ID NO: 154722 - DNA, 25 bp, Saccharomyces pastorianus
catcgatctaatcacggcaagaccc

SEQ ID NO: 154723 - DNA, 25 bp, Saccharomyces pastorianus
ggtttgtctcagcttttcacatgga

SEQ ID NO: 154724 - DNA, 25 bp, Saccharomyces pastorianus
aaagcctcgccatatgtcattgctg

SEQ ID NO: 154725 - DNA, 25 bp, Saccharomyces pastorianus
gttattgccttctgtgctgcatctc

SEQ ID NO: 154726 - DNA, 25 bp, Saccharomyces pastorianus
actgccatttgtttatcccatctta

SEQ ID NO: 154727 - DNA, 25 bp, Saccharomyces pastorianus
tattggccatttctggtttgtctca

SEQ ID NO: 154728 - DNA, 25 bp, Saccharomyces pastorianus
ttgattgcactttatgtcggctaca

SEQ ID NO: 154729 - DNA, 25 bp, Saccharomyces pastorianus
ggtggtggtactaaagcctcgccat

SEQ ID NO: 154730 - DNA, 25 bp, Saccharomyces pastorianus
tttcgaaaactacttggctatgcca

SEQ ID NO: 154731 - DNA, 25 bp, Saccharomyces pastorianus
gtgtttctgcattgtttgccgttat

SEQ ID NO: 154732 - DNA, 25 bp, Saccharomyces pastorianus
aaggttttctcctacatcgacagag

SEQ ID NO: 154733 - DNA, 25 bp, Saccharomyces pastorianus
gggatctgcctacgcttgcattatg

SEQ ID NO: 154734 - DNA, 25 bp, Saccharomyces pastorianus
attctgctgctaaaccatcgagtac

SEQ ID NO: 154735 - DNA, 25 bp, Saccharomyces pastorianus
gtgctgccatacaacatcgagcgtg

SEQ ID NO: 154736 - DNA, 25 bp, Saccharomyces pastorianus
atttcatactgccatgcgctaggaa

SEQ ID NO: 154737 - DNA, 25 bp, Saccharomyces pastorianus
caacatgagcgcacgggccatagaa

SEQ ID NO: 154738 - DNA, 25 bp, Saccharomyces pastorianus
aacactgggctttggtagcaccggc

SEQ ID NO: 154739 - DNA, 25 bp, Saccharomyces pastorianus
agtaacgacgattcagtgctgccat

SEQ ID NO: 154740 - DNA, 25 bp, Saccharomyces pastorianus
gtaacctgtaccttatcctggaata

SEQ ID NO: 154741 - DNA, 25 bp, Saccharomyces pastorianus
gagcgtgaggccatcaattgcttca

SEQ ID NO: 154742 - DNA, 25 bp, Saccharomyces pastorianus
actgttcaacttgcttgtggaccac

SEQ ID NO: 154743 - DNA, 25 bp, Saccharomyces pastorianus
aaggtccaacttgcgcaacatgagc

SEQ ID NO: 154744 - DNA, 25 bp, Saccharomyces pastorianus
catcgagtactataggcccatggaa

SEQ ID NO: 154745 - DNA, 25 bp, Saccharomyces pastorianus
atattccccactattcctaggttag

SEQ ID NO: 154746 - DNA, 25 bp, Saccharomyces pastorianus
ttgacgcagaaactctctccacaag

SEQ ID NO: 154747 - DNA, 25 bp, Saccharomyces pastorianus
acagctcgagtaatttgtttccaga

SEQ ID NO: 154748 - DNA, 25 bp, Saccharomyces pastorianus
acgcgcagctgatgttgaaaactta

SEQ ID NO: 154749 - DNA, 25 bp, Saccharomyces pastorianus
tttccagagggaaaggtgccccaag

SEQ ID NO: 154750 - DNA, 25 bp, Saccharomyces pastorianus
ttagcgccgccagcttcaaaaatta

SEQ ID NO: 154751 - DNA, 25 bp, Saccharomyces pastorianus
gaagatgcatctacattgacgcaga

SEQ ID NO: 154752 - DNA, 25 bp, Saccharomyces pastorianus
cattataactggaaacgcttggcta

SEQ ID NO: 154753 - DNA, 25 bp, Saccharomyces pastorianus
ggtcaccatcctatattgagctctt

SEQ ID NO: 154754 - DNA, 25 bp, Saccharomyces pastorianus
gacctctttggtgattttattccta

SEQ ID NO: 154755 - DNA, 25 bp, Saccharomyces pastorianus
cgcttggctagtcaagtctccttaa

SEQ ID NO: 154756 - DNA, 25 bp, Saccharomyces pastorianus
caattggaagaggtcaagcaccctt

SEQ ID NO: 154757 - DNA, 25 bp, Saccharomyces pastorianus
atctgatttcgatgctactcacgag

SEQ ID NO: 154758 - DNA, 25 bp, Saccharomyces pastorianus
aagaggtcaagcacccttcaacaga

SEQ ID NO: 154759 - DNA, 25 bp, Saccharomyces pastorianus
gatttcgatgctactcacgagaaga

SEQ ID NO: 154760 - DNA, 25 bp, Saccharomyces pastorianus
gaacatagggctgttaatagcaaac

SEQ ID NO: 154761 - DNA, 25 bp, Saccharomyces pastorianus
aatagcaaactttccggtgcatctg

SEQ ID NO: 154762 - DNA, 25 bp, Saccharomyces pastorianus
atacggcaccataacaacatttaga

SEQ ID NO: 154763 - DNA, 25 bp, Saccharomyces pastorianus
atggccaaagatttactctgtgtaa

SEQ ID NO: 154764 - DNA, 25 bp, Saccharomyces pastorianus
aagcacccttcaacagacgaacata

SEQ ID NO: 154765 - DNA, 25 bp, Saccharomyces pastorianus
agaaaagatcatacggcaccataac

SEQ ID NO: 154766 - DNA, 25 bp, Saccharomyces pastorianus
aactttccggtgcatctgatttcga

SEQ ID NO: 154767 - DNA, 25 bp, Saccharomyces pastorianus
ctggcccgtggaactgcaatacaaa

SEQ ID NO: 154768 - DNA, 25 bp, Saccharomyces pastorianus
agcactctacgttttgatcgattga

SEQ ID NO: 154769 - DNA, 25 bp, Saccharomyces pastorianus
gaacataccaccatccaaggagata

SEQ ID NO: 154770 - DNA, 25 bp, Saccharomyces pastorianus
agaattagccaaatgctggcccgtg

SEQ ID NO: 154771 - DNA, 25 bp, Saccharomyces pastorianus
ttatctcttcttcgtcagttgctga

SEQ ID NO: 154772 - DNA, 25 bp, Saccharomyces pastorianus
gccctccaagatccctaagttgaaa

SEQ ID NO: 154773 - DNA, 25 bp, Saccharomyces pastorianus
cattatattctactgctcacgagct

SEQ ID NO: 154774 - DNA, 25 bp, Saccharomyces pastorianus
attatcctctgcatttatctcttct

SEQ ID NO: 154775 - DNA, 25 bp, Saccharomyces pastorianus
agttactacacttcagatggatcaa

SEQ ID NO: 154776 - DNA, 25 bp, Saccharomyces pastorianus
gttgctgacttgattacgaaggcta

SEQ ID NO: 154777 - DNA, 25 bp, Saccharomyces pastorianus
gagctttgcgcttatgattccgaaa

SEQ ID NO: 154778 - DNA, 25 bp, Saccharomyces pastorianus
gactggacggataatgtgttcactc

SEQ ID NO: 154779 - DNA, 25 bp, Saccharomyces pastorianus
atgtgttcactcaatcagtattcta

SEQ ID NO: 154780 - DNA, 25 bp, Saccharomyces pastorianus
acctgtcgtctctttactctgaaaa

SEQ ID NO: 154781 - DNA, 25 bp, Saccharomyces pastorianus
atcagtattctatcacgggtcagat

SEQ ID NO: 154782 - DNA, 25 bp, Saccharomyces pastorianus
caaactatccaaatctgttgtcgag

SEQ ID NO: 154783 - DNA, 25 bp, Saccharomyces pastorianus
tgttgtcgagaccacaccgctaaat

SEQ ID NO: 154784 - DNA, 25 bp, Saccharomyces pastorianus
gggaagttctttgtctgcgtgtaca

SEQ ID NO: 154785 - DNA, 25 bp, Saccharomyces pastorianus
gataaatcactttcagactggacgg

SEQ ID NO: 154786 - DNA, 25 bp, Saccharomyces pastorianus
caccgctaaatggtcattcattgtt

SEQ ID NO: 154787 - DNA, 25 bp, Saccharomyces pastorianus
gagaacgatgaaaccttatttaaca

SEQ ID NO: 154788 - DNA, 25 bp, Saccharomyces pastorianus
ttctttgtctgcgtgtacaagtccc

SEQ ID NO: 154789 - DNA, 25 bp, Saccharomyces pastorianus
aacgaacccggtgtcttgtccagag

SEQ ID NO: 154790 - DNA, 25 bp, Saccharomyces pastorianus
gacaaatcgaagacttggtccccgt

SEQ ID NO: 154791 - DNA, 25 bp, Saccharomyces pastorianus
ctggaatgccaacagtgccgtttca

SEQ ID NO: 154792 - DNA, 25 bp, Saccharomyces pastorianus
gactcccaagaattggtcgccgaaa

SEQ ID NO: 154793 - DNA, 25 bp, Saccharomyces pastorianus
gggtggttgcttcttcatgtgctac

SEQ ID NO: 154794 - DNA, 25 bp, Saccharomyces pastorianus
atgtgctaccatggtgcgttgcagt

SEQ ID NO: 154795 - DNA, 25 bp, Saccharomyces pastorianus
tgccgtttcatccatcatttacgaa

SEQ ID NO: 154796 - DNA, 25 bp, Saccharomyces pastorianus
gctagtgatggccagaatctcttta

SEQ ID NO: 154797 - DNA, 25 bp, Saccharomyces pastorianus
gccgtcctagactataccaattctg

SEQ ID NO: 154798 - DNA, 25 bp, Saccharomyces pastorianus
agagtctcgggtacgttagctgcca

SEQ ID NO: 154799 - DNA, 25 bp, Saccharomyces pastorianus
gctgccagaggctttaacattgatt

SEQ ID NO: 154800 - DNA, 25 bp, Saccharomyces pastorianus
ttagcgctgctggacaattttcaca

SEQ ID NO: 154801 - DNA, 25 bp, Saccharomyces pastorianus
attcctgtgatcatgtgggtaccca

SEQ ID NO: 154802 - DNA, 25 bp, Saccharomyces pastorianus
aactttccacgattctttagcgctg

SEQ ID NO: 154803 - DNA, 25 bp, Saccharomyces pastorianus
gatggttcatctcctcacagtattc

SEQ ID NO: 154804 - DNA, 25 bp, Saccharomyces pastorianus
gaatacatcgactcacatgggtgga

SEQ ID NO: 154805 - DNA, 25 bp, Saccharomyces pastorianus
agggtatttacgcactctgacggca

SEQ ID NO: 154806 - DNA, 25 bp, Saccharomyces pastorianus
tgacggcactccacaactactgttg

SEQ ID NO: 154807 - DNA, 25 bp, Saccharomyces pastorianus
catgggtggattgcgctgaccatac

SEQ ID NO: 154808 - DNA, 25 bp, Saccharomyces pastorianus
ggctgttcaaagtcattcaacccat

SEQ ID NO: 154809 - DNA, 25 bp, Saccharomyces pastorianus
ttcccgaggcggtggtcaattggct

SEQ ID NO: 154810 - DNA, 25 bp, Saccharomyces pastorianus
caccatcagtagttacttgcccata

SEQ ID NO: 154811 - DNA, 25 bp, Saccharomyces pastorianus
ttatccagaacagcacggacatggc

SEQ ID NO: 154812 - DNA, 25 bp, Saccharomyces pastorianus
actcattactctttgttctttatta

SEQ ID NO: 154813 - DNA, 25 bp, Saccharomyces pastorianus
ttggacgcgcagagagttagtagaa

SEQ ID NO: 154814 - DNA, 25 bp, Saccharomyces pastorianus
aacagcacggacatggcactaacca

SEQ ID NO: 154815 - DNA, 25 bp, Saccharomyces pastorianus
gtatagctaaattggacgcgcagag

SEQ ID NO: 154816 - DNA, 25 bp, Saccharomyces pastorianus
aaaatcactgtacttctccaaacac

SEQ ID NO: 154817 - DNA, 25 bp, Saccharomyces pastorianus
atggccaatgtcaaaatcactgtac

SEQ ID NO: 154818 - DNA, 25 bp, Saccharomyces pastorianus
gtaatatggagacacatcgtacaaa

SEQ ID NO: 154819 - DNA, 25 bp, Saccharomyces pastorianus
cacatacgcttggttgttctttgga

SEQ ID NO: 154820 - DNA, 25 bp, Saccharomyces pastorianus
tacttctccaaacactgtacgacaa

SEQ ID NO: 154821 - DNA, 25 bp, Saccharomyces pastorianus
aaatgttgcacatacgcttggttgt

SEQ ID NO: 154822 - DNA, 25 bp, Saccharomyces pastorianus
ggcatatttacatatggctgttcca

SEQ ID NO: 154823 - DNA, 25 bp, Saccharomyces pastorianus
catttttggctgaatctatcgattt

SEQ ID NO: 154824 - DNA, 25 bp, Saccharomyces pastorianus
gtcaccttattggtcatactttgtc

SEQ ID NO: 154825 - DNA, 25 bp, Saccharomyces pastorianus
gtataaactggatgggatgctcaac

SEQ ID NO: 154826 - DNA, 25 bp, Saccharomyces pastorianus
gctgttccatctctaatttaccgtt

SEQ ID NO: 154827 - DNA, 25 bp, Saccharomyces pastorianus
tttggcgttttctatttggaacaca

SEQ ID NO: 154828 - DNA, 25 bp, Saccharomyces pastorianus
accgaccaatgcattgttttacgaa

SEQ ID NO: 154829 - DNA, 25 bp, Saccharomyces pastorianus
aaatgtttcaagtatgtgcctcaaa

SEQ ID NO: 154830 - DNA, 25 bp, Saccharomyces pastorianus
ggatgctcaacagtaggtttatcat

SEQ ID NO: 154831 - DNA, 25 bp, Saccharomyces pastorianus
aagtgtgttccttgtattaggcata

SEQ ID NO: 154832 - DNA, 25 bp, Saccharomyces pastorianus
taccatttaattcaacgcccttttg

SEQ ID NO: 154833 - DNA, 25 bp, Saccharomyces pastorianus
agacgataacaaagcatggtatggc

SEQ ID NO: 154834 - DNA, 25 bp, Saccharomyces pastorianus
tcccgtatcatggacgattttcttg

SEQ ID NO: 154835 - DNA, 25 bp, Saccharomyces pastorianus
gattttcttgaacatttgagcaaag

SEQ ID NO: 154836 - DNA, 25 bp, Saccharomyces pastorianus
ggacgattttcttgaacatttgagc

SEQ ID NO: 154837 - DNA, 25 bp, Saccharomyces pastorianus
agtgcataacactaaaaagttgaaa

SEQ ID NO: 154838 - DNA, 25 bp, Saccharomyces pastorianus
aaagttgaaagaatcccgtatcatg

SEQ ID NO: 154839 - DNA, 25 bp, Saccharomyces pastorianus
atcatggacgattttcttgaacatt

SEQ ID NO: 154840 - DNA, 25 bp, Saccharomyces pastorianus
gaatcccgtatcatggacgattttc

SEQ ID NO: 154841 - DNA, 25 bp, Saccharomyces pastorianus
gaaagaatcccgtatcatggacgat

SEQ ID NO: 154842 - DNA, 25 bp, Saccharomyces pastorianus
ccgtatcatggacgattttcttgaa

SEQ ID NO: 154843 - DNA, 25 bp, Saccharomyces pastorianus
tcttgaacatttgagcaaagacgat

SEQ ID NO: 154844 - DNA, 25 bp, Saccharomyces pastorianus
tcctgggagttgttgttgctttcat

SEQ ID NO: 154845 - DNA, 25 bp, Saccharomyces pastorianus
ggtggtaccgcattatgttcttacg

SEQ ID NO: 154846 - DNA, 25 bp, Saccharomyces pastorianus
tgtcgtcggttgtgctatgttttat

SEQ ID NO: 154847 - DNA, 25 bp, Saccharomyces pastorianus
gtttcgctgcaatttacattccttg

SEQ ID NO: 154848 - DNA, 25 bp, Saccharomyces pastorianus
tgtcacaagagctggtggcgtcctg

SEQ ID NO: 154849 - DNA, 25 bp, Saccharomyces pastorianus
gaaatccactgttatgttctttttg

SEQ ID NO: 154850 - DNA, 25 bp, Saccharomyces pastorianus
acattccttggtttggtatcttgga

SEQ ID NO: 154851 - DNA, 25 bp, Saccharomyces pastorianus
aaccgtttgtaccatgaaatccact

SEQ ID NO: 154852 - DNA, 25 bp, Saccharomyces pastorianus
ttcctactgttgtctattggtcact

SEQ ID NO: 154853 - DNA, 25 bp, Saccharomyces pastorianus
tgggttttggttgagtttcgctgca

SEQ ID NO: 154854 - DNA, 25 bp, Saccharomyces pastorianus
ttgctttcattgcttggtacaacgc

SEQ ID NO: 154855 - DNA, 25 bp, Saccharomyces pastorianus
caatgtgtgaaaaccagttgcatca

SEQ ID NO: 154856 - DNA, 25 bp, Saccharomyces pastorianus
tgaaaaccagttgcatcacaaagtg

SEQ ID NO: 154857 - DNA, 25 bp, Saccharomyces pastorianus
gttgcatcacaaagtgggtccagaa

SEQ ID NO: 154858 - DNA, 25 bp, Saccharomyces pastorianus
gggtccagaatgataaatttgcgtt

SEQ ID NO: 154859 - DNA, 25 bp, Saccharomyces pastorianus
gaaagatattttccaaagggaagca

SEQ ID NO: 154860 - DNA, 25 bp, Saccharomyces pastorianus
tttcttggtaagattgaacagtcag

SEQ ID NO: 154861 - DNA, 25 bp, Saccharomyces pastorianus
gatgtcgatgaatttcttggtaaga

SEQ ID NO: 154862 - DNA, 25 bp, Saccharomyces pastorianus
agcaggcttaaatgatgtcgatgaa

SEQ ID NO: 154863 - DNA, 25 bp, Saccharomyces pastorianus
gcatttgactcagaaagatattttc

SEQ ID NO: 154864 - DNA, 25 bp, Saccharomyces pastorianus
gaacagtcaggaattcaatgtgtga

SEQ ID NO: 154865 - DNA, 25 bp, Saccharomyces pastorianus
ggaagcaggcttaaatgatgtcgat

SEQ ID NO: 154866 - DNA, 25 bp, Saccharomyces pastorianus
aaaacctcttaagcgactcttacag

SEQ ID NO: 154867 - DNA, 25 bp, Saccharomyces pastorianus
ttcaaaacctcttaagcgactctta

SEQ ID NO: 154868 - DNA, 25 bp, Saccharomyces pastorianus
gagcttcccttgttactgacaaaac

SEQ ID NO: 154869 - DNA, 25 bp, Saccharomyces pastorianus
ggaagagcttcccttgttactgaca

SEQ ID NO: 154870 - DNA, 25 bp, Saccharomyces pastorianus
aacctcttaagcgactcttacaggg

SEQ ID NO: 154871 - DNA, 25 bp, Saccharomyces pastorianus
gcttcccttgttactgacaaaacga

SEQ ID NO: 154872 - DNA, 25 bp, Saccharomyces pastorianus
taagcgactcttacagggggataaa

SEQ ID NO: 154873 - DNA, 25 bp, Saccharomyces pastorianus
tcccttgttactgacaaaacgaagt

SEQ ID NO: 154874 - DNA, 25 bp, Saccharomyces pastorianus
gatacaagcttcaaaacctcttaag

SEQ ID NO: 154875 - DNA, 25 bp, Saccharomyces pastorianus
aagagcttcccttgttactgacaaa

SEQ ID NO: 154876 - DNA, 25 bp, Saccharomyces pastorianus
aaggaagagcttcccttgttactga

SEQ ID NO: 154877 - DNA, 25 bp, Saccharomyces pastorianus
atatgtctctgaatgccaaggatgg

SEQ ID NO: 154878 - DNA, 25 bp, Saccharomyces pastorianus
tggctatatccattgttttttacag

SEQ ID NO: 154879 - DNA, 25 bp, Saccharomyces pastorianus
tttttacagctaacgccaaacttgg

SEQ ID NO: 154880 - DNA, 25 bp, Saccharomyces pastorianus
tattggcagcgcaaaaaggcttcaa

SEQ ID NO: 154881 - DNA, 25 bp, Saccharomyces pastorianus
gaaagctttaacgaacgcagaattt

SEQ ID NO: 154882 - DNA, 25 bp, Saccharomyces pastorianus
gaaataatatccttctcgaaagctt

SEQ ID NO: 154883 - DNA, 25 bp, Saccharomyces pastorianus
aaagaggtggtattcttctgagata

SEQ ID NO: 154884 - DNA, 25 bp, Saccharomyces pastorianus
ggcttcaagcttacacaacacggtt

SEQ ID NO: 154885 - DNA, 25 bp, Saccharomyces pastorianus
aagccgttttgtaatgacacgaccg

SEQ ID NO: 154886 - DNA, 25 bp, Saccharomyces pastorianus
gacacgaccgagttggcaaaaatca

SEQ ID NO: 154887 - DNA, 25 bp, Saccharomyces pastorianus
atagtggagagatttcgtacagcga

SEQ ID NO: 154888 - DNA, 25 bp, Saccharomyces pastorianus
gttattttcatttttcccatagttg

SEQ ID NO: 154889 - DNA, 25 bp, Saccharomyces pastorianus
ggcctgattaggacatattctctgc

SEQ ID NO: 154890 - DNA, 25 bp, Saccharomyces pastorianus
gctggtgtactgtcgtctacttgta

SEQ ID NO: 154891 - DNA, 25 bp, Saccharomyces pastorianus
gaagacagtctgtaggcctgattag

SEQ ID NO: 154892 - DNA, 25 bp, Saccharomyces pastorianus
tgaaccagaacaaaccggtactctt

SEQ ID NO: 154893 - DNA, 25 bp, Saccharomyces pastorianus
tatgatttagccgtagatccagaaa

SEQ ID NO: 154894 - DNA, 25 bp, Saccharomyces pastorianus
gaatgaacggattcctagctggtgt

SEQ ID NO: 154895 - DNA, 25 bp, Saccharomyces pastorianus
caacagacgctgtgcatgccaatat

SEQ ID NO: 154896 - DNA, 25 bp, Saccharomyces pastorianus
tgtacgttatggttccttacgttgt

SEQ ID NO: 154897 - DNA, 25 bp, Saccharomyces pastorianus
atatagatacagctccagacggttg

SEQ ID NO: 154898 - DNA, 25 bp, Saccharomyces pastorianus
gaactttagtcaagctgtaccctat

SEQ ID NO: 154899 - DNA, 25 bp, Saccharomyces pastorianus
tgttcgcttttttccttttatcact

SEQ ID NO: 154900 - DNA, 25 bp, Saccharomyces pastorianus
tcccgtaaaatccaaattgttcgct

SEQ ID NO: 154901 - DNA, 25 bp, Saccharomyces pastorianus
gcttttttccttttatcactattat

SEQ ID NO: 154902 - DNA, 25 bp, Saccharomyces pastorianus
tcgcttttttccttttatcactatt

SEQ ID NO: 154903 - DNA, 25 bp, Saccharomyces pastorianus
gtttcgtatttagacagatcccgta

SEQ ID NO: 154904 - DNA, 25 bp, Saccharomyces pastorianus
gatcccgtaaaatccaaattgttcg

SEQ ID NO: 154905 - DNA, 25 bp, Saccharomyces pastorianus
ttcgcttttttccttttatcactat

SEQ ID NO: 154906 - DNA, 25 bp, Saccharomyces pastorianus
atttagacagatcccgtaaaatcca

SEQ ID NO: 154907 - DNA, 25 bp, Saccharomyces pastorianus
ttcgtatttagacagatcccgtaaa

SEQ ID NO: 154908 - DNA, 25 bp, Saccharomyces pastorianus
gacagatcccgtaaaatccaaattg

SEQ ID NO: 154909 - DNA, 25 bp, Saccharomyces pastorianus
gtgtttcgtatttagacagatcccg

SEQ ID NO: 154910 - DNA, 25 bp, Saccharomyces pastorianus
ctatacctgttttgcactttcgaaa

SEQ ID NO: 154911 - DNA, 25 bp, Saccharomyces pastorianus
gaaaacttggtacagcatgaactaa

SEQ ID NO: 154912 - DNA, 25 bp, Saccharomyces pastorianus
tctcactttatctaacatttcgcta

SEQ ID NO: 154913 - DNA, 25 bp, Saccharomyces pastorianus
taatacaaggttatcccatacagga

SEQ ID NO: 154914 - DNA, 25 bp, Saccharomyces pastorianus
agcgcagccgaaacgatggatacaa

SEQ ID NO: 154915 - DNA, 25 bp, Saccharomyces pastorianus
agaaatttcaacatagcgcagccga

SEQ ID NO: 154916 - DNA, 25 bp, Saccharomyces pastorianus
taactgactcagttagtttcgcagt

SEQ ID NO: 154917 - DNA, 25 bp, Saccharomyces pastorianus
aatgctgcttcgaaagtcttaagac

SEQ ID NO: 154918 - DNA, 25 bp, Saccharomyces pastorianus
atgcgaactcaataactatacctgt

SEQ ID NO: 154919 - DNA, 25 bp, Saccharomyces pastorianus
gaaaagctttgatttatgccatgat

SEQ ID NO: 154920 - DNA, 25 bp, Saccharomyces pastorianus
ttaagactccaagacgatgtgaaga

SEQ ID NO: 154921 - DNA, 25 bp, Saccharomyces pastorianus
gacgatctgtttcatcatgtatcac

SEQ ID NO: 154922 - DNA, 25 bp, Saccharomyces pastorianus
gaattttgcgggtgggatttcaacg

SEQ ID NO: 154923 - DNA, 25 bp, Saccharomyces pastorianus
ggatcaaagttctctggcgtcaggc

SEQ ID NO: 154924 - DNA, 25 bp, Saccharomyces pastorianus
gatggaagcctctatttattctaag

SEQ ID NO: 154925 - DNA, 25 bp, Saccharomyces pastorianus
gtttaagctatcaggctgtcacaaa

SEQ ID NO: 154926 - DNA, 25 bp, Saccharomyces pastorianus
ataattctagatactgatgcctacg

SEQ ID NO: 154927 - DNA, 25 bp, Saccharomyces pastorianus
gatttcttttcttccaaatttcaag

SEQ ID NO: 154928 - DNA, 25 bp, Saccharomyces pastorianus
gatgcctacgaaaacatagtcctta

SEQ ID NO: 154929 - DNA, 25 bp, Saccharomyces pastorianus
gtgtccattgattctatacggcttg

SEQ ID NO: 154930 - DNA, 25 bp, Saccharomyces pastorianus
acaagatttatctcagcctctgaat

SEQ ID NO: 154931 - DNA, 25 bp, Saccharomyces pastorianus
tacggcttgcgtttttaaacatgac

SEQ ID NO: 154932 - DNA, 25 bp, Saccharomyces pastorianus
tggtctaacatggagggtggcccat

SEQ ID NO: 154933 - DNA, 25 bp, Saccharomyces pastorianus
tttcatttctcgagacggtggtcta

SEQ ID NO: 154934 - DNA, 25 bp, Saccharomyces pastorianus
atatcccgtctccttcatataaaga

SEQ ID NO: 154935 - DNA, 25 bp, Saccharomyces pastorianus
gacaggttctgttggcgatgacaat

SEQ ID NO: 154936 - DNA, 25 bp, Saccharomyces pastorianus
ttattgtatatatcccgtctccttc

SEQ ID NO: 154937 - DNA, 25 bp, Saccharomyces pastorianus
ccttctgctgggatcatattaatga

SEQ ID NO: 154938 - DNA, 25 bp, Saccharomyces pastorianus
ttaagcggacatctcatcactacgg

SEQ ID NO: 154939 - DNA, 25 bp, Saccharomyces pastorianus
ggtggcccataattcttctggatta

SEQ ID NO: 154940 - DNA, 25 bp, Saccharomyces pastorianus
gagcttgccgatgctttattttata

SEQ ID NO: 154941 - DNA, 25 bp, Saccharomyces pastorianus
ggaatcaatatgagcttgccgatgc

SEQ ID NO: 154942 - DNA, 25 bp, Saccharomyces pastorianus
aaaactttcaaatccttctgctggg

SEQ ID NO: 154943 - DNA, 25 bp, Saccharomyces pastorianus
gctaccgccggtgtgaaactaaacg

SEQ ID NO: 154944 - DNA, 25 bp, Saccharomyces pastorianus
aaagatacaactgaacccgctaccg

SEQ ID NO: 154945 - DNA, 25 bp, Saccharomyces pastorianus
caagctttcgaaatttctctctcac

SEQ ID NO: 154946 - DNA, 25 bp, Saccharomyces pastorianus
gactacgcaaatccatgaacccatt

SEQ ID NO: 154947 - DNA, 25 bp, Saccharomyces pastorianus
gaacccatttgatgactcggacgaa

SEQ ID NO: 154948 - DNA, 25 bp, Saccharomyces pastorianus
gtcttgttctttcatgaccaactct

SEQ ID NO: 154949 - DNA, 25 bp, Saccharomyces pastorianus
aaatggttggtatgtcggatctctg

SEQ ID NO: 154950 - DNA, 25 bp, Saccharomyces pastorianus
tctctggtaatatatcccttgacgg

SEQ ID NO: 154951 - DNA, 25 bp, Saccharomyces pastorianus
atgtccaacttctacaccatttgtt

SEQ ID NO: 154952 - DNA, 25 bp, Saccharomyces pastorianus
tgacggaacagtttacgggctttca

SEQ ID NO: 154953 - DNA, 25 bp, Saccharomyces pastorianus
taggcctcctagtccaaatggttgg

SEQ ID NO: 154954 - DNA, 25 bp, Saccharomyces pastorianus
acaggtgttgctttccaattgttca

SEQ ID NO: 154955 - DNA, 25 bp, Saccharomyces pastorianus
ctgcctgtgtaggttccttgatttt

SEQ ID NO: 154956 - DNA, 25 bp, Saccharomyces pastorianus
aatttggcatggagtacccctacag

SEQ ID NO: 154957 - DNA, 25 bp, Saccharomyces pastorianus
tatgcatgcgttattggtcccggta

SEQ ID NO: 154958 - DNA, 25 bp, Saccharomyces pastorianus
gatccttgcaggtatctactacaaa

SEQ ID NO: 154959 - DNA, 25 bp, Saccharomyces pastorianus
ggtccagcaaccaatttgtcggatg

SEQ ID NO: 154960 - DNA, 25 bp, Saccharomyces pastorianus
gtggattctaaatactcggtccctt

SEQ ID NO: 154961 - DNA, 25 bp, Saccharomyces pastorianus
acggtttgcccctatcaaagtatat

SEQ ID NO: 154962 - DNA, 25 bp, Saccharomyces pastorianus
tattttggttatgttcccctctcaa

SEQ ID NO: 154963 - DNA, 25 bp, Saccharomyces pastorianus
gtttgattgatgatgccgccactga

SEQ ID NO: 154964 - DNA, 25 bp, Saccharomyces pastorianus
tttcgctattttggctgcctgtgta

SEQ ID NO: 154965 - DNA, 25 bp, Saccharomyces pastorianus
gggagactatcgaagcattacaagc

SEQ ID NO: 154966 - DNA, 25 bp, Saccharomyces pastorianus
gtacaaatccccaccaatgtgactt

SEQ ID NO: 154967 - DNA, 25 bp, Saccharomyces pastorianus
atgtgactttggtggacccctttga

SEQ ID NO: 154968 - DNA, 25 bp, Saccharomyces pastorianus
aaaagcatcgctaaccagagggaga

SEQ ID NO: 154969 - DNA, 25 bp, Saccharomyces pastorianus
gaaatctgcgccaagttacaggact

SEQ ID NO: 154970 - DNA, 25 bp, Saccharomyces pastorianus
aatgtattcctgagctggtcgacaa

SEQ ID NO: 154971 - DNA, 25 bp, Saccharomyces pastorianus
gaacgcaactacgatgaatacactt

SEQ ID NO: 154972 - DNA, 25 bp, Saccharomyces pastorianus
gttagatgagattcacacgttccat

SEQ ID NO: 154973 - DNA, 25 bp, Saccharomyces pastorianus
agaggatttgttcgctatccaggaa

SEQ ID NO: 154974 - DNA, 25 bp, Saccharomyces pastorianus
agccaatctcacgatgttatcctac

SEQ ID NO: 154975 - DNA, 25 bp, Saccharomyces pastorianus
gttcgacttccctctagcaaagaag

SEQ ID NO: 154976 - DNA, 25 bp, Saccharomyces pastorianus
taccacactcatcaattgactggag

SEQ ID NO: 154977 - DNA, 25 bp, Saccharomyces pastorianus
cttactactacttcatagatttttt

SEQ ID NO: 154978 - DNA, 25 bp, Saccharomyces pastorianus
gtgatatgcttcttcaccgtcctct

SEQ ID NO: 154979 - DNA, 25 bp, Saccharomyces pastorianus
tggcctatcttactactacttcata

SEQ ID NO: 154980 - DNA, 25 bp, Saccharomyces pastorianus
tttttttcatctatccccttccatc

SEQ ID NO: 154981 - DNA, 25 bp, Saccharomyces pastorianus
gcctaataccacactcatcaattga

SEQ ID NO: 154982 - DNA, 25 bp, Saccharomyces pastorianus
ggagatctggcctatcttactacta

SEQ ID NO: 154983 - DNA, 25 bp, Saccharomyces pastorianus
tggttctaccccttcagcgtgaaaa

SEQ ID NO: 154984 - DNA, 25 bp, Saccharomyces pastorianus
caattgactggagatctggcctatc

SEQ ID NO: 154985 - DNA, 25 bp, Saccharomyces pastorianus
tctaccccttcagcgtgaaaaatca

SEQ ID NO: 154986 - DNA, 25 bp, Saccharomyces pastorianus
tgcttctgcctaataccacactcat

SEQ ID NO: 154987 - DNA, 25 bp, Saccharomyces pastorianus
gggtgctttgccaagggtaccaatg

SEQ ID NO: 154988 - DNA, 25 bp, Saccharomyces pastorianus
cgttatctctcaatctttgtccaag

SEQ ID NO: 154989 - DNA, 25 bp, Saccharomyces pastorianus
gaaactatgtacagtgtcgtgcaga

SEQ ID NO: 154990 - DNA, 25 bp, Saccharomyces pastorianus
caagttcacgtgtaatgcgactcat

SEQ ID NO: 154991 - DNA, 25 bp, Saccharomyces pastorianus
catacttggcctgttcgtgttccaa

SEQ ID NO: 154992 - DNA, 25 bp, Saccharomyces pastorianus
gtgactcaagtcgtgaaatgccaga

SEQ ID NO: 154993 - DNA, 25 bp, Saccharomyces pastorianus
gaaaagtcaacacagagcccataaa

SEQ ID NO: 154994 - DNA, 25 bp, Saccharomyces pastorianus
tggatgctttgtttccttgtgttca

SEQ ID NO: 154995 - DNA, 25 bp, Saccharomyces pastorianus
caagtactccaattctgacgccatt

SEQ ID NO: 154996 - DNA, 25 bp, Saccharomyces pastorianus
gttatctgctgactatcctttgtta

SEQ ID NO: 154997 - DNA, 25 bp, Saccharomyces pastorianus
acgccattatctatgtcgggtgctt

SEQ ID NO: 154998 - DNA, 25 bp, Saccharomyces pastorianus
atctgggagctaaaggttcctgcca

SEQ ID NO: 154999 - DNA, 25 bp, Saccharomyces pastorianus
ggttattgcgttatggctcactaca

SEQ ID NO: 155000 - DNA, 25 bp, Saccharomyces pastorianus
taagagattttgaccctgtatcagg

SEQ ID NO: 155001 - DNA, 25 bp, Saccharomyces pastorianus
ggttgcaaccaacgctggaggacta

SEQ ID NO: 155002 - DNA, 25 bp, Saccharomyces pastorianus
gactgttcctaagccaaaagcgttt

SEQ ID NO: 155003 - DNA, 25 bp, Saccharomyces pastorianus
atgctgccttccctttggaggatga

SEQ ID NO: 155004 - DNA, 25 bp, Saccharomyces pastorianus
ggtgtttcaatcttgactgttccta

SEQ ID NO: 155005 - DNA, 25 bp, Saccharomyces pastorianus
atcggtatcatcactggtgtttcaa

SEQ ID NO: 155006 - DNA, 25 bp, Saccharomyces pastorianus
atatgtttccgttggatctgggagc

SEQ ID NO: 155007 - DNA, 25 bp, Saccharomyces pastorianus
aaaagtcttcgtcagagccaggcaa

SEQ ID NO: 155008 - DNA, 25 bp, Saccharomyces pastorianus
gaaacagctgttcattggctcagaa

SEQ ID NO: 155009 - DNA, 25 bp, Saccharomyces pastorianus
gtcaagtgtcatgtcaagcccaaag

SEQ ID NO: 155010 - DNA, 25 bp, Saccharomyces pastorianus
ggttgcattgctaattcttgttcag

SEQ ID NO: 155011 - DNA, 25 bp, Saccharomyces pastorianus
aaaggtcgcgctatggtctgtgcta

SEQ ID NO: 155012 - DNA, 25 bp, Saccharomyces pastorianus
tgactatagtgttgccggacgggac

SEQ ID NO: 155013 - DNA, 25 bp, Saccharomyces pastorianus
cgcatgtgcttctaatctgactcag

SEQ ID NO: 155014 - DNA, 25 bp, Saccharomyces pastorianus
gggagatctcccaacattgtcaatg

SEQ ID NO: 155015 - DNA, 25 bp, Saccharomyces pastorianus
gaagttaaggctgtcgcccagttaa

SEQ ID NO: 155016 - DNA, 25 bp, Saccharomyces pastorianus
aaactgttgcggtggtatcctttga

SEQ ID NO: 155017 - DNA, 25 bp, Saccharomyces pastorianus
ttgttcaggaaccaacgcgtaccgt

SEQ ID NO: 155018 - DNA, 25 bp, Saccharomyces pastorianus
gatactatcaaggatgcggccgcat

SEQ ID NO: 155019 - DNA, 25 bp, Saccharomyces pastorianus
ttgatcaacgcatctgaatccacgg

SEQ ID NO: 155020 - DNA, 25 bp, Saccharomyces pastorianus
gaggtggtgccggtaatatctttca

SEQ ID NO: 155021 - DNA, 25 bp, Saccharomyces pastorianus
gacatcgacgattatatttccccta

SEQ ID NO: 155022 - DNA, 25 bp, Saccharomyces pastorianus
gacaacctgtttgtggtgacttcca

SEQ ID NO: 155023 - DNA, 25 bp, Saccharomyces pastorianus
aggttcctcgttttgcaattggtag

SEQ ID NO: 155024 - DNA, 25 bp, Saccharomyces pastorianus
caaggagccatcagtctttgcatgc

SEQ ID NO: 155025 - DNA, 25 bp, Saccharomyces pastorianus
aacgccccaattgtcgttggtagag

SEQ ID NO: 155026 - DNA, 25 bp, Saccharomyces pastorianus
ttcccctataacttcggatatggtg

SEQ ID NO: 155027 - DNA, 25 bp, Saccharomyces pastorianus
aatggcaatgctttggcggctatca

SEQ ID NO: 155028 - DNA, 25 bp, Saccharomyces pastorianus
gcggctatcaagtccacgttcaaga

SEQ ID NO: 155029 - DNA, 25 bp, Saccharomyces pastorianus
aggtctcgtatcagcgctacaagga

SEQ ID NO: 155030 - DNA, 25 bp, Saccharomyces pastorianus
aatatctttcatgatccgcacctga

SEQ ID NO: 155031 - DNA, 25 bp, Saccharomyces pastorianus
gaaggtctacttcgtaatgtcaaca

SEQ ID NO: 155032 - DNA, 25 bp, Saccharomyces pastorianus
aattcaccatttctgtgtcctactg

SEQ ID NO: 155033 - DNA, 25 bp, Saccharomyces pastorianus
aatgggtgccaaccgtgtttccatc

SEQ ID NO: 155034 - DNA, 25 bp, Saccharomyces pastorianus
tttccatctcctctttgattgcaat

SEQ ID NO: 155035 - DNA, 25 bp, Saccharomyces pastorianus
gtgtattcatcatcacctaatcaga

SEQ ID NO: 155036 - DNA, 25 bp, Saccharomyces pastorianus
gtgtcctactgggttatggttgtga

SEQ ID NO: 155037 - DNA, 25 bp, Saccharomyces pastorianus
tgggtatctccactttagcatccta

SEQ ID NO: 155038 - DNA, 25 bp, Saccharomyces pastorianus
tggtgtttatccatacttagccatg

SEQ ID NO: 155039 - DNA, 25 bp, Saccharomyces pastorianus
gccttttctttacatgagcgtggtt

SEQ ID NO: 155040 - DNA, 25 bp, Saccharomyces pastorianus
gcagcgttcccaagttgctttgatt

SEQ ID NO: 155041 - DNA, 25 bp, Saccharomyces pastorianus
tatttggctcaagatgccttttctt

SEQ ID NO: 155042 - DNA, 25 bp, Saccharomyces pastorianus
gctgaaactcaccagactttagtct

SEQ ID NO: 155043 - DNA, 25 bp, Saccharomyces pastorianus
acttcatactacttgtcagatgctg

SEQ ID NO: 155044 - DNA, 25 bp, Saccharomyces pastorianus
gttgttgtccaaaccgatggtcaat

SEQ ID NO: 155045 - DNA, 25 bp, Saccharomyces pastorianus
tggtgaactaccagcccacaaagtg

SEQ ID NO: 155046 - DNA, 25 bp, Saccharomyces pastorianus
taagattgctcagggtgctaagccg

SEQ ID NO: 155047 - DNA, 25 bp, Saccharomyces pastorianus
gcttccgctagattcggtgtaactt

SEQ ID NO: 155048 - DNA, 25 bp, Saccharomyces pastorianus
gttgcctctggtgtagctaaggcta

SEQ ID NO: 155049 - DNA, 25 bp, Saccharomyces pastorianus
taatgttgggttaatctctcctcct

SEQ ID NO: 155050 - DNA, 25 bp, Saccharomyces pastorianus
gccgatcatatcttagtttctggtc

SEQ ID NO: 155051 - DNA, 25 bp, Saccharomyces pastorianus
gggcagaatcttttaccttggcaac

SEQ ID NO: 155052 - DNA, 25 bp, Saccharomyces pastorianus
gatatcgcaaaaaccaggcactcca

SEQ ID NO: 155053 - DNA, 25 bp, Saccharomyces pastorianus
tggtagagaccctcgtgaatactgc

SEQ ID NO: 155054 - DNA, 25 bp, Saccharomyces pastorianus
aagacttttgcatgtggtgactgta

SEQ ID NO: 155055 - DNA, 25 bp, Saccharomyces pastorianus
gtttcgtgggtcctgaattgatcaa

SEQ ID NO: 155056 - DNA, 25 bp, Saccharomyces pastorianus
gacacggtgcagcatcagttttgaa

SEQ ID NO: 155057 - DNA, 25 bp, Saccharomyces pastorianus
gggtgaagtcactgccatcagaact

SEQ ID NO: 155058 - DNA, 25 bp, Saccharomyces pastorianus
tcaatggccgcgtgtcatgagagtg

SEQ ID NO: 155059 - DNA, 25 bp, Saccharomyces pastorianus
gacgtggtacgattgccacactcga

SEQ ID NO: 155060 - DNA, 25 bp, Saccharomyces pastorianus
aatttcgaattgttgcctgagccac

SEQ ID NO: 155061 - DNA, 25 bp, Saccharomyces pastorianus
gagccaccagtggaacgtgccaaag

SEQ ID NO: 155062 - DNA, 25 bp, Saccharomyces pastorianus
tatcattttgttgtccatgggtttc

SEQ ID NO: 155063 - DNA, 25 bp, Saccharomyces pastorianus
aatctttgattgtctgggccatcca

SEQ ID NO: 155064 - DNA, 25 bp, Saccharomyces pastorianus
taaagttaaggtctgtctctttgca

SEQ ID NO: 155065 - DNA, 25 bp, Saccharomyces pastorianus
tttcaaggcgaaacttttacgtcag

SEQ ID NO: 155066 - DNA, 25 bp, Saccharomyces pastorianus
agaattccaatacgcgactcagata

SEQ ID NO: 155067 - DNA, 25 bp, Saccharomyces pastorianus
gaaagggctcaggtgcatttactaa

SEQ ID NO: 155068 - DNA, 25 bp, Saccharomyces pastorianus
tgaaacccatgttagccaagcctac

SEQ ID NO: 155069 - DNA, 25 bp, Saccharomyces pastorianus
tttgcctttccaggtcttaagtaca

SEQ ID NO: 155070 - DNA, 25 bp, Saccharomyces pastorianus
aaaattccttgatgagtccgttaat

SEQ ID NO: 155071 - DNA, 25 bp, Saccharomyces pastorianus
gttgtcccgggagaattccaatacg

SEQ ID NO: 155072 - DNA, 25 bp, Saccharomyces pastorianus
attctagactgtgaggctgttgctt

SEQ ID NO: 155073 - DNA, 25 bp, Saccharomyces pastorianus
ttgctacaacgatgaaaggctgatt

SEQ ID NO: 155074 - DNA, 25 bp, Saccharomyces pastorianus
gtccgttaatcactcatgcgaaggt

SEQ ID NO: 155075 - DNA, 25 bp, Saccharomyces pastorianus
tgaaatcctgttttccttacaagaa

SEQ ID NO: 155076 - DNA, 25 bp, Saccharomyces pastorianus
ggatggcattccaaaccttcaatgg

SEQ ID NO: 155077 - DNA, 25 bp, Saccharomyces pastorianus
gcagggttcttgagctggatgaaac

SEQ ID NO: 155078 - DNA, 25 bp, Saccharomyces pastorianus
atcgttcgctcaagtgtctgctgaa

SEQ ID NO: 155079 - DNA, 25 bp, Saccharomyces pastorianus
agcgtcttaatggaacctttattgg

SEQ ID NO: 155080 - DNA, 25 bp, Saccharomyces pastorianus
gatggcgggctattttctgaattaa

SEQ ID NO: 155081 - DNA, 25 bp, Saccharomyces pastorianus
gaatcattgtagtcactggcgctaa

SEQ ID NO: 155082 - DNA, 25 bp, Saccharomyces pastorianus
gaaagactcaactcactgcttacaa

SEQ ID NO: 155083 - DNA, 25 bp, Saccharomyces pastorianus
aaataggttgttttgttccagcaga

SEQ ID NO: 155084 - DNA, 25 bp, Saccharomyces pastorianus
gtcactggcgctaatgcatctggaa

SEQ ID NO: 155085 - DNA, 25 bp, Saccharomyces pastorianus
tttatggcgcgatttcagattttga

SEQ ID NO: 155086 - DNA, 25 bp, Saccharomyces pastorianus
agaagcagctgcgtccaaagtaaag

SEQ ID NO: 155087 - DNA, 25 bp, Saccharomyces pastorianus
gaattcgaggcacgcaatctcatag

SEQ ID NO: 155088 - DNA, 25 bp, Saccharomyces pastorianus
gacaatggtgctgagagctccgata

SEQ ID NO: 155089 - DNA, 25 bp, Saccharomyces pastorianus
tccattggcggctgggaattttgta

SEQ ID NO: 155090 - DNA, 25 bp, Saccharomyces pastorianus
aagcgggtcatctcttgtgcaaaag

SEQ ID NO: 155091 - DNA, 25 bp, Saccharomyces pastorianus
gacctgtccgcgtaagacacgaaga

SEQ ID NO: 155092 - DNA, 25 bp, Saccharomyces pastorianus
aacacacacgttatctctagcggtc

SEQ ID NO: 155093 - DNA, 25 bp, Saccharomyces pastorianus
agttattccctgtgagacctgtccg

SEQ ID NO: 155094 - DNA, 25 bp, Saccharomyces pastorianus
gaaggtgtagcgtccaaatctaaga

SEQ ID NO: 155095 - DNA, 25 bp, Saccharomyces pastorianus
atctgccaagccctcattaaagttt

SEQ ID NO: 155096 - DNA, 25 bp, Saccharomyces pastorianus
gaataaaagagtaaccggcgctggc

SEQ ID NO: 155097 - DNA, 25 bp, Saccharomyces pastorianus
gattcatttctcaacaataagtatt

SEQ ID NO: 155098 - DNA, 25 bp, Saccharomyces pastorianus
tcatttctcaacaataagtattctt

SEQ ID NO: 155099 - DNA, 25 bp, Saccharomyces pastorianus
aaggcgattcatttctcaacaataa

SEQ ID NO: 155100 - DNA, 25 bp, Saccharomyces pastorianus
gcgattcatttctcaacaataagta

SEQ ID NO: 155101 - DNA, 25 bp, Saccharomyces pastorianus
gaaggcgattcatttctcaacaata

SEQ ID NO: 155102 - DNA, 25 bp, Saccharomyces pastorianus
ggcgattcatttctcaacaataagt

SEQ ID NO: 155103 - DNA, 25 bp, Saccharomyces pastorianus
ttctcaacaataagtattcttggag

SEQ ID NO: 155104 - DNA, 25 bp, Saccharomyces pastorianus
ataagtattcttggagaaagcaatt

SEQ ID NO: 155105 - DNA, 25 bp, Saccharomyces pastorianus
caacaataagtattcttggagaaag

SEQ ID NO: 155106 - DNA, 25 bp, Saccharomyces pastorianus
aggcgattcatttctcaacaataag

SEQ ID NO: 155107 - DNA, 25 bp, Saccharomyces pastorianus
tgaaggcgattcatttctcaacaat

SEQ ID NO: 155108 - DNA, 25 bp, Saccharomyces pastorianus
gggaagtaccaattgcctgcaaaaa

SEQ ID NO: 155109 - DNA, 25 bp, Saccharomyces pastorianus
ttttgagggaactcactagcctgat

SEQ ID NO: 155110 - DNA, 25 bp, Saccharomyces pastorianus
ctagcctgatgataacaccgtttgt

SEQ ID NO: 155111 - DNA, 25 bp, Saccharomyces pastorianus
ttgccgtgaacggaagtcatacact

SEQ ID NO: 155112 - DNA, 25 bp, Saccharomyces pastorianus
cagccggcaggattgtagatttctt

SEQ ID NO: 155113 - DNA, 25 bp, Saccharomyces pastorianus
aaggctatccgaataatgaaggcga

SEQ ID NO: 155114 - DNA, 25 bp, Saccharomyces pastorianus
tttcgaccccgaagagacgctcaag

SEQ ID NO: 155115 - DNA, 25 bp, Saccharomyces pastorianus
gaagatacacacagcatggatggag

SEQ ID NO: 155116 - DNA, 25 bp, Saccharomyces pastorianus
tgtactttggttttcgttgccctcg

SEQ ID NO: 155117 - DNA, 25 bp, Saccharomyces pastorianus
atttaccgccgaagaccatagcgat

SEQ ID NO: 155118 - DNA, 25 bp, Saccharomyces pastorianus
gaatatacacactatctaccaaagg

SEQ ID NO: 155119 - DNA, 25 bp, Saccharomyces pastorianus
acaccgctgttttactgagacacat

SEQ ID NO: 155120 - DNA, 25 bp, Saccharomyces pastorianus
gagacacatcattattctaagcaat

SEQ ID NO: 155121 - DNA, 25 bp, Saccharomyces pastorianus
gctgttttactgagacacatcatta

SEQ ID NO: 155122 - DNA, 25 bp, Saccharomyces pastorianus
gacaatacaccgctgttttactgag

SEQ ID NO: 155123 - DNA, 25 bp, Saccharomyces pastorianus
ggtaataaggccacgttcggacaat

SEQ ID NO: 155124 - DNA, 25 bp, Saccharomyces pastorianus
ggatcgacggtaataaggccacgtt

SEQ ID NO: 155125 - DNA, 25 bp, Saccharomyces pastorianus
gttcggacaatacaccgctgtttta

SEQ ID NO: 155126 - DNA, 25 bp, Saccharomyces pastorianus
ttattctaagcaatcaacactacct

SEQ ID NO: 155127 - DNA, 25 bp, Saccharomyces pastorianus
gcaatcaacactaccttaaaaacgt

SEQ ID NO: 155128 - DNA, 25 bp, Saccharomyces pastorianus
taaggccacgttcggacaatacacc

SEQ ID NO: 155129 - DNA, 25 bp, Saccharomyces pastorianus
aatacaccgctgttttactgagaca

SEQ ID NO: 155130 - DNA, 25 bp, Saccharomyces pastorianus
atgacggtattgctgattctgatga

SEQ ID NO: 155131 - DNA, 25 bp, Saccharomyces pastorianus
gacgcaacccaagaagaatccaatg

SEQ ID NO: 155132 - DNA, 25 bp, Saccharomyces pastorianus
aaaaagaacatttccatttcatgcc

SEQ ID NO: 155133 - DNA, 25 bp, Saccharomyces pastorianus
atgccctagaactcatgatgcgtta

SEQ ID NO: 155134 - DNA, 25 bp, Saccharomyces pastorianus
gagctgcaccttctgatagaactaa

SEQ ID NO: 155135 - DNA, 25 bp, Saccharomyces pastorianus
gaaagaggtcattgccaaatcaaaa

SEQ ID NO: 155136 - DNA, 25 bp, Saccharomyces pastorianus
tggagcaacagcgtcttgatcgtat

SEQ ID NO: 155137 - DNA, 25 bp, Saccharomyces pastorianus
tccaatggaacctaagaccgatcta

SEQ ID NO: 155138 - DNA, 25 bp, Saccharomyces pastorianus
gaattgatgatgacgcaacccaaga

SEQ ID NO: 155139 - DNA, 25 bp, Saccharomyces pastorianus
aatttcgaggatgttatgtctgaat

SEQ ID NO: 155140 - DNA, 25 bp, Saccharomyces pastorianus
attggacaaaagagctgcaccttct

SEQ ID NO: 155141 - DNA, 25 bp, Saccharomyces pastorianus
atcagggttaactgtacgctttaag

SEQ ID NO: 155142 - DNA, 25 bp, Saccharomyces pastorianus
attctatcatgtgttatcagggtta

SEQ ID NO: 155143 - DNA, 25 bp, Saccharomyces pastorianus
ctcactaggagggaatatgctacca

SEQ ID NO: 155144 - DNA, 25 bp, Saccharomyces pastorianus
gggaatatgctaccaatccgagtaa

SEQ ID NO: 155145 - DNA, 25 bp, Saccharomyces pastorianus
gaactataccgaaaaggccattcta

SEQ ID NO: 155146 - DNA, 25 bp, Saccharomyces pastorianus
gcattacttcggagaactataccga

SEQ ID NO: 155147 - DNA, 25 bp, Saccharomyces pastorianus
aatcttttcagagatctcactagga

SEQ ID NO: 155148 - DNA, 25 bp, Saccharomyces pastorianus
attcatgctccgcattacttcggag

SEQ ID NO: 155149 - DNA, 25 bp, Saccharomyces pastorianus
aggccattctatcatgtgttatcag

SEQ ID NO: 155150 - DNA, 25 bp, Saccharomyces pastorianus
aatggtgcccatttattcatgctcc

SEQ ID NO: 155151 - DNA, 25 bp, Saccharomyces pastorianus
taccaatccgagtaaaactcctcat

SEQ ID NO: 155152 - DNA, 25 bp, Saccharomyces pastorianus
ttttctcacctgaagaagttagagc

SEQ ID NO: 155153 - DNA, 25 bp, Saccharomyces pastorianus
tacagtaaaagaggtccaattcggt

SEQ ID NO: 155154 - DNA, 25 bp, Saccharomyces pastorianus
taaacgaccctaggttaggctctat

SEQ ID NO: 155155 - DNA, 25 bp, Saccharomyces pastorianus
gagcgaaaattggtggtctaaacga

SEQ ID NO: 155156 - DNA, 25 bp, Saccharomyces pastorianus
ggttaggctctattgatcgtaattt

SEQ ID NO: 155157 - DNA, 25 bp, Saccharomyces pastorianus
gtcctggtcattttggtcacataga

SEQ ID NO: 155158 - DNA, 25 bp, Saccharomyces pastorianus
gtcacatagatttagcaaaacctgt

SEQ ID NO: 155159 - DNA, 25 bp, Saccharomyces pastorianus
gtgctccactccgtacagtaaaaga

SEQ ID NO: 155160 - DNA, 25 bp, Saccharomyces pastorianus
gcaaaacctgtatttcatgttggtt

SEQ ID NO: 155161 - DNA, 25 bp, Saccharomyces pastorianus
acagtattctagtgctccactccgt

SEQ ID NO: 155162 - DNA, 25 bp, Saccharomyces pastorianus
tatgaacgaatgtcctggtcatttt

SEQ ID NO: 155163 - DNA, 25 bp, Saccharomyces pastorianus
aaaatagtcatctgaatcctggaaa

SEQ ID NO: 155164 - DNA, 25 bp, Saccharomyces pastorianus
gaacgatagccaaaactgcctacga

SEQ ID NO: 155165 - DNA, 25 bp, Saccharomyces pastorianus
aaatcataacaacatgccacaccgc

SEQ ID NO: 155166 - DNA, 25 bp, Saccharomyces pastorianus
gaatgacacggaagcaaagtccata

SEQ ID NO: 155167 - DNA, 25 bp, Saccharomyces pastorianus
atcctggaaatgacttcggccacca

SEQ ID NO: 155168 - DNA, 25 bp, Saccharomyces pastorianus
tgccacaccgcaatgcatacacaga

SEQ ID NO: 155169 - DNA, 25 bp, Saccharomyces pastorianus
gaatctacgaatgacacggaagcaa

SEQ ID NO: 155170 - DNA, 25 bp, Saccharomyces pastorianus
gcaatgcatacacagaatctacgaa

SEQ ID NO: 155171 - DNA, 25 bp, Saccharomyces pastorianus
accaccagggtgcagaatgtacgat

SEQ ID NO: 155172 - DNA, 25 bp, Saccharomyces pastorianus
aaactgcctacgacagagggaagaa

SEQ ID NO: 155173 - DNA, 25 bp, Saccharomyces pastorianus
aatgacttcggccaccaccagggtg

SEQ ID NO: 155174 - DNA, 25 bp, Saccharomyces pastorianus
ttagtaccgctgttatcttttccat

SEQ ID NO: 155175 - DNA, 25 bp, Saccharomyces pastorianus
aaatggcccgtcttcatatagaata

SEQ ID NO: 155176 - DNA, 25 bp, Saccharomyces pastorianus
cattcatatttcaccactagccaaa

SEQ ID NO: 155177 - DNA, 25 bp, Saccharomyces pastorianus
gttaatcgctccctatatttcagat

SEQ ID NO: 155178 - DNA, 25 bp, Saccharomyces pastorianus
aatagccatactcgtatcattcctc

SEQ ID NO: 155179 - DNA, 25 bp, Saccharomyces pastorianus
atcgggataatctctgctgtggttc

SEQ ID NO: 155180 - DNA, 25 bp, Saccharomyces pastorianus
ctgtggttcctctttatcaagctga

SEQ ID NO: 155181 - DNA, 25 bp, Saccharomyces pastorianus
cggtggcttggtgctattaatcgtc

SEQ ID NO: 155182 - DNA, 25 bp, Saccharomyces pastorianus
aactcattacaggtggcatccggtg

SEQ ID NO: 155183 - DNA, 25 bp, Saccharomyces pastorianus
ttaaaacctacattgctccgaacca

SEQ ID NO: 155184 - DNA, 25 bp, Saccharomyces pastorianus
gggcatgatattccttccagagagt

SEQ ID NO: 155185 - DNA, 25 bp, Saccharomyces pastorianus
taatgaaagtttccccgacgacata

SEQ ID NO: 155186 - DNA, 25 bp, Saccharomyces pastorianus
ggtgctttcatcaacatcaacgagt

SEQ ID NO: 155187 - DNA, 25 bp, Saccharomyces pastorianus
tgctgtcgccctgaagaatgaacca

SEQ ID NO: 155188 - DNA, 25 bp, Saccharomyces pastorianus
ggatctccaaaaagtgccacctcga

SEQ ID NO: 155189 - DNA, 25 bp, Saccharomyces pastorianus
taatgcgtgtggtgctttcatcaac

SEQ ID NO: 155190 - DNA, 25 bp, Saccharomyces pastorianus
atagaagacttttcgccaagcgttt

SEQ ID NO: 155191 - DNA, 25 bp, Saccharomyces pastorianus
cgaagacttccgagatgctagctaa

SEQ ID NO: 155192 - DNA, 25 bp, Saccharomyces pastorianus
cccgacgacatacctttagctaaag

SEQ ID NO: 155193 - DNA, 25 bp, Saccharomyces pastorianus
attcatggcacttcaacatcagcag

SEQ ID NO: 155194 - DNA, 25 bp, Saccharomyces pastorianus
aacgagttcgcattacctgctggat

SEQ ID NO: 155195 - DNA, 25 bp, Saccharomyces pastorianus
tggaagacgattttgctgtcgccct

SEQ ID NO: 155196 - DNA, 25 bp, Saccharomyces pastorianus
attctgcaatcgctatccggtggag

SEQ ID NO: 155197 - DNA, 25 bp, Saccharomyces pastorianus
aaactgattcaacaggtcccaccag

SEQ ID NO: 155198 - DNA, 25 bp, Saccharomyces pastorianus
acatcgcagcggcaatggtaccatt

SEQ ID NO: 155199 - DNA, 25 bp, Saccharomyces pastorianus
aagagggcacgagcttaaccattca

SEQ ID NO: 155200 - DNA, 25 bp, Saccharomyces pastorianus
tggaggccacgataatcacggtaat

SEQ ID NO: 155201 - DNA, 25 bp, Saccharomyces pastorianus
gcaggatgccgttcaactttacggt

SEQ ID NO: 155202 - DNA, 25 bp, Saccharomyces pastorianus
gaccaatattaatttcgctagcgga

SEQ ID NO: 155203 - DNA, 25 bp, Saccharomyces pastorianus
accagggctagatgctctcgtgaaa

SEQ ID NO: 155204 - DNA, 25 bp, Saccharomyces pastorianus
ttaaccattcagcacatcgcagcgg

SEQ ID NO: 155205 - DNA, 25 bp, Saccharomyces pastorianus
cacaattcaagctatcacgtcctta

SEQ ID NO: 155206 - DNA, 25 bp, Saccharomyces pastorianus
aacgatgctgatgtattaaccttag

SEQ ID NO: 155207 - DNA, 25 bp, Saccharomyces pastorianus
atttcctttgctgctttcatcctag

SEQ ID NO: 155208 - DNA, 25 bp, Saccharomyces pastorianus
ctgactctattatttcctttgctgc

SEQ ID NO: 155209 - DNA, 25 bp, Saccharomyces pastorianus
ctttcatcctagctgatgctggttt

SEQ ID NO: 155210 - DNA, 25 bp, Saccharomyces pastorianus
attatttcctttgctgctttcatcc

SEQ ID NO: 155211 - DNA, 25 bp, Saccharomyces pastorianus
tctattatttcctttgctgctttca

SEQ ID NO: 155212 - DNA, 25 bp, Saccharomyces pastorianus
gatgctggtttggaaatcacctctg

SEQ ID NO: 155213 - DNA, 25 bp, Saccharomyces pastorianus
tggtttggaaatcacctctgacaac

SEQ ID NO: 155214 - DNA, 25 bp, Saccharomyces pastorianus
ctttgctgctttcatcctagctgat

SEQ ID NO: 155215 - DNA, 25 bp, Saccharomyces pastorianus
gactctattatttcctttgctgctt

SEQ ID NO: 155216 - DNA, 25 bp, Saccharomyces pastorianus
gctgctttcatcctagctgatgctg

SEQ ID NO: 155217 - DNA, 25 bp, Saccharomyces pastorianus
atcctagctgatgctggtttggaaa

SEQ ID NO: 155218 - DNA, 25 bp, Saccharomyces pastorianus
tttaattacatgtctctcgccattc

SEQ ID NO: 155219 - DNA, 25 bp, Saccharomyces pastorianus
ctcgccattcttgaagcctatcaaa

SEQ ID NO: 155220 - DNA, 25 bp, Saccharomyces pastorianus
gactctgatggctacctctgtatat

SEQ ID NO: 155221 - DNA, 25 bp, Saccharomyces pastorianus
accctctccactttggaatctagaa

SEQ ID NO: 155222 - DNA, 25 bp, Saccharomyces pastorianus
cctcttaacaaacactgggccgaat

SEQ ID NO: 155223 - DNA, 25 bp, Saccharomyces pastorianus
ttagcgacaagttttctccgcggac

SEQ ID NO: 155224 - DNA, 25 bp, Saccharomyces pastorianus
ggtatagagaccaccaggcatagaa

SEQ ID NO: 155225 - DNA, 25 bp, Saccharomyces pastorianus
taacgttcaaactccgactctgatg

SEQ ID NO: 155226 - DNA, 25 bp, Saccharomyces pastorianus
acggccttctcatcctaagggaggt

SEQ ID NO: 155227 - DNA, 25 bp, Saccharomyces pastorianus
gcgctcatcgtccaatatgtctatc

SEQ ID NO: 155228 - DNA, 25 bp, Saccharomyces pastorianus
atatgtctatcccatctttagcttc

SEQ ID NO: 155229 - DNA, 25 bp, Saccharomyces pastorianus
tgtttatgctctgaagttacctggc

SEQ ID NO: 155230 - DNA, 25 bp, Saccharomyces pastorianus
gaagatgggcactgactatgtcgat

SEQ ID NO: 155231 - DNA, 25 bp, Saccharomyces pastorianus
tcaagatgtcagattccccagcgga

SEQ ID NO: 155232 - DNA, 25 bp, Saccharomyces pastorianus
gttacctggcattattcacattgat

SEQ ID NO: 155233 - DNA, 25 bp, Saccharomyces pastorianus
gatgctaccttttccaacagtttgg

SEQ ID NO: 155234 - DNA, 25 bp, Saccharomyces pastorianus
atatcggtgtttccaactttgctgt

SEQ ID NO: 155235 - DNA, 25 bp, Saccharomyces pastorianus
tataccttttgcatagcccatttgt

SEQ ID NO: 155236 - DNA, 25 bp, Saccharomyces pastorianus
gactatgtcgatctataccttttgc

SEQ ID NO: 155237 - DNA, 25 bp, Saccharomyces pastorianus
gaaagttgcggaagtcaagccccaa

SEQ ID NO: 155238 - DNA, 25 bp, Saccharomyces pastorianus
gcaatcgccatcattgggacaggta

SEQ ID NO: 155239 - DNA, 25 bp, Saccharomyces pastorianus
gacaagtactcacctcaaatcaaga

SEQ ID NO: 155240 - DNA, 25 bp, Saccharomyces pastorianus
cttcagaaataataatagccttagc

SEQ ID NO: 155241 - DNA, 25 bp, Saccharomyces pastorianus
gaccatctaaactacattgttgaga

SEQ ID NO: 155242 - DNA, 25 bp, Saccharomyces pastorianus
tggttcccgacaagattttttgaga

SEQ ID NO: 155243 - DNA, 25 bp, Saccharomyces pastorianus
cgatttatttattaatttttggcat

SEQ ID NO: 155244 - DNA, 25 bp, Saccharomyces pastorianus
accagaccatctaaactacattgtt

SEQ ID NO: 155245 - DNA, 25 bp, Saccharomyces pastorianus
tacattgttgagagcgttagtgaaa

SEQ ID NO: 155246 - DNA, 25 bp, Saccharomyces pastorianus
aaaccagaccatctaaactacattg

SEQ ID NO: 155247 - DNA, 25 bp, Saccharomyces pastorianus
tgaaacttggagtaacaacaataac

SEQ ID NO: 155248 - DNA, 25 bp, Saccharomyces pastorianus
gagagcgttagtgaaatgacaacaa

SEQ ID NO: 155249 - DNA, 25 bp, Saccharomyces pastorianus
ttggttcccgacaagattttttgag

SEQ ID NO: 155250 - DNA, 25 bp, Saccharomyces pastorianus
tctaaactacattgttgagagcgtt

SEQ ID NO: 155251 - DNA, 25 bp, Saccharomyces pastorianus
ggcagcttgcgttagatttggctaa

SEQ ID NO: 155252 - DNA, 25 bp, Saccharomyces pastorianus
actgttactggttttcaggaacgct

SEQ ID NO: 155253 - DNA, 25 bp, Saccharomyces pastorianus
ataagagagtttcgctcagccgcgg

SEQ ID NO: 155254 - DNA, 25 bp, Saccharomyces pastorianus
gaagaagctaaactttccgacaata

SEQ ID NO: 155255 - DNA, 25 bp, Saccharomyces pastorianus
caggaacgctgatcttgatctagat

SEQ ID NO: 155256 - DNA, 25 bp, Saccharomyces pastorianus
ggaacttcatccttataactcgagg

SEQ ID NO: 155257 - DNA, 25 bp, Saccharomyces pastorianus
acgaattaattttggccggtgcgat

SEQ ID NO: 155258 - DNA, 25 bp, Saccharomyces pastorianus
gagaaaacaccaatgtcctcgatgt

SEQ ID NO: 155259 - DNA, 25 bp, Saccharomyces pastorianus
ttgacccgttcaacatcataagaga

SEQ ID NO: 155260 - DNA, 25 bp, Saccharomyces pastorianus
agctgtgacttggattttcctttac

SEQ ID NO: 155261 - DNA, 25 bp, Saccharomyces pastorianus
taatgagcaaaaccccattgacccg

SEQ ID NO: 155262 - DNA, 25 bp, Saccharomyces pastorianus
ggaagaattctcgtacgatcacgat

SEQ ID NO: 155263 - DNA, 25 bp, Saccharomyces pastorianus
atcagatagtggacctcagaggccc

SEQ ID NO: 155264 - DNA, 25 bp, Saccharomyces pastorianus
aacacacattttgctacagatttgg

SEQ ID NO: 155265 - DNA, 25 bp, Saccharomyces pastorianus
agaggcccaagagaactcgcgcaaa

SEQ ID NO: 155266 - DNA, 25 bp, Saccharomyces pastorianus
aactcgcgcaaagggtgaagcacta

SEQ ID NO: 155267 - DNA, 25 bp, Saccharomyces pastorianus
tgaaataaatccaacaccctctttg

SEQ ID NO: 155268 - DNA, 25 bp, Saccharomyces pastorianus
acaaccacaaccaattcaaactcaa

SEQ ID NO: 155269 - DNA, 25 bp, Saccharomyces pastorianus
gagtgcttcatcgaatgcatcagat

SEQ ID NO: 155270 - DNA, 25 bp, Saccharomyces pastorianus
gaagcactagatgtcctaaagcgta

SEQ ID NO: 155271 - DNA, 25 bp, Saccharomyces pastorianus
tacgatcacgattttaacacacatt

SEQ ID NO: 155272 - DNA, 25 bp, Saccharomyces pastorianus
acgaccacgaccaacatactaatga

SEQ ID NO: 155273 - DNA, 25 bp, Saccharomyces pastorianus
gacactacagaagcacgatacaaag

SEQ ID NO: 155274 - DNA, 25 bp, Saccharomyces pastorianus
gaatatagaacctgctctcacgaaa

SEQ ID NO: 155275 - DNA, 25 bp, Saccharomyces pastorianus
gtcgtcgatatagcgcatgtagatt

SEQ ID NO: 155276 - DNA, 25 bp, Saccharomyces pastorianus
agcactagatgcttcacaaccgtgg

SEQ ID NO: 155277 - DNA, 25 bp, Saccharomyces pastorianus
accagttatggaaagagtcgtcgat

SEQ ID NO: 155278 - DNA, 25 bp, Saccharomyces pastorianus
gatgtcgcttttgagatatcgttac

SEQ ID NO: 155279 - DNA, 25 bp, Saccharomyces pastorianus
tgagatatcgttacctccacaaatg

SEQ ID NO: 155280 - DNA, 25 bp, Saccharomyces pastorianus
aaagcaatccaaccattgatgaagg

SEQ ID NO: 155281 - DNA, 25 bp, Saccharomyces pastorianus
aaggaactagaaaccgacactacag

SEQ ID NO: 155282 - DNA, 25 bp, Saccharomyces pastorianus
aaatgtacttggatgtcgcttttga

SEQ ID NO: 155283 - DNA, 25 bp, Saccharomyces pastorianus
gaacctgctctcacgaaagagtttc

SEQ ID NO: 155284 - DNA, 25 bp, Saccharomyces pastorianus
aatgggacatcctcaacagtaccga

SEQ ID NO: 155285 - DNA, 25 bp, Saccharomyces pastorianus
agccaacctatatacgtactctgca

SEQ ID NO: 155286 - DNA, 25 bp, Saccharomyces pastorianus
attggtgattgtaccgcacacacgg

SEQ ID NO: 155287 - DNA, 25 bp, Saccharomyces pastorianus
tatgggcgactcatcataccagttg

SEQ ID NO: 155288 - DNA, 25 bp, Saccharomyces pastorianus
gaaactgaggtatcacgtctacaaa

SEQ ID NO: 155289 - DNA, 25 bp, Saccharomyces pastorianus
aagcatatgggtgcccttgcgtaca

SEQ ID NO: 155290 - DNA, 25 bp, Saccharomyces pastorianus
caagttggagcttctcggttctgag

SEQ ID NO: 155291 - DNA, 25 bp, Saccharomyces pastorianus
gtacatcggctctgaaaccgcaatt

SEQ ID NO: 155292 - DNA, 25 bp, Saccharomyces pastorianus
aatacgggatgctggtttgggccac

SEQ ID NO: 155293 - DNA, 25 bp, Saccharomyces pastorianus
gccatgtgtctctctatcaggaata

SEQ ID NO: 155294 - DNA, 25 bp, Saccharomyces pastorianus
ttggaaatccgcttatttggccatg

SEQ ID NO: 155295 - DNA, 25 bp, Saccharomyces pastorianus
accgcgcccgccttatatataaaat

SEQ ID NO: 155296 - DNA, 25 bp, Saccharomyces pastorianus
aattgcttgagcctcttcccaatat

SEQ ID NO: 155297 - DNA, 25 bp, Saccharomyces pastorianus
gagtcattctctgccgctttattat

SEQ ID NO: 155298 - DNA, 25 bp, Saccharomyces pastorianus
gtgtcactgtgcacgagcaacgaaa

SEQ ID NO: 155299 - DNA, 25 bp, Saccharomyces pastorianus
atcgcgcatttatttgagtcattct

SEQ ID NO: 155300 - DNA, 25 bp, Saccharomyces pastorianus
atagccgccgaggtttatttcgctc

SEQ ID NO: 155301 - DNA, 25 bp, Saccharomyces pastorianus
aaaaactggcgtcggttgcgcctca

SEQ ID NO: 155302 - DNA, 25 bp, Saccharomyces pastorianus
ggtttatttcgctcaatctgtttgt

SEQ ID NO: 155303 - DNA, 25 bp, Saccharomyces pastorianus
tcttcccaatatcatcgcgcattta

SEQ ID NO: 155304 - DNA, 25 bp, Saccharomyces pastorianus
atctgtttgtttcactttttccgcg

SEQ ID NO: 155305 - DNA, 25 bp, Saccharomyces pastorianus
ggttgcgcctcacgaattgcttgag

SEQ ID NO: 155306 - DNA, 25 bp, Saccharomyces pastorianus
attgcagggcaacgtgtatcattca

SEQ ID NO: 155307 - DNA, 25 bp, Saccharomyces pastorianus
ggaagcggaggaactaccaccacac

SEQ ID NO: 155308 - DNA, 25 bp, Saccharomyces pastorianus
agatgctagaccgtttctgaagccg

SEQ ID NO: 155309 - DNA, 25 bp, Saccharomyces pastorianus
ttcagtagagcaagtcacatcggac

SEQ ID NO: 155310 - DNA, 25 bp, Saccharomyces pastorianus
cgagcaccctttgggcctagaacgg

SEQ ID NO: 155311 - DNA, 25 bp, Saccharomyces pastorianus
acaatatcaatgtcggcgtcggtga

SEQ ID NO: 155312 - DNA, 25 bp, Saccharomyces pastorianus
atcactaacctgaattcttcatccc

SEQ ID NO: 155313 - DNA, 25 bp, Saccharomyces pastorianus
ttttaagctccattaaggcgaccaa

SEQ ID NO: 155314 - DNA, 25 bp, Saccharomyces pastorianus
aacagagccggcgttggaagctgaa

SEQ ID NO: 155315 - DNA, 25 bp, Saccharomyces pastorianus
gtctcccatttccattagtaatgca

SEQ ID NO: 155316 - DNA, 25 bp, Saccharomyces pastorianus
aattacaaacttgcgagcagcggta

SEQ ID NO: 155317 - DNA, 25 bp, Saccharomyces pastorianus
gaaaatttaacccatttagctcatt

SEQ ID NO: 155318 - DNA, 25 bp, Saccharomyces pastorianus
tttaacccatttagctcatttgcga

SEQ ID NO: 155319 - DNA, 25 bp, Saccharomyces pastorianus
aaatttaacccatttagctcatttg

SEQ ID NO: 155320 - DNA, 25 bp, Saccharomyces pastorianus
tttagctcatttgcgaatacctgcc

SEQ ID NO: 155321 - DNA, 25 bp, Saccharomyces pastorianus
atttaacccatttagctcatttgcg

SEQ ID NO: 155322 - DNA, 25 bp, Saccharomyces pastorianus
tcatttgcgaatacctgcccatttg

SEQ ID NO: 155323 - DNA, 25 bp, Saccharomyces pastorianus
tagctcatttgcgaatacctgccca

SEQ ID NO: 155324 - DNA, 25 bp, Saccharomyces pastorianus
acccatttagctcatttgcgaatac

SEQ ID NO: 155325 - DNA, 25 bp, Saccharomyces pastorianus
taacccatttagctcatttgcgaat

SEQ ID NO: 155326 - DNA, 25 bp, Saccharomyces pastorianus
ttgaaaatttaacccatttagctca

SEQ ID NO: 155327 - DNA, 25 bp, Saccharomyces pastorianus
aatttaacccatttagctcatttgc

SEQ ID NO: 155328 - DNA, 25 bp, Saccharomyces pastorianus
aattaacctattagctcatttgcga

SEQ ID NO: 155329 - DNA, 25 bp, Saccharomyces pastorianus
gttgaaaattaacctattagctcat

SEQ ID NO: 155330 - DNA, 25 bp, Saccharomyces pastorianus
ataacttagatcgagctcgagtagt

SEQ ID NO: 155331 - DNA, 25 bp, Saccharomyces pastorianus
acatggactcgataagctggcttat

SEQ ID NO: 155332 - DNA, 25 bp, Saccharomyces pastorianus
gatcgagctcgagtagtgaacatgg

SEQ ID NO: 155333 - DNA, 25 bp, Saccharomyces pastorianus
aacttcaattacattcataacttag

SEQ ID NO: 155334 - DNA, 25 bp, Saccharomyces pastorianus
gaacatggactcgataagctggctt

SEQ ID NO: 155335 - DNA, 25 bp, Saccharomyces pastorianus
gactcgataagctggcttatcaaga

SEQ ID NO: 155336 - DNA, 25 bp, Saccharomyces pastorianus
aacatttacgaatttcaatcagttt

SEQ ID NO: 155337 - DNA, 25 bp, Saccharomyces pastorianus
attcataacttagatcgagctcgag

SEQ ID NO: 155338 - DNA, 25 bp, Saccharomyces pastorianus
tcgagctcgagtagtgaacatggac

SEQ ID NO: 155339 - DNA, 25 bp, Saccharomyces pastorianus
taactaaactgctatataccacaag

SEQ ID NO: 155340 - DNA, 25 bp, Saccharomyces pastorianus
gtacgagtaccaatgactggagact

SEQ ID NO: 155341 - DNA, 25 bp, Saccharomyces pastorianus
gtccttgaagttaatcctgacggat

SEQ ID NO: 155342 - DNA, 25 bp, Saccharomyces pastorianus
agcaggaatatgttggtacgagtac

SEQ ID NO: 155343 - DNA, 25 bp, Saccharomyces pastorianus
ggaaaggaacgcataccgactaaag

SEQ ID NO: 155344 - DNA, 25 bp, Saccharomyces pastorianus
gacaaaagtgtttgcaactactgtt

SEQ ID NO: 155345 - DNA, 25 bp, Saccharomyces pastorianus
ttcccatcagaactataaacacggt

SEQ ID NO: 155346 - DNA, 25 bp, Saccharomyces pastorianus
ggattcgcaggaatattcccatcag

SEQ ID NO: 155347 - DNA, 25 bp, Saccharomyces pastorianus
aactactgttgctcgaatatctggg

SEQ ID NO: 155348 - DNA, 25 bp, Saccharomyces pastorianus
ggagacttgagcacaggaaatacat

SEQ ID NO: 155349 - DNA, 25 bp, Saccharomyces pastorianus
gaaaaactgtgtgaagtccttgaag

SEQ ID NO: 155350 - DNA, 25 bp, Saccharomyces pastorianus
acttggctttggcttgcggtaacaa

SEQ ID NO: 155351 - DNA, 25 bp, Saccharomyces pastorianus
ggacaatactcctgctttgtgtaaa

SEQ ID NO: 155352 - DNA, 25 bp, Saccharomyces pastorianus
gtcttttaagctggccattgacaaa

SEQ ID NO: 155353 - DNA, 25 bp, Saccharomyces pastorianus
gacatcgtcgctcaaggatttggct

SEQ ID NO: 155354 - DNA, 25 bp, Saccharomyces pastorianus
aacattttggaatccgccactttga

SEQ ID NO: 155355 - DNA, 25 bp, Saccharomyces pastorianus
ttctacaaactccattgcatccatt

SEQ ID NO: 155356 - DNA, 25 bp, Saccharomyces pastorianus
tgcatccattttcgcgtggtcgaga

SEQ ID NO: 155357 - DNA, 25 bp, Saccharomyces pastorianus
ggctccttaggtttgatgacttcta

SEQ ID NO: 155358 - DNA, 25 bp, Saccharomyces pastorianus
aaaggtggctttatcatggcgctaa

SEQ ID NO: 155359 - DNA, 25 bp, Saccharomyces pastorianus
gaagctgctcatggtaccgtgacaa

SEQ ID NO: 155360 - DNA, 25 bp, Saccharomyces pastorianus
gggatccactatgaacaccgtttaa

SEQ ID NO: 155361 - DNA, 25 bp, Saccharomyces pastorianus
gttgaaatcctcaatggaaaccata

SEQ ID NO: 155362 - DNA, 25 bp, Saccharomyces pastorianus
gaaacggagttgaaatcctcaatgg

SEQ ID NO: 155363 - DNA, 25 bp, Saccharomyces pastorianus
cggagttgaaatcctcaatggaaac

SEQ ID NO: 155364 - DNA, 25 bp, Saccharomyces pastorianus
gtacgattgagagcaatgaaacgga

SEQ ID NO: 155365 - DNA, 25 bp, Saccharomyces pastorianus
gagttgaaatcctcaatggaaacca

SEQ ID NO: 155366 - DNA, 25 bp, Saccharomyces pastorianus
ctagagagtacgattgagagcaatg

SEQ ID NO: 155367 - DNA, 25 bp, Saccharomyces pastorianus
gcaatgaaacggagttgaaatcctc

SEQ ID NO: 155368 - DNA, 25 bp, Saccharomyces pastorianus
ggaaaccataaggaaatcagatgaa

SEQ ID NO: 155369 - DNA, 25 bp, Saccharomyces pastorianus
gatgaaaaagctagagagtacgatt

SEQ ID NO: 155370 - DNA, 25 bp, Saccharomyces pastorianus
aacggagttgaaatcctcaatggaa

SEQ ID NO: 155371 - DNA, 25 bp, Saccharomyces pastorianus
gaaatcctcaatggaaaccataagg

SEQ ID NO: 155372 - DNA, 25 bp, Saccharomyces pastorianus
taacttgaaggcagagaactctaag

SEQ ID NO: 155373 - DNA, 25 bp, Saccharomyces pastorianus
ttaaaaagaccaccgattctcagag

SEQ ID NO: 155374 - DNA, 25 bp, Saccharomyces pastorianus
tacaacgatttggtgaataaagagc

SEQ ID NO: 155375 - DNA, 25 bp, Saccharomyces pastorianus
ctctaagttgaaggaggctaacgaa

SEQ ID NO: 155376 - DNA, 25 bp, Saccharomyces pastorianus
ttgcttgaaactaaatacaacgatt

SEQ ID NO: 155377 - DNA, 25 bp, Saccharomyces pastorianus
ggaaaagggatgaagatactgttaa

SEQ ID NO: 155378 - DNA, 25 bp, Saccharomyces pastorianus
ggataacttgaaggcagagaactct

SEQ ID NO: 155379 - DNA, 25 bp, Saccharomyces pastorianus
agttggctaaagaactggataactt

SEQ ID NO: 155380 - DNA, 25 bp, Saccharomyces pastorianus
gatactgttaaaaagaccaccgatt

SEQ ID NO: 155381 - DNA, 25 bp, Saccharomyces pastorianus
taaagagcaagcatggaaaagggat

SEQ ID NO: 155382 - DNA, 25 bp, Saccharomyces pastorianus
gagaactctaagttgaaggaggcta

SEQ ID NO: 155383 - DNA, 25 bp, Saccharomyces pastorianus
tacaagagttgcgtgtcctagacta

SEQ ID NO: 155384 - DNA, 25 bp, Saccharomyces pastorianus
caactccgttcacacgtttgataca

SEQ ID NO: 155385 - DNA, 25 bp, Saccharomyces pastorianus
tatttcgatccttcattacctgtaa

SEQ ID NO: 155386 - DNA, 25 bp, Saccharomyces pastorianus
aattggatgctctatgccaactccg

SEQ ID NO: 155387 - DNA, 25 bp, Saccharomyces pastorianus
taagaggctctctcgtcgtcaatga

SEQ ID NO: 155388 - DNA, 25 bp, Saccharomyces pastorianus
accaaaatgcgttgcttgactcaag

SEQ ID NO: 155389 - DNA, 25 bp, Saccharomyces pastorianus
gtgttgcgacttgcattctttcata

SEQ ID NO: 155390 - DNA, 25 bp, Saccharomyces pastorianus
atcgtcagcctaacagtagagccag

SEQ ID NO: 155391 - DNA, 25 bp, Saccharomyces pastorianus
gctcttttgactgccgcaaacatga

SEQ ID NO: 155392 - DNA, 25 bp, Saccharomyces pastorianus
agttagaccggttgctcttttgact

SEQ ID NO: 155393 - DNA, 25 bp, Saccharomyces pastorianus
actgtcaccactaagcaccaaaatg

SEQ ID NO: 155394 - DNA, 25 bp, Saccharomyces pastorianus
gagcttgttgagtacaaatcccgct

SEQ ID NO: 155395 - DNA, 25 bp, Saccharomyces pastorianus
gctggaagccgagttagcagcttat

SEQ ID NO: 155396 - DNA, 25 bp, Saccharomyces pastorianus
gagtcatgacaatctagtagcgaaa

SEQ ID NO: 155397 - DNA, 25 bp, Saccharomyces pastorianus
aaatcccgctttcagagtcatgaca

SEQ ID NO: 155398 - DNA, 25 bp, Saccharomyces pastorianus
atgagtcccagattagtctcttgaa

SEQ ID NO: 155399 - DNA, 25 bp, Saccharomyces pastorianus
aaaaaccatctctgacttagaacaa

SEQ ID NO: 155400 - DNA, 25 bp, Saccharomyces pastorianus
atgcaagctgaaaatgagtctctaa

SEQ ID NO: 155401 - DNA, 25 bp, Saccharomyces pastorianus
ggaaattatctctaaatccgattct

SEQ ID NO: 155402 - DNA, 25 bp, Saccharomyces pastorianus
gaaacggcgacaacagcaaacgatg

SEQ ID NO: 155403 - DNA, 25 bp, Saccharomyces pastorianus
aggaacatatttcgaaggagcttgt

SEQ ID NO: 155404 - DNA, 25 bp, Saccharomyces pastorianus
acgaaagcagcatacaattgtctaa

SEQ ID NO: 155405 - DNA, 25 bp, Saccharomyces pastorianus
taccgccggcccctatgccggctga

SEQ ID NO: 155406 - DNA, 25 bp, Saccharomyces pastorianus
gccggcccctatgccggctgataat

SEQ ID NO: 155407 - DNA, 25 bp, Saccharomyces pastorianus
cggcccctatgccggctgataatgg

SEQ ID NO: 155408 - DNA, 25 bp, Saccharomyces pastorianus
ggcccctatgccggctgataatggc

SEQ ID NO: 155409 - DNA, 25 bp, Saccharomyces pastorianus
ccggcccctatgccggctgataatg

SEQ ID NO: 155410 - DNA, 25 bp, Saccharomyces pastorianus
atgctaccgccggcccctatgccgg

SEQ ID NO: 155411 - DNA, 25 bp, Saccharomyces pastorianus
ccgccggcccctatgccggctgata

SEQ ID NO: 155412 - DNA, 25 bp, Saccharomyces pastorianus
cgccggcccctatgccggctgataa

SEQ ID NO: 155413 - DNA, 25 bp, Saccharomyces pastorianus
tgctaccgccggcccctatgccggc

SEQ ID NO: 155414 - DNA, 25 bp, Saccharomyces pastorianus
accgccggcccctatgccggctgat

SEQ ID NO: 155415 - DNA, 25 bp, Saccharomyces pastorianus
gctaccgccggcccctatgccggct

SEQ ID NO: 155416 - DNA, 25 bp, Saccharomyces pastorianus
gataaccattgcaccggaggcacaa

SEQ ID NO: 155417 - DNA, 25 bp, Saccharomyces pastorianus
gtctttgcgcaaacagctatcggtt

SEQ ID NO: 155418 - DNA, 25 bp, Saccharomyces pastorianus
gtgttcgggtaccaatgccatgata

SEQ ID NO: 155419 - DNA, 25 bp, Saccharomyces pastorianus
ggacggacggtgtttacttcataca

SEQ ID NO: 155420 - DNA, 25 bp, Saccharomyces pastorianus
atacacgtttactctgtgttcgggt

SEQ ID NO: 155421 - DNA, 25 bp, Saccharomyces pastorianus
ggtgttgtgaaatatgctcccatgc

SEQ ID NO: 155422 - DNA, 25 bp, Saccharomyces pastorianus
gtgggtgccacgattgattctaaga

SEQ ID NO: 155423 - DNA, 25 bp, Saccharomyces pastorianus
gattctaagagtttcaccgttccct

SEQ ID NO: 155424 - DNA, 25 bp, Saccharomyces pastorianus
caatggctactcttcaaacactcag

SEQ ID NO: 155425 - DNA, 25 bp, Saccharomyces pastorianus
atgcaactccaaccggctactaagg

SEQ ID NO: 155426 - DNA, 25 bp, Saccharomyces pastorianus
gctccagaacccaactcagtttatg

SEQ ID NO: 155427 - DNA, 25 bp, Saccharomyces pastorianus
ttaaacaagccgaacaagaacaagc

SEQ ID NO: 155428 - DNA, 25 bp, Saccharomyces pastorianus
tctttaaacaagccgaacaagaaca

SEQ ID NO: 155429 - DNA, 25 bp, Saccharomyces pastorianus
acaagccgaacaagaacaagccgat

SEQ ID NO: 155430 - DNA, 25 bp, Saccharomyces pastorianus
aacaagccgaacaagaacaagccga

SEQ ID NO: 155431 - DNA, 25 bp, Saccharomyces pastorianus
aaacaagccgaacaagaacaagccg

SEQ ID NO: 155432 - DNA, 25 bp, Saccharomyces pastorianus
tttaaacaagccgaacaagaacaag

SEQ ID NO: 155433 - DNA, 25 bp, Saccharomyces pastorianus
caagccgaacaagaacaagccgatg

SEQ ID NO: 155434 - DNA, 25 bp, Saccharomyces pastorianus
taaacaagccgaacaagaacaagcc

SEQ ID NO: 155435 - DNA, 25 bp, Saccharomyces pastorianus
gagagaaggccaaacaactcatgat

SEQ ID NO: 155436 - DNA, 25 bp, Saccharomyces pastorianus
tcatgatttccgacaaccacaaaag

SEQ ID NO: 155437 - DNA, 25 bp, Saccharomyces pastorianus
aacaactcatgatttccgacaacca

SEQ ID NO: 155438 - DNA, 25 bp, Saccharomyces pastorianus
aaggccaaacaactcatgatttccg

SEQ ID NO: 155439 - DNA, 25 bp, Saccharomyces pastorianus
atgatttccgacaaccacaaaagat

SEQ ID NO: 155440 - DNA, 25 bp, Saccharomyces pastorianus
aagttctctagggagagaaggccaa

SEQ ID NO: 155441 - DNA, 25 bp, Saccharomyces pastorianus
tctagggagagaaggccaaacaact

SEQ ID NO: 155442 - DNA, 25 bp, Saccharomyces pastorianus
tttccgacaaccacaaaagataatt

SEQ ID NO: 155443 - DNA, 25 bp, Saccharomyces pastorianus
ggccaaacaactcatgatttccgac

SEQ ID NO: 155444 - DNA, 25 bp, Saccharomyces pastorianus
gatttccgacaaccacaaaagataa

SEQ ID NO: 155445 - DNA, 25 bp, Saccharomyces pastorianus
aactcatgatttccgacaaccacaa

SEQ ID NO: 155446 - DNA, 25 bp, Saccharomyces pastorianus
ggtggtggtatagcctcagaatctc

SEQ ID NO: 155447 - DNA, 25 bp, Saccharomyces pastorianus
cgtggtccagcgttgaaaggcattt

SEQ ID NO: 155448 - DNA, 25 bp, Saccharomyces pastorianus
gaatcattccggtaaactggtttgt

SEQ ID NO: 155449 - DNA, 25 bp, Saccharomyces pastorianus
ttagaaggcgttgggtcaaagaaag

SEQ ID NO: 155450 - DNA, 25 bp, Saccharomyces pastorianus
aatgcacatgtcgtggtccagcgtt

SEQ ID NO: 155451 - DNA, 25 bp, Saccharomyces pastorianus
gaagtcgaatcattacttagtaaag

SEQ ID NO: 155452 - DNA, 25 bp, Saccharomyces pastorianus
gaatctcagtttaacgtacaacgaa

SEQ ID NO: 155453 - DNA, 25 bp, Saccharomyces pastorianus
gtggtatagcctcagaatctcagtt

SEQ ID NO: 155454 - DNA, 25 bp, Saccharomyces pastorianus
taaaggcgaaaatgtcccgtacact

SEQ ID NO: 155455 - DNA, 25 bp, Saccharomyces pastorianus
accaagtaaggtccaatccgtacat

SEQ ID NO: 155456 - DNA, 25 bp, Saccharomyces pastorianus
aaatgtcccgtacactttccaagat

SEQ ID NO: 155457 - DNA, 25 bp, Saccharomyces pastorianus
ctggtttcaaaacgtcattggacat

SEQ ID NO: 155458 - DNA, 25 bp, Saccharomyces pastorianus
atgattggccccttgggcgtctctg

SEQ ID NO: 155459 - DNA, 25 bp, Saccharomyces pastorianus
gaagctgctgacactgccaagggat

SEQ ID NO: 155460 - DNA, 25 bp, Saccharomyces pastorianus
catgtcattagttggtttgagctcc

SEQ ID NO: 155461 - DNA, 25 bp, Saccharomyces pastorianus
cattggacattgacactactgaagc

SEQ ID NO: 155462 - DNA, 25 bp, Saccharomyces pastorianus
agttggtttgagctccatcgatgcc

SEQ ID NO: 155463 - DNA, 25 bp, Saccharomyces pastorianus
tttgagctccatcgatgccacttct

SEQ ID NO: 155464 - DNA, 25 bp, Saccharomyces pastorianus
actgccaagggatccatgtcattag

SEQ ID NO: 155465 - DNA, 25 bp, Saccharomyces pastorianus
tgctgacactgccaagggatccatg

SEQ ID NO: 155466 - DNA, 25 bp, Saccharomyces pastorianus
ttgacactactgaagctgctgacac

SEQ ID NO: 155467 - DNA, 25 bp, Saccharomyces pastorianus
gggcgtctctggtttcaaaacgtca

SEQ ID NO: 155468 - DNA, 25 bp, Saccharomyces pastorianus
agacgcgtccattgtttatagaact

SEQ ID NO: 155469 - DNA, 25 bp, Saccharomyces pastorianus
ctggacatcattggctgtggcacaa

SEQ ID NO: 155470 - DNA, 25 bp, Saccharomyces pastorianus
ttactggaagtatccttgggaatcc

SEQ ID NO: 155471 - DNA, 25 bp, Saccharomyces pastorianus
gaatgatatcgagccatgcgtcttt

SEQ ID NO: 155472 - DNA, 25 bp, Saccharomyces pastorianus
gggtcaattgaaagacgcgtccatt

SEQ ID NO: 155473 - DNA, 25 bp, Saccharomyces pastorianus
tgggaagcattccttggttaccgtg

SEQ ID NO: 155474 - DNA, 25 bp, Saccharomyces pastorianus
tcgagccatgcgtctttgataaatt

SEQ ID NO: 155475 - DNA, 25 bp, Saccharomyces pastorianus
acacagcgagtgtttgatgtacaaa

SEQ ID NO: 155476 - DNA, 25 bp, Saccharomyces pastorianus
caaaaatgctttagtgtccaggaaa

SEQ ID NO: 155477 - DNA, 25 bp, Saccharomyces pastorianus
ggttaccgtgctaactggacatcat

SEQ ID NO: 155478 - DNA, 25 bp, Saccharomyces pastorianus
aaagctgccagtgataaccaagaca

SEQ ID NO: 155479 - DNA, 25 bp, Saccharomyces pastorianus
agtgttgctgcttatccgagtgatc

SEQ ID NO: 155480 - DNA, 25 bp, Saccharomyces pastorianus
ccaatggaggacttcgctaccgaat

SEQ ID NO: 155481 - DNA, 25 bp, Saccharomyces pastorianus
tagctttgtgctttgcttctctaaa

SEQ ID NO: 155482 - DNA, 25 bp, Saccharomyces pastorianus
ataactactccatgcaagtcagaga

SEQ ID NO: 155483 - DNA, 25 bp, Saccharomyces pastorianus
ttggcaccacgagcggtttatttgg

SEQ ID NO: 155484 - DNA, 25 bp, Saccharomyces pastorianus
gttggatttccattcatactgtatg

SEQ ID NO: 155485 - DNA, 25 bp, Saccharomyces pastorianus
aggtacgccaagagcctatctggag

SEQ ID NO: 155486 - DNA, 25 bp, Saccharomyces pastorianus
agttgattgaaacctccactccaat

SEQ ID NO: 155487 - DNA, 25 bp, Saccharomyces pastorianus
aaggcactttataccaaacccatgt

SEQ ID NO: 155488 - DNA, 25 bp, Saccharomyces pastorianus
aattcgctaagagatttggcaccac

SEQ ID NO: 155489 - DNA, 25 bp, Saccharomyces pastorianus
aaacccatgtatgttcgcgcaatga

SEQ ID NO: 155490 - DNA, 25 bp, Saccharomyces pastorianus
gcaagcgtcaccgatattgtcagta

SEQ ID NO: 155491 - DNA, 25 bp, Saccharomyces pastorianus
gttctgtttctgtagttgacgcatt

SEQ ID NO: 155492 - DNA, 25 bp, Saccharomyces pastorianus
atatggtttcctcaactggttcagc

SEQ ID NO: 155493 - DNA, 25 bp, Saccharomyces pastorianus
agtatatccaacagcttcgaccgga

SEQ ID NO: 155494 - DNA, 25 bp, Saccharomyces pastorianus
gagcgtctcatccattcaaagatct

SEQ ID NO: 155495 - DNA, 25 bp, Saccharomyces pastorianus
aggaatttcggccacttcaagttct

SEQ ID NO: 155496 - DNA, 25 bp, Saccharomyces pastorianus
gaacttatgcatcagctcacgcaag

SEQ ID NO: 155497 - DNA, 25 bp, Saccharomyces pastorianus
aaatggtttagtcggctcatcttcc

SEQ ID NO: 155498 - DNA, 25 bp, Saccharomyces pastorianus
gtagagttactgactcgactcgcca

SEQ ID NO: 155499 - DNA, 25 bp, Saccharomyces pastorianus
aagcactttcgctgtctcgaatagc

SEQ ID NO: 155500 - DNA, 25 bp, Saccharomyces pastorianus
gattcggcttcctcgagtaggtcaa

SEQ ID NO: 155501 - DNA, 25 bp, Saccharomyces pastorianus
ggagagtttgctttattcgtcacac

SEQ ID NO: 155502 - DNA, 25 bp, Saccharomyces pastorianus
gaatcaactctcttttctagtaagg

SEQ ID NO: 155503 - DNA, 25 bp, Saccharomyces pastorianus
acttcggatcacttgtttgtcgttt

SEQ ID NO: 155504 - DNA, 25 bp, Saccharomyces pastorianus
ccagcagctggttaaccgtggtagt

SEQ ID NO: 155505 - DNA, 25 bp, Saccharomyces pastorianus
agaacattccgaggcaaccggcaat

SEQ ID NO: 155506 - DNA, 25 bp, Saccharomyces pastorianus
gatgaccctttcaacgcgtttaaat

SEQ ID NO: 155507 - DNA, 25 bp, Saccharomyces pastorianus
tgaatgtagaggtcatccccggcaa

SEQ ID NO: 155508 - DNA, 25 bp, Saccharomyces pastorianus
actgcaacagttgcggagccgtgaa

SEQ ID NO: 155509 - DNA, 25 bp, Saccharomyces pastorianus
taagggacacggcagacgcagttat

SEQ ID NO: 155510 - DNA, 25 bp, Saccharomyces pastorianus
gggaaatccctcagttatcattttg

SEQ ID NO: 155511 - DNA, 25 bp, Saccharomyces pastorianus
ttattcgtcacacttcggatcactt

SEQ ID NO: 155512 - DNA, 25 bp, Saccharomyces pastorianus
gtatcgaaccctcttcagtattcaa

SEQ ID NO: 155513 - DNA, 25 bp, Saccharomyces pastorianus
aatgggcgacgcacttttgaaagac

SEQ ID NO: 155514 - DNA, 25 bp, Saccharomyces pastorianus
ggtcaactgcaggaagagcacctct

SEQ ID NO: 155515 - DNA, 25 bp, Saccharomyces pastorianus
agacatcttccgttttcgaaagcca

SEQ ID NO: 155516 - DNA, 25 bp, Saccharomyces pastorianus
taaatcgtttgacatgccactgggt

SEQ ID NO: 155517 - DNA, 25 bp, Saccharomyces pastorianus
gtatctattgccctttttgttcgag

SEQ ID NO: 155518 - DNA, 25 bp, Saccharomyces pastorianus
gggtccggatggattgcctatgcca

SEQ ID NO: 155519 - DNA, 25 bp, Saccharomyces pastorianus
gttcgaggtggttcaagacatcttc

SEQ ID NO: 155520 - DNA, 25 bp, Saccharomyces pastorianus
gagcacctctctggtaaatcgtttg

SEQ ID NO: 155521 - DNA, 25 bp, Saccharomyces pastorianus
gaagcacctgcatatgattcgacgg

SEQ ID NO: 155522 - DNA, 25 bp, Saccharomyces pastorianus
gcttgacagagagtatcgctgcgaa

SEQ ID NO: 155523 - DNA, 25 bp, Saccharomyces pastorianus
atcaccagactagcatgacgacgat

SEQ ID NO: 155524 - DNA, 25 bp, Saccharomyces pastorianus
acaggagttcatcaaggagtcaccc

SEQ ID NO: 155525 - DNA, 25 bp, Saccharomyces pastorianus
ataatcttcccacaagtgaccttcc

SEQ ID NO: 155526 - DNA, 25 bp, Saccharomyces pastorianus
gtggaattaccacttgaggattctc

SEQ ID NO: 155527 - DNA, 25 bp, Saccharomyces pastorianus
cggtcatactagtacctcatcgcat

SEQ ID NO: 155528 - DNA, 25 bp, Saccharomyces pastorianus
atcgcattcaaccttgttcggacga

SEQ ID NO: 155529 - DNA, 25 bp, Saccharomyces pastorianus
gaggattctcaccaaacaaacttta

SEQ ID NO: 155530 - DNA, 25 bp, Saccharomyces pastorianus
cctccaccgtcaatgggcaatttga

SEQ ID NO: 155531 - DNA, 25 bp, Saccharomyces pastorianus
gacaacgaagctgggtcctgcaaag

SEQ ID NO: 155532 - DNA, 25 bp, Saccharomyces pastorianus
gggcaatttgacatccggtcatact

SEQ ID NO: 155533 - DNA, 25 bp, Saccharomyces pastorianus
tgaggatgtgcctaactctccaaac

SEQ ID NO: 155534 - DNA, 25 bp, Saccharomyces pastorianus
tccaatcacagttaccttgaaaggc

SEQ ID NO: 155535 - DNA, 25 bp, Saccharomyces pastorianus
tacaattgtcggcaaccaccttggc

SEQ ID NO: 155536 - DNA, 25 bp, Saccharomyces pastorianus
ataggagtaccccagttaccagatc

SEQ ID NO: 155537 - DNA, 25 bp, Saccharomyces pastorianus
cagttaccagatccaatcacagtta

SEQ ID NO: 155538 - DNA, 25 bp, Saccharomyces pastorianus
gagtaccccagttaccagatccaat

SEQ ID NO: 155539 - DNA, 25 bp, Saccharomyces pastorianus
ccagatccaatcacagttaccttga

SEQ ID NO: 155540 - DNA, 25 bp, Saccharomyces pastorianus
ggcaaccaccttggctataggagta

SEQ ID NO: 155541 - DNA, 25 bp, Saccharomyces pastorianus
aattgtcggcaaccaccttggctat

SEQ ID NO: 155542 - DNA, 25 bp, Saccharomyces pastorianus
gtcggcaaccaccttggctatagga

SEQ ID NO: 155543 - DNA, 25 bp, Saccharomyces pastorianus
accttggctataggagtaccccagt

SEQ ID NO: 155544 - DNA, 25 bp, Saccharomyces pastorianus
ggctataggagtaccccagttacca

SEQ ID NO: 155545 - DNA, 25 bp, Saccharomyces pastorianus
tggccgacaaactatcatcaaccga

SEQ ID NO: 155546 - DNA, 25 bp, Saccharomyces pastorianus
gaagttcgcattttgcgctacgaaa

SEQ ID NO: 155547 - DNA, 25 bp, Saccharomyces pastorianus
tggagtcccaccttctgttttattt

SEQ ID NO: 155548 - DNA, 25 bp, Saccharomyces pastorianus
atcctgcagccatattgtccatatt

SEQ ID NO: 155549 - DNA, 25 bp, Saccharomyces pastorianus
aagtcggcatagcagcatattccct

SEQ ID NO: 155550 - DNA, 25 bp, Saccharomyces pastorianus
agagctccccttattcgtggtagaa

SEQ ID NO: 155551 - DNA, 25 bp, Saccharomyces pastorianus
atctctaccgtcaagaagttcgcat

SEQ ID NO: 155552 - DNA, 25 bp, Saccharomyces pastorianus
tcatcaaccgatgctatgggctgtt

SEQ ID NO: 155553 - DNA, 25 bp, Saccharomyces pastorianus
gaagtttcctcttttatctctaccg

SEQ ID NO: 155554 - DNA, 25 bp, Saccharomyces pastorianus
atattccctggaagatcctgcagcc

SEQ ID NO: 155555 - DNA, 25 bp, Saccharomyces pastorianus
aatttcttcgtctacttcagagctc

SEQ ID NO: 155556 - DNA, 25 bp, Saccharomyces pastorianus
agggaatatgctgctatgccgactt

SEQ ID NO: 155557 - DNA, 25 bp, Saccharomyces pastorianus
taaaagcacctgttcatatagcaag

SEQ ID NO: 155558 - DNA, 25 bp, Saccharomyces pastorianus
aacagcccatagcatcggttgatga

SEQ ID NO: 155559 - DNA, 25 bp, Saccharomyces pastorianus
ttgttgttagtgtttttcgtagcgc

SEQ ID NO: 155560 - DNA, 25 bp, Saccharomyces pastorianus
gaaggtgggactccaacagcccata

SEQ ID NO: 155561 - DNA, 25 bp, Saccharomyces pastorianus
atatggctgcaggatcttccaggga

SEQ ID NO: 155562 - DNA, 25 bp, Saccharomyces pastorianus
tatgccgacttctaccacgaataag

SEQ ID NO: 155563 - DNA, 25 bp, Saccharomyces pastorianus
ctagacttgtctccgattataatat

SEQ ID NO: 155564 - DNA, 25 bp, Saccharomyces pastorianus
ggtgaccggtagaggaactgttcca

SEQ ID NO: 155565 - DNA, 25 bp, Saccharomyces pastorianus
aatgcgaacttcttgacggtagaga

SEQ ID NO: 155566 - DNA, 25 bp, Saccharomyces pastorianus
gaatactccctcatactagacttgt

SEQ ID NO: 155567 - DNA, 25 bp, Saccharomyces pastorianus
gtcttggacaaaaaagcttcttcgt

SEQ ID NO: 155568 - DNA, 25 bp, Saccharomyces pastorianus
caactccgaaatgccttgtgctagg

SEQ ID NO: 155569 - DNA, 25 bp, Saccharomyces pastorianus
tatgttttcacaacccttttaagag

SEQ ID NO: 155570 - DNA, 25 bp, Saccharomyces pastorianus
tttccaactacactgcatttcacga

SEQ ID NO: 155571 - DNA, 25 bp, Saccharomyces pastorianus
atttcacgacctaatcattcacgac

SEQ ID NO: 155572 - DNA, 25 bp, Saccharomyces pastorianus
ggcattaagcgttttatgttttcac

SEQ ID NO: 155573 - DNA, 25 bp, Saccharomyces pastorianus
atagcttctttagtccaactccgaa

SEQ ID NO: 155574 - DNA, 25 bp, Saccharomyces pastorianus
acccttttaagagatgtcttggaca

SEQ ID NO: 155575 - DNA, 25 bp, Saccharomyces pastorianus
aatcattcacgacctctttatttat

SEQ ID NO: 155576 - DNA, 25 bp, Saccharomyces pastorianus
gcttcttcgttgatgatagcttctt

SEQ ID NO: 155577 - DNA, 25 bp, Saccharomyces pastorianus
ttgtgctaggaaaactacgcctttc

SEQ ID NO: 155578 - DNA, 25 bp, Saccharomyces pastorianus
cgtcgctaagcgttcatatgcagaa

SEQ ID NO: 155579 - DNA, 25 bp, Saccharomyces pastorianus
gttcaaccagactcgcagttatgtg

SEQ ID NO: 155580 - DNA, 25 bp, Saccharomyces pastorianus
tcaagtgaacctgcctgctaagtca

SEQ ID NO: 155581 - DNA, 25 bp, Saccharomyces pastorianus
tgctgccgcatcatcaggtttgaag

SEQ ID NO: 155582 - DNA, 25 bp, Saccharomyces pastorianus
agaacgttagttcatctgatgccag

SEQ ID NO: 155583 - DNA, 25 bp, Saccharomyces pastorianus
tagtggctccgaagttactcaagtg

SEQ ID NO: 155584 - DNA, 25 bp, Saccharomyces pastorianus
gttacaatttgctctaccacacgaa

SEQ ID NO: 155585 - DNA, 25 bp, Saccharomyces pastorianus
tatcaggtggatttgcaacagttca

SEQ ID NO: 155586 - DNA, 25 bp, Saccharomyces pastorianus
gaacaattactaccaggtgtcgttg

SEQ ID NO: 155587 - DNA, 25 bp, Saccharomyces pastorianus
aaccatgttcccaccgttgaacaat

SEQ ID NO: 155588 - DNA, 25 bp, Saccharomyces pastorianus
gtattggtgtactggccaaccatgt

SEQ ID NO: 155589 - DNA, 25 bp, Saccharomyces pastorianus
gaatactaaggccagctctgttaag

SEQ ID NO: 155590 - DNA, 25 bp, Saccharomyces pastorianus
aacgtaaatgttaccgctggccttg

SEQ ID NO: 155591 - DNA, 25 bp, Saccharomyces pastorianus
gttaccgctggccttgttagaaatc

SEQ ID NO: 155592 - DNA, 25 bp, Saccharomyces pastorianus
ccaactctgctttcttttgatcatg

SEQ ID NO: 155593 - DNA, 25 bp, Saccharomyces pastorianus
tgccgatatacgtcaaattgtttgt

SEQ ID NO: 155594 - DNA, 25 bp, Saccharomyces pastorianus
gagactcttctttaacaaggttaat

SEQ ID NO: 155595 - DNA, 25 bp, Saccharomyces pastorianus
ggtgagagagtacccaactctgctt

SEQ ID NO: 155596 - DNA, 25 bp, Saccharomyces pastorianus
ttgccgtttacttttccaacaattg

SEQ ID NO: 155597 - DNA, 25 bp, Saccharomyces pastorianus
agattgattcttttgcgtgccgata

SEQ ID NO: 155598 - DNA, 25 bp, Saccharomyces pastorianus
aagttctatcactatccctgatgtc

SEQ ID NO: 155599 - DNA, 25 bp, Saccharomyces pastorianus
aattggtggccaacgatccttcaat

SEQ ID NO: 155600 - DNA, 25 bp, Saccharomyces pastorianus
gttgcagtcttttggaaatacgagt

SEQ ID NO: 155601 - DNA, 25 bp, Saccharomyces pastorianus
actggcaaaccgaggaactcttggt

SEQ ID NO: 155602 - DNA, 25 bp, Saccharomyces pastorianus
cagtcttttggaaatacgagtcttt

SEQ ID NO: 155603 - DNA, 25 bp, Saccharomyces pastorianus
tggcaaaccgaggaactcttggtat

SEQ ID NO: 155604 - DNA, 25 bp, Saccharomyces pastorianus
tgcagtcttttggaaatacgagtct

SEQ ID NO: 155605 - DNA, 25 bp, Saccharomyces pastorianus
ataactggcaaaccgaggaactctt

SEQ ID NO: 155606 - DNA, 25 bp, Saccharomyces pastorianus
gtcttttaataactggcaaaccgag

SEQ ID NO: 155607 - DNA, 25 bp, Saccharomyces pastorianus
taataactggcaaaccgaggaactc

SEQ ID NO: 155608 - DNA, 25 bp, Saccharomyces pastorianus
atacgagtcttttaataactggcaa

SEQ ID NO: 155609 - DNA, 25 bp, Saccharomyces pastorianus
gagtcttttaataactggcaaaccg

SEQ ID NO: 155610 - DNA, 25 bp, Saccharomyces pastorianus
atgttgcagtcttttggaaatacga

SEQ ID NO: 155611 - DNA, 25 bp, Saccharomyces pastorianus
gttaccatggtcacataacctctgt

SEQ ID NO: 155612 - DNA, 25 bp, Saccharomyces pastorianus
gatcgaaaggcatccgcggaaactt

SEQ ID NO: 155613 - DNA, 25 bp, Saccharomyces pastorianus
tttatgtctccgttcttttccaaat

SEQ ID NO: 155614 - DNA, 25 bp, Saccharomyces pastorianus
tgcgcggaaccagacgactgggaaa

SEQ ID NO: 155615 - DNA, 25 bp, Saccharomyces pastorianus
gaaacttaaaatagctccgcggatg

SEQ ID NO: 155616 - DNA, 25 bp, Saccharomyces pastorianus
ctccgcggatgctagatttctacga

SEQ ID NO: 155617 - DNA, 25 bp, Saccharomyces pastorianus
aaatgtgtacggttaccatggtcac

SEQ ID NO: 155618 - DNA, 25 bp, Saccharomyces pastorianus
acgagtcatacatagtctggcgtga

SEQ ID NO: 155619 - DNA, 25 bp, Saccharomyces pastorianus
ataacctctgtgtgcggagccactc

SEQ ID NO: 155620 - DNA, 25 bp, Saccharomyces pastorianus
gcgccacttccttgccgtggaaaaa

SEQ ID NO: 155621 - DNA, 25 bp, Saccharomyces pastorianus
tgactcgcatcaaccgggctatggt

SEQ ID NO: 155622 - DNA, 25 bp, Saccharomyces pastorianus
attgccgaggctttggcagccaaag

SEQ ID NO: 155623 - DNA, 25 bp, Saccharomyces pastorianus
cactgtcctttattctggtaagcaa

SEQ ID NO: 155624 - DNA, 25 bp, Saccharomyces pastorianus
gcagccaaaggttccatttactgtt

SEQ ID NO: 155625 - DNA, 25 bp, Saccharomyces pastorianus
atgcaaccattttcggtctaaggca

SEQ ID NO: 155626 - DNA, 25 bp, Saccharomyces pastorianus
acagctgaatttttaaccgcgttga

SEQ ID NO: 155627 - DNA, 25 bp, Saccharomyces pastorianus
ggatttcgctattgcctgcaaaacg

SEQ ID NO: 155628 - DNA, 25 bp, Saccharomyces pastorianus
aaccgcgttgactgatccaaatgga

SEQ ID NO: 155629 - DNA, 25 bp, Saccharomyces pastorianus
gggttatttgtgtcctccaaggcaa

SEQ ID NO: 155630 - DNA, 25 bp, Saccharomyces pastorianus
aaaacgcctgctctcagagtcaata

SEQ ID NO: 155631 - DNA, 25 bp, Saccharomyces pastorianus
tttggatgcgtctacggccttagaa

SEQ ID NO: 155632 - DNA, 25 bp, Saccharomyces pastorianus
ggattccatctgatcaagccaggtt

SEQ ID NO: 155633 - DNA, 25 bp, Saccharomyces pastorianus
gggtgaaatgattttggttcttgga

SEQ ID NO: 155634 - DNA, 25 bp, Saccharomyces pastorianus
tgtcaatgccctggcagaagcgggt

SEQ ID NO: 155635 - DNA, 25 bp, Saccharomyces pastorianus
ataagcaatgtcaatgccctggcag

SEQ ID NO: 155636 - DNA, 25 bp, Saccharomyces pastorianus
tggcagaagcgggtgaaatgatttt

SEQ ID NO: 155637 - DNA, 25 bp, Saccharomyces pastorianus
atgccctggcagaagcgggtgaaat

SEQ ID NO: 155638 - DNA, 25 bp, Saccharomyces pastorianus
aatgtcaatgccctggcagaagcgg

SEQ ID NO: 155639 - DNA, 25 bp, Saccharomyces pastorianus
caatgccctggcagaagcgggtgaa

SEQ ID NO: 155640 - DNA, 25 bp, Saccharomyces pastorianus
aagcaatgtcaatgccctggcagaa

SEQ ID NO: 155641 - DNA, 25 bp, Saccharomyces pastorianus
agcgggtgaaatgattttggttctt

SEQ ID NO: 155642 - DNA, 25 bp, Saccharomyces pastorianus
agcaatgtcaatgccctggcagaag

SEQ ID NO: 155643 - DNA, 25 bp, Saccharomyces pastorianus
gatcataagcaatgtcaatgccctg

SEQ ID NO: 155644 - DNA, 25 bp, Saccharomyces pastorianus
gagtcatttgcagatgcgctatccc

SEQ ID NO: 155645 - DNA, 25 bp, Saccharomyces pastorianus
aagatgagcagagcgataccccggc

SEQ ID NO: 155646 - DNA, 25 bp, Saccharomyces pastorianus
cgatgcccatgccatctttgaaagt

SEQ ID NO: 155647 - DNA, 25 bp, Saccharomyces pastorianus
ctgcgagccagattagtgccactgt

SEQ ID NO: 155648 - DNA, 25 bp, Saccharomyces pastorianus
tcatacaacgagaagcggtgccttt

SEQ ID NO: 155649 - DNA, 25 bp, Saccharomyces pastorianus
aagcgcttcttttgcagcttcagaa

SEQ ID NO: 155650 - DNA, 25 bp, Saccharomyces pastorianus
gaaatggcgccagatgtcgtatcta

SEQ ID NO: 155651 - DNA, 25 bp, Saccharomyces pastorianus
gataccccggcggataaactgacaa

SEQ ID NO: 155652 - DNA, 25 bp, Saccharomyces pastorianus
taatgctgtcgctagaagctcaagc

SEQ ID NO: 155653 - DNA, 25 bp, Saccharomyces pastorianus
gacctgcaagagacactgcgagcca

SEQ ID NO: 155654 - DNA, 25 bp, Saccharomyces pastorianus
gaagaatcatttacgggcataaccc

SEQ ID NO: 155655 - DNA, 25 bp, Saccharomyces pastorianus
aaatacttcatcgagcaaaggaata

SEQ ID NO: 155656 - DNA, 25 bp, Saccharomyces pastorianus
aatcttgaatggtctgaatggtctc

SEQ ID NO: 155657 - DNA, 25 bp, Saccharomyces pastorianus
agttgatatcaaccactgacaaata

SEQ ID NO: 155658 - DNA, 25 bp, Saccharomyces pastorianus
gtattgcaggagatcaatgatacta

SEQ ID NO: 155659 - DNA, 25 bp, Saccharomyces pastorianus
gatatcaaccactgacaaatacttc

SEQ ID NO: 155660 - DNA, 25 bp, Saccharomyces pastorianus
ggtctgaatggtctcaatatatcat

SEQ ID NO: 155661 - DNA, 25 bp, Saccharomyces pastorianus
gatggctagtacatccaatgatgaa

SEQ ID NO: 155662 - DNA, 25 bp, Saccharomyces pastorianus
gaatggtctgaatggtctcaatata

SEQ ID NO: 155663 - DNA, 25 bp, Saccharomyces pastorianus
atgatactatgaattcaatcttgaa

SEQ ID NO: 155664 - DNA, 25 bp, Saccharomyces pastorianus
gaatggtctcaatatatcattggag

SEQ ID NO: 155665 - DNA, 25 bp, Saccharomyces pastorianus
atatcattggagagctcgatagctg

SEQ ID NO: 155666 - DNA, 25 bp, Saccharomyces pastorianus
tctggtggctttcctttgtttcaaa

SEQ ID NO: 155667 - DNA, 25 bp, Saccharomyces pastorianus
tattggatattctcccgccttgaga

SEQ ID NO: 155668 - DNA, 25 bp, Saccharomyces pastorianus
accattactgggatttggcatgcga

SEQ ID NO: 155669 - DNA, 25 bp, Saccharomyces pastorianus
aagagcacatttggaccatgtccga

SEQ ID NO: 155670 - DNA, 25 bp, Saccharomyces pastorianus
gaacggaatacgtcggcaccaaatt

SEQ ID NO: 155671 - DNA, 25 bp, Saccharomyces pastorianus
aaatgaatccattgccgcttataat

SEQ ID NO: 155672 - DNA, 25 bp, Saccharomyces pastorianus
aagacatttgttactaccgcactct

SEQ ID NO: 155673 - DNA, 25 bp, Saccharomyces pastorianus
aacgccaagccatgctttcgattta

SEQ ID NO: 155674 - DNA, 25 bp, Saccharomyces pastorianus
ggtggtaacgtttatatcatcctga

SEQ ID NO: 155675 - DNA, 25 bp, Saccharomyces pastorianus
gttccctgagggtacaaatctaagc

SEQ ID NO: 155676 - DNA, 25 bp, Saccharomyces pastorianus
ttactaccgcactctaaaggcttga

SEQ ID NO: 155677 - DNA, 25 bp, Saccharomyces pastorianus
aacccagagttaatcagacaatctc

SEQ ID NO: 155678 - DNA, 25 bp, Saccharomyces pastorianus
aattatttccgcctaccaagattgg

SEQ ID NO: 155679 - DNA, 25 bp, Saccharomyces pastorianus
tttccgcctaccaagattgggtcaa

SEQ ID NO: 155680 - DNA, 25 bp, Saccharomyces pastorianus
tatttccgcctaccaagattgggtc

SEQ ID NO: 155681 - DNA, 25 bp, Saccharomyces pastorianus
gatgaaattatttccgcctaccaag

SEQ ID NO: 155682 - DNA, 25 bp, Saccharomyces pastorianus
attatttccgcctaccaagattggg

SEQ ID NO: 155683 - DNA, 25 bp, Saccharomyces pastorianus
aatcagacaatctcagaaagcaaga

SEQ ID NO: 155684 - DNA, 25 bp, Saccharomyces pastorianus
gttaatcagacaatctcagaaagca

SEQ ID NO: 155685 - DNA, 25 bp, Saccharomyces pastorianus
gccagtgttgaaatcgtcgatgaaa

SEQ ID NO: 155686 - DNA, 25 bp, Saccharomyces pastorianus
gaaagcaagaaatgccagtgttgaa

SEQ ID NO: 155687 - DNA, 25 bp, Saccharomyces pastorianus
tccgcctaccaagattgggtcaaaa

SEQ ID NO: 155688 - DNA, 25 bp, Saccharomyces pastorianus
gaatttcagtccatgctagtaaaca

SEQ ID NO: 155689 - DNA, 25 bp, Saccharomyces pastorianus
gaaagttcagcctacaattatcgat

SEQ ID NO: 155690 - DNA, 25 bp, Saccharomyces pastorianus
gcaatttgaggacgataccagcttt

SEQ ID NO: 155691 - DNA, 25 bp, Saccharomyces pastorianus
gagttggactaggtgttggccctat

SEQ ID NO: 155692 - DNA, 25 bp, Saccharomyces pastorianus
taacgagtgcctttgacctatacag

SEQ ID NO: 155693 - DNA, 25 bp, Saccharomyces pastorianus
ggagcaaactcctgcagaatttcag

SEQ ID NO: 155694 - DNA, 25 bp, Saccharomyces pastorianus
tttgccaacagagaatgcacacgct

SEQ ID NO: 155695 - DNA, 25 bp, Saccharomyces pastorianus
gataccagctttgtcagcaacgaga

SEQ ID NO: 155696 - DNA, 25 bp, Saccharomyces pastorianus
agggaaaaatctatcactgagctta

SEQ ID NO: 155697 - DNA, 25 bp, Saccharomyces pastorianus
acaatggctctactagtgggtctaa

SEQ ID NO: 155698 - DNA, 25 bp, Saccharomyces pastorianus
tgcacacgctgacaataaccacgat

SEQ ID NO: 155699 - DNA, 25 bp, Saccharomyces pastorianus
gtcgtttgaagcaaatctgaggcaa

SEQ ID NO: 155700 - DNA, 25 bp, Saccharomyces pastorianus
tgagggacaggctaaacgatttttt

SEQ ID NO: 155701 - DNA, 25 bp, Saccharomyces pastorianus
catgaggagtcgtttgaagcaaatc

SEQ ID NO: 155702 - DNA, 25 bp, Saccharomyces pastorianus
cataaagtgttggacgctatcgatt

SEQ ID NO: 155703 - DNA, 25 bp, Saccharomyces pastorianus
actagacatgaagagacaagcggaa

SEQ ID NO: 155704 - DNA, 25 bp, Saccharomyces pastorianus
tcagacaaatttcaagtaggtaacc

SEQ ID NO: 155705 - DNA, 25 bp, Saccharomyces pastorianus
gggatgccgagctaataaatagtat

SEQ ID NO: 155706 - DNA, 25 bp, Saccharomyces pastorianus
tggacgctatcgatttatttgtaac

SEQ ID NO: 155707 - DNA, 25 bp, Saccharomyces pastorianus
taaccctcgaacttttcataaagtg

SEQ ID NO: 155708 - DNA, 25 bp, Saccharomyces pastorianus
acctgacttgtacttttcagacaaa

SEQ ID NO: 155709 - DNA, 25 bp, Saccharomyces pastorianus
atagtatacctgacttgtacttttc

SEQ ID NO: 155710 - DNA, 25 bp, Saccharomyces pastorianus
gaaaaactggctcaattaccccact

SEQ ID NO: 155711 - DNA, 25 bp, Saccharomyces pastorianus
attgttgttcctgagggatcgcctt

SEQ ID NO: 155712 - DNA, 25 bp, Saccharomyces pastorianus
gattctaggacactttctgttgcaa

SEQ ID NO: 155713 - DNA, 25 bp, Saccharomyces pastorianus
gatattccacaagttagcctaagca

SEQ ID NO: 155714 - DNA, 25 bp, Saccharomyces pastorianus
gctggtcgtcctaaaattgttgttc

SEQ ID NO: 155715 - DNA, 25 bp, Saccharomyces pastorianus
aattaccccactgttgctgatattc

SEQ ID NO: 155716 - DNA, 25 bp, Saccharomyces pastorianus
gatacttcccttaatgacgacttgt

SEQ ID NO: 155717 - DNA, 25 bp, Saccharomyces pastorianus
tgcaaaaagcggctggtcgtcctaa

SEQ ID NO: 155718 - DNA, 25 bp, Saccharomyces pastorianus
tagtgggtccatggacttttcgcca

SEQ ID NO: 155719 - DNA, 25 bp, Saccharomyces pastorianus
aagtctggattcaataacgccgcga

SEQ ID NO: 155720 - DNA, 25 bp, Saccharomyces pastorianus
gggatcgccttctcgtaatagtgat

SEQ ID NO: 155721 - DNA, 25 bp, Saccharomyces pastorianus
cacaggcagatgataatggacactc

SEQ ID NO: 155722 - DNA, 25 bp, Saccharomyces pastorianus
aaaatgcagatcaccccactatttc

SEQ ID NO: 155723 - DNA, 25 bp, Saccharomyces pastorianus
agtactccagaaatgggtgctccga

SEQ ID NO: 155724 - DNA, 25 bp, Saccharomyces pastorianus
atgacctcgccgtcaaattcgaata

SEQ ID NO: 155725 - DNA, 25 bp, Saccharomyces pastorianus
tgaaaatgcaggtcatcccactact

SEQ ID NO: 155726 - DNA, 25 bp, Saccharomyces pastorianus
ccctaatcctgctgtaacttcaact

SEQ ID NO: 155727 - DNA, 25 bp, Saccharomyces pastorianus
tacagtaaaacggaagtactccaga

SEQ ID NO: 155728 - DNA, 25 bp, Saccharomyces pastorianus
aatgggtgctccgagtgtaagagac

SEQ ID NO: 155729 - DNA, 25 bp, Saccharomyces pastorianus
gtcatcccactacttcagagcaaga

SEQ ID NO: 155730 - DNA, 25 bp, Saccharomyces pastorianus
accccactatttcacaggcagatga

SEQ ID NO: 155731 - DNA, 25 bp, Saccharomyces pastorianus
gtaacttcaactgttacggataaga

SEQ ID NO: 155732 - DNA, 25 bp, Saccharomyces pastorianus
ttcgtccgaaaagtccaaagaccag

SEQ ID NO: 155733 - DNA, 25 bp, Saccharomyces pastorianus
aaattcttagacagtgactcgccgc

SEQ ID NO: 155734 - DNA, 25 bp, Saccharomyces pastorianus
agaagttgccatcagctggtatgat

SEQ ID NO: 155735 - DNA, 25 bp, Saccharomyces pastorianus
tgctgtattgattgcaggtttgaat

SEQ ID NO: 155736 - DNA, 25 bp, Saccharomyces pastorianus
gactcgccgccacaaaattcaagga

SEQ ID NO: 155737 - DNA, 25 bp, Saccharomyces pastorianus
gctggtatgatatttctcatcagac

SEQ ID NO: 155738 - DNA, 25 bp, Saccharomyces pastorianus
gacaatcagtcacaccctagaatta

SEQ ID NO: 155739 - DNA, 25 bp, Saccharomyces pastorianus
agactatctgcttttatcatcccaa

SEQ ID NO: 155740 - DNA, 25 bp, Saccharomyces pastorianus
gccaaaagagtcaagtaccattcaa

SEQ ID NO: 155741 - DNA, 25 bp, Saccharomyces pastorianus
ggaattataccctcagacaatcagt

SEQ ID NO: 155742 - DNA, 25 bp, Saccharomyces pastorianus
ttatcatcccaaacttcgtccgaaa

SEQ ID NO: 155743 - DNA, 25 bp, Saccharomyces pastorianus
gttgattaacgaccctgatatgaat

SEQ ID NO: 155744 - DNA, 25 bp, Saccharomyces pastorianus
tagttatcgtgatcgggccatgttc

SEQ ID NO: 155745 - DNA, 25 bp, Saccharomyces pastorianus
actgatggtggtttgcaagtcgcca

SEQ ID NO: 155746 - DNA, 25 bp, Saccharomyces pastorianus
gagaattagcatccggtctatcttt

SEQ ID NO: 155747 - DNA, 25 bp, Saccharomyces pastorianus
gatgttggataccatttctccgcag

SEQ ID NO: 155748 - DNA, 25 bp, Saccharomyces pastorianus
gatctgcttcaacatgaatttccaa

SEQ ID NO: 155749 - DNA, 25 bp, Saccharomyces pastorianus
ccatttctccgcagtttttgagtga

SEQ ID NO: 155750 - DNA, 25 bp, Saccharomyces pastorianus
gaatttccaatttcagccaaaggtg

SEQ ID NO: 155751 - DNA, 25 bp, Saccharomyces pastorianus
aaagccgcttacgattacgctgaca

SEQ ID NO: 155752 - DNA, 25 bp, Saccharomyces pastorianus
tacgctgacagattggctaaaattt

SEQ ID NO: 155753 - DNA, 25 bp, Saccharomyces pastorianus
attacccattgctggtgagatgttg

SEQ ID NO: 155754 - DNA, 25 bp, Saccharomyces pastorianus
aaatggccctgtatctatgtcttac

SEQ ID NO: 155755 - DNA, 25 bp, Saccharomyces pastorianus
agatgtaggctcaacttttgctctc

SEQ ID NO: 155756 - DNA, 25 bp, Saccharomyces pastorianus
gacgaattcgtatcaccattaccaa

SEQ ID NO: 155757 - DNA, 25 bp, Saccharomyces pastorianus
acagtctgcatacttcttcgggatg

SEQ ID NO: 155758 - DNA, 25 bp, Saccharomyces pastorianus
gcagacgcttatatgctcggcttag

SEQ ID NO: 155759 - DNA, 25 bp, Saccharomyces pastorianus
tgaagcctgttttaacttgtctaaa

SEQ ID NO: 155760 - DNA, 25 bp, Saccharomyces pastorianus
gaaggtaaggctttcgcacaagaat

SEQ ID NO: 155761 - DNA, 25 bp, Saccharomyces pastorianus
tttaataacgatccacagtctgcat

SEQ ID NO: 155762 - DNA, 25 bp, Saccharomyces pastorianus
catgcccgagatggacattggtttt

SEQ ID NO: 155763 - DNA, 25 bp, Saccharomyces pastorianus
ttttgctctccctagaatcgtgaca

SEQ ID NO: 155764 - DNA, 25 bp, Saccharomyces pastorianus
ggcttagcgtctcattacgtcagta

SEQ ID NO: 155765 - DNA, 25 bp, Saccharomyces pastorianus
attccatcaaattttttactgatga

SEQ ID NO: 155766 - DNA, 25 bp, Saccharomyces pastorianus
gtggcaatattcaattttaacaaag

SEQ ID NO: 155767 - DNA, 25 bp, Saccharomyces pastorianus
ccaattccatcaaattttttactga

SEQ ID NO: 155768 - DNA, 25 bp, Saccharomyces pastorianus
gccaattccatcaaattttttactg

SEQ ID NO: 155769 - DNA, 25 bp, Saccharomyces pastorianus
ttattcattttaaattcatccaacc

SEQ ID NO: 155770 - DNA, 25 bp, Saccharomyces pastorianus
aaagaatttgccaattccatcaaat

SEQ ID NO: 155771 - DNA, 25 bp, Saccharomyces pastorianus
tactgtggcaatattcaattttaac

SEQ ID NO: 155772 - DNA, 25 bp, Saccharomyces pastorianus
ttgccaattccatcaaattttttac

SEQ ID NO: 155773 - DNA, 25 bp, Saccharomyces pastorianus
taacaaagaatttgccaattccatc

SEQ ID NO: 155774 - DNA, 25 bp, Saccharomyces pastorianus
ctactgtggcaatattcaattttaa

SEQ ID NO: 155775 - DNA, 25 bp, Saccharomyces pastorianus
gaatttgccaattccatcaaatttt

SEQ ID NO: 155776 - DNA, 25 bp, Saccharomyces pastorianus
gaacgccgaaatgtcagaatccatg

SEQ ID NO: 155777 - DNA, 25 bp, Saccharomyces pastorianus
taccgttcaagatacagctagagtt

SEQ ID NO: 155778 - DNA, 25 bp, Saccharomyces pastorianus
agtcatattaaagtcatccaaccga

SEQ ID NO: 155779 - DNA, 25 bp, Saccharomyces pastorianus
aaatgtgcccaattgtcgtctaaat

SEQ ID NO: 155780 - DNA, 25 bp, Saccharomyces pastorianus
aataggcccaaaaagctcaatgctt

SEQ ID NO: 155781 - DNA, 25 bp, Saccharomyces pastorianus
atgactactcaaccccagctaaatg

SEQ ID NO: 155782 - DNA, 25 bp, Saccharomyces pastorianus
ctaccacacgtacattcatgactac

SEQ ID NO: 155783 - DNA, 25 bp, Saccharomyces pastorianus
gagttatcacgctaaataggcccaa

SEQ ID NO: 155784 - DNA, 25 bp, Saccharomyces pastorianus
aagctcaatgctttgaacgccgaaa

SEQ ID NO: 155785 - DNA, 25 bp, Saccharomyces pastorianus
cacctgtgctatttaccgttcaaga

SEQ ID NO: 155786 - DNA, 25 bp, Saccharomyces pastorianus
taaatgtcaccgacgcaccacctgt

SEQ ID NO: 155787 - DNA, 25 bp, Saccharomyces pastorianus
ttgcttctattttgaatgctgtcga

SEQ ID NO: 155788 - DNA, 25 bp, Saccharomyces pastorianus
gctaggtctagaaaaggctgctcca

SEQ ID NO: 155789 - DNA, 25 bp, Saccharomyces pastorianus
acagggtcctgtatggcttcattta

SEQ ID NO: 155790 - DNA, 25 bp, Saccharomyces pastorianus
gaaaatgttgctcaggctttgtatt

SEQ ID NO: 155791 - DNA, 25 bp, Saccharomyces pastorianus
aaatcagtatttcccttatcaccag

SEQ ID NO: 155792 - DNA, 25 bp, Saccharomyces pastorianus
aacattcagaagtttgtcctacaat

SEQ ID NO: 155793 - DNA, 25 bp, Saccharomyces pastorianus
tgtggattattgtcgtcacctcttg

SEQ ID NO: 155794 - DNA, 25 bp, Saccharomyces pastorianus
tcacctcttgttttcctgctatggg

SEQ ID NO: 155795 - DNA, 25 bp, Saccharomyces pastorianus
ttatagatcacgttctgcggctttc

SEQ ID NO: 155796 - DNA, 25 bp, Saccharomyces pastorianus
gcgtctgatattgttctaagcgatg

SEQ ID NO: 155797 - DNA, 25 bp, Saccharomyces pastorianus
gtgcgctttgattctggcttgggaa

SEQ ID NO: 155798 - DNA, 25 bp, Saccharomyces pastorianus
agtgaggaggaagtggacgatttgc

SEQ ID NO: 155799 - DNA, 25 bp, Saccharomyces pastorianus
tggacgatttgcccgtcttaccttt

SEQ ID NO: 155800 - DNA, 25 bp, Saccharomyces pastorianus
ggaagtggacgatttgcccgtctta

SEQ ID NO: 155801 - DNA, 25 bp, Saccharomyces pastorianus
ctaagtgaggaggaagtggacgatt

SEQ ID NO: 155802 - DNA, 25 bp, Saccharomyces pastorianus
gtggacgatttgcccgtcttacctt

SEQ ID NO: 155803 - DNA, 25 bp, Saccharomyces pastorianus
aggaagtggacgatttgcccgtctt

SEQ ID NO: 155804 - DNA, 25 bp, Saccharomyces pastorianus
gaagtggacgatttgcccgtcttac

SEQ ID NO: 155805 - DNA, 25 bp, Saccharomyces pastorianus
aagtgaggaggaagtggacgatttg

SEQ ID NO: 155806 - DNA, 25 bp, Saccharomyces pastorianus
agtggacgatttgcccgtcttacct

SEQ ID NO: 155807 - DNA, 25 bp, Saccharomyces pastorianus
taagtgaggaggaagtggacgattt

SEQ ID NO: 155808 - DNA, 25 bp, Saccharomyces pastorianus
gaggaagtggacgatttgcccgtct

SEQ ID NO: 155809 - DNA, 25 bp, Saccharomyces pastorianus
gaacatattgctgaattcccattcg

SEQ ID NO: 155810 - DNA, 25 bp, Saccharomyces pastorianus
taagagtcttgggttttgcctccaa

SEQ ID NO: 155811 - DNA, 25 bp, Saccharomyces pastorianus
attacttcaaacagggccaccgcag

SEQ ID NO: 155812 - DNA, 25 bp, Saccharomyces pastorianus
gaatgtcatctgtctactacaacaa

SEQ ID NO: 155813 - DNA, 25 bp, Saccharomyces pastorianus
ctgccggtgcagtcaagaagtttca

SEQ ID NO: 155814 - DNA, 25 bp, Saccharomyces pastorianus
gaagcctggcagtgcacaattcgaa

SEQ ID NO: 155815 - DNA, 25 bp, Saccharomyces pastorianus
gttttgcctccaaatctttcactaa

SEQ ID NO: 155816 - DNA, 25 bp, Saccharomyces pastorianus
aatcctctctttcacaacacaatga

SEQ ID NO: 155817 - DNA, 25 bp, Saccharomyces pastorianus
ttggtatttacgatccacccagaaa

SEQ ID NO: 155818 - DNA, 25 bp, Saccharomyces pastorianus
gaattcccattcgactcaactgtga

SEQ ID NO: 155819 - DNA, 25 bp, Saccharomyces pastorianus
catcatcagttgttgcagttcttgg

SEQ ID NO: 155820 - DNA, 25 bp, Saccharomyces pastorianus
aggacactttcctttagcaaagctt

SEQ ID NO: 155821 - DNA, 25 bp, Saccharomyces pastorianus
tttaccattttcagattagcggagt

SEQ ID NO: 155822 - DNA, 25 bp, Saccharomyces pastorianus
acacatccctgaatgtccaacattt

SEQ ID NO: 155823 - DNA, 25 bp, Saccharomyces pastorianus
gaaactttctcaatatgaatccaga

SEQ ID NO: 155824 - DNA, 25 bp, Saccharomyces pastorianus
gtccaacatttcaggtggattcgaa

SEQ ID NO: 155825 - DNA, 25 bp, Saccharomyces pastorianus
tgattccactactctgctcgaaagt

SEQ ID NO: 155826 - DNA, 25 bp, Saccharomyces pastorianus
tctaaaggtcctcattttttctatt

SEQ ID NO: 155827 - DNA, 25 bp, Saccharomyces pastorianus
gtatacaaactctctgaccagaagt

SEQ ID NO: 155828 - DNA, 25 bp, Saccharomyces pastorianus
gattccatatctgctaccaagaatg

SEQ ID NO: 155829 - DNA, 25 bp, Saccharomyces pastorianus
gttggagtactgagcgaaactttct

SEQ ID NO: 155830 - DNA, 25 bp, Saccharomyces pastorianus
gaagtatcggttacacacatccctg

SEQ ID NO: 155831 - DNA, 25 bp, Saccharomyces pastorianus
gaagagccgaaagccaacgtttaga

SEQ ID NO: 155832 - DNA, 25 bp, Saccharomyces pastorianus
gttacgttatggtgtccttcgtcac

SEQ ID NO: 155833 - DNA, 25 bp, Saccharomyces pastorianus
aacagcttcactaactccggagatt

SEQ ID NO: 155834 - DNA, 25 bp, Saccharomyces pastorianus
cttcgtcacgtattttatggtccaa

SEQ ID NO: 155835 - DNA, 25 bp, Saccharomyces pastorianus
gatgggtgtcacttatccgacgctt

SEQ ID NO: 155836 - DNA, 25 bp, Saccharomyces pastorianus
gatcctatagtaacgtcttccaaaa

SEQ ID NO: 155837 - DNA, 25 bp, Saccharomyces pastorianus
ggtctttagtcatcggttacgttat

SEQ ID NO: 155838 - DNA, 25 bp, Saccharomyces pastorianus
gaacaggtcttctagttgccaacgc

SEQ ID NO: 155839 - DNA, 25 bp, Saccharomyces pastorianus
caaaggtttgagtcttgcaggcccg

SEQ ID NO: 155840 - DNA, 25 bp, Saccharomyces pastorianus
gttagttcacagattcgtcgactca

SEQ ID NO: 155841 - DNA, 25 bp, Saccharomyces pastorianus
gacgcttccaggtaacttcaatgca

SEQ ID NO: 155842 - DNA, 25 bp, Saccharomyces pastorianus
attgaacactgcttctatcccagaa

SEQ ID NO: 155843 - DNA, 25 bp, Saccharomyces pastorianus
ttgttatctgtcctccagctaccta

SEQ ID NO: 155844 - DNA, 25 bp, Saccharomyces pastorianus
gaagttgttatctgtcctccagcta

SEQ ID NO: 155845 - DNA, 25 bp, Saccharomyces pastorianus
tgtctctttggttaagaagccacaa

SEQ ID NO: 155846 - DNA, 25 bp, Saccharomyces pastorianus
ttatctgtcctccagctacctactt

SEQ ID NO: 155847 - DNA, 25 bp, Saccharomyces pastorianus
aagattgaacactgcttctatccca

SEQ ID NO: 155848 - DNA, 25 bp, Saccharomyces pastorianus
gattgaacactgcttctatcccaga

SEQ ID NO: 155849 - DNA, 25 bp, Saccharomyces pastorianus
aagttgttatctgtcctccagctac

SEQ ID NO: 155850 - DNA, 25 bp, Saccharomyces pastorianus
actctgtctctttggttaagaagcc

SEQ ID NO: 155851 - DNA, 25 bp, Saccharomyces pastorianus
tgaacactgcttctatcccagaaaa

SEQ ID NO: 155852 - DNA, 25 bp, Saccharomyces pastorianus
gactactctgtctctttggttaaga

SEQ ID NO: 155853 - DNA, 25 bp, Saccharomyces pastorianus
tgagatttccggaagactttccctt

SEQ ID NO: 155854 - DNA, 25 bp, Saccharomyces pastorianus
gaaagctattccctcatttcatata

SEQ ID NO: 155855 - DNA, 25 bp, Saccharomyces pastorianus
ttagaggaccccaatatcaactcgc

SEQ ID NO: 155856 - DNA, 25 bp, Saccharomyces pastorianus
atcaactcgccagcaaatgtcgatg

SEQ ID NO: 155857 - DNA, 25 bp, Saccharomyces pastorianus
atgtcgatgccgctgttgattacag

SEQ ID NO: 155858 - DNA, 25 bp, Saccharomyces pastorianus
atgaccgacgaacctgatgctgaaa

SEQ ID NO: 155859 - DNA, 25 bp, Saccharomyces pastorianus
aaggtttcataatgcccacttctga

SEQ ID NO: 155860 - DNA, 25 bp, Saccharomyces pastorianus
gaatcggcgtacatatctcaaagta

SEQ ID NO: 155861 - DNA, 25 bp, Saccharomyces pastorianus
agtttcgatttacgccggctatcta

SEQ ID NO: 155862 - DNA, 25 bp, Saccharomyces pastorianus
gtgtgttgatctctatagtatctct

SEQ ID NO: 155863 - DNA, 25 bp, Saccharomyces pastorianus
ttttctccaccacagtttcgattta

SEQ ID NO: 155864 - DNA, 25 bp, Saccharomyces pastorianus
atcgaagttgacgatctggatataa

SEQ ID NO: 155865 - DNA, 25 bp, Saccharomyces pastorianus
gaaaactttaactctgaaatcgaag

SEQ ID NO: 155866 - DNA, 25 bp, Saccharomyces pastorianus
ctctgaaatcgaagttgacgatctg

SEQ ID NO: 155867 - DNA, 25 bp, Saccharomyces pastorianus
cgaagttgacgatctggatataaag

SEQ ID NO: 155868 - DNA, 25 bp, Saccharomyces pastorianus
gttgacgatctggatataaaggata

SEQ ID NO: 155869 - DNA, 25 bp, Saccharomyces pastorianus
actttaactctgaaatcgaagttga

SEQ ID NO: 155870 - DNA, 25 bp, Saccharomyces pastorianus
aactctgaaatcgaagttgacgatc

SEQ ID NO: 155871 - DNA, 25 bp, Saccharomyces pastorianus
gaaatcgaagttgacgatctggata

SEQ ID NO: 155872 - DNA, 25 bp, Saccharomyces pastorianus
taaagtttccctggattaccgtgcg

SEQ ID NO: 155873 - DNA, 25 bp, Saccharomyces pastorianus
ttaactctgaaatcgaagttgacga

SEQ ID NO: 155874 - DNA, 25 bp, Saccharomyces pastorianus
gataaagtttccctggattaccgtg

SEQ ID NO: 155875 - DNA, 25 bp, Saccharomyces pastorianus
gaaagttttcatattggagtacggt

SEQ ID NO: 155876 - DNA, 25 bp, Saccharomyces pastorianus
tgataatatctctcgtggtagcatg

SEQ ID NO: 155877 - DNA, 25 bp, Saccharomyces pastorianus
ggtagcatgtatgagaaagttttca

SEQ ID NO: 155878 - DNA, 25 bp, Saccharomyces pastorianus
ctctcgtggtagcatgtatgagaaa

SEQ ID NO: 155879 - DNA, 25 bp, Saccharomyces pastorianus
cgaatggtgaattgataatatctct

SEQ ID NO: 155880 - DNA, 25 bp, Saccharomyces pastorianus
atctctcgtggtagcatgtatgaga

SEQ ID NO: 155881 - DNA, 25 bp, Saccharomyces pastorianus
aatatctctcgtggtagcatgtatg

SEQ ID NO: 155882 - DNA, 25 bp, Saccharomyces pastorianus
atatctctcgtggtagcatgtatga

SEQ ID NO: 155883 - DNA, 25 bp, Saccharomyces pastorianus
attgataatatctctcgtggtagca

SEQ ID NO: 155884 - DNA, 25 bp, Saccharomyces pastorianus
taatatctctcgtggtagcatgtat

SEQ ID NO: 155885 - DNA, 25 bp, Saccharomyces pastorianus
gataatatctctcgtggtagcatgt

SEQ ID NO: 155886 - DNA, 25 bp, Saccharomyces pastorianus
aaatacatattatctttgacaccag

SEQ ID NO: 155887 - DNA, 25 bp, Saccharomyces pastorianus
acactagtgactccgttacaatttt

SEQ ID NO: 155888 - DNA, 25 bp, Saccharomyces pastorianus
ttcgaccgtacagccaaatttatat

SEQ ID NO: 155889 - DNA, 25 bp, Saccharomyces pastorianus
cattcctgagaacccttagattgaa

SEQ ID NO: 155890 - DNA, 25 bp, Saccharomyces pastorianus
gaacctttgagcactgatcctctaa

SEQ ID NO: 155891 - DNA, 25 bp, Saccharomyces pastorianus
gagaaatcaatctcccattcctgag

SEQ ID NO: 155892 - DNA, 25 bp, Saccharomyces pastorianus
agcactgatcctctaatggtaaagt

SEQ ID NO: 155893 - DNA, 25 bp, Saccharomyces pastorianus
tttgacaccagaacctttgagcact

SEQ ID NO: 155894 - DNA, 25 bp, Saccharomyces pastorianus
atatagaggatcttacccacgagaa

SEQ ID NO: 155895 - DNA, 25 bp, Saccharomyces pastorianus
ggcagacaagaccaaaccccagatt

SEQ ID NO: 155896 - DNA, 25 bp, Saccharomyces pastorianus
tgactccgttacaattttcgaccgt

SEQ ID NO: 155897 - DNA, 25 bp, Saccharomyces pastorianus
attgcctcgtcaattgagtgggaac

SEQ ID NO: 155898 - DNA, 25 bp, Saccharomyces pastorianus
ataccaaccttttacggtgctgtca

SEQ ID NO: 155899 - DNA, 25 bp, Saccharomyces pastorianus
ggacaatacgcctcactactaaaat

SEQ ID NO: 155900 - DNA, 25 bp, Saccharomyces pastorianus
acaggactgccaagagttttgccaa

SEQ ID NO: 155901 - DNA, 25 bp, Saccharomyces pastorianus
gggaacgattcttgactactgattt

SEQ ID NO: 155902 - DNA, 25 bp, Saccharomyces pastorianus
ttaagactgcatcccaacaggactg

SEQ ID NO: 155903 - DNA, 25 bp, Saccharomyces pastorianus
tgctgtcaatccctattcctaaaaa

SEQ ID NO: 155904 - DNA, 25 bp, Saccharomyces pastorianus
gagttttgccaattccttctagatg

SEQ ID NO: 155905 - DNA, 25 bp, Saccharomyces pastorianus
atgcggttcaaacccacctttgaag

SEQ ID NO: 155906 - DNA, 25 bp, Saccharomyces pastorianus
aaaactgtctttgcgaattgcctcg

SEQ ID NO: 155907 - DNA, 25 bp, Saccharomyces pastorianus
aagtctgtagtcatacctcgacaat

SEQ ID NO: 155908 - DNA, 25 bp, Saccharomyces pastorianus
tagccatttgggtactcatttgaac

SEQ ID NO: 155909 - DNA, 25 bp, Saccharomyces pastorianus
ggatttcacatgtctcctattgtgt

SEQ ID NO: 155910 - DNA, 25 bp, Saccharomyces pastorianus
gtatacttatacgtcttccaaccac

SEQ ID NO: 155911 - DNA, 25 bp, Saccharomyces pastorianus
tatttttcattacccctgcaagcgc

SEQ ID NO: 155912 - DNA, 25 bp, Saccharomyces pastorianus
ccttgcccctgtttacatttgttat

SEQ ID NO: 155913 - DNA, 25 bp, Saccharomyces pastorianus
ttactggcttggttctcctatgtca

SEQ ID NO: 155914 - DNA, 25 bp, Saccharomyces pastorianus
catggtttactcatctgtacggtat

SEQ ID NO: 155915 - DNA, 25 bp, Saccharomyces pastorianus
tttggtttcaaggtccaccagctta

SEQ ID NO: 155916 - DNA, 25 bp, Saccharomyces pastorianus
aatgctttagttttgccctaggatt

SEQ ID NO: 155917 - DNA, 25 bp, Saccharomyces pastorianus
gatcatttctttgcttaccagtcgg

SEQ ID NO: 155918 - DNA, 25 bp, Saccharomyces pastorianus
gacaattttcataccgtttgccttg

SEQ ID NO: 155919 - DNA, 25 bp, Saccharomyces pastorianus
ttctgcctggctctaatgggtacaa

SEQ ID NO: 155920 - DNA, 25 bp, Saccharomyces pastorianus
agatgagtcctgtactatagtggtc

SEQ ID NO: 155921 - DNA, 25 bp, Saccharomyces pastorianus
tactatagtggtcttctgcctggct

SEQ ID NO: 155922 - DNA, 25 bp, Saccharomyces pastorianus
aaatgtgccgctaccagatgagtcc

SEQ ID NO: 155923 - DNA, 25 bp, Saccharomyces pastorianus
acgccataaagtccacagttttgat

SEQ ID NO: 155924 - DNA, 25 bp, Saccharomyces pastorianus
aatttttcaagccacctgcggagat

SEQ ID NO: 155925 - DNA, 25 bp, Saccharomyces pastorianus
aagccacctgcggagattattgaag

SEQ ID NO: 155926 - DNA, 25 bp, Saccharomyces pastorianus
aatgctccaggtgggttaccaggtc

SEQ ID NO: 155927 - DNA, 25 bp, Saccharomyces pastorianus
gggtacaaatttcctcgatttcata

SEQ ID NO: 155928 - DNA, 25 bp, Saccharomyces pastorianus
aagcttataggattttagcgccaag

SEQ ID NO: 155929 - DNA, 25 bp, Saccharomyces pastorianus
cgctttgaagctgatgggatttttt

SEQ ID NO: 155930 - DNA, 25 bp, Saccharomyces pastorianus
gatctcgctcgttataacgaactga

SEQ ID NO: 155931 - DNA, 25 bp, Saccharomyces pastorianus
gtgggatccggtatgcagttatttt

SEQ ID NO: 155932 - DNA, 25 bp, Saccharomyces pastorianus
tttgccgcagtaggtcttgtgtcac

SEQ ID NO: 155933 - DNA, 25 bp, Saccharomyces pastorianus
ttttcgtggaccctattggaaggcg

SEQ ID NO: 155934 - DNA, 25 bp, Saccharomyces pastorianus
ggatttgtaggatcctacgcctcaa

SEQ ID NO: 155935 - DNA, 25 bp, Saccharomyces pastorianus
aaccccatctaagtcgatgctgcta

SEQ ID NO: 155936 - DNA, 25 bp, Saccharomyces pastorianus
ggtgacgtatttagaaccccatcta

SEQ ID NO: 155937 - DNA, 25 bp, Saccharomyces pastorianus
tccctgccaactgtaatgtttgttc

SEQ ID NO: 155938 - DNA, 25 bp, Saccharomyces pastorianus
ttgtgtcacctgtttccagaggatc

SEQ ID NO: 155939 - DNA, 25 bp, Saccharomyces pastorianus
gatgctgctatccattcttgtggga

SEQ ID NO: 155940 - DNA, 25 bp, Saccharomyces pastorianus
acgcctcaatgggtgtctacaaatt

SEQ ID NO: 155941 - DNA, 25 bp, Saccharomyces pastorianus
cctggcgcatgttctacaacgggaa

SEQ ID NO: 155942 - DNA, 25 bp, Saccharomyces pastorianus
gacagcccaagaatgttaagcctaa

SEQ ID NO: 155943 - DNA, 25 bp, Saccharomyces pastorianus
aaactattacggcacaggatttgag

SEQ ID NO: 155944 - DNA, 25 bp, Saccharomyces pastorianus
aagagcttacttcagaggcctcaaa

SEQ ID NO: 155945 - DNA, 25 bp, Saccharomyces pastorianus
atcgaaagatcgtcacctggcgcat

SEQ ID NO: 155946 - DNA, 25 bp, Saccharomyces pastorianus
ggtaaagcagttcccagtacgatgg

SEQ ID NO: 155947 - DNA, 25 bp, Saccharomyces pastorianus
gtgtcattgtaaaccctgtatctat

SEQ ID NO: 155948 - DNA, 25 bp, Saccharomyces pastorianus
cagccggagtcgttaggttcagtca

SEQ ID NO: 155949 - DNA, 25 bp, Saccharomyces pastorianus
taacgaggtttacttcacttattct

SEQ ID NO: 155950 - DNA, 25 bp, Saccharomyces pastorianus
acaacgggaaaacctctgatactag

SEQ ID NO: 155951 - DNA, 25 bp, Saccharomyces pastorianus
gttatattggatgctcgacagccca

SEQ ID NO: 155952 - DNA, 25 bp, Saccharomyces pastorianus
gacgatgcgtttcatgattatgtat

SEQ ID NO: 155953 - DNA, 25 bp, Saccharomyces pastorianus
gacctttcgacgatgcgtttcatga

SEQ ID NO: 155954 - DNA, 25 bp, Saccharomyces pastorianus
agtcttctggaagcgcttaagttgt

SEQ ID NO: 155955 - DNA, 25 bp, Saccharomyces pastorianus
aacgtttctcagtgagtttctccgg

SEQ ID NO: 155956 - DNA, 25 bp, Saccharomyces pastorianus
gtacctcacggcttctatgggaaaa

SEQ ID NO: 155957 - DNA, 25 bp, Saccharomyces pastorianus
gagtttctccggtagttatttcact

SEQ ID NO: 155958 - DNA, 25 bp, Saccharomyces pastorianus
cgatcacgtgatccgagcttcaaat

SEQ ID NO: 155959 - DNA, 25 bp, Saccharomyces pastorianus
tatctatacagtcttctggaagcgc

SEQ ID NO: 155960 - DNA, 25 bp, Saccharomyces pastorianus
aaattccttacagctttcgatcacg

SEQ ID NO: 155961 - DNA, 25 bp, Saccharomyces pastorianus
gagcttcaaatgacctttcgacgat

SEQ ID NO: 155962 - DNA, 25 bp, Saccharomyces pastorianus
ttatttcacttgttgtacctcacgg

SEQ ID NO: 155963 - DNA, 25 bp, Saccharomyces pastorianus
gcccacaaaccggtatgctcttaaa

SEQ ID NO: 155964 - DNA, 25 bp, Saccharomyces pastorianus
aacagttcaccattgaagaccccgt

SEQ ID NO: 155965 - DNA, 25 bp, Saccharomyces pastorianus
ttctttctctgctctatctgtgtta

SEQ ID NO: 155966 - DNA, 25 bp, Saccharomyces pastorianus
atctatatcttctttctctgctcta

SEQ ID NO: 155967 - DNA, 25 bp, Saccharomyces pastorianus
cttcacaccgttgggatttggctta

SEQ ID NO: 155968 - DNA, 25 bp, Saccharomyces pastorianus
gctctatctgtgttacgcccacaaa

SEQ ID NO: 155969 - DNA, 25 bp, Saccharomyces pastorianus
gtcactatttgcaaggctctgccag

SEQ ID NO: 155970 - DNA, 25 bp, Saccharomyces pastorianus
gctctgccagcctcaatcaagaaga

SEQ ID NO: 155971 - DNA, 25 bp, Saccharomyces pastorianus
aatgttttcatctatatcttctttc

SEQ ID NO: 155972 - DNA, 25 bp, Saccharomyces pastorianus
accggtatgctcttaaacagttcac

SEQ ID NO: 155973 - DNA, 25 bp, Saccharomyces pastorianus
gccagcctcaatcaagaagaatgtt

SEQ ID NO: 155974 - DNA, 25 bp, Saccharomyces pastorianus
aagcgcatccctagtgtttccaaaa

SEQ ID NO: 155975 - DNA, 25 bp, Saccharomyces pastorianus
ggaagaagcgcatccctagtgtttc

SEQ ID NO: 155976 - DNA, 25 bp, Saccharomyces pastorianus
tatcggtggatggaagaagcgcatc

SEQ ID NO: 155977 - DNA, 25 bp, Saccharomyces pastorianus
atgcaccgcgaaggtatcggtggat

SEQ ID NO: 155978 - DNA, 25 bp, Saccharomyces pastorianus
agcgcatccctagtgtttccaaaag

SEQ ID NO: 155979 - DNA, 25 bp, Saccharomyces pastorianus
gaagaagcgcatccctagtgtttcc

SEQ ID NO: 155980 - DNA, 25 bp, Saccharomyces pastorianus
gcgcatccctagtgtttccaaaaga

SEQ ID NO: 155981 - DNA, 25 bp, Saccharomyces pastorianus
atggaagaagcgcatccctagtgtt

SEQ ID NO: 155982 - DNA, 25 bp, Saccharomyces pastorianus
agaagcgcatccctagtgtttccaa

SEQ ID NO: 155983 - DNA, 25 bp, Saccharomyces pastorianus
gaagcgcatccctagtgtttccaaa

SEQ ID NO: 155984 - DNA, 25 bp, Saccharomyces pastorianus
gcatccctagtgtttccaaaagaaa

SEQ ID NO: 155985 - DNA, 25 bp, Saccharomyces pastorianus
ggtacacgaatcagccccaaagttt

SEQ ID NO: 155986 - DNA, 25 bp, Saccharomyces pastorianus
aagcacgctacggaatcttcagatt

SEQ ID NO: 155987 - DNA, 25 bp, Saccharomyces pastorianus
acttgcagagagattgtccccattc

SEQ ID NO: 155988 - DNA, 25 bp, Saccharomyces pastorianus
tccttgggtggttatgtcttccaca

SEQ ID NO: 155989 - DNA, 25 bp, Saccharomyces pastorianus
tgttttaagcggagccaccctgtta

SEQ ID NO: 155990 - DNA, 25 bp, Saccharomyces pastorianus
accctgttactatatgtggcactta

SEQ ID NO: 155991 - DNA, 25 bp, Saccharomyces pastorianus
cacctatcagtggttctatcgtata

SEQ ID NO: 155992 - DNA, 25 bp, Saccharomyces pastorianus
cccattctttttctccattgtactg

SEQ ID NO: 155993 - DNA, 25 bp, Saccharomyces pastorianus
atcgtatattgtttcggtgccgtgg

SEQ ID NO: 155994 - DNA, 25 bp, Saccharomyces pastorianus
atgtttgtctctgccatttttgggc

SEQ ID NO: 155995 - DNA, 25 bp, Saccharomyces pastorianus
gggctcctctatgatattgacctta

SEQ ID NO: 155996 - DNA, 25 bp, Saccharomyces pastorianus
gaacagcggctaatcaaatctcata

SEQ ID NO: 155997 - DNA, 25 bp, Saccharomyces pastorianus
gctccttacattccaagatcttctg

SEQ ID NO: 155998 - DNA, 25 bp, Saccharomyces pastorianus
aagagatttgcctcctattgaagga

SEQ ID NO: 155999 - DNA, 25 bp, Saccharomyces pastorianus
atgcgactcgctatcaaaaacccgt

SEQ ID NO: 156000 - DNA, 25 bp, Saccharomyces pastorianus
tggagaatccgcctataagtttgag

SEQ ID NO: 156001 - DNA, 25 bp, Saccharomyces pastorianus
gtgccgttattacaggcttttaaat

SEQ ID NO: 156002 - DNA, 25 bp, Saccharomyces pastorianus
aaaaacccgtgaacagccagcaaat

SEQ ID NO: 156003 - DNA, 25 bp, Saccharomyces pastorianus
tttccagcttcttctgcattttcaa

SEQ ID NO: 156004 - DNA, 25 bp, Saccharomyces pastorianus
aacctcgccctactttgaagacgat

SEQ ID NO: 156005 - DNA, 25 bp, Saccharomyces pastorianus
gggaggagcatccatcgatctagat

SEQ ID NO: 156006 - DNA, 25 bp, Saccharomyces pastorianus
aaaaggcatcacttttccagcttct

SEQ ID NO: 156007 - DNA, 25 bp, Saccharomyces pastorianus
gactcctctgaaagctcagttcgag

SEQ ID NO: 156008 - DNA, 25 bp, Saccharomyces pastorianus
gagagccccaatgacgttttttgaa

SEQ ID NO: 156009 - DNA, 25 bp, Saccharomyces pastorianus
ggatctaatccaaatgccgcgcgtt

SEQ ID NO: 156010 - DNA, 25 bp, Saccharomyces pastorianus
gaatgaattcggtgactcctctgaa

SEQ ID NO: 156011 - DNA, 25 bp, Saccharomyces pastorianus
ttggcaactctgacgccataagttt

SEQ ID NO: 156012 - DNA, 25 bp, Saccharomyces pastorianus
tcgatgttcctctctgttatgggta

SEQ ID NO: 156013 - DNA, 25 bp, Saccharomyces pastorianus
gacaaactctgtgttgagagcccca

SEQ ID NO: 156014 - DNA, 25 bp, Saccharomyces pastorianus
cttgcaacccgaaaagcgtttgtgt

SEQ ID NO: 156015 - DNA, 25 bp, Saccharomyces pastorianus
agacaatcgttctctgggttttttg

SEQ ID NO: 156016 - DNA, 25 bp, Saccharomyces pastorianus
ggtattggttcagcactggcaacat

SEQ ID NO: 156017 - DNA, 25 bp, Saccharomyces pastorianus
gttacttggccatttatttcgcact

SEQ ID NO: 156018 - DNA, 25 bp, Saccharomyces pastorianus
ggtgcttgatgaagccacggccgca

SEQ ID NO: 156019 - DNA, 25 bp, Saccharomyces pastorianus
atacctcaggattctcaagtttttg

SEQ ID NO: 156020 - DNA, 25 bp, Saccharomyces pastorianus
ggaaaatcctcattaacgctagcat

SEQ ID NO: 156021 - DNA, 25 bp, Saccharomyces pastorianus
gcaagagcaatgttggttccatcaa

SEQ ID NO: 156022 - DNA, 25 bp, Saccharomyces pastorianus
gacagaactatcttgaccatcgcgc

SEQ ID NO: 156023 - DNA, 25 bp, Saccharomyces pastorianus
gagacgattcgtactgctttcaagg

SEQ ID NO: 156024 - DNA, 25 bp, Saccharomyces pastorianus
gactctccgggccagttattaagtg

SEQ ID NO: 156025 - DNA, 25 bp, Saccharomyces pastorianus
ttagatgcccaactaaccgaaggtg

SEQ ID NO: 156026 - DNA, 25 bp, Saccharomyces pastorianus
aaagtagccgagtttgactctccgg

SEQ ID NO: 156027 - DNA, 25 bp, Saccharomyces pastorianus
gttcgtgagaacattgatcccatta

SEQ ID NO: 156028 - DNA, 25 bp, Saccharomyces pastorianus
tgaccatcgcgcatagactgaacac

SEQ ID NO: 156029 - DNA, 25 bp, Saccharomyces pastorianus
atgtatcgattctgtgcgcacgcat

SEQ ID NO: 156030 - DNA, 25 bp, Saccharomyces pastorianus
gccccgtaggtatcaaagcttcttt

SEQ ID NO: 156031 - DNA, 25 bp, Saccharomyces pastorianus
tagctttcgctgtttgtttcgactg

SEQ ID NO: 156032 - DNA, 25 bp, Saccharomyces pastorianus
gttcatgaatgtttctcttgcgcga

SEQ ID NO: 156033 - DNA, 25 bp, Saccharomyces pastorianus
aacgtttccacctcacggagaaatg

SEQ ID NO: 156034 - DNA, 25 bp, Saccharomyces pastorianus
agacgcgccttacgctttataggag

SEQ ID NO: 156035 - DNA, 25 bp, Saccharomyces pastorianus
atagtacgcttgttatgctgcatca

SEQ ID NO: 156036 - DNA, 25 bp, Saccharomyces pastorianus
gtgcgcacgcatatcttcttttaaa

SEQ ID NO: 156037 - DNA, 25 bp, Saccharomyces pastorianus
ttgcgcgagcagatctactggtcag

SEQ ID NO: 156038 - DNA, 25 bp, Saccharomyces pastorianus
aaaatagcactttggagacgcgcct

SEQ ID NO: 156039 - DNA, 25 bp, Saccharomyces pastorianus
gaagacttttatcgttctccgtgag

SEQ ID NO: 156040 - DNA, 25 bp, Saccharomyces pastorianus
agacgcttgtattttctgaaatttc

SEQ ID NO: 156041 - DNA, 25 bp, Saccharomyces pastorianus
cttttaataccacagacgcttgtat

SEQ ID NO: 156042 - DNA, 25 bp, Saccharomyces pastorianus
gaacattctattttaaatccacaag

SEQ ID NO: 156043 - DNA, 25 bp, Saccharomyces pastorianus
ctgaaatttctttagaaccaggtga

SEQ ID NO: 156044 - DNA, 25 bp, Saccharomyces pastorianus
caaggtatcttataatcgaacggac

SEQ ID NO: 156045 - DNA, 25 bp, Saccharomyces pastorianus
accacagacgcttgtattttctgaa

SEQ ID NO: 156046 - DNA, 25 bp, Saccharomyces pastorianus
tcttttctcagaaagcggttctagg

SEQ ID NO: 156047 - DNA, 25 bp, Saccharomyces pastorianus
tatcttataatcgaacggacgctta

SEQ ID NO: 156048 - DNA, 25 bp, Saccharomyces pastorianus
gatatcaacacgatacctagtataa

SEQ ID NO: 156049 - DNA, 25 bp, Saccharomyces pastorianus
gaacggacgcttaatgatatcaaca

SEQ ID NO: 156050 - DNA, 25 bp, Saccharomyces pastorianus
gaaccaggtgaagtaagaacattct

SEQ ID NO: 156051 - DNA, 25 bp, Saccharomyces pastorianus
aattctgttcttgcattggaagatg

SEQ ID NO: 156052 - DNA, 25 bp, Saccharomyces pastorianus
acgacaaattctgttcttgcattgg

SEQ ID NO: 156053 - DNA, 25 bp, Saccharomyces pastorianus
atcaaacctggtccctaaaatcatt

SEQ ID NO: 156054 - DNA, 25 bp, Saccharomyces pastorianus
atatccggttatgttcaaatatcgg

SEQ ID NO: 156055 - DNA, 25 bp, Saccharomyces pastorianus
taaaatcattactaggtgccttcaa

SEQ ID NO: 156056 - DNA, 25 bp, Saccharomyces pastorianus
atcaacctgtaacgttaatatccgg

SEQ ID NO: 156057 - DNA, 25 bp, Saccharomyces pastorianus
gcaaatgtattttcatcaacctgta

SEQ ID NO: 156058 - DNA, 25 bp, Saccharomyces pastorianus
tactaggtgccttcaaaagaacagg

SEQ ID NO: 156059 - DNA, 25 bp, Saccharomyces pastorianus
acgattcagaggtaatttcagagtc

SEQ ID NO: 156060 - DNA, 25 bp, Saccharomyces pastorianus
ggactagatattgtacctggacata

SEQ ID NO: 156061 - DNA, 25 bp, Saccharomyces pastorianus
gatattgtacctggacatacgacaa

SEQ ID NO: 156062 - DNA, 25 bp, Saccharomyces pastorianus
caacaaagacttatattccagggaa

SEQ ID NO: 156063 - DNA, 25 bp, Saccharomyces pastorianus
tcagatctcgtatatcacatcaagg

SEQ ID NO: 156064 - DNA, 25 bp, Saccharomyces pastorianus
gttcattcagtggttaattatcttt

SEQ ID NO: 156065 - DNA, 25 bp, Saccharomyces pastorianus
atctctgttgagctgaaggaatcag

SEQ ID NO: 156066 - DNA, 25 bp, Saccharomyces pastorianus
agatctcgtatatcacatcaaggaa

SEQ ID NO: 156067 - DNA, 25 bp, Saccharomyces pastorianus
gaaggaatcagatctcgtatatcac

SEQ ID NO: 156068 - DNA, 25 bp, Saccharomyces pastorianus
tcattcagtggttaattatctttta

SEQ ID NO: 156069 - DNA, 25 bp, Saccharomyces pastorianus
ttccagggaaaacaaatgtatgttc

SEQ ID NO: 156070 - DNA, 25 bp, Saccharomyces pastorianus
gaatcagatctcgtatatcacatca

SEQ ID NO: 156071 - DNA, 25 bp, Saccharomyces pastorianus
atgtatgttcattcagtggttaatt

SEQ ID NO: 156072 - DNA, 25 bp, Saccharomyces pastorianus
gagatctctgttgagctgaaggaat

SEQ ID NO: 156073 - DNA, 25 bp, Saccharomyces pastorianus
atcatttggctcagtagtgccttcc

SEQ ID NO: 156074 - DNA, 25 bp, Saccharomyces pastorianus
ggtgcactctacctctcaaaagaag

SEQ ID NO: 156075 - DNA, 25 bp, Saccharomyces pastorianus
gagcttttgtacaagatccctggga

SEQ ID NO: 156076 - DNA, 25 bp, Saccharomyces pastorianus
ttacaaaatctctcacactcacctt

SEQ ID NO: 156077 - DNA, 25 bp, Saccharomyces pastorianus
aaacgatgccaagaccattcaactt

SEQ ID NO: 156078 - DNA, 25 bp, Saccharomyces pastorianus
gaagtcgcaacaaccgttacaaaat

SEQ ID NO: 156079 - DNA, 25 bp, Saccharomyces pastorianus
actgatttcctctcctgataatttg

SEQ ID NO: 156080 - DNA, 25 bp, Saccharomyces pastorianus
aaatgtcttcatggtgcactctacc

SEQ ID NO: 156081 - DNA, 25 bp, Saccharomyces pastorianus
agatccctgggacaaggctaatcaa

SEQ ID NO: 156082 - DNA, 25 bp, Saccharomyces pastorianus
tcaacttgtaggtccactgatttcc

SEQ ID NO: 156083 - DNA, 25 bp, Saccharomyces pastorianus
agtgccttccactaatttcaatttt

SEQ ID NO: 156084 - DNA, 25 bp, Saccharomyces pastorianus
gaagagcccatctctcataagggat

SEQ ID NO: 156085 - DNA, 25 bp, Saccharomyces pastorianus
agatgatcctatgaaactggccaag

SEQ ID NO: 156086 - DNA, 25 bp, Saccharomyces pastorianus
gagcgctgcagagtctaatattctt

SEQ ID NO: 156087 - DNA, 25 bp, Saccharomyces pastorianus
ggaagcaactccttcagaagctctt

SEQ ID NO: 156088 - DNA, 25 bp, Saccharomyces pastorianus
gttccgcaaactttcatcgatttta

SEQ ID NO: 156089 - DNA, 25 bp, Saccharomyces pastorianus
ggagcacttacctattatttcagac

SEQ ID NO: 156090 - DNA, 25 bp, Saccharomyces pastorianus
tgccagccgttaccaaattcttgaa

SEQ ID NO: 156091 - DNA, 25 bp, Saccharomyces pastorianus
gaaattcttactggagcacttacct

SEQ ID NO: 156092 - DNA, 25 bp, Saccharomyces pastorianus
agaagctctttcgagcgctgcagag

SEQ ID NO: 156093 - DNA, 25 bp, Saccharomyces pastorianus
tgaaagttctcttactgatttgcca

SEQ ID NO: 156094 - DNA, 25 bp, Saccharomyces pastorianus
ctagcaaaatcatcagttccgcaaa

SEQ ID NO: 156095 - DNA, 25 bp, Saccharomyces pastorianus
ttcgtcaagcaaattggaatgcccc

SEQ ID NO: 156096 - DNA, 25 bp, Saccharomyces pastorianus
ctgcgacttctcgagtgagaatgtt

SEQ ID NO: 156097 - DNA, 25 bp, Saccharomyces pastorianus
gtctctaaaacaaatgcagtcacag

SEQ ID NO: 156098 - DNA, 25 bp, Saccharomyces pastorianus
gtgctagtggcttgagatcttcgtc

SEQ ID NO: 156099 - DNA, 25 bp, Saccharomyces pastorianus
ggaatgcccccagattctcaaacaa

SEQ ID NO: 156100 - DNA, 25 bp, Saccharomyces pastorianus
gcagtcacagagattttctgcgact

SEQ ID NO: 156101 - DNA, 25 bp, Saccharomyces pastorianus
ttttctgcgacttctcgagtgagaa

SEQ ID NO: 156102 - DNA, 25 bp, Saccharomyces pastorianus
agattttctgcgacttctcgagtga

SEQ ID NO: 156103 - DNA, 25 bp, Saccharomyces pastorianus
gctagtggcttgagatcttcgtcaa

SEQ ID NO: 156104 - DNA, 25 bp, Saccharomyces pastorianus
gtgagaatgttgcttattggtgcta

SEQ ID NO: 156105 - DNA, 25 bp, Saccharomyces pastorianus
tgttgcttattggtgctagtggctt

SEQ ID NO: 156106 - DNA, 25 bp, Saccharomyces pastorianus
ccaacctgcaggtgggtactaccaa

SEQ ID NO: 156107 - DNA, 25 bp, Saccharomyces pastorianus
tcagcagcaattcaatccacaaggt

SEQ ID NO: 156108 - DNA, 25 bp, Saccharomyces pastorianus
ttgacacaaaacctgccgaatctga

SEQ ID NO: 156109 - DNA, 25 bp, Saccharomyces pastorianus
atcctcaaggcggttatcagcagca

SEQ ID NO: 156110 - DNA, 25 bp, Saccharomyces pastorianus
gatgccggttaccagcaacagtata

SEQ ID NO: 156111 - DNA, 25 bp, Saccharomyces pastorianus
aggatatcaagctggtttccaacca

SEQ ID NO: 156112 - DNA, 25 bp, Saccharomyces pastorianus
tgaagcttgtctccagttccggtat

SEQ ID NO: 156113 - DNA, 25 bp, Saccharomyces pastorianus
ttctgggtaccaacaaggtggctat

SEQ ID NO: 156114 - DNA, 25 bp, Saccharomyces pastorianus
gtggctatcaacagtacaatcccga

SEQ ID NO: 156115 - DNA, 25 bp, Saccharomyces pastorianus
ggtttccaaccacagtctcaaggta

SEQ ID NO: 156116 - DNA, 25 bp, Saccharomyces pastorianus
gccgctcccaaaccaaagaagactt

SEQ ID NO: 156117 - DNA, 25 bp, Saccharomyces pastorianus
cagtatccggctacagtggtgcaaa

SEQ ID NO: 156118 - DNA, 25 bp, Saccharomyces pastorianus
tcacatccatgctccattcatgttg

SEQ ID NO: 156119 - DNA, 25 bp, Saccharomyces pastorianus
ggataccatgaaccacgtcgaccgt

SEQ ID NO: 156120 - DNA, 25 bp, Saccharomyces pastorianus
agatgatcggtggtgcttctcaagc

SEQ ID NO: 156121 - DNA, 25 bp, Saccharomyces pastorianus
gacagacgttgtatttatgccagta

SEQ ID NO: 156122 - DNA, 25 bp, Saccharomyces pastorianus
gtgttttggtcatttccgccagaaa

SEQ ID NO: 156123 - DNA, 25 bp, Saccharomyces pastorianus
ccatattggatgctcctggtcataa

SEQ ID NO: 156124 - DNA, 25 bp, Saccharomyces pastorianus
attcatgttgcctattgccgctaag

SEQ ID NO: 156125 - DNA, 25 bp, Saccharomyces pastorianus
accggcccaactctgttagaatatc

SEQ ID NO: 156126 - DNA, 25 bp, Saccharomyces pastorianus
aaagaatgcccatggtacaccggcc

SEQ ID NO: 156127 - DNA, 25 bp, Saccharomyces pastorianus
atggatgacccaaccgttaactggt

SEQ ID NO: 156128 - DNA, 25 bp, Saccharomyces pastorianus
gtcagtgagacgacgacttcaggat

SEQ ID NO: 156129 - DNA, 25 bp, Saccharomyces pastorianus
aattaggcaaaactttgtatgattc

SEQ ID NO: 156130 - DNA, 25 bp, Saccharomyces pastorianus
cgacgacttcaggatctttgggttt

SEQ ID NO: 156131 - DNA, 25 bp, Saccharomyces pastorianus
acgacgacttcaggatctttgggtt

SEQ ID NO: 156132 - DNA, 25 bp, Saccharomyces pastorianus
aagagtcagtgagacgacgacttca

SEQ ID NO: 156133 - DNA, 25 bp, Saccharomyces pastorianus
gacgacttcaggatctttgggtttc

SEQ ID NO: 156134 - DNA, 25 bp, Saccharomyces pastorianus
gagacgacgacttcaggatctttgg

SEQ ID NO: 156135 - DNA, 25 bp, Saccharomyces pastorianus
tcgaaggcatcattggaaaaaagag

SEQ ID NO: 156136 - DNA, 25 bp, Saccharomyces pastorianus
gacgacgacttcaggatctttgggt

SEQ ID NO: 156137 - DNA, 25 bp, Saccharomyces pastorianus
cagtgagacgacgacttcaggatct

SEQ ID NO: 156138 - DNA, 25 bp, Saccharomyces pastorianus
gtgagacgacgacttcaggatcttt

SEQ ID NO: 156139 - DNA, 25 bp, Saccharomyces pastorianus
gttgacaaacttatgcgagatgatt

SEQ ID NO: 156140 - DNA, 25 bp, Saccharomyces pastorianus
aatcctcatctgtcggatgcgagaa

SEQ ID NO: 156141 - DNA, 25 bp, Saccharomyces pastorianus
atttacgaaggagacccggagcgat

SEQ ID NO: 156142 - DNA, 25 bp, Saccharomyces pastorianus
gacccggagcgatgggaattactaa

SEQ ID NO: 156143 - DNA, 25 bp, Saccharomyces pastorianus
ggttctttgagttccatgtcactaa

SEQ ID NO: 156144 - DNA, 25 bp, Saccharomyces pastorianus
gctgaatcagctttcgctcgaatat

SEQ ID NO: 156145 - DNA, 25 bp, Saccharomyces pastorianus
tattttaacaatcctcatctgtcgg

SEQ ID NO: 156146 - DNA, 25 bp, Saccharomyces pastorianus
gaaccgatcaaaatgtttcagatgc

SEQ ID NO: 156147 - DNA, 25 bp, Saccharomyces pastorianus
gtatggtcgttcaagaaccgatcaa

SEQ ID NO: 156148 - DNA, 25 bp, Saccharomyces pastorianus
aaaatccctctgtgctgaatcagct

SEQ ID NO: 156149 - DNA, 25 bp, Saccharomyces pastorianus
aaacaactggttctttgagttccat

SEQ ID NO: 156150 - DNA, 25 bp, Saccharomyces pastorianus
gattctttcttttctgtcatgcttt

SEQ ID NO: 156151 - DNA, 25 bp, Saccharomyces pastorianus
agaagagcttaactatcccattttt

SEQ ID NO: 156152 - DNA, 25 bp, Saccharomyces pastorianus
gcggtctccctttttggaatctata

SEQ ID NO: 156153 - DNA, 25 bp, Saccharomyces pastorianus
ggtccgttatccactgcagctgatt

SEQ ID NO: 156154 - DNA, 25 bp, Saccharomyces pastorianus
gaaaaaatctttgccttgtccgtcg

SEQ ID NO: 156155 - DNA, 25 bp, Saccharomyces pastorianus
gtattaccccagaaaccaggtggtg

SEQ ID NO: 156156 - DNA, 25 bp, Saccharomyces pastorianus
tggctacgacggctatgctgacaac

SEQ ID NO: 156157 - DNA, 25 bp, Saccharomyces pastorianus
ggagaattttccatactgccacagt

SEQ ID NO: 156158 - DNA, 25 bp, Saccharomyces pastorianus
ggaatttaactcttgtatcaccgat

SEQ ID NO: 156159 - DNA, 25 bp, Saccharomyces pastorianus
attagagggctcataccactggtat

SEQ ID NO: 156160 - DNA, 25 bp, Saccharomyces pastorianus
atatgttgggacttggttctgcggt

SEQ ID NO: 156161 - DNA, 25 bp, Saccharomyces pastorianus
ccagtccacttcaccaaaagttagt

SEQ ID NO: 156162 - DNA, 25 bp, Saccharomyces pastorianus
attaatgagcgtcgctttgcccagt

SEQ ID NO: 156163 - DNA, 25 bp, Saccharomyces pastorianus
tggacactgtcggtacggacgcagc

SEQ ID NO: 156164 - DNA, 25 bp, Saccharomyces pastorianus
tacggacgcagcagccgcgagcatt

SEQ ID NO: 156165 - DNA, 25 bp, Saccharomyces pastorianus
gcagcagccgcgagcattaatgagc

SEQ ID NO: 156166 - DNA, 25 bp, Saccharomyces pastorianus
gacactgtcggtacggacgcagcag

SEQ ID NO: 156167 - DNA, 25 bp, Saccharomyces pastorianus
actgtcggtacggacgcagcagccg

SEQ ID NO: 156168 - DNA, 25 bp, Saccharomyces pastorianus
aatgagcgtcgctttgcccagtcca

SEQ ID NO: 156169 - DNA, 25 bp, Saccharomyces pastorianus
tttgcccagtccacttcaccaaaag

SEQ ID NO: 156170 - DNA, 25 bp, Saccharomyces pastorianus
cgagcattaatgagcgtcgctttgc

SEQ ID NO: 156171 - DNA, 25 bp, Saccharomyces pastorianus
cagccgcgagcattaatgagcgtcg

SEQ ID NO: 156172 - DNA, 25 bp, Saccharomyces pastorianus
gggcaggtagatccactttgaaaga

SEQ ID NO: 156173 - DNA, 25 bp, Saccharomyces pastorianus
gaacataggtgattcttgcgaccct

SEQ ID NO: 156174 - DNA, 25 bp, Saccharomyces pastorianus
ccaagtcttgcaccatcttaatcaa

SEQ ID NO: 156175 - DNA, 25 bp, Saccharomyces pastorianus
atcgccctttcgagatacctaagat

SEQ ID NO: 156176 - DNA, 25 bp, Saccharomyces pastorianus
attatgccctcgctcaaacaaagga

SEQ ID NO: 156177 - DNA, 25 bp, Saccharomyces pastorianus
tttgggattcctaccgtgtactaag

SEQ ID NO: 156178 - DNA, 25 bp, Saccharomyces pastorianus
gtctcagagctgtggcaaacgttct

SEQ ID NO: 156179 - DNA, 25 bp, Saccharomyces pastorianus
agacaggtattgaggcgttcgcaga

SEQ ID NO: 156180 - DNA, 25 bp, Saccharomyces pastorianus
taatcaagggctccacacattatgc

SEQ ID NO: 156181 - DNA, 25 bp, Saccharomyces pastorianus
gttggatgacgctcaggattctgac

SEQ ID NO: 156182 - DNA, 25 bp, Saccharomyces pastorianus
gaactcaggattcgacccattggac

SEQ ID NO: 156183 - DNA, 25 bp, Saccharomyces pastorianus
gcctgaaaagaaaaccatcccgata

SEQ ID NO: 156184 - DNA, 25 bp, Saccharomyces pastorianus
aaaacctccaagaatgggcacattc

SEQ ID NO: 156185 - DNA, 25 bp, Saccharomyces pastorianus
atggaccctttaaacagctctcaaa

SEQ ID NO: 156186 - DNA, 25 bp, Saccharomyces pastorianus
aatttggagactactgacagttacc

SEQ ID NO: 156187 - DNA, 25 bp, Saccharomyces pastorianus
attgttctttacttgacatcaacga

SEQ ID NO: 156188 - DNA, 25 bp, Saccharomyces pastorianus
acattatccggtatctatggcttaa

SEQ ID NO: 156189 - DNA, 25 bp, Saccharomyces pastorianus
aagatggatccgattccgctttcaa

SEQ ID NO: 156190 - DNA, 25 bp, Saccharomyces pastorianus
gacagttacctatacatcgacccaa

SEQ ID NO: 156191 - DNA, 25 bp, Saccharomyces pastorianus
gttggtggcggtaactacctagaat

SEQ ID NO: 156192 - DNA, 25 bp, Saccharomyces pastorianus
acattcccagttgcataatcccaaa

SEQ ID NO: 156193 - DNA, 25 bp, Saccharomyces pastorianus
tgacatcaacgacaggcttaccaaa

SEQ ID NO: 156194 - DNA, 25 bp, Saccharomyces pastorianus
tatctcacatgtaattgtcgggctc

SEQ ID NO: 156195 - DNA, 25 bp, Saccharomyces pastorianus
gctcaagtctgccaagggtaccaag

SEQ ID NO: 156196 - DNA, 25 bp, Saccharomyces pastorianus
gaactaacccctgaagacgcagaga

SEQ ID NO: 156197 - DNA, 25 bp, Saccharomyces pastorianus
caggtaagacggcattggctctcgc

SEQ ID NO: 156198 - DNA, 25 bp, Saccharomyces pastorianus
ggctctcgccatttcacaagagtta

SEQ ID NO: 156199 - DNA, 25 bp, Saccharomyces pastorianus
tagctggtggcccttctacaggtaa

SEQ ID NO: 156200 - DNA, 25 bp, Saccharomyces pastorianus
acagcagtaattctggtgcagttac

SEQ ID NO: 156201 - DNA, 25 bp, Saccharomyces pastorianus
agctcgtgaagcgtgcggtgtaatt

SEQ ID NO: 156202 - DNA, 25 bp, Saccharomyces pastorianus
attctgtcctcttgttggtaccgaa

SEQ ID NO: 156203 - DNA, 25 bp, Saccharomyces pastorianus
gaactgcggcacatacacatattaa

SEQ ID NO: 156204 - DNA, 25 bp, Saccharomyces pastorianus
ttaggcccaaaagttccattctgtc

SEQ ID NO: 156205 - DNA, 25 bp, Saccharomyces pastorianus
aaaatccccggagcacaagatataa

SEQ ID NO: 156206 - DNA, 25 bp, Saccharomyces pastorianus
agagttgtaccgagccattattggc

SEQ ID NO: 156207 - DNA, 25 bp, Saccharomyces pastorianus
agttgacgttgggaccatacatcaa

SEQ ID NO: 156208 - DNA, 25 bp, Saccharomyces pastorianus
ataggttccgatctagttagttttg

SEQ ID NO: 156209 - DNA, 25 bp, Saccharomyces pastorianus
ttgcaaagattgatggttttcctcg

SEQ ID NO: 156210 - DNA, 25 bp, Saccharomyces pastorianus
tatcgatggcgctttgatgaggcaa

SEQ ID NO: 156211 - DNA, 25 bp, Saccharomyces pastorianus
tggtttccaggatttgttcttcact

SEQ ID NO: 156212 - DNA, 25 bp, Saccharomyces pastorianus
gagcagctgtcaattatcgatcgat

SEQ ID NO: 156213 - DNA, 25 bp, Saccharomyces pastorianus
agggaaatttccaggctacgatctg

SEQ ID NO: 156214 - DNA, 25 bp, Saccharomyces pastorianus
gggctttacaacaccagttgacgtt

SEQ ID NO: 156215 - DNA, 25 bp, Saccharomyces pastorianus
gaatttcaactgtctctcaaagtga

SEQ ID NO: 156216 - DNA, 25 bp, Saccharomyces pastorianus
actttagtgccgtatgtcgatttca

SEQ ID NO: 156217 - DNA, 25 bp, Saccharomyces pastorianus
ttaccattagatgcggcgatcacct

SEQ ID NO: 156218 - DNA, 25 bp, Saccharomyces pastorianus
gaggataacctctgcttacaactta

SEQ ID NO: 156219 - DNA, 25 bp, Saccharomyces pastorianus
ggcgatcacctctatgacaacatta

SEQ ID NO: 156220 - DNA, 25 bp, Saccharomyces pastorianus
agacgcttagcgagttgacagaaaa

SEQ ID NO: 156221 - DNA, 25 bp, Saccharomyces pastorianus
gtcgatttcatgaaccacatttgtg

SEQ ID NO: 156222 - DNA, 25 bp, Saccharomyces pastorianus
tgtgagtcggatttgcactgctatc

SEQ ID NO: 156223 - DNA, 25 bp, Saccharomyces pastorianus
ggaactacttagacatatctgacga

SEQ ID NO: 156224 - DNA, 25 bp, Saccharomyces pastorianus
gaattattggtctccttaactgcaa

SEQ ID NO: 156225 - DNA, 25 bp, Saccharomyces pastorianus
tgctatcctcagttaagtcctcagt

SEQ ID NO: 156226 - DNA, 25 bp, Saccharomyces pastorianus
atgacaacattaacgaggagctctt

SEQ ID NO: 156227 - DNA, 25 bp, Saccharomyces pastorianus
taggactggaacttacgctttgtag

SEQ ID NO: 156228 - DNA, 25 bp, Saccharomyces pastorianus
ttcacattgttgtcagattcccaca

SEQ ID NO: 156229 - DNA, 25 bp, Saccharomyces pastorianus
aatgttccaggattgttactcagtc

SEQ ID NO: 156230 - DNA, 25 bp, Saccharomyces pastorianus
aaatcctcctagagacctggtattc

SEQ ID NO: 156231 - DNA, 25 bp, Saccharomyces pastorianus
cacagctcacatcctaggactggaa

SEQ ID NO: 156232 - DNA, 25 bp, Saccharomyces pastorianus
atgcctgtatctaatggtattccca

SEQ ID NO: 156233 - DNA, 25 bp, Saccharomyces pastorianus
gtaaaagaatgctcctggctcatcg

SEQ ID NO: 156234 - DNA, 25 bp, Saccharomyces pastorianus
tgttactcagtctgcgaatccacag

SEQ ID NO: 156235 - DNA, 25 bp, Saccharomyces pastorianus
gaaatcgtcaaaccgcaattaccca

SEQ ID NO: 156236 - DNA, 25 bp, Saccharomyces pastorianus
gcgaattcgtatccaaatttggcgt

SEQ ID NO: 156237 - DNA, 25 bp, Saccharomyces pastorianus
ggcgtggccatggaacttttgaacc

SEQ ID NO: 156238 - DNA, 25 bp, Saccharomyces pastorianus
aagtgattcctctgggaggcgcatt

SEQ ID NO: 156239 - DNA, 25 bp, Saccharomyces pastorianus
ctgctgtttgcaatttccggttgga

SEQ ID NO: 156240 - DNA, 25 bp, Saccharomyces pastorianus
tttgccagtgaaatgccaacgtcgt

SEQ ID NO: 156241 - DNA, 25 bp, Saccharomyces pastorianus
ggaacctcggtacaacggccatgtt

SEQ ID NO: 156242 - DNA, 25 bp, Saccharomyces pastorianus
gagatcttgcatatggaccaactag

SEQ ID NO: 156243 - DNA, 25 bp, Saccharomyces pastorianus
tgttccccttcatcggtacgagaaa

SEQ ID NO: 156244 - DNA, 25 bp, Saccharomyces pastorianus
ggcggcaatgtacaccttaggctca

SEQ ID NO: 156245 - DNA, 25 bp, Saccharomyces pastorianus
tgcattgccggtcttcttggagaat

SEQ ID NO: 156246 - DNA, 25 bp, Saccharomyces pastorianus
aatactcggccaatggaacctcggt

SEQ ID NO: 156247 - DNA, 25 bp, Saccharomyces pastorianus
tgggctaatattacctgcggcggca

SEQ ID NO: 156248 - DNA, 25 bp, Saccharomyces pastorianus
cgagttacgtattagggccctggct

SEQ ID NO: 156249 - DNA, 25 bp, Saccharomyces pastorianus
gaagagtttaccactttattgcaac

SEQ ID NO: 156250 - DNA, 25 bp, Saccharomyces pastorianus
gacactagccgtttctattgttgga

SEQ ID NO: 156251 - DNA, 25 bp, Saccharomyces pastorianus
aaatgccggctcaagaatgtatgat

SEQ ID NO: 156252 - DNA, 25 bp, Saccharomyces pastorianus
ttaggtcccaaggacgctgtggtga

SEQ ID NO: 156253 - DNA, 25 bp, Saccharomyces pastorianus
cttgatgatcagacactagccgttt

SEQ ID NO: 156254 - DNA, 25 bp, Saccharomyces pastorianus
tgagcagtttgaccaagaccttgat

SEQ ID NO: 156255 - DNA, 25 bp, Saccharomyces pastorianus
aaagaaggtattgccaccgtggagc

SEQ ID NO: 156256 - DNA, 25 bp, Saccharomyces pastorianus
agtgacgattcaatttcttccgcca

SEQ ID NO: 156257 - DNA, 25 bp, Saccharomyces pastorianus
tgccaccgtggagcgtgctatggaa

SEQ ID NO: 156258 - DNA, 25 bp, Saccharomyces pastorianus
aacaatcatgatcttgacacagcat

SEQ ID NO: 156259 - DNA, 25 bp, Saccharomyces pastorianus
ttacgaaagcgaggtgtctgacgat

SEQ ID NO: 156260 - DNA, 25 bp, Saccharomyces pastorianus
ggtaaatctgccactgaatcactgt

SEQ ID NO: 156261 - DNA, 25 bp, Saccharomyces pastorianus
gaatcactgttggtgccaggttatg

SEQ ID NO: 156262 - DNA, 25 bp, Saccharomyces pastorianus
gttgtagatgctcttttggctgtta

SEQ ID NO: 156263 - DNA, 25 bp, Saccharomyces pastorianus
gcaatgcctaaacgtatcgccggtg

SEQ ID NO: 156264 - DNA, 25 bp, Saccharomyces pastorianus
atcgccggtggcaatgtgaaaatcg

SEQ ID NO: 156265 - DNA, 25 bp, Saccharomyces pastorianus
tcaagtatcccgtaaaggctgtcaa

SEQ ID NO: 156266 - DNA, 25 bp, Saccharomyces pastorianus
gtgctcaagttgtgttaaccaccaa

SEQ ID NO: 156267 - DNA, 25 bp, Saccharomyces pastorianus
ctaagatcattggtgctgactctga

SEQ ID NO: 156268 - DNA, 25 bp, Saccharomyces pastorianus
gagaagaattgcacgcgctacaggc

SEQ ID NO: 156269 - DNA, 25 bp, Saccharomyces pastorianus
tgccaggttatgctttgaattgtac

SEQ ID NO: 156270 - DNA, 25 bp, Saccharomyces pastorianus
acaggcgccactttggttagttcta

SEQ ID NO: 156271 - DNA, 25 bp, Saccharomyces pastorianus
gacatcgattccagttcagcaaaat

SEQ ID NO: 156272 - DNA, 25 bp, Saccharomyces pastorianus
tccaggctgcggtgacaatgtcgac

SEQ ID NO: 156273 - DNA, 25 bp, Saccharomyces pastorianus
atatcatattgtttccaggctgcgg

SEQ ID NO: 156274 - DNA, 25 bp, Saccharomyces pastorianus
tgagtcctgggctgaagcttgtcac

SEQ ID NO: 156275 - DNA, 25 bp, Saccharomyces pastorianus
attgtgcgccaagaaatctctcaga

SEQ ID NO: 156276 - DNA, 25 bp, Saccharomyces pastorianus
gggaggcctcatgtttgtttatact

SEQ ID NO: 156277 - DNA, 25 bp, Saccharomyces pastorianus
ataaaacagcccatttgagtcctgg

SEQ ID NO: 156278 - DNA, 25 bp, Saccharomyces pastorianus
ggcgaaacattagctctgtacgata

SEQ ID NO: 156279 - DNA, 25 bp, Saccharomyces pastorianus
aaaagtgacaccctaggcgaaacat

SEQ ID NO: 156280 - DNA, 25 bp, Saccharomyces pastorianus
gaacgatgaactaggcgtacccata

SEQ ID NO: 156281 - DNA, 25 bp, Saccharomyces pastorianus
aagccgatggtctcacagaaactga

SEQ ID NO: 156282 - DNA, 25 bp, Saccharomyces pastorianus
gctgttatcggctcaaacgggaata

SEQ ID NO: 156283 - DNA, 25 bp, Saccharomyces pastorianus
atgccgctggaggaaaggtccctga

SEQ ID NO: 156284 - DNA, 25 bp, Saccharomyces pastorianus
gaaaggtccctgacaaacttaccat

SEQ ID NO: 156285 - DNA, 25 bp, Saccharomyces pastorianus
ttgttccgaatattgtctcacctgg

SEQ ID NO: 156286 - DNA, 25 bp, Saccharomyces pastorianus
taccattaaacctattgttccgaat

SEQ ID NO: 156287 - DNA, 25 bp, Saccharomyces pastorianus
aatgttcttgttgatgtctttgatg

SEQ ID NO: 156288 - DNA, 25 bp, Saccharomyces pastorianus
gggaaaacttgcaccttgctgagga

SEQ ID NO: 156289 - DNA, 25 bp, Saccharomyces pastorianus
ttcttgtagtgtacagatgccgctg

SEQ ID NO: 156290 - DNA, 25 bp, Saccharomyces pastorianus
acagaaatgctgttatcggctcaaa

SEQ ID NO: 156291 - DNA, 25 bp, Saccharomyces pastorianus
gtctcacctggatatgaatgattta

SEQ ID NO: 156292 - DNA, 25 bp, Saccharomyces pastorianus
caccttgctgaggatgctggcgaat

SEQ ID NO: 156293 - DNA, 25 bp, Saccharomyces pastorianus
gaaattatccagttcgttaagtgct

SEQ ID NO: 156294 - DNA, 25 bp, Saccharomyces pastorianus
gcctacatctactgaatcgtctgac

SEQ ID NO: 156295 - DNA, 25 bp, Saccharomyces pastorianus
gattgaaaggcattatcccgatttt

SEQ ID NO: 156296 - DNA, 25 bp, Saccharomyces pastorianus
tcccttctccgacattttctaatta

SEQ ID NO: 156297 - DNA, 25 bp, Saccharomyces pastorianus
gaatcgtctgactcaatcacaagat

SEQ ID NO: 156298 - DNA, 25 bp, Saccharomyces pastorianus
gatttcactaagtcacgagatcctg

SEQ ID NO: 156299 - DNA, 25 bp, Saccharomyces pastorianus
ccccttctgacatactaccgaaagt

SEQ ID NO: 156300 - DNA, 25 bp, Saccharomyces pastorianus
aacggtgaaacaactaatcctctag

SEQ ID NO: 156301 - DNA, 25 bp, Saccharomyces pastorianus
ctgtattttcaagttcatcgcccaa

SEQ ID NO: 156302 - DNA, 25 bp, Saccharomyces pastorianus
aaagtaggcagaaggagcgtctcaa

SEQ ID NO: 156303 - DNA, 25 bp, Saccharomyces pastorianus
tcgcccaaactactggacgatgatt

SEQ ID NO: 156304 - DNA, 25 bp, Saccharomyces pastorianus
gagattccgctcttgtgaaagtcaa

SEQ ID NO: 156305 - DNA, 25 bp, Saccharomyces pastorianus
gcaggaaatctgactgagcttttag

SEQ ID NO: 156306 - DNA, 25 bp, Saccharomyces pastorianus
aacatgcaacattacgtattcggga

SEQ ID NO: 156307 - DNA, 25 bp, Saccharomyces pastorianus
gtcttgacgacatactggacaacta

SEQ ID NO: 156308 - DNA, 25 bp, Saccharomyces pastorianus
gggatcacaatcctattgtcttgac

SEQ ID NO: 156309 - DNA, 25 bp, Saccharomyces pastorianus
ttcaacgtccaatgaccgaaggtgt

SEQ ID NO: 156310 - DNA, 25 bp, Saccharomyces pastorianus
gtgaaagtcaagtcagtctcctgga

SEQ ID NO: 156311 - DNA, 25 bp, Saccharomyces pastorianus
acttagcagctatacaggacgatga

SEQ ID NO: 156312 - DNA, 25 bp, Saccharomyces pastorianus
gtacactatatgctttcaacgtcca

SEQ ID NO: 156313 - DNA, 25 bp, Saccharomyces pastorianus
tacgcagaacatttaaaggccacat

SEQ ID NO: 156314 - DNA, 25 bp, Saccharomyces pastorianus
gcgatcatatcggtacttctggaga

SEQ ID NO: 156315 - DNA, 25 bp, Saccharomyces pastorianus
gatgagaaaacacttgcaccttcga

SEQ ID NO: 156316 - DNA, 25 bp, Saccharomyces pastorianus
gaaacagccgaaatttttccactag

SEQ ID NO: 156317 - DNA, 25 bp, Saccharomyces pastorianus
aaagtcacctcatttgtcgaaaagt

SEQ ID NO: 156318 - DNA, 25 bp, Saccharomyces pastorianus
tgttacaccatcaaagaggccccag

SEQ ID NO: 156319 - DNA, 25 bp, Saccharomyces pastorianus
gaggccccagctaggagaaataccg

SEQ ID NO: 156320 - DNA, 25 bp, Saccharomyces pastorianus
gaggccgcctgaaatcatgagcact

SEQ ID NO: 156321 - DNA, 25 bp, Saccharomyces pastorianus
aactataactctacttctcgaagca

SEQ ID NO: 156322 - DNA, 25 bp, Saccharomyces pastorianus
caaaacttgcttttcttgttgaata

SEQ ID NO: 156323 - DNA, 25 bp, Saccharomyces pastorianus
gcaccttcgaagcatcagcctataa

SEQ ID NO: 156324 - DNA, 25 bp, Saccharomyces pastorianus
aaagtccagctgacagacctcaagg

SEQ ID NO: 156325 - DNA, 25 bp, Saccharomyces pastorianus
aggaagacgccgacctcaagaggat

SEQ ID NO: 156326 - DNA, 25 bp, Saccharomyces pastorianus
acccaataggtccagcactcccaaa

SEQ ID NO: 156327 - DNA, 25 bp, Saccharomyces pastorianus
aatgacaataagacacccaataggt

SEQ ID NO: 156328 - DNA, 25 bp, Saccharomyces pastorianus
tgacaataagacacccaataggtcc

SEQ ID NO: 156329 - DNA, 25 bp, Saccharomyces pastorianus
agacacccaataggtccagcactcc

SEQ ID NO: 156330 - DNA, 25 bp, Saccharomyces pastorianus
atgacaataagacacccaataggtc

SEQ ID NO: 156331 - DNA, 25 bp, Saccharomyces pastorianus
aataagacacccaataggtccagca

SEQ ID NO: 156332 - DNA, 25 bp, Saccharomyces pastorianus
ataagacacccaataggtccagcac

SEQ ID NO: 156333 - DNA, 25 bp, Saccharomyces pastorianus
taagacacccaataggtccagcact

SEQ ID NO: 156334 - DNA, 25 bp, Saccharomyces pastorianus
aagacacccaataggtccagcactc

SEQ ID NO: 156335 - DNA, 25 bp, Saccharomyces pastorianus
gacaataagacacccaataggtcca

SEQ ID NO: 156336 - DNA, 25 bp, Saccharomyces pastorianus
caataagacacccaataggtccagc

SEQ ID NO: 156337 - DNA, 25 bp, Saccharomyces pastorianus
tattgctaacatgaccaccgagtgg

SEQ ID NO: 156338 - DNA, 25 bp, Saccharomyces pastorianus
ctgccggtagaggtattggtcatca

SEQ ID NO: 156339 - DNA, 25 bp, Saccharomyces pastorianus
aggtcaattgcctcagggtgtttcc

SEQ ID NO: 156340 - DNA, 25 bp, Saccharomyces pastorianus
gtgaacactctggaccacgatattc

SEQ ID NO: 156341 - DNA, 25 bp, Saccharomyces pastorianus
attgaggagggctatgctttcccct

SEQ ID NO: 156342 - DNA, 25 bp, Saccharomyces pastorianus
ttaatccaaagactatccgcgcact

SEQ ID NO: 156343 - DNA, 25 bp, Saccharomyces pastorianus
aaatcacgccattgaattcacgggt

SEQ ID NO: 156344 - DNA, 25 bp, Saccharomyces pastorianus
gtcgctgggcactccaatagtgaga

SEQ ID NO: 156345 - DNA, 25 bp, Saccharomyces pastorianus
tcacgggtgactctttgaatgcatt

SEQ ID NO: 156346 - DNA, 25 bp, Saccharomyces pastorianus
atgactgtcgcatctgactcgcatt

SEQ ID NO: 156347 - DNA, 25 bp, Saccharomyces pastorianus
ttgcctatcgatcacagactcacta

SEQ ID NO: 156348 - DNA, 25 bp, Saccharomyces pastorianus
ggtaagattagttctcctgctgagg

SEQ ID NO: 156349 - DNA, 25 bp, Saccharomyces pastorianus
gcttctgccgtgctgggtaagatta

SEQ ID NO: 156350 - DNA, 25 bp, Saccharomyces pastorianus
gaaggtttcccaagagagttttctg

SEQ ID NO: 156351 - DNA, 25 bp, Saccharomyces pastorianus
gttaacgctcaaacagaggctccaa

SEQ ID NO: 156352 - DNA, 25 bp, Saccharomyces pastorianus
gcgaaattccattcagcggcgttaa

SEQ ID NO: 156353 - DNA, 25 bp, Saccharomyces pastorianus
cagaggctccaaaacaatccgttga

SEQ ID NO: 156354 - DNA, 25 bp, Saccharomyces pastorianus
gaattagttttatgtgatgccgata

SEQ ID NO: 156355 - DNA, 25 bp, Saccharomyces pastorianus
gatgcattggcttacttagcttccc

SEQ ID NO: 156356 - DNA, 25 bp, Saccharomyces pastorianus
gataattgagaatcccgtggttgaa

SEQ ID NO: 156357 - DNA, 25 bp, Saccharomyces pastorianus
ctcctgctgaggtattgtccacaag

SEQ ID NO: 156358 - DNA, 25 bp, Saccharomyces pastorianus
acacttatcaggatgatgtgcctaa

SEQ ID NO: 156359 - DNA, 25 bp, Saccharomyces pastorianus
ggagacttactcgagtaccgatttt

SEQ ID NO: 156360 - DNA, 25 bp, Saccharomyces pastorianus
gagtaccgattttcagaaagctctt

SEQ ID NO: 156361 - DNA, 25 bp, Saccharomyces pastorianus
gacacgatgaaatcacttttagtta

SEQ ID NO: 156362 - DNA, 25 bp, Saccharomyces pastorianus
gatgaaatcacttttagttacaatg

SEQ ID NO: 156363 - DNA, 25 bp, Saccharomyces pastorianus
gacttactcgagtaccgattttcag

SEQ ID NO: 156364 - DNA, 25 bp, Saccharomyces pastorianus
gtatggagacttactcgagtaccga

SEQ ID NO: 156365 - DNA, 25 bp, Saccharomyces pastorianus
atggagacttactcgagtaccgatt

SEQ ID NO: 156366 - DNA, 25 bp, Saccharomyces pastorianus
ctcgagtaccgattttcagaaagct

SEQ ID NO: 156367 - DNA, 25 bp, Saccharomyces pastorianus
attgacacgatgaaatcacttttag

SEQ ID NO: 156368 - DNA, 25 bp, Saccharomyces pastorianus
cttactcgagtaccgattttcagaa

SEQ ID NO: 156369 - DNA, 25 bp, Saccharomyces pastorianus
taccgattttcagaaagctcttgaa

SEQ ID NO: 156370 - DNA, 25 bp, Saccharomyces pastorianus
gaaagctcttgaaaagggatctgat

SEQ ID NO: 156371 - DNA, 25 bp, Saccharomyces pastorianus
ggagacttactcgagtaccgatttt

SEQ ID NO: 156372 - DNA, 25 bp, Saccharomyces pastorianus
gatgaaatcacttttagttacaatg

SEQ ID NO: 156373 - DNA, 25 bp, Saccharomyces pastorianus
gacttactcgagtaccgattttcag

SEQ ID NO: 156374 - DNA, 25 bp, Saccharomyces pastorianus
gtatggagacttactcgagtaccga

SEQ ID NO: 156375 - DNA, 25 bp, Saccharomyces pastorianus
agcgtacacgttggttttcgatcct

SEQ ID NO: 156376 - DNA, 25 bp, Saccharomyces pastorianus
tcacagccagcgtacacgttggttt

SEQ ID NO: 156377 - DNA, 25 bp, Saccharomyces pastorianus
ctcgagtaccgattttcagaaagct

SEQ ID NO: 156378 - DNA, 25 bp, Saccharomyces pastorianus
attgacacgatgaaatcacttttag

SEQ ID NO: 156379 - DNA, 25 bp, Saccharomyces pastorianus
ttttcgatccttctccgagtatgga

SEQ ID NO: 156380 - DNA, 25 bp, Saccharomyces pastorianus
gtaccgattttcagaaagctcttga

SEQ ID NO: 156381 - DNA, 25 bp, Saccharomyces pastorianus
aatagccgacaacttcctaaggaag

SEQ ID NO: 156382 - DNA, 25 bp, Saccharomyces pastorianus
tcagcggaattttaccaacgacgaa

SEQ ID NO: 156383 - DNA, 25 bp, Saccharomyces pastorianus
tgaccgacccaagagtacatccaat

SEQ ID NO: 156384 - DNA, 25 bp, Saccharomyces pastorianus
taaccggcctgaagtttgtcgctat

SEQ ID NO: 156385 - DNA, 25 bp, Saccharomyces pastorianus
aataccatcccatatataccttacg

SEQ ID NO: 156386 - DNA, 25 bp, Saccharomyces pastorianus
caggcggactaatctatcagcggaa

SEQ ID NO: 156387 - DNA, 25 bp, Saccharomyces pastorianus
tataccttacgtgggcatgtccagc

SEQ ID NO: 156388 - DNA, 25 bp, Saccharomyces pastorianus
aattcttgctagtacactgcacggt

SEQ ID NO: 156389 - DNA, 25 bp, Saccharomyces pastorianus
gttcatatatcagaccctaaccggc

SEQ ID NO: 156390 - DNA, 25 bp, Saccharomyces pastorianus
aactatgcacggatcagttcacgat

SEQ ID NO: 156391 - DNA, 25 bp, Saccharomyces pastorianus
gactccgaaggcattacagctaact

SEQ ID NO: 156392 - DNA, 25 bp, Saccharomyces pastorianus
gtgccttagatattcgtaccgatag

SEQ ID NO: 156393 - DNA, 25 bp, Saccharomyces pastorianus
ttcgtaccgatagacaatacgctat

SEQ ID NO: 156394 - DNA, 25 bp, Saccharomyces pastorianus
gtgaaattgcaaaagaagctcgcta

SEQ ID NO: 156395 - DNA, 25 bp, Saccharomyces pastorianus
gttgttcaaagttacggtgttagca

SEQ ID NO: 156396 - DNA, 25 bp, Saccharomyces pastorianus
accgtgccttagatattcgtaccga

SEQ ID NO: 156397 - DNA, 25 bp, Saccharomyces pastorianus
gcgaaggcgcgtacggaatagtata

SEQ ID NO: 156398 - DNA, 25 bp, Saccharomyces pastorianus
atacgctatcaaagcggttgttcaa

SEQ ID NO: 156399 - DNA, 25 bp, Saccharomyces pastorianus
acttaataacttctcaaattggcga

SEQ ID NO: 156400 - DNA, 25 bp, Saccharomyces pastorianus
tagcaaggaggctgatatgggcaat

SEQ ID NO: 156401 - DNA, 25 bp, Saccharomyces pastorianus
gaatagtataccgtgccttagatat

SEQ ID NO: 156402 - DNA, 25 bp, Saccharomyces pastorianus
aagttacggtgttagcaaggaggct

SEQ ID NO: 156403 - DNA, 25 bp, Saccharomyces pastorianus
aggttattgtattggcaggtactgc

SEQ ID NO: 156404 - DNA, 25 bp, Saccharomyces pastorianus
ttaaggttattgtattggcaggtac

SEQ ID NO: 156405 - DNA, 25 bp, Saccharomyces pastorianus
gaaatttaaggttattgtattggca

SEQ ID NO: 156406 - DNA, 25 bp, Saccharomyces pastorianus
ggttattgtattggcaggtactgca

SEQ ID NO: 156407 - DNA, 25 bp, Saccharomyces pastorianus
atttaaggttattgtattggcaggt

SEQ ID NO: 156408 - DNA, 25 bp, Saccharomyces pastorianus
aatttaaggttattgtattggcagg

SEQ ID NO: 156409 - DNA, 25 bp, Saccharomyces pastorianus
atgacagagaaacacaaaacgatgg

SEQ ID NO: 156410 - DNA, 25 bp, Saccharomyces pastorianus
taaggttattgtattggcaggtact

SEQ ID NO: 156411 - DNA, 25 bp, Saccharomyces pastorianus
tttaaggttattgtattggcaggta

SEQ ID NO: 156412 - DNA, 25 bp, Saccharomyces pastorianus
aaggttattgtattggcaggtactg

SEQ ID NO: 156413 - DNA, 25 bp, Saccharomyces pastorianus
tgacagagaaacacaaaacgatggg

SEQ ID NO: 156414 - DNA, 25 bp, Saccharomyces pastorianus
gtgatatccccttttatagaatggt

SEQ ID NO: 156415 - DNA, 25 bp, Saccharomyces pastorianus
gtgatccctacattatttgagcatg

SEQ ID NO: 156416 - DNA, 25 bp, Saccharomyces pastorianus
aactttgcaagatttacctgtagag

SEQ ID NO: 156417 - DNA, 25 bp, Saccharomyces pastorianus
aaatatcttttcgatcccctggagt

SEQ ID NO: 156418 - DNA, 25 bp, Saccharomyces pastorianus
aaatatttctcattttcttcccaga

SEQ ID NO: 156419 - DNA, 25 bp, Saccharomyces pastorianus
agagctagacttgtgttcaatgaac

SEQ ID NO: 156420 - DNA, 25 bp, Saccharomyces pastorianus
gatcccctggagtttggcgtaagta

SEQ ID NO: 156421 - DNA, 25 bp, Saccharomyces pastorianus
tgaaccgtcgatggtcaccttgaac

SEQ ID NO: 156422 - DNA, 25 bp, Saccharomyces pastorianus
gaacaggttcttctatagttgcttg

SEQ ID NO: 156423 - DNA, 25 bp, Saccharomyces pastorianus
actactagatcatcatcctatcctg

SEQ ID NO: 156424 - DNA, 25 bp, Saccharomyces pastorianus
caaggaactgacctaagccctaagt

SEQ ID NO: 156425 - DNA, 25 bp, Saccharomyces pastorianus
gatatgggcaatggagcctagtttc

SEQ ID NO: 156426 - DNA, 25 bp, Saccharomyces pastorianus
agcaccagaggaaataccgccccgg

SEQ ID NO: 156427 - DNA, 25 bp, Saccharomyces pastorianus
tggagcctagtttcgtaagaggtaa

SEQ ID NO: 156428 - DNA, 25 bp, Saccharomyces pastorianus
gccccggctacataattctcaagta

SEQ ID NO: 156429 - DNA, 25 bp, Saccharomyces pastorianus
gttagcaccagaggaaataccgccc

SEQ ID NO: 156430 - DNA, 25 bp, Saccharomyces pastorianus
taagaacgtcgtcaacttaattact

SEQ ID NO: 156431 - DNA, 25 bp, Saccharomyces pastorianus
aattactttcacagattcaaatggc

SEQ ID NO: 156432 - DNA, 25 bp, Saccharomyces pastorianus
gtaagaggtaagaacgtcgtcaact

SEQ ID NO: 156433 - DNA, 25 bp, Saccharomyces pastorianus
ggcaatggagcctagtttcgtaaga

SEQ ID NO: 156434 - DNA, 25 bp, Saccharomyces pastorianus
gattcaaatggcaagctgcacaaga

SEQ ID NO: 156435 - DNA, 25 bp, Saccharomyces pastorianus
aagctgcacaagaggttagcaccag

SEQ ID NO: 156436 - DNA, 25 bp, Saccharomyces pastorianus
ggcttactgcctcaattaaagagaa

SEQ ID NO: 156437 - DNA, 25 bp, Saccharomyces pastorianus
atacatgtatcaaacattagccatt

SEQ ID NO: 156438 - DNA, 25 bp, Saccharomyces pastorianus
acctggcttactgcctcaattaaag

SEQ ID NO: 156439 - DNA, 25 bp, Saccharomyces pastorianus
ggtgtccctgaaaaaatacatgtat

SEQ ID NO: 156440 - DNA, 25 bp, Saccharomyces pastorianus
gtgtgcttttgaacttgtgatgaat

SEQ ID NO: 156441 - DNA, 25 bp, Saccharomyces pastorianus
gagaattcaaaaacaggtgtccctg

SEQ ID NO: 156442 - DNA, 25 bp, Saccharomyces pastorianus
gctacacagggcttcttgtgcgtgt

SEQ ID NO: 156443 - DNA, 25 bp, Saccharomyces pastorianus
ggaatacctggcttactgcctcaat

SEQ ID NO: 156444 - DNA, 25 bp, Saccharomyces pastorianus
attagccattgatggttatgcgtgg

SEQ ID NO: 156445 - DNA, 25 bp, Saccharomyces pastorianus
gtgcgtgtgcttttgaacttgtgat

SEQ ID NO: 156446 - DNA, 25 bp, Saccharomyces pastorianus
acacagggcttcttgtgcgtgtgct

SEQ ID NO: 156447 - DNA, 25 bp, Saccharomyces pastorianus
ggtctttggttgtaaaacactcata

SEQ ID NO: 156448 - DNA, 25 bp, Saccharomyces pastorianus
gctttacctgaaaatttccctctag

SEQ ID NO: 156449 - DNA, 25 bp, Saccharomyces pastorianus
attccctacattgttgcaccatttg

SEQ ID NO: 156450 - DNA, 25 bp, Saccharomyces pastorianus
aagacgatttttcagctttacctga

SEQ ID NO: 156451 - DNA, 25 bp, Saccharomyces pastorianus
aaatgggccttatacagggtatcat

SEQ ID NO: 156452 - DNA, 25 bp, Saccharomyces pastorianus
gttgcaccatttgaagcagatccgc

SEQ ID NO: 156453 - DNA, 25 bp, Saccharomyces pastorianus
gcagatccgcaaatggtttacttgg

SEQ ID NO: 156454 - DNA, 25 bp, Saccharomyces pastorianus
gattctgatttgttggtctttggtt

SEQ ID NO: 156455 - DNA, 25 bp, Saccharomyces pastorianus
agaaattgtggtcagccggcaacag

SEQ ID NO: 156456 - DNA, 25 bp, Saccharomyces pastorianus
tgcaagctacattcaattccctaca

SEQ ID NO: 156457 - DNA, 25 bp, Saccharomyces pastorianus
tgttgacatcacaccagaaatggcg

SEQ ID NO: 156458 - DNA, 25 bp, Saccharomyces pastorianus
actgagggcgtgtttagactgtgca

SEQ ID NO: 156459 - DNA, 25 bp, Saccharomyces pastorianus
agaactttcgagatggacctgctag

SEQ ID NO: 156460 - DNA, 25 bp, Saccharomyces pastorianus
atggacctgctagctattatcgaag

SEQ ID NO: 156461 - DNA, 25 bp, Saccharomyces pastorianus
gactgtgcagtggaagcgacgattc

SEQ ID NO: 156462 - DNA, 25 bp, Saccharomyces pastorianus
actgggaatgtgttgctgtcttaaa

SEQ ID NO: 156463 - DNA, 25 bp, Saccharomyces pastorianus
gattccactgtatctatctgggcta

SEQ ID NO: 156464 - DNA, 25 bp, Saccharomyces pastorianus
gatattacctagcaacctgttccag

SEQ ID NO: 156465 - DNA, 25 bp, Saccharomyces pastorianus
gtgttgctgtcttaaatggccatga

SEQ ID NO: 156466 - DNA, 25 bp, Saccharomyces pastorianus
aagttcttatgatgacaccgtcagg

SEQ ID NO: 156467 - DNA, 25 bp, Saccharomyces pastorianus
ggaactgtttggtcttctgattttg

SEQ ID NO: 156468 - DNA, 25 bp, Saccharomyces pastorianus
ttagcggctggctcttttgattcca

SEQ ID NO: 156469 - DNA, 25 bp, Saccharomyces pastorianus
ttgcctattatcatactggacgcga

SEQ ID NO: 156470 - DNA, 25 bp, Saccharomyces pastorianus
tggcattttccagttgatgtgctct

SEQ ID NO: 156471 - DNA, 25 bp, Saccharomyces pastorianus
gtcatcgtattgctgttgcctatta

SEQ ID NO: 156472 - DNA, 25 bp, Saccharomyces pastorianus
gatgtgctctttgggtgtcatcgta

SEQ ID NO: 156473 - DNA, 25 bp, Saccharomyces pastorianus
atagatcatcattaccggtggcaga

SEQ ID NO: 156474 - DNA, 25 bp, Saccharomyces pastorianus
gatcaatcatactacagctggtctg

SEQ ID NO: 156475 - DNA, 25 bp, Saccharomyces pastorianus
ggtactatctttgacgtggcactgc

SEQ ID NO: 156476 - DNA, 25 bp, Saccharomyces pastorianus
gattacggttgcaagttattccact

SEQ ID NO: 156477 - DNA, 25 bp, Saccharomyces pastorianus
aagaccagtggtcccataagcggaa

SEQ ID NO: 156478 - DNA, 25 bp, Saccharomyces pastorianus
tggacgcgatcgatctattcctcta

SEQ ID NO: 156479 - DNA, 25 bp, Saccharomyces pastorianus
tattcctctacatgggcaggttgct

SEQ ID NO: 156480 - DNA, 25 bp, Saccharomyces pastorianus
caggccattccggaaaacacgatga

SEQ ID NO: 156481 - DNA, 25 bp, Saccharomyces pastorianus
aaaaagattattggcctcctcacct

SEQ ID NO: 156482 - DNA, 25 bp, Saccharomyces pastorianus
tgctcctccggagtacactgataga

SEQ ID NO: 156483 - DNA, 25 bp, Saccharomyces pastorianus
agaactttgtgaatgctcctccgga

SEQ ID NO: 156484 - DNA, 25 bp, Saccharomyces pastorianus
gcttcttttcaaagtttgccactat

SEQ ID NO: 156485 - DNA, 25 bp, Saccharomyces pastorianus
ctcaatccacgacttcttcgagaag

SEQ ID NO: 156486 - DNA, 25 bp, Saccharomyces pastorianus
ggcagtgataatgcttcttttcaaa

SEQ ID NO: 156487 - DNA, 25 bp, Saccharomyces pastorianus
gtttgccactatcaatgagtagctc

SEQ ID NO: 156488 - DNA, 25 bp, Saccharomyces pastorianus
atgagtagctctcaatccacgactt

SEQ ID NO: 156489 - DNA, 25 bp, Saccharomyces pastorianus
aacgacgtccattagaatcgactaa

SEQ ID NO: 156490 - DNA, 25 bp, Saccharomyces pastorianus
aatcatgggtttgcaagctccctac

SEQ ID NO: 156491 - DNA, 25 bp, Saccharomyces pastorianus
aactctactcataatcctagtgaca

SEQ ID NO: 156492 - DNA, 25 bp, Saccharomyces pastorianus
ggcgttactaatattagcaccacag

SEQ ID NO: 156493 - DNA, 25 bp, Saccharomyces pastorianus
gaaagcggtatccataaactgcaaa

SEQ ID NO: 156494 - DNA, 25 bp, Saccharomyces pastorianus
aactgcaaagcacactggacgatga

SEQ ID NO: 156495 - DNA, 25 bp, Saccharomyces pastorianus
ctgctaaagacccatccagattaaa

SEQ ID NO: 156496 - DNA, 25 bp, Saccharomyces pastorianus
gatgatagatccaatgacagcaatt

SEQ ID NO: 156497 - DNA, 25 bp, Saccharomyces pastorianus
gatccatccagctcagtttacgagg

SEQ ID NO: 156498 - DNA, 25 bp, Saccharomyces pastorianus
atgacagcaattatggcgttactaa

SEQ ID NO: 156499 - DNA, 25 bp, Saccharomyces pastorianus
atgcaccataatgtttgcgcgatga

SEQ ID NO: 156500 - DNA, 25 bp, Saccharomyces pastorianus
gaattcgttttatctgctaaagacc

SEQ ID NO: 156501 - DNA, 25 bp, Saccharomyces pastorianus
gatgaattggatccatccagctcag

SEQ ID NO: 156502 - DNA, 25 bp, Saccharomyces pastorianus
tatgttgctcatccagaatccttgc

SEQ ID NO: 156503 - DNA, 25 bp, Saccharomyces pastorianus
agatttttaccatggccgtccaagt

SEQ ID NO: 156504 - DNA, 25 bp, Saccharomyces pastorianus
tggccgtccaagtgtgtatctttga

SEQ ID NO: 156505 - DNA, 25 bp, Saccharomyces pastorianus
aagtgactcgcctgttgatcaacat

SEQ ID NO: 156506 - DNA, 25 bp, Saccharomyces pastorianus
gggtaccacgccagtaatagatttt

SEQ ID NO: 156507 - DNA, 25 bp, Saccharomyces pastorianus
gaatctcatcttcgcaaaatctgtg

SEQ ID NO: 156508 - DNA, 25 bp, Saccharomyces pastorianus
aggacacatacaatgcgctgctttc

SEQ ID NO: 156509 - DNA, 25 bp, Saccharomyces pastorianus
aaggctgtcatatctaccaatgctc

SEQ ID NO: 156510 - DNA, 25 bp, Saccharomyces pastorianus
cgctgctttcgaactgccaataaat

SEQ ID NO: 156511 - DNA, 25 bp, Saccharomyces pastorianus
gcggtttcccactatcaatggcgaa

SEQ ID NO: 156512 - DNA, 25 bp, Saccharomyces pastorianus
aatctgtgttgaacgcttacatcac

SEQ ID NO: 156513 - DNA, 25 bp, Saccharomyces pastorianus
ttccgccttaatactctttacacct

SEQ ID NO: 156514 - DNA, 25 bp, Saccharomyces pastorianus
gacctagccatggttatggcgctaa

SEQ ID NO: 156515 - DNA, 25 bp, Saccharomyces pastorianus
gaaagcatgttgtgcctacatttaa

SEQ ID NO: 156516 - DNA, 25 bp, Saccharomyces pastorianus
gaccgatgcctttagaaattttgaa

SEQ ID NO: 156517 - DNA, 25 bp, Saccharomyces pastorianus
tttgacttcaataatggcggctttc

SEQ ID NO: 156518 - DNA, 25 bp, Saccharomyces pastorianus
ctttacacctttttgatttgcagaa

SEQ ID NO: 156519 - DNA, 25 bp, Saccharomyces pastorianus
aatggcggctttcagcagaaggaaa

SEQ ID NO: 156520 - DNA, 25 bp, Saccharomyces pastorianus
gtggacctatagaaactgctttgaa

SEQ ID NO: 156521 - DNA, 25 bp, Saccharomyces pastorianus
gggagtggaaagaccgatgccttta

SEQ ID NO: 156522 - DNA, 25 bp, Saccharomyces pastorianus
ggcgctaatgccaagagaatgtgtt

SEQ ID NO: 156523 - DNA, 25 bp, Saccharomyces pastorianus
ctgtgacgaaagaagacctagccat

SEQ ID NO: 156524 - DNA, 25 bp, Saccharomyces pastorianus
tagagtcccgggagtcacctcaata

SEQ ID NO: 156525 - DNA, 25 bp, Saccharomyces pastorianus
gatttgcaccaaaaggctcgtcagt

SEQ ID NO: 156526 - DNA, 25 bp, Saccharomyces pastorianus
aaatcctgcttggactggcgggtta

SEQ ID NO: 156527 - DNA, 25 bp, Saccharomyces pastorianus
tccaggcctggtgctattgtcgtag

SEQ ID NO: 156528 - DNA, 25 bp, Saccharomyces pastorianus
tattgtcgtaggttgttgggccact

SEQ ID NO: 156529 - DNA, 25 bp, Saccharomyces pastorianus
acgacatatcaagtggacctgggaa

SEQ ID NO: 156530 - DNA, 25 bp, Saccharomyces pastorianus
gaagctacgccacgtggagctagat

SEQ ID NO: 156531 - DNA, 25 bp, Saccharomyces pastorianus
gggtacattgagtcgtgccaagaaa

SEQ ID NO: 156532 - DNA, 25 bp, Saccharomyces pastorianus
aacatctgccattacttgactttag

SEQ ID NO: 156533 - DNA, 25 bp, Saccharomyces pastorianus
aaacagcgacttacgaatgcatcag

SEQ ID NO: 156534 - DNA, 25 bp, Saccharomyces pastorianus
cgctccaaactttcctcatggtatt

SEQ ID NO: 156535 - DNA, 25 bp, Saccharomyces pastorianus
atgtccgctttgaagatctttgcag

SEQ ID NO: 156536 - DNA, 25 bp, Saccharomyces pastorianus
tttacctttgccaccatgaagactg

SEQ ID NO: 156537 - DNA, 25 bp, Saccharomyces pastorianus
atctttgcaggctttttattcgttg

SEQ ID NO: 156538 - DNA, 25 bp, Saccharomyces pastorianus
tgaccactgtgggtatgctttgcca

SEQ ID NO: 156539 - DNA, 25 bp, Saccharomyces pastorianus
ggaaccggtattgccatgacgttaa

SEQ ID NO: 156540 - DNA, 25 bp, Saccharomyces pastorianus
agaccttcctcggattattccagat

SEQ ID NO: 156541 - DNA, 25 bp, Saccharomyces pastorianus
ttacggtgctcttttcaacaatcct

SEQ ID NO: 156542 - DNA, 25 bp, Saccharomyces pastorianus
gacgttaactcatttgactcacaga

SEQ ID NO: 156543 - DNA, 25 bp, Saccharomyces pastorianus
cgaactttgctcaaccatttttcac

SEQ ID NO: 156544 - DNA, 25 bp, Saccharomyces pastorianus
atacgtgccatatgcttacggtgct

SEQ ID NO: 156545 - DNA, 25 bp, Saccharomyces pastorianus
aacaatcctgttgagggcttcttgt

SEQ ID NO: 156546 - DNA, 25 bp, Saccharomyces pastorianus
gacaatctgaatgaaaccatcgaca

SEQ ID NO: 156547 - DNA, 25 bp, Saccharomyces pastorianus
gacggcattaacgaagacaatctga

SEQ ID NO: 156548 - DNA, 25 bp, Saccharomyces pastorianus
ctgcgacaatgtgaccactcaatgg

SEQ ID NO: 156549 - DNA, 25 bp, Saccharomyces pastorianus
cattgggtcaggacggcattaacga

SEQ ID NO: 156550 - DNA, 25 bp, Saccharomyces pastorianus
cataacgtaacactgccggcattgg

SEQ ID NO: 156551 - DNA, 25 bp, Saccharomyces pastorianus
taacactgccggcattgggtcagga

SEQ ID NO: 156552 - DNA, 25 bp, Saccharomyces pastorianus
gacaacatgttaatttttgacttcc

SEQ ID NO: 156553 - DNA, 25 bp, Saccharomyces pastorianus
ggatgtttccccataacgtaacact

SEQ ID NO: 156554 - DNA, 25 bp, Saccharomyces pastorianus
gaatgaaaccatcgacaacatgtta

SEQ ID NO: 156555 - DNA, 25 bp, Saccharomyces pastorianus
caatgtgaccactcaatggagagag

SEQ ID NO: 156556 - DNA, 25 bp, Saccharomyces pastorianus
ggagagagtggatgtttccccataa

SEQ ID NO: 156557 - DNA, 25 bp, Saccharomyces pastorianus
tgtgtggacagcacggaaatcctat

SEQ ID NO: 156558 - DNA, 25 bp, Saccharomyces pastorianus
aggtaccaagttcctttgctgacta

SEQ ID NO: 156559 - DNA, 25 bp, Saccharomyces pastorianus
ttacgtgcccggtagaagtttgcct

SEQ ID NO: 156560 - DNA, 25 bp, Saccharomyces pastorianus
gtgcggagaactcaggtaccaagtt

SEQ ID NO: 156561 - DNA, 25 bp, Saccharomyces pastorianus
gaagtttgcctagtctgtgtgatat

SEQ ID NO: 156562 - DNA, 25 bp, Saccharomyces pastorianus
gctagttatcttgaggccaggtccg

SEQ ID NO: 156563 - DNA, 25 bp, Saccharomyces pastorianus
tttgctgactattacttacctttta

SEQ ID NO: 156564 - DNA, 25 bp, Saccharomyces pastorianus
actatggtgtgctctttgggctcca

SEQ ID NO: 156565 - DNA, 25 bp, Saccharomyces pastorianus
ggctccacctcagctagagtgcgga

SEQ ID NO: 156566 - DNA, 25 bp, Saccharomyces pastorianus
ggccaaaattgcttccacggatatt

SEQ ID NO: 156567 - DNA, 25 bp, Saccharomyces pastorianus
ggtggttacaactgcctttaataat

SEQ ID NO: 156568 - DNA, 25 bp, Saccharomyces pastorianus
acagttgaaggctacttgtgccgtt

SEQ ID NO: 156569 - DNA, 25 bp, Saccharomyces pastorianus
atgttatgctttcttctcctaaact

SEQ ID NO: 156570 - DNA, 25 bp, Saccharomyces pastorianus
ttgaaggctacttgtgccgttcgtg

SEQ ID NO: 156571 - DNA, 25 bp, Saccharomyces pastorianus
ttctcctaaactcacttcttttcct

SEQ ID NO: 156572 - DNA, 25 bp, Saccharomyces pastorianus
tttcttctcctaaactcacttcttt

SEQ ID NO: 156573 - DNA, 25 bp, Saccharomyces pastorianus
taaactcacttcttttcctccctat

SEQ ID NO: 156574 - DNA, 25 bp, Saccharomyces pastorianus
cctccctatctgcttttgtttatta

SEQ ID NO: 156575 - DNA, 25 bp, Saccharomyces pastorianus
tttcctccctatctgcttttgttta

SEQ ID NO: 156576 - DNA, 25 bp, Saccharomyces pastorianus
tccctatctgcttttgtttattaca

SEQ ID NO: 156577 - DNA, 25 bp, Saccharomyces pastorianus
tatgctttcttctcctaaactcact

SEQ ID NO: 156578 - DNA, 25 bp, Saccharomyces pastorianus
ctgcttttgtttattacagttgaag

SEQ ID NO: 156579 - DNA, 25 bp, Saccharomyces pastorianus
gacggtggtcctcatagatatctct

SEQ ID NO: 156580 - DNA, 25 bp, Saccharomyces pastorianus
atgggtcgtctattacacactatga

SEQ ID NO: 156581 - DNA, 25 bp, Saccharomyces pastorianus
aaaccagtcatttaaggcgcacgat

SEQ ID NO: 156582 - DNA, 25 bp, Saccharomyces pastorianus
ggtgattctacaggctccattaaat

SEQ ID NO: 156583 - DNA, 25 bp, Saccharomyces pastorianus
catagatatctctggcgggcctggt

SEQ ID NO: 156584 - DNA, 25 bp, Saccharomyces pastorianus
ggcgcacgatgcagacgtactgtgt

SEQ ID NO: 156585 - DNA, 25 bp, Saccharomyces pastorianus
aggtgcagattttctagtttcagga

SEQ ID NO: 156586 - DNA, 25 bp, Saccharomyces pastorianus
gaactgatcagattgcctctggtga

SEQ ID NO: 156587 - DNA, 25 bp, Saccharomyces pastorianus
ctgtgtctaactaccgatactgata

SEQ ID NO: 156588 - DNA, 25 bp, Saccharomyces pastorianus
taggttgcttcatggaaacgacatt

SEQ ID NO: 156589 - DNA, 25 bp, Saccharomyces pastorianus
gggatttccagtttgccacgctaaa

SEQ ID NO: 156590 - DNA, 25 bp, Saccharomyces pastorianus
agcaacctgttatggaaagaagtaa

SEQ ID NO: 156591 - DNA, 25 bp, Saccharomyces pastorianus
aataccgcagcaaaatcatccctat

SEQ ID NO: 156592 - DNA, 25 bp, Saccharomyces pastorianus
gaatctaccaataccgcagcaaaat

SEQ ID NO: 156593 - DNA, 25 bp, Saccharomyces pastorianus
gaaagaatctaccaataccgcagca

SEQ ID NO: 156594 - DNA, 25 bp, Saccharomyces pastorianus
agctactcgcaaaaaaaggtcattt

SEQ ID NO: 156595 - DNA, 25 bp, Saccharomyces pastorianus
cgcagcaaaatcatccctatcattc

SEQ ID NO: 156596 - DNA, 25 bp, Saccharomyces pastorianus
gaccactcgtacaaggaaagaatct

SEQ ID NO: 156597 - DNA, 25 bp, Saccharomyces pastorianus
atgagggatgaagctactcgcaaaa

SEQ ID NO: 156598 - DNA, 25 bp, Saccharomyces pastorianus
gaagtaagaccactcgtacaaggaa

SEQ ID NO: 156599 - DNA, 25 bp, Saccharomyces pastorianus
tgtcaaggaaaaagcaacctgttat

SEQ ID NO: 156600 - DNA, 25 bp, Saccharomyces pastorianus
aaggtcatttagtgatggtcatttt

SEQ ID NO: 156601 - DNA, 25 bp, Saccharomyces pastorianus
agattcactctcatgtgggtgtcag

SEQ ID NO: 156602 - DNA, 25 bp, Saccharomyces pastorianus
aataatgtgctggatttggccttgg

SEQ ID NO: 156603 - DNA, 25 bp, Saccharomyces pastorianus
ttccacgttaactttgcaggacctc

SEQ ID NO: 156604 - DNA, 25 bp, Saccharomyces pastorianus
gtgcaaaacgtaattcctgatgatt

SEQ ID NO: 156605 - DNA, 25 bp, Saccharomyces pastorianus
gattcattcaccttcgaaaagattc

SEQ ID NO: 156606 - DNA, 25 bp, Saccharomyces pastorianus
tgatctgtttgataggaatccgtca

SEQ ID NO: 156607 - DNA, 25 bp, Saccharomyces pastorianus
cacctattactgtttggatttccta

SEQ ID NO: 156608 - DNA, 25 bp, Saccharomyces pastorianus
gatgattcaaaacctctttccgtaa

SEQ ID NO: 156609 - DNA, 25 bp, Saccharomyces pastorianus
ttgcaggacctcttcgattcattca

SEQ ID NO: 156610 - DNA, 25 bp, Saccharomyces pastorianus
tctttccgtaagtcattatcatcat

SEQ ID NO: 156611 - DNA, 25 bp, Saccharomyces pastorianus
ttggccttggagacttaccgcaaaa

SEQ ID NO: 156612 - DNA, 25 bp, Saccharomyces pastorianus
tgggccgtattagtatccacgtcgc

SEQ ID NO: 156613 - DNA, 25 bp, Saccharomyces pastorianus
ggcacatggctaatgtccttagtat

SEQ ID NO: 156614 - DNA, 25 bp, Saccharomyces pastorianus
acagatgctgcacacgaagttatag

SEQ ID NO: 156615 - DNA, 25 bp, Saccharomyces pastorianus
cacgtcgcggttctggttcaattac

SEQ ID NO: 156616 - DNA, 25 bp, Saccharomyces pastorianus
gctgagtgatgatgtggcctgcaat

SEQ ID NO: 156617 - DNA, 25 bp, Saccharomyces pastorianus
ggatcacgctattgacctttacgga

SEQ ID NO: 156618 - DNA, 25 bp, Saccharomyces pastorianus
ccatcctaaatctaaacggttgttg

SEQ ID NO: 156619 - DNA, 25 bp, Saccharomyces pastorianus
tgacctttacggagactctgtagag

SEQ ID NO: 156620 - DNA, 25 bp, Saccharomyces pastorianus
gacaggacatggtggcgatgatttt

SEQ ID NO: 156621 - DNA, 25 bp, Saccharomyces pastorianus
ttactacccctttcaggtgcaaata

SEQ ID NO: 156622 - DNA, 25 bp, Saccharomyces pastorianus
gtggcctgcaattcaaggaatctat

SEQ ID NO: 156623 - DNA, 25 bp, Saccharomyces pastorianus
tagagccttatttaggtgccctctc

SEQ ID NO: 156624 - DNA, 25 bp, Saccharomyces pastorianus
aacccaagcttaatcgttagcggat

SEQ ID NO: 156625 - DNA, 25 bp, Saccharomyces pastorianus
aattatttcagctctccatttggtc

SEQ ID NO: 156626 - DNA, 25 bp, Saccharomyces pastorianus
cattaggttgatttcttgcgtcgaa

SEQ ID NO: 156627 - DNA, 25 bp, Saccharomyces pastorianus
gtcagcaggtcttaagttccacatt

SEQ ID NO: 156628 - DNA, 25 bp, Saccharomyces pastorianus
gatgaatacttacccaagctggaga

SEQ ID NO: 156629 - DNA, 25 bp, Saccharomyces pastorianus
gaaatatgtcattcctgatctacta

SEQ ID NO: 156630 - DNA, 25 bp, Saccharomyces pastorianus
gccctctcccaatacatgattgttg

SEQ ID NO: 156631 - DNA, 25 bp, Saccharomyces pastorianus
tgccgcggatgctttagtctattat

SEQ ID NO: 156632 - DNA, 25 bp, Saccharomyces pastorianus
tcttgcgtcgaattagaccttactt

SEQ ID NO: 156633 - DNA, 25 bp, Saccharomyces pastorianus
tgatctactacagtttgccgcggat

SEQ ID NO: 156634 - DNA, 25 bp, Saccharomyces pastorianus
tgaggccgaccaagtacttaccaac

SEQ ID NO: 156635 - DNA, 25 bp, Saccharomyces pastorianus
caagtacttaccaacccaaatacag

SEQ ID NO: 156636 - DNA, 25 bp, Saccharomyces pastorianus
tgccttcgaatagctctcaggtaat

SEQ ID NO: 156637 - DNA, 25 bp, Saccharomyces pastorianus
ggtgcatatgtcactgtgtctatct

SEQ ID NO: 156638 - DNA, 25 bp, Saccharomyces pastorianus
gatttccaagctgaggccgaccaag

SEQ ID NO: 156639 - DNA, 25 bp, Saccharomyces pastorianus
gaatagctctcaggtaatgaacatg

SEQ ID NO: 156640 - DNA, 25 bp, Saccharomyces pastorianus
gatttctgaagtcgctcctaaggaa

SEQ ID NO: 156641 - DNA, 25 bp, Saccharomyces pastorianus
gacctgccttcgaatagctctcagg

SEQ ID NO: 156642 - DNA, 25 bp, Saccharomyces pastorianus
atatgtcactgtgtctatctgttgt

SEQ ID NO: 156643 - DNA, 25 bp, Saccharomyces pastorianus
tacaggtaaaggtgcatatgtcact

SEQ ID NO: 156644 - DNA, 25 bp, Saccharomyces pastorianus
aagctgaggccgaccaagtacttac

SEQ ID NO: 156645 - DNA, 25 bp, Saccharomyces pastorianus
tatggtactaccgtttttaaggctg

SEQ ID NO: 156646 - DNA, 25 bp, Saccharomyces pastorianus
aactgtttgttatatggtgccattg

SEQ ID NO: 156647 - DNA, 25 bp, Saccharomyces pastorianus
cactgtcgatcgttttggacgtcgt

SEQ ID NO: 156648 - DNA, 25 bp, Saccharomyces pastorianus
tccaaagttaacaaggttgccccag

SEQ ID NO: 156649 - DNA, 25 bp, Saccharomyces pastorianus
gttcactggtaagccggccatgttt

SEQ ID NO: 156650 - DNA, 25 bp, Saccharomyces pastorianus
gcttctgttggtgtcaccagactat

SEQ ID NO: 156651 - DNA, 25 bp, Saccharomyces pastorianus
tagtttacgcttctgttggtgtcac

SEQ ID NO: 156652 - DNA, 25 bp, Saccharomyces pastorianus
taagccggccatgtttaagcgtact

SEQ ID NO: 156653 - DNA, 25 bp, Saccharomyces pastorianus
ggtctgctgttatgtagtttacgct

SEQ ID NO: 156654 - DNA, 25 bp, Saccharomyces pastorianus
tgttgttctttgtacactgtcgatc

SEQ ID NO: 156655 - DNA, 25 bp, Saccharomyces pastorianus
gaagcaagagcatctctttccaaag

SEQ ID NO: 156656 - DNA, 25 bp, Saccharomyces pastorianus
ccagctaaccaccactacagaaatt

SEQ ID NO: 156657 - DNA, 25 bp, Saccharomyces pastorianus
tatcattggttcaggtccagctgca

SEQ ID NO: 156658 - DNA, 25 bp, Saccharomyces pastorianus
tgccgtccccattttcagaaacaag

SEQ ID NO: 156659 - DNA, 25 bp, Saccharomyces pastorianus
taagagaatgcatttgccgggcgag

SEQ ID NO: 156660 - DNA, 25 bp, Saccharomyces pastorianus
aaagttgatctgtcttccaaaccat

SEQ ID NO: 156661 - DNA, 25 bp, Saccharomyces pastorianus
gaacctgtgacgactgacgctataa

SEQ ID NO: 156662 - DNA, 25 bp, Saccharomyces pastorianus
ggccacaggcgcttctgctaagaga

SEQ ID NO: 156663 - DNA, 25 bp, Saccharomyces pastorianus
gaacaatccacgaagtttggcactg

SEQ ID NO: 156664 - DNA, 25 bp, Saccharomyces pastorianus
tgccgtgtgtgatggtgccgtcccc

SEQ ID NO: 156665 - DNA, 25 bp, Saccharomyces pastorianus
ggtttcccagatggtctaacaggta

SEQ ID NO: 156666 - DNA, 25 bp, Saccharomyces pastorianus
aaaaggtatttctgcctgtgccgtg

SEQ ID NO: 156667 - DNA, 25 bp, Saccharomyces pastorianus
gtcagttttctatctctttcatcaa

SEQ ID NO: 156668 - DNA, 25 bp, Saccharomyces pastorianus
atagctggcctttgaaaatttcgcg

SEQ ID NO: 156669 - DNA, 25 bp, Saccharomyces pastorianus
taacgcctacgggtaatagctggcc

SEQ ID NO: 156670 - DNA, 25 bp, Saccharomyces pastorianus
tccttccgaagtttgttttcatctg

SEQ ID NO: 156671 - DNA, 25 bp, Saccharomyces pastorianus
attaggcactgctgaacttggacgt

SEQ ID NO: 156672 - DNA, 25 bp, Saccharomyces pastorianus
aactctagcagctggttcaagcggg

SEQ ID NO: 156673 - DNA, 25 bp, Saccharomyces pastorianus
ggatacgcagtatagttcggtcagt

SEQ ID NO: 156674 - DNA, 25 bp, Saccharomyces pastorianus
tatattctatctgttcggcggctaa

SEQ ID NO: 156675 - DNA, 25 bp, Saccharomyces pastorianus
aaatttacttctatcactgctctgg

SEQ ID NO: 156676 - DNA, 25 bp, Saccharomyces pastorianus
actgctctggtcctcactgagtgat

SEQ ID NO: 156677 - DNA, 25 bp, Saccharomyces pastorianus
aacttggacgtgaggacatctttga

SEQ ID NO: 156678 - DNA, 25 bp, Saccharomyces pastorianus
agcagaagttccctatgatagcttg

SEQ ID NO: 156679 - DNA, 25 bp, Saccharomyces pastorianus
tggtagcagaagttccctatgatag

SEQ ID NO: 156680 - DNA, 25 bp, Saccharomyces pastorianus
gtggtagcagaagttccctatgata

SEQ ID NO: 156681 - DNA, 25 bp, Saccharomyces pastorianus
atctgtggtagcagaagttccctat

SEQ ID NO: 156682 - DNA, 25 bp, Saccharomyces pastorianus
ctgtggtagcagaagttccctatga

SEQ ID NO: 156683 - DNA, 25 bp, Saccharomyces pastorianus
gacctagaaaatctgtggtagcaga

SEQ ID NO: 156684 - DNA, 25 bp, Saccharomyces pastorianus
gtagcagaagttccctatgatagct

SEQ ID NO: 156685 - DNA, 25 bp, Saccharomyces pastorianus
aatctgtggtagcagaagttcccta

SEQ ID NO: 156686 - DNA, 25 bp, Saccharomyces pastorianus
aaatctgtggtagcagaagttccct

SEQ ID NO: 156687 - DNA, 25 bp, Saccharomyces pastorianus
tgtggtagcagaagttccctatgat

SEQ ID NO: 156688 - DNA, 25 bp, Saccharomyces pastorianus
ggtagcagaagttccctatgatagc

SEQ ID NO: 156689 - DNA, 25 bp, Saccharomyces pastorianus
aagagttgctatttatccaagtgaa

SEQ ID NO: 156690 - DNA, 25 bp, Saccharomyces pastorianus
gatgaattcacttcttctgattctg

SEQ ID NO: 156691 - DNA, 25 bp, Saccharomyces pastorianus
gcgaggaagttgaaggacctccaaa

SEQ ID NO: 156692 - DNA, 25 bp, Saccharomyces pastorianus
gattatgttagctcttctgatgaat

SEQ ID NO: 156693 - DNA, 25 bp, Saccharomyces pastorianus
gaggtccagcataaatctaaggttg

SEQ ID NO: 156694 - DNA, 25 bp, Saccharomyces pastorianus
accagaatctggtgacatctctaag

SEQ ID NO: 156695 - DNA, 25 bp, Saccharomyces pastorianus
catctctaagaatttggccgtcgta

SEQ ID NO: 156696 - DNA, 25 bp, Saccharomyces pastorianus
gatgattaccttttccagtttcgtt

SEQ ID NO: 156697 - DNA, 25 bp, Saccharomyces pastorianus
aaaacagtagtggaccgtgcccgtg

SEQ ID NO: 156698 - DNA, 25 bp, Saccharomyces pastorianus
tctgattctgaatcgtccggagaaa

SEQ ID NO: 156699 - DNA, 25 bp, Saccharomyces pastorianus
ttggccgtcgtaaatttagattggg

SEQ ID NO: 156700 - DNA, 25 bp, Saccharomyces pastorianus
aacttgcctcgggtttactctacag

SEQ ID NO: 156701 - DNA, 25 bp, Saccharomyces pastorianus
gtgatgtccggaaaagcttctacag

SEQ ID NO: 156702 - DNA, 25 bp, Saccharomyces pastorianus
gcagagattattagtgatgtccgga

SEQ ID NO: 156703 - DNA, 25 bp, Saccharomyces pastorianus
agcttctacagagggtagcgttact

SEQ ID NO: 156704 - DNA, 25 bp, Saccharomyces pastorianus
ttcaataatgcacaagacgccatat

SEQ ID NO: 156705 - DNA, 25 bp, Saccharomyces pastorianus
caagacgccatattaacgagaaaat

SEQ ID NO: 156706 - DNA, 25 bp, Saccharomyces pastorianus
aatatggcattgcacagtataagca

SEQ ID NO: 156707 - DNA, 25 bp, Saccharomyces pastorianus
aaataagcaacgtcgcagcaaccca

SEQ ID NO: 156708 - DNA, 25 bp, Saccharomyces pastorianus
acgtcgcagcaacccattcaataat

SEQ ID NO: 156709 - DNA, 25 bp, Saccharomyces pastorianus
agcgttactacggagtttctctctg

SEQ ID NO: 156710 - DNA, 25 bp, Saccharomyces pastorianus
gagtttctctctgatatcattggta

SEQ ID NO: 156711 - DNA, 25 bp, Saccharomyces pastorianus
gatacgaaattacggaactattgca

SEQ ID NO: 156712 - DNA, 25 bp, Saccharomyces pastorianus
caagaacaactcaaaatagcctatg

SEQ ID NO: 156713 - DNA, 25 bp, Saccharomyces pastorianus
actcagacaagtagcaccagaccac

SEQ ID NO: 156714 - DNA, 25 bp, Saccharomyces pastorianus
gaaggttcattttattatcctacag

SEQ ID NO: 156715 - DNA, 25 bp, Saccharomyces pastorianus
aaaattcaccacatatctcccgttg

SEQ ID NO: 156716 - DNA, 25 bp, Saccharomyces pastorianus
atggaactctcatcaaacttaaaag

SEQ ID NO: 156717 - DNA, 25 bp, Saccharomyces pastorianus
acatatctcccgttgaggctccttc

SEQ ID NO: 156718 - DNA, 25 bp, Saccharomyces pastorianus
ggaactattgcaaaattcaccacat

SEQ ID NO: 156719 - DNA, 25 bp, Saccharomyces pastorianus
gttgaggctccttccttaactcaga

SEQ ID NO: 156720 - DNA, 25 bp, Saccharomyces pastorianus
gctccttccttaactcagacaagta

SEQ ID NO: 156721 - DNA, 25 bp, Saccharomyces pastorianus
gtagcaccagaccaccaaagaggac

SEQ ID NO: 156722 - DNA, 25 bp, Saccharomyces pastorianus
aaagttctacagtgtcttcgccatc

SEQ ID NO: 156723 - DNA, 25 bp, Saccharomyces pastorianus
gtgtcagcccactactaaataacct

SEQ ID NO: 156724 - DNA, 25 bp, Saccharomyces pastorianus
gaagttcctaatagtgtcagcccac

SEQ ID NO: 156725 - DNA, 25 bp, Saccharomyces pastorianus
attctaatgtacttcgcactgtcca

SEQ ID NO: 156726 - DNA, 25 bp, Saccharomyces pastorianus
tacaagtcctggtcattttaaccct

SEQ ID NO: 156727 - DNA, 25 bp, Saccharomyces pastorianus
gaaggagacctgaccccagaagaag

SEQ ID NO: 156728 - DNA, 25 bp, Saccharomyces pastorianus
gcatcgttaaactgggactggccaa

SEQ ID NO: 156729 - DNA, 25 bp, Saccharomyces pastorianus
agaaattctctctgctaaactggaa

SEQ ID NO: 156730 - DNA, 25 bp, Saccharomyces pastorianus
tagaaaccgtgatgctgttaccgag

SEQ ID NO: 156731 - DNA, 25 bp, Saccharomyces pastorianus
aaacttatgttcaacctctgctaga

SEQ ID NO: 156732 - DNA, 25 bp, Saccharomyces pastorianus
gagagacattccattattcagcaaa

SEQ ID NO: 156733 - DNA, 25 bp, Saccharomyces pastorianus
gtctctgctcatgttccaggtatga

SEQ ID NO: 156734 - DNA, 25 bp, Saccharomyces pastorianus
tttttggacacttcatcgtgccatt

SEQ ID NO: 156735 - DNA, 25 bp, Saccharomyces pastorianus
aaacgatagcgctgtattcggaaga

SEQ ID NO: 156736 - DNA, 25 bp, Saccharomyces pastorianus
tagattcgatgccaattccagtgat

SEQ ID NO: 156737 - DNA, 25 bp, Saccharomyces pastorianus
atcggaaacctacagcgcaagtgac

SEQ ID NO: 156738 - DNA, 25 bp, Saccharomyces pastorianus
tcgtgccattgttatcgcaggataa

SEQ ID NO: 156739 - DNA, 25 bp, Saccharomyces pastorianus
ttaccagtccaaattgaggccgcag

SEQ ID NO: 156740 - DNA, 25 bp, Saccharomyces pastorianus
attgtatccaatcctcaaatccacc

SEQ ID NO: 156741 - DNA, 25 bp, Saccharomyces pastorianus
gagattttcagatgaactatcccca

SEQ ID NO: 156742 - DNA, 25 bp, Saccharomyces pastorianus
gatttagcttcaaacctagtcgaac

SEQ ID NO: 156743 - DNA, 25 bp, Saccharomyces pastorianus
tagatgagccatccgttctggagaa

SEQ ID NO: 156744 - DNA, 25 bp, Saccharomyces pastorianus
aaagcgctagaagagttggagtata

SEQ ID NO: 156745 - DNA, 25 bp, Saccharomyces pastorianus
gcgaccgtacaaaagatgatatctg

SEQ ID NO: 156746 - DNA, 25 bp, Saccharomyces pastorianus
ggacaacgaggctaagaaaaccata

SEQ ID NO: 156747 - DNA, 25 bp, Saccharomyces pastorianus
actggaccaggatttgatgtttacc

SEQ ID NO: 156748 - DNA, 25 bp, Saccharomyces pastorianus
gttcaagaagtcaggtctctcggaa

SEQ ID NO: 156749 - DNA, 25 bp, Saccharomyces pastorianus
cgagcacgtgatcaaagcgctagaa

SEQ ID NO: 156750 - DNA, 25 bp, Saccharomyces pastorianus
tcataatgatcctgtcctcgatggc

SEQ ID NO: 156751 - DNA, 25 bp, Saccharomyces pastorianus
tcaactccggcatagaattcataat

SEQ ID NO: 156752 - DNA, 25 bp, Saccharomyces pastorianus
agaaatcatcatcaactccggcata

SEQ ID NO: 156753 - DNA, 25 bp, Saccharomyces pastorianus
gatttgatgtttaccaaggatgcaa

SEQ ID NO: 156754 - DNA, 25 bp, Saccharomyces pastorianus
gaaactagggattccaagttcaaga

SEQ ID NO: 156755 - DNA, 25 bp, Saccharomyces pastorianus
atagctcttccagcaaccataatgc

SEQ ID NO: 156756 - DNA, 25 bp, Saccharomyces pastorianus
gttggctagaacactcacatcgcag

SEQ ID NO: 156757 - DNA, 25 bp, Saccharomyces pastorianus
gctaacatcgtaccaaagctgctta

SEQ ID NO: 156758 - DNA, 25 bp, Saccharomyces pastorianus
tccgccgatgtgtcataccagtcaa

SEQ ID NO: 156759 - DNA, 25 bp, Saccharomyces pastorianus
ggaagaatctaagcgcctccggaga

SEQ ID NO: 156760 - DNA, 25 bp, Saccharomyces pastorianus
taccagtcaactttcgctaacatcg

SEQ ID NO: 156761 - DNA, 25 bp, Saccharomyces pastorianus
aaaccatactcactcggttgtgtat

SEQ ID NO: 156762 - DNA, 25 bp, Saccharomyces pastorianus
gcaaatatttgtacttcggacccgg

SEQ ID NO: 156763 - DNA, 25 bp, Saccharomyces pastorianus
gacagcatccatactgcggtttcga

SEQ ID NO: 156764 - DNA, 25 bp, Saccharomyces pastorianus
acgaaattcgcggagctcgagctca

SEQ ID NO: 156765 - DNA, 25 bp, Saccharomyces pastorianus
cagtgatcaattctccagtacggcg

SEQ ID NO: 156766 - DNA, 25 bp, Saccharomyces pastorianus
atgttctcaggatgcttatgatctt

SEQ ID NO: 156767 - DNA, 25 bp, Saccharomyces pastorianus
tttggactctgctactgctttagaa

SEQ ID NO: 156768 - DNA, 25 bp, Saccharomyces pastorianus
gaaagaccgcggctactgtggccat

SEQ ID NO: 156769 - DNA, 25 bp, Saccharomyces pastorianus
tactgctttagaattcatccgtgct

SEQ ID NO: 156770 - DNA, 25 bp, Saccharomyces pastorianus
catccgtgctttaaaaacccaggct

SEQ ID NO: 156771 - DNA, 25 bp, Saccharomyces pastorianus
aaagcgtgtatccattgcggaagtc

SEQ ID NO: 156772 - DNA, 25 bp, Saccharomyces pastorianus
ataatgccaccagaggtttggactc

SEQ ID NO: 156773 - DNA, 25 bp, Saccharomyces pastorianus
tggccacatatggtctttcgcatac

SEQ ID NO: 156774 - DNA, 25 bp, Saccharomyces pastorianus
gccgcaaaatcgtatcaagggtgtt

SEQ ID NO: 156775 - DNA, 25 bp, Saccharomyces pastorianus
gaagcgtacgccaatcacgtgacag

SEQ ID NO: 156776 - DNA, 25 bp, Saccharomyces pastorianus
tctgcggcgccagatttcaatgttg

SEQ ID NO: 156777 - DNA, 25 bp, Saccharomyces pastorianus
tcccagacagaccactgcagatttt

SEQ ID NO: 156778 - DNA, 25 bp, Saccharomyces pastorianus
gcttcaagttacaagtcctagctga

SEQ ID NO: 156779 - DNA, 25 bp, Saccharomyces pastorianus
accactgcagattttgtaagcttca

SEQ ID NO: 156780 - DNA, 25 bp, Saccharomyces pastorianus
atatggccagaatatcggctacaat

SEQ ID NO: 156781 - DNA, 25 bp, Saccharomyces pastorianus
aagtcctagctgacatagaagttat

SEQ ID NO: 156782 - DNA, 25 bp, Saccharomyces pastorianus
tacgtattgtctcccagacagacca

SEQ ID NO: 156783 - DNA, 25 bp, Saccharomyces pastorianus
ttgggctacgtattgtctcccagac

SEQ ID NO: 156784 - DNA, 25 bp, Saccharomyces pastorianus
cagtgcctcagagcgccaaaggata

SEQ ID NO: 156785 - DNA, 25 bp, Saccharomyces pastorianus
aggtactagcagtgcctcagagcgc

SEQ ID NO: 156786 - DNA, 25 bp, Saccharomyces pastorianus
ttatcgataaaggtactagcagtgc

SEQ ID NO: 156787 - DNA, 25 bp, Saccharomyces pastorianus
gaatatcggctacaatcagaaaact

SEQ ID NO: 156788 - DNA, 25 bp, Saccharomyces pastorianus
ttgtatcatccaagcgctgacgcat

SEQ ID NO: 156789 - DNA, 25 bp, Saccharomyces pastorianus
gtatacagggtttgccatccctaaa

SEQ ID NO: 156790 - DNA, 25 bp, Saccharomyces pastorianus
tgctggccctgcttatcagaacatc

SEQ ID NO: 156791 - DNA, 25 bp, Saccharomyces pastorianus
gctagcctacctgtttgaatcttta

SEQ ID NO: 156792 - DNA, 25 bp, Saccharomyces pastorianus
agatgcgtgggctccttgaccaaaa

SEQ ID NO: 156793 - DNA, 25 bp, Saccharomyces pastorianus
ccacattcactttatcccatttatt

SEQ ID NO: 156794 - DNA, 25 bp, Saccharomyces pastorianus
gtagattcccttgtgcccaatacat

SEQ ID NO: 156795 - DNA, 25 bp, Saccharomyces pastorianus
atggtccccgcttcaatgttattat

SEQ ID NO: 156796 - DNA, 25 bp, Saccharomyces pastorianus
aattccatgaccgtagattcccttg

SEQ ID NO: 156797 - DNA, 25 bp, Saccharomyces pastorianus
aacattacaggaggccatggtcccc

SEQ ID NO: 156798 - DNA, 25 bp, Saccharomyces pastorianus
gaacatcacaggtactcaacgcgtc

SEQ ID NO: 156799 - DNA, 25 bp, Saccharomyces pastorianus
agcagcaatcaccttccgttattag

SEQ ID NO: 156800 - DNA, 25 bp, Saccharomyces pastorianus
atcactctgatggaactgctgaaag

SEQ ID NO: 156801 - DNA, 25 bp, Saccharomyces pastorianus
gaccttatcaggaatttcttgcaga

SEQ ID NO: 156802 - DNA, 25 bp, Saccharomyces pastorianus
aaggccgttctacaggaccttatca

SEQ ID NO: 156803 - DNA, 25 bp, Saccharomyces pastorianus
ttcatcatcttttgctgtaccgaca

SEQ ID NO: 156804 - DNA, 25 bp, Saccharomyces pastorianus
gagtgctatcacagtacgttctatg

SEQ ID NO: 156805 - DNA, 25 bp, Saccharomyces pastorianus
ggcggaaaacgtctaccacatcttc

SEQ ID NO: 156806 - DNA, 25 bp, Saccharomyces pastorianus
ggcaagtctgatccttatagagttc

SEQ ID NO: 156807 - DNA, 25 bp, Saccharomyces pastorianus
gaatgaacctttgcctgtttataaa

SEQ ID NO: 156808 - DNA, 25 bp, Saccharomyces pastorianus
gttattaggcagtctcccactcaac

SEQ ID NO: 156809 - DNA, 25 bp, Saccharomyces pastorianus
aaagggtaccccattgagtgctatc

SEQ ID NO: 156810 - DNA, 25 bp, Saccharomyces pastorianus
gattccctgattcaacattgcgtgg

SEQ ID NO: 156811 - DNA, 25 bp, Saccharomyces pastorianus
aatgcaagttcgagcgctctcagta

SEQ ID NO: 156812 - DNA, 25 bp, Saccharomyces pastorianus
tgcttcagaaactactactccggtg

SEQ ID NO: 156813 - DNA, 25 bp, Saccharomyces pastorianus
tatcagattcatttgtccagcctca

SEQ ID NO: 156814 - DNA, 25 bp, Saccharomyces pastorianus
aagaatcttcagtttttccaccacg

SEQ ID NO: 156815 - DNA, 25 bp, Saccharomyces pastorianus
taaggcctcccataaattccaacag

SEQ ID NO: 156816 - DNA, 25 bp, Saccharomyces pastorianus
gataattcatcccacttaatctctc

SEQ ID NO: 156817 - DNA, 25 bp, Saccharomyces pastorianus
cagtacccctcccttaataagaatg

SEQ ID NO: 156818 - DNA, 25 bp, Saccharomyces pastorianus
gacaaaattctacgcctgtacttcc

SEQ ID NO: 156819 - DNA, 25 bp, Saccharomyces pastorianus
agatgttagcgtatcatccccaacg

SEQ ID NO: 156820 - DNA, 25 bp, Saccharomyces pastorianus
atatggatatgtcctttccttccac

SEQ ID NO: 156821 - DNA, 25 bp, Saccharomyces pastorianus
gatggtggttatgtccctagtttaa

SEQ ID NO: 156822 - DNA, 25 bp, Saccharomyces pastorianus
tgcattttttgctttccgtcataga

SEQ ID NO: 156823 - DNA, 25 bp, Saccharomyces pastorianus
tcaagcgtcttggattcttcaaaag

SEQ ID NO: 156824 - DNA, 25 bp, Saccharomyces pastorianus
gaaagtgtttactctgcggtagatg

SEQ ID NO: 156825 - DNA, 25 bp, Saccharomyces pastorianus
cggtgatctattgtacagggacgca

SEQ ID NO: 156826 - DNA, 25 bp, Saccharomyces pastorianus
ttgaaagtaccgagctttcccgctc

SEQ ID NO: 156827 - DNA, 25 bp, Saccharomyces pastorianus
gtactcttgtggttattcgttgcat

SEQ ID NO: 156828 - DNA, 25 bp, Saccharomyces pastorianus
cctagtttaacctcatcaagcgtct

SEQ ID NO: 156829 - DNA, 25 bp, Saccharomyces pastorianus
gattgacgttatatggctctggaga

SEQ ID NO: 156830 - DNA, 25 bp, Saccharomyces pastorianus
gttttaactattggcgtactcttgt

SEQ ID NO: 156831 - DNA, 25 bp, Saccharomyces pastorianus
aaaccccactgcgaagtttagctgg

SEQ ID NO: 156832 - DNA, 25 bp, Saccharomyces pastorianus
gccgtgaatctaacactttcgcagt

SEQ ID NO: 156833 - DNA, 25 bp, Saccharomyces pastorianus
gtgcttcggatactgttgtttcaac

SEQ ID NO: 156834 - DNA, 25 bp, Saccharomyces pastorianus
tgttgtagtaccttctgcctatgcg

SEQ ID NO: 156835 - DNA, 25 bp, Saccharomyces pastorianus
ttcaccatcggcttctgttgtagta

SEQ ID NO: 156836 - DNA, 25 bp, Saccharomyces pastorianus
aagaactgattgtcgatcgcccggc

SEQ ID NO: 156837 - DNA, 25 bp, Saccharomyces pastorianus
agcacctgctgtaatatcctcaacg

SEQ ID NO: 156838 - DNA, 25 bp, Saccharomyces pastorianus
gtcgacttatatttcttcttccctt

SEQ ID NO: 156839 - DNA, 25 bp, Saccharomyces pastorianus
tacctgttgcagtatcctcgacgta

SEQ ID NO: 156840 - DNA, 25 bp, Saccharomyces pastorianus
atatctttctcatcagtacccgttg

SEQ ID NO: 156841 - DNA, 25 bp, Saccharomyces pastorianus
attcaacctttgttcatgcgacttc

SEQ ID NO: 156842 - DNA, 25 bp, Saccharomyces pastorianus
gcagtatcttcgatttccacgacaa

SEQ ID NO: 156843 - DNA, 25 bp, Saccharomyces pastorianus
attgggactactatcggcgaagctc

SEQ ID NO: 156844 - DNA, 25 bp, Saccharomyces pastorianus
gcagatgcggaaactgaaccttttg

SEQ ID NO: 156845 - DNA, 25 bp, Saccharomyces pastorianus
agagcatctacgtcatcttcaacct

SEQ ID NO: 156846 - DNA, 25 bp, Saccharomyces pastorianus
gcagcacatctgacatggatctctc

SEQ ID NO: 156847 - DNA, 25 bp, Saccharomyces pastorianus
ttgtcgatgtctactactgctacta

SEQ ID NO: 156848 - DNA, 25 bp, Saccharomyces pastorianus
gcgaagctcgcccagagaacgaaaa

SEQ ID NO: 156849 - DNA, 25 bp, Saccharomyces pastorianus
ttcttcatcgtctttgccatctagc

SEQ ID NO: 156850 - DNA, 25 bp, Saccharomyces pastorianus
gaaccttttgtttccttgtcgatgt

SEQ ID NO: 156851 - DNA, 25 bp, Saccharomyces pastorianus
aacctcttctcatgccgtagtggaa

SEQ ID NO: 156852 - DNA, 25 bp, Saccharomyces pastorianus
atcacctatatgcttctggaattgg

SEQ ID NO: 156853 - DNA, 25 bp, Saccharomyces pastorianus
gataataatccattcgtcggcactc

SEQ ID NO: 156854 - DNA, 25 bp, Saccharomyces pastorianus
agaggttacatctgaccctaacacc

SEQ ID NO: 156855 - DNA, 25 bp, Saccharomyces pastorianus
aattttcttatcacctcagactctg

SEQ ID NO: 156856 - DNA, 25 bp, Saccharomyces pastorianus
gaaagttcttatccgcttattagca

SEQ ID NO: 156857 - DNA, 25 bp, Saccharomyces pastorianus
atagattgcacagcttgttagacaa

SEQ ID NO: 156858 - DNA, 25 bp, Saccharomyces pastorianus
agctgcttgcccaatggaccaaaga

SEQ ID NO: 156859 - DNA, 25 bp, Saccharomyces pastorianus
gcatcttcaaacacatcttctgtag

SEQ ID NO: 156860 - DNA, 25 bp, Saccharomyces pastorianus
attctgccgcacattatagatcaag

SEQ ID NO: 156861 - DNA, 25 bp, Saccharomyces pastorianus
gcagatgccggtcatgcatttgcaa

SEQ ID NO: 156862 - DNA, 25 bp, Saccharomyces pastorianus
cgaagaccgaccacatttttgaatt

SEQ ID NO: 156863 - DNA, 25 bp, Saccharomyces pastorianus
agcctcgcctgattttcgggtttga

SEQ ID NO: 156864 - DNA, 25 bp, Saccharomyces pastorianus
agagattacctcatggcagctgctt

SEQ ID NO: 156865 - DNA, 25 bp, Saccharomyces pastorianus
atatctgtcaatgcttgttcaacaa

SEQ ID NO: 156866 - DNA, 25 bp, Saccharomyces pastorianus
tactacctttatcatagagcccctc

SEQ ID NO: 156867 - DNA, 25 bp, Saccharomyces pastorianus
aattcaatgatttactactaccttt

SEQ ID NO: 156868 - DNA, 25 bp, Saccharomyces pastorianus
atggaatatacctccaactggatat

SEQ ID NO: 156869 - DNA, 25 bp, Saccharomyces pastorianus
caattgcttgttatcatatctgtca

SEQ ID NO: 156870 - DNA, 25 bp, Saccharomyces pastorianus
gccttctaattggtggcttattgat

SEQ ID NO: 156871 - DNA, 25 bp, Saccharomyces pastorianus
ggacgcaaatcgctgaaaccgcaac

SEQ ID NO: 156872 - DNA, 25 bp, Saccharomyces pastorianus
ggatattttctaacggcctgtgctt

SEQ ID NO: 156873 - DNA, 25 bp, Saccharomyces pastorianus
gtgcttgggcatacgaggacgcaaa

SEQ ID NO: 156874 - DNA, 25 bp, Saccharomyces pastorianus
gcccctccgtatatttatcactgta

SEQ ID NO: 156875 - DNA, 25 bp, Saccharomyces pastorianus
ctttattcttttgagtagccttcta

SEQ ID NO: 156876 - DNA, 25 bp, Saccharomyces pastorianus
ctttgtggacaataacagggtcgct

SEQ ID NO: 156877 - DNA, 25 bp, Saccharomyces pastorianus
taattcctcagtgcgatgttatcct

SEQ ID NO: 156878 - DNA, 25 bp, Saccharomyces pastorianus
gaagcctcacttatcagatcaactt

SEQ ID NO: 156879 - DNA, 25 bp, Saccharomyces pastorianus
agaacttttgcccaatttcctatct

SEQ ID NO: 156880 - DNA, 25 bp, Saccharomyces pastorianus
agtgcgatgttatcctcgtaaataa

SEQ ID NO: 156881 - DNA, 25 bp, Saccharomyces pastorianus
acagggtcgctgaactaattcctca

SEQ ID NO: 156882 - DNA, 25 bp, Saccharomyces pastorianus
tgcgtagtacaagctgcgttggaat

SEQ ID NO: 156883 - DNA, 25 bp, Saccharomyces pastorianus
tttcatggacgcatagtggcggaga

SEQ ID NO: 156884 - DNA, 25 bp, Saccharomyces pastorianus
gatgtgcattaagcttcggatgtga

SEQ ID NO: 156885 - DNA, 25 bp, Saccharomyces pastorianus
gctagcgatttaactatactgcagt

SEQ ID NO: 156886 - DNA, 25 bp, Saccharomyces pastorianus
gggtgacactttcatggatctcggt

SEQ ID NO: 156887 - DNA, 25 bp, Saccharomyces pastorianus
tgccgggtgagtgtgcttctataac

SEQ ID NO: 156888 - DNA, 25 bp, Saccharomyces pastorianus
tctgtctatttttcatatgcctctg

SEQ ID NO: 156889 - DNA, 25 bp, Saccharomyces pastorianus
gttgtcgtggatgatgttctcgcca

SEQ ID NO: 156890 - DNA, 25 bp, Saccharomyces pastorianus
ttcatatttccttctcgctttgtat

SEQ ID NO: 156891 - DNA, 25 bp, Saccharomyces pastorianus
gattaattgtcttgctctcttcata

SEQ ID NO: 156892 - DNA, 25 bp, Saccharomyces pastorianus
gaagctagaggccttctatttgggc

SEQ ID NO: 156893 - DNA, 25 bp, Saccharomyces pastorianus
attccctttgattccaacgtggttg

SEQ ID NO: 156894 - DNA, 25 bp, Saccharomyces pastorianus
tgcgggcgaccttatcagacaagtg

SEQ ID NO: 156895 - DNA, 25 bp, Saccharomyces pastorianus
aacggcatatgctgcgggcgacctt

SEQ ID NO: 156896 - DNA, 25 bp, Saccharomyces pastorianus
gttggtacacacgttcaagacgcat

SEQ ID NO: 156897 - DNA, 25 bp, Saccharomyces pastorianus
gacaagtgggtgctcatattctgga

SEQ ID NO: 156898 - DNA, 25 bp, Saccharomyces pastorianus
tgtcctattacttccaaaaataagt

SEQ ID NO: 156899 - DNA, 25 bp, Saccharomyces pastorianus
ttccaacgaaatagccttgttggcg

SEQ ID NO: 156900 - DNA, 25 bp, Saccharomyces pastorianus
taatgtcctattacttccaaaaata

SEQ ID NO: 156901 - DNA, 25 bp, Saccharomyces pastorianus
tttccaacgaaatagccttgttggc

SEQ ID NO: 156902 - DNA, 25 bp, Saccharomyces pastorianus
tagtttttccaacgaaatagccttg

SEQ ID NO: 156903 - DNA, 25 bp, Saccharomyces pastorianus
tcctattacttccaaaaataagtag

SEQ ID NO: 156904 - DNA, 25 bp, Saccharomyces pastorianus
ttttccaacgaaatagccttgttgg

SEQ ID NO: 156905 - DNA, 25 bp, Saccharomyces pastorianus
tttttccaacgaaatagccttgttg

SEQ ID NO: 156906 - DNA, 25 bp, Saccharomyces pastorianus
tccaacgaaatagccttgttggcgc

SEQ ID NO: 156907 - DNA, 25 bp, Saccharomyces pastorianus
atgtcctattacttccaaaaataag

SEQ ID NO: 156908 - DNA, 25 bp, Saccharomyces pastorianus
ttaatgtcctattacttccaaaaat

SEQ ID NO: 156909 - DNA, 25 bp, Saccharomyces pastorianus
gtattcctgaaatggatgacttggt

SEQ ID NO: 156910 - DNA, 25 bp, Saccharomyces pastorianus
cgaacagtctatctgattggtctat

SEQ ID NO: 156911 - DNA, 25 bp, Saccharomyces pastorianus
atcagcttctaaagttgcacccaac

SEQ ID NO: 156912 - DNA, 25 bp, Saccharomyces pastorianus
cgtgccaagcggtgtaagagaatct

SEQ ID NO: 156913 - DNA, 25 bp, Saccharomyces pastorianus
ggacatttggattagttgtgcgaaa

SEQ ID NO: 156914 - DNA, 25 bp, Saccharomyces pastorianus
cacaagatttaaagttttgggcaat

SEQ ID NO: 156915 - DNA, 25 bp, Saccharomyces pastorianus
gtcaataaattacgtgccaagcggt

SEQ ID NO: 156916 - DNA, 25 bp, Saccharomyces pastorianus
gattaaattccagagggtctagcat

SEQ ID NO: 156917 - DNA, 25 bp, Saccharomyces pastorianus
gttgcacccaacgaatgtggacatt

SEQ ID NO: 156918 - DNA, 25 bp, Saccharomyces pastorianus
ggtggagaaaggactattcactaaa

SEQ ID NO: 156919 - DNA, 25 bp, Saccharomyces pastorianus
aaagaactgattttgagcatagatt

SEQ ID NO: 156920 - DNA, 25 bp, Saccharomyces pastorianus
gactgacacctagggagccagtaat

SEQ ID NO: 156921 - DNA, 25 bp, Saccharomyces pastorianus
catcctgtcgacctgtgttttgttt

SEQ ID NO: 156922 - DNA, 25 bp, Saccharomyces pastorianus
ttgtttttcctcgtgtttataattg

SEQ ID NO: 156923 - DNA, 25 bp, Saccharomyces pastorianus
cgatattcatcctgacccttattat

SEQ ID NO: 156924 - DNA, 25 bp, Saccharomyces pastorianus
aaatcattgattgccatcctgtcga

SEQ ID NO: 156925 - DNA, 25 bp, Saccharomyces pastorianus
ggaaggaagctctattgatgcagtt

SEQ ID NO: 156926 - DNA, 25 bp, Saccharomyces pastorianus
aatttacaaagctaggactgacacc

SEQ ID NO: 156927 - DNA, 25 bp, Saccharomyces pastorianus
gaaaattacatggacggttccttca

SEQ ID NO: 156928 - DNA, 25 bp, Saccharomyces pastorianus
caatatgtttccgttttctccaaat

SEQ ID NO: 156929 - DNA, 25 bp, Saccharomyces pastorianus
gggacaacgagtcacttcaattgct

SEQ ID NO: 156930 - DNA, 25 bp, Saccharomyces pastorianus
ggttccttcatattaccgatattca

SEQ ID NO: 156931 - DNA, 25 bp, Saccharomyces pastorianus
aatgtctggatgtgattctcccgtt

SEQ ID NO: 156932 - DNA, 25 bp, Saccharomyces pastorianus
gtggcacccaagtttgggaaggcaa

SEQ ID NO: 156933 - DNA, 25 bp, Saccharomyces pastorianus
ggcaatgtctggatgtgattctccc

SEQ ID NO: 156934 - DNA, 25 bp, Saccharomyces pastorianus
atgtggcacccaagtttgggaaggc

SEQ ID NO: 156935 - DNA, 25 bp, Saccharomyces pastorianus
atgtctggatgtgattctcccgtta

SEQ ID NO: 156936 - DNA, 25 bp, Saccharomyces pastorianus
aaggcaatgtctggatgtgattctc

SEQ ID NO: 156937 - DNA, 25 bp, Saccharomyces pastorianus
caatgtctggatgtgattctcccgt

SEQ ID NO: 156938 - DNA, 25 bp, Saccharomyces pastorianus
gtctggatgtgattctcccgttatt

SEQ ID NO: 156939 - DNA, 25 bp, Saccharomyces pastorianus
cccaagtttgggaaggcaatgtctg

SEQ ID NO: 156940 - DNA, 25 bp, Saccharomyces pastorianus
aaaaggatgtggcacccaagtttgg

SEQ ID NO: 156941 - DNA, 25 bp, Saccharomyces pastorianus
aaaggatgtggcacccaagtttggg

SEQ ID NO: 156942 - DNA, 25 bp, Saccharomyces pastorianus
gggcccatattctgacaacaattct

SEQ ID NO: 156943 - DNA, 25 bp, Saccharomyces pastorianus
tacgtggtgctgttggtgtcgcctt

SEQ ID NO: 156944 - DNA, 25 bp, Saccharomyces pastorianus
tattcagacagatttgggcccatat

SEQ ID NO: 156945 - DNA, 25 bp, Saccharomyces pastorianus
tgtcgccttggcgttgggaattcaa

SEQ ID NO: 156946 - DNA, 25 bp, Saccharomyces pastorianus
gttcactttattggcaacggtcctt

SEQ ID NO: 156947 - DNA, 25 bp, Saccharomyces pastorianus
gtttctccatccttacaagattcgg

SEQ ID NO: 156948 - DNA, 25 bp, Saccharomyces pastorianus
caagaatctccccaataacatatcc

SEQ ID NO: 156949 - DNA, 25 bp, Saccharomyces pastorianus
taacccggcaaggtcttctatggat

SEQ ID NO: 156950 - DNA, 25 bp, Saccharomyces pastorianus
accaattcgcggtcagcagtaacaa

SEQ ID NO: 156951 - DNA, 25 bp, Saccharomyces pastorianus
aagattcggctacgcaatcacctgc

SEQ ID NO: 156952 - DNA, 25 bp, Saccharomyces pastorianus
gtattcttggacaacgtttctccat

SEQ ID NO: 156953 - DNA, 25 bp, Saccharomyces pastorianus
gatgaccctattgcaggtgatcctg

SEQ ID NO: 156954 - DNA, 25 bp, Saccharomyces pastorianus
tagggcagtgcatgaaactgtgctt

SEQ ID NO: 156955 - DNA, 25 bp, Saccharomyces pastorianus
ggcattgttcattatgttgctccta

SEQ ID NO: 156956 - DNA, 25 bp, Saccharomyces pastorianus
atgttgctcctattgatctctgcat

SEQ ID NO: 156957 - DNA, 25 bp, Saccharomyces pastorianus
gttaaccaccgccaagagagcagtt

SEQ ID NO: 156958 - DNA, 25 bp, Saccharomyces pastorianus
gatctctgcattgtggtctagttac

SEQ ID NO: 156959 - DNA, 25 bp, Saccharomyces pastorianus
gatctcccgggtagcgatgacccta

SEQ ID NO: 156960 - DNA, 25 bp, Saccharomyces pastorianus
gatcctgatgtagacttaaaccctg

SEQ ID NO: 156961 - DNA, 25 bp, Saccharomyces pastorianus
gacgatgatgatgaacttctacctt

SEQ ID NO: 156962 - DNA, 25 bp, Saccharomyces pastorianus
ttggcttgataataaggatgtcccc

SEQ ID NO: 156963 - DNA, 25 bp, Saccharomyces pastorianus
aaggtgctgttaaccaccgccaaga

SEQ ID NO: 156964 - DNA, 25 bp, Saccharomyces pastorianus
agcacttttctcttgtcgatctata

SEQ ID NO: 156965 - DNA, 25 bp, Saccharomyces pastorianus
taacatatcgcatggtctgttggga

SEQ ID NO: 156966 - DNA, 25 bp, Saccharomyces pastorianus
gtgaacactcactacagcaaatatt

SEQ ID NO: 156967 - DNA, 25 bp, Saccharomyces pastorianus
tggtgctcagacattatcagaaatc

SEQ ID NO: 156968 - DNA, 25 bp, Saccharomyces pastorianus
tatggcccttttacccgcagaaagt

SEQ ID NO: 156969 - DNA, 25 bp, Saccharomyces pastorianus
tttgttaacaccattttctcggctc

SEQ ID NO: 156970 - DNA, 25 bp, Saccharomyces pastorianus
atccttgaagcatgtctggtgctca

SEQ ID NO: 156971 - DNA, 25 bp, Saccharomyces pastorianus
tcggctcctcaagtaagctcgaagt

SEQ ID NO: 156972 - DNA, 25 bp, Saccharomyces pastorianus
gaacggatgctttattcacattgga

SEQ ID NO: 156973 - DNA, 25 bp, Saccharomyces pastorianus
tttctcaataaaagcttcggtggcg

SEQ ID NO: 156974 - DNA, 25 bp, Saccharomyces pastorianus
atgacgacccaagaactgtgtgaac

SEQ ID NO: 156975 - DNA, 25 bp, Saccharomyces pastorianus
tctttcaacacagttcccagatcaa

SEQ ID NO: 156976 - DNA, 25 bp, Saccharomyces pastorianus
gaaagtggctttacctcggacaaca

SEQ ID NO: 156977 - DNA, 25 bp, Saccharomyces pastorianus
gatacggtggacatactcgctaagc

SEQ ID NO: 156978 - DNA, 25 bp, Saccharomyces pastorianus
gcgcagtctagcctcgatattggac

SEQ ID NO: 156979 - DNA, 25 bp, Saccharomyces pastorianus
gatcaaaggtatcttcgcccttaga

SEQ ID NO: 156980 - DNA, 25 bp, Saccharomyces pastorianus
agaatttcctggcatgcagatccct

SEQ ID NO: 156981 - DNA, 25 bp, Saccharomyces pastorianus
aatgccgactacttctccgggaata

SEQ ID NO: 156982 - DNA, 25 bp, Saccharomyces pastorianus
agtacctaccatgcgtatctttcaa

SEQ ID NO: 156983 - DNA, 25 bp, Saccharomyces pastorianus
tgtatgtcaggcaggaccagctgga

SEQ ID NO: 156984 - DNA, 25 bp, Saccharomyces pastorianus
gcagatccctgcagattatacaatg

SEQ ID NO: 156985 - DNA, 25 bp, Saccharomyces pastorianus
attggactcgagcagttccgtcgaa

SEQ ID NO: 156986 - DNA, 25 bp, Saccharomyces pastorianus
ggacgcaacggcctcttgatagata

SEQ ID NO: 156987 - DNA, 25 bp, Saccharomyces pastorianus
gtacgcggatcatgacagccacgat

SEQ ID NO: 156988 - DNA, 25 bp, Saccharomyces pastorianus
gacagaggtttctgcgtcaggccag

SEQ ID NO: 156989 - DNA, 25 bp, Saccharomyces pastorianus
tgaaaccactgctgccgacgaaaat

SEQ ID NO: 156990 - DNA, 25 bp, Saccharomyces pastorianus
aacgctagttttgcgcggctggaga

SEQ ID NO: 156991 - DNA, 25 bp, Saccharomyces pastorianus
aaggcgtcttggttgtggtttatct

SEQ ID NO: 156992 - DNA, 25 bp, Saccharomyces pastorianus
tatcgctcaggagtatgacccagga

SEQ ID NO: 156993 - DNA, 25 bp, Saccharomyces pastorianus
gaactagccaaaccttttcttgttg

SEQ ID NO: 156994 - DNA, 25 bp, Saccharomyces pastorianus
gcggcaacgctgagcaacgctagtt

SEQ ID NO: 156995 - DNA, 25 bp, Saccharomyces pastorianus
actactgatgctgtcgccattgaaa

SEQ ID NO: 156996 - DNA, 25 bp, Saccharomyces pastorianus
gtggtttatctacgattgccgccgg

SEQ ID NO: 156997 - DNA, 25 bp, Saccharomyces pastorianus
attattccgcccatggcgtctatta

SEQ ID NO: 156998 - DNA, 25 bp, Saccharomyces pastorianus
ggtcgttaccattcatattcatatt

SEQ ID NO: 156999 - DNA, 25 bp, Saccharomyces pastorianus
tcatctcgtaatgggaaacatcgtc

SEQ ID NO: 157000 - DNA, 25 bp, Saccharomyces pastorianus
tcattttccggttctatagagccaa

SEQ ID NO: 157001 - DNA, 25 bp, Saccharomyces pastorianus
ggcgtctattaccaagcgtcataat

SEQ ID NO: 157002 - DNA, 25 bp, Saccharomyces pastorianus
taccaagcgtcataatgtgcaatat

SEQ ID NO: 157003 - DNA, 25 bp, Saccharomyces pastorianus
atagagccaatttctttttcctttg

SEQ ID NO: 157004 - DNA, 25 bp, Saccharomyces pastorianus
attagagcttccttcattattccgc

SEQ ID NO: 157005 - DNA, 25 bp, Saccharomyces pastorianus
gaaacatcgtcaaggtcgttaccat

SEQ ID NO: 157006 - DNA, 25 bp, Saccharomyces pastorianus
tggttgtatttccttcatctcgtaa

SEQ ID NO: 157007 - DNA, 25 bp, Saccharomyces pastorianus
atattctacttcattttccggttct

SEQ ID NO: 157008 - DNA, 25 bp, Saccharomyces pastorianus
gaggaattatctcccattacacaag

SEQ ID NO: 157009 - DNA, 25 bp, Saccharomyces pastorianus
actgaggcaaacgttcctggattta

SEQ ID NO: 157010 - DNA, 25 bp, Saccharomyces pastorianus
agaccgaaatagttcctctctctaa

SEQ ID NO: 157011 - DNA, 25 bp, Saccharomyces pastorianus
taaccaacccaagttcttcatcatt

SEQ ID NO: 157012 - DNA, 25 bp, Saccharomyces pastorianus
attgtatctcatattctcaaccgaa

SEQ ID NO: 157013 - DNA, 25 bp, Saccharomyces pastorianus
aataccctcttcaaaatcgcttgta

SEQ ID NO: 157014 - DNA, 25 bp, Saccharomyces pastorianus
gaatgtatgatcgtgcgcgcgacga

SEQ ID NO: 157015 - DNA, 25 bp, Saccharomyces pastorianus
attcaggctgcccaaatgctcaagc

SEQ ID NO: 157016 - DNA, 25 bp, Saccharomyces pastorianus
gtacgcaaccagttttcgagcttga

SEQ ID NO: 157017 - DNA, 25 bp, Saccharomyces pastorianus
gtccttatttacttcatgggcaaac

SEQ ID NO: 157018 - DNA, 25 bp, Saccharomyces pastorianus
attacacaagactctccaacatcat

SEQ ID NO: 157019 - DNA, 25 bp, Saccharomyces pastorianus
accgttcccatttagctgttttcat

SEQ ID NO: 157020 - DNA, 25 bp, Saccharomyces pastorianus
aatccactcttccaataccaactta

SEQ ID NO: 157021 - DNA, 25 bp, Saccharomyces pastorianus
tttgaatccactcttccaataccaa

SEQ ID NO: 157022 - DNA, 25 bp, Saccharomyces pastorianus
atttagctgttttcatgcaccgtct

SEQ ID NO: 157023 - DNA, 25 bp, Saccharomyces pastorianus
ttagctgttttcatgcaccgtctga

SEQ ID NO: 157024 - DNA, 25 bp, Saccharomyces pastorianus
gttcccatttagctgttttcatgca

SEQ ID NO: 157025 - DNA, 25 bp, Saccharomyces pastorianus
agctgttttcatgcaccgtctgatg

SEQ ID NO: 157026 - DNA, 25 bp, Saccharomyces pastorianus
aaaatcagacgaaacaacagctacc

SEQ ID NO: 157027 - DNA, 25 bp, Saccharomyces pastorianus
gagttttgaatccactcttccaata

SEQ ID NO: 157028 - DNA, 25 bp, Saccharomyces pastorianus
aacaaggtattgttcatctgggagt

SEQ ID NO: 157029 - DNA, 25 bp, Saccharomyces pastorianus
aactctaaagagttttgaatccact

SEQ ID NO: 157030 - DNA, 25 bp, Saccharomyces pastorianus
taacatatacgctccttcttcatta

SEQ ID NO: 157031 - DNA, 25 bp, Saccharomyces pastorianus
aggtgctactcttttcctgtaatga

SEQ ID NO: 157032 - DNA, 25 bp, Saccharomyces pastorianus
agactcaccatcattttctgtacga

SEQ ID NO: 157033 - DNA, 25 bp, Saccharomyces pastorianus
agatcatgcctatttgacctttata

SEQ ID NO: 157034 - DNA, 25 bp, Saccharomyces pastorianus
gtcaatcttatgttacgttcccaga

SEQ ID NO: 157035 - DNA, 25 bp, Saccharomyces pastorianus
tcataaccgattcctaccaacaaga

SEQ ID NO: 157036 - DNA, 25 bp, Saccharomyces pastorianus
atccaaatcatctagcataccgtca

SEQ ID NO: 157037 - DNA, 25 bp, Saccharomyces pastorianus
aaacctcctgctcgagttcaaatat

SEQ ID NO: 157038 - DNA, 25 bp, Saccharomyces pastorianus
ggtcactttcacaaggtcaaacgct

SEQ ID NO: 157039 - DNA, 25 bp, Saccharomyces pastorianus
gtgtctaaaatatcgaacttgccct

SEQ ID NO: 157040 - DNA, 25 bp, Saccharomyces pastorianus
tcaaaactcctccttaaattcctct

SEQ ID NO: 157041 - DNA, 25 bp, Saccharomyces pastorianus
caggccaacggcaaatgctaagcta

SEQ ID NO: 157042 - DNA, 25 bp, Saccharomyces pastorianus
gctaagctatttccaagggtttgtg

SEQ ID NO: 157043 - DNA, 25 bp, Saccharomyces pastorianus
aacggcaaatgctaagctatttcca

SEQ ID NO: 157044 - DNA, 25 bp, Saccharomyces pastorianus
ggtttgtgcccatacacacaatatt

SEQ ID NO: 157045 - DNA, 25 bp, Saccharomyces pastorianus
gccaacggcaaatgctaagctattt

SEQ ID NO: 157046 - DNA, 25 bp, Saccharomyces pastorianus
aatgctaagctatttccaagggttt

SEQ ID NO: 157047 - DNA, 25 bp, Saccharomyces pastorianus
tcatcaggccaacggcaaatgctaa

SEQ ID NO: 157048 - DNA, 25 bp, Saccharomyces pastorianus
gtgcccatacacacaatattttatt

SEQ ID NO: 157049 - DNA, 25 bp, Saccharomyces pastorianus
ggcaaatgctaagctatttccaagg

SEQ ID NO: 157050 - DNA, 25 bp, Saccharomyces pastorianus
agggtttgtgcccatacacacaata

SEQ ID NO: 157051 - DNA, 25 bp, Saccharomyces pastorianus
cacaatattttattccgtgttccat

SEQ ID NO: 157052 - DNA, 25 bp, Saccharomyces pastorianus
cttctttctgtctcttggtggttcc

SEQ ID NO: 157053 - DNA, 25 bp, Saccharomyces pastorianus
ttctgtctcttggtggttccttcaa

SEQ ID NO: 157054 - DNA, 25 bp, Saccharomyces pastorianus
ccttctttctgtctcttggtggttc

SEQ ID NO: 157055 - DNA, 25 bp, Saccharomyces pastorianus
tccttctttctgtctcttggtggtt

SEQ ID NO: 157056 - DNA, 25 bp, Saccharomyces pastorianus
tttctgtctcttggtggttccttca

SEQ ID NO: 157057 - DNA, 25 bp, Saccharomyces pastorianus
ctttctgtctcttggtggttccttc

SEQ ID NO: 157058 - DNA, 25 bp, Saccharomyces pastorianus
ttctttctgtctcttggtggttcct

SEQ ID NO: 157059 - DNA, 25 bp, Saccharomyces pastorianus
tctttctgtctcttggtggttcctt

SEQ ID NO: 157060 - DNA, 25 bp, Saccharomyces pastorianus
ctaccgttgctaaattcgagtgaaa

SEQ ID NO: 157061 - DNA, 25 bp, Saccharomyces pastorianus
gggcggattactaccgttgctaaat

SEQ ID NO: 157062 - DNA, 25 bp, Saccharomyces pastorianus
ggaagaccagaaaatcctcatttca

SEQ ID NO: 157063 - DNA, 25 bp, Saccharomyces pastorianus
tgccgttggaaatcactgggaaata

SEQ ID NO: 157064 - DNA, 25 bp, Saccharomyces pastorianus
gaaatccattcaactaacatcacac

SEQ ID NO: 157065 - DNA, 25 bp, Saccharomyces pastorianus
gagaacttcatgtgggtcctaggat

SEQ ID NO: 157066 - DNA, 25 bp, Saccharomyces pastorianus
gagcagacgctcatcaataaaatcg

SEQ ID NO: 157067 - DNA, 25 bp, Saccharomyces pastorianus
cagagcgagagcatttttgaatatc

SEQ ID NO: 157068 - DNA, 25 bp, Saccharomyces pastorianus
aatttcatcaatgggtgccgttgga

SEQ ID NO: 157069 - DNA, 25 bp, Saccharomyces pastorianus
gaatttgcagtggtaacgctagagc

SEQ ID NO: 157070 - DNA, 25 bp, Saccharomyces pastorianus
ggcacatcaatgcatcaatccgtgt

SEQ ID NO: 157071 - DNA, 25 bp, Saccharomyces pastorianus
aggttttattgcttccgactccgat

SEQ ID NO: 157072 - DNA, 25 bp, Saccharomyces pastorianus
aacgcggaggatgacatttctactg

SEQ ID NO: 157073 - DNA, 25 bp, Saccharomyces pastorianus
ttccgactccgataaagatattgcg

SEQ ID NO: 157074 - DNA, 25 bp, Saccharomyces pastorianus
tttctactgttcaaccagacgctga

SEQ ID NO: 157075 - DNA, 25 bp, Saccharomyces pastorianus
ttgccatccggacaaagtaagcttg

SEQ ID NO: 157076 - DNA, 25 bp, Saccharomyces pastorianus
gacgctgattctgttttcattttaa

SEQ ID NO: 157077 - DNA, 25 bp, Saccharomyces pastorianus
cttcccattctggtatttggataga

SEQ ID NO: 157078 - DNA, 25 bp, Saccharomyces pastorianus
gttgaacactgacctacataaccct

SEQ ID NO: 157079 - DNA, 25 bp, Saccharomyces pastorianus
gaaagaatcatcgaagccttctcgt

SEQ ID NO: 157080 - DNA, 25 bp, Saccharomyces pastorianus
gccttctcgtctgcgtattgtgaaa

SEQ ID NO: 157081 - DNA, 25 bp, Saccharomyces pastorianus
aacaatcggtttgctactttgccat

SEQ ID NO: 157082 - DNA, 25 bp, Saccharomyces pastorianus
gtagatcccgtcactatcataatca

SEQ ID NO: 157083 - DNA, 25 bp, Saccharomyces pastorianus
tagatcccgtcactatcataatcaa

SEQ ID NO: 157084 - DNA, 25 bp, Saccharomyces pastorianus
tcgtcacggtagatcccgtcactat

SEQ ID NO: 157085 - DNA, 25 bp, Saccharomyces pastorianus
gatcccgtcactatcataatcaaag

SEQ ID NO: 157086 - DNA, 25 bp, Saccharomyces pastorianus
ggtagatcccgtcactatcataatc

SEQ ID NO: 157087 - DNA, 25 bp, Saccharomyces pastorianus
cggtagatcccgtcactatcataat

SEQ ID NO: 157088 - DNA, 25 bp, Saccharomyces pastorianus
cccgtcactatcataatcaaagaat

SEQ ID NO: 157089 - DNA, 25 bp, Saccharomyces pastorianus
gtcacggtagatcccgtcactatca

SEQ ID NO: 157090 - DNA, 25 bp, Saccharomyces pastorianus
gtcactatcataatcaaagaatgca

SEQ ID NO: 157091 - DNA, 25 bp, Saccharomyces pastorianus
atcccgtcactatcataatcaaaga

SEQ ID NO: 157092 - DNA, 25 bp, Saccharomyces pastorianus
ttcgtcacggtagatcccgtcacta

SEQ ID NO: 157093 - DNA, 25 bp, Saccharomyces pastorianus
atgcaaggcatctcatccggaactc

SEQ ID NO: 157094 - DNA, 25 bp, Saccharomyces pastorianus
aacgttatcattgagcctggcgaac

SEQ ID NO: 157095 - DNA, 25 bp, Saccharomyces pastorianus
gatattgcgcgtatttcattcccta

SEQ ID NO: 157096 - DNA, 25 bp, Saccharomyces pastorianus
tccggaactcgatgtggtgctgatt

SEQ ID NO: 157097 - DNA, 25 bp, Saccharomyces pastorianus
ctttgaggcctcttatcgatgatta

SEQ ID NO: 157098 - DNA, 25 bp, Saccharomyces pastorianus
aagaactgccgttacgatctcgtag

SEQ ID NO: 157099 - DNA, 25 bp, Saccharomyces pastorianus
gcgccgtttagacgcagggaccaac

SEQ ID NO: 157100 - DNA, 25 bp, Saccharomyces pastorianus
gtgatttacctccaacggcactaag

SEQ ID NO: 157101 - DNA, 25 bp, Saccharomyces pastorianus
cagctggcattggtcatcgttgtga

SEQ ID NO: 157102 - DNA, 25 bp, Saccharomyces pastorianus
gctgattcagggtgattccgcattt

SEQ ID NO: 157103 - DNA, 25 bp, Saccharomyces pastorianus
attgggctcggatatgctcttgcat

SEQ ID NO: 157104 - DNA, 25 bp, Saccharomyces pastorianus
aaaacaacgttatgcctggctttgg

SEQ ID NO: 157105 - DNA, 25 bp, Saccharomyces pastorianus
tttccaaaattgaaggttctctgcc

SEQ ID NO: 157106 - DNA, 25 bp, Saccharomyces pastorianus
ttgccctcagaattttattgagttt

SEQ ID NO: 157107 - DNA, 25 bp, Saccharomyces pastorianus
ctgccaattgccctcagaattttat

SEQ ID NO: 157108 - DNA, 25 bp, Saccharomyces pastorianus
attgagtttgcaaccattctgctgt

SEQ ID NO: 157109 - DNA, 25 bp, Saccharomyces pastorianus
aacgttatgcctggctttggttcct

SEQ ID NO: 157110 - DNA, 25 bp, Saccharomyces pastorianus
gtttgcaaccattctgctgtaacat

SEQ ID NO: 157111 - DNA, 25 bp, Saccharomyces pastorianus
caaccattctgctgtaacatttaca

SEQ ID NO: 157112 - DNA, 25 bp, Saccharomyces pastorianus
atgcctggctttggttccttctgtt

SEQ ID NO: 157113 - DNA, 25 bp, Saccharomyces pastorianus
attgaaggttctctgccaattgccc

SEQ ID NO: 157114 - DNA, 25 bp, Saccharomyces pastorianus
agtgaagagcacgtccggaaacaca

SEQ ID NO: 157115 - DNA, 25 bp, Saccharomyces pastorianus
gaaactcagtattacaccaccggtg

SEQ ID NO: 157116 - DNA, 25 bp, Saccharomyces pastorianus
aagctatccgtcaccttgctaatga

SEQ ID NO: 157117 - DNA, 25 bp, Saccharomyces pastorianus
agacaagtggatccgtactaccgtc

SEQ ID NO: 157118 - DNA, 25 bp, Saccharomyces pastorianus
tactaccgtctaacattgtcgccaa

SEQ ID NO: 157119 - DNA, 25 bp, Saccharomyces pastorianus
gatatttttgtgtttctttcgtcgg

SEQ ID NO: 157120 - DNA, 25 bp, Saccharomyces pastorianus
cagaccgccatggagtgtttacatt

SEQ ID NO: 157121 - DNA, 25 bp, Saccharomyces pastorianus
ccatttgtggcgtcattgttgcgtg

SEQ ID NO: 157122 - DNA, 25 bp, Saccharomyces pastorianus
gtaagattggcctgtcgttcactac

SEQ ID NO: 157123 - DNA, 25 bp, Saccharomyces pastorianus
gaatggctaccacatatcgctgatg

SEQ ID NO: 157124 - DNA, 25 bp, Saccharomyces pastorianus
tgcggttcattcacatgcggatggt

SEQ ID NO: 157125 - DNA, 25 bp, Saccharomyces pastorianus
tgtttacattcctcactgactatcg

SEQ ID NO: 157126 - DNA, 25 bp, Saccharomyces pastorianus
gagacttttcatgagatggttccaa

SEQ ID NO: 157127 - DNA, 25 bp, Saccharomyces pastorianus
atgtttctaataccatccaccctaa

SEQ ID NO: 157128 - DNA, 25 bp, Saccharomyces pastorianus
gttccaaccaatttccattagctgt

SEQ ID NO: 157129 - DNA, 25 bp, Saccharomyces pastorianus
gcttcttacccaagttcgatcataa

SEQ ID NO: 157130 - DNA, 25 bp, Saccharomyces pastorianus
tagccggtcgtggtattgtattgag

SEQ ID NO: 157131 - DNA, 25 bp, Saccharomyces pastorianus
tatgctgctagaagtcctgatttca

SEQ ID NO: 157132 - DNA, 25 bp, Saccharomyces pastorianus
tagagcaaggcttcttacccaagtt

SEQ ID NO: 157133 - DNA, 25 bp, Saccharomyces pastorianus
tatgagcgccaaagtagccggtcgt

SEQ ID NO: 157134 - DNA, 25 bp, Saccharomyces pastorianus
atactttaccgatccaagtggtcta

SEQ ID NO: 157135 - DNA, 25 bp, Saccharomyces pastorianus
gataattctaccaatgttccacaag

SEQ ID NO: 157136 - DNA, 25 bp, Saccharomyces pastorianus
gtggttctactcaatcttttgcaag

SEQ ID NO: 157137 - DNA, 25 bp, Saccharomyces pastorianus
gtaaacacgataatgctgctaaaga

SEQ ID NO: 157138 - DNA, 25 bp, Saccharomyces pastorianus
gttcttggccgcaggtcacacttat

SEQ ID NO: 157139 - DNA, 25 bp, Saccharomyces pastorianus
gcagggagtgtattccggagctatt

SEQ ID NO: 157140 - DNA, 25 bp, Saccharomyces pastorianus
atttggccaaaaatacagcccactg

SEQ ID NO: 157141 - DNA, 25 bp, Saccharomyces pastorianus
aggtcacacttatgcactgcaggga

SEQ ID NO: 157142 - DNA, 25 bp, Saccharomyces pastorianus
tggaggtaccttttgtaaacacgat

SEQ ID NO: 157143 - DNA, 25 bp, Saccharomyces pastorianus
atgcttgctgctatgattcatttgg

SEQ ID NO: 157144 - DNA, 25 bp, Saccharomyces pastorianus
cagcccactgcacacatggtgataa

SEQ ID NO: 157145 - DNA, 25 bp, Saccharomyces pastorianus
ttccgggcaaatagcacatatgtct

SEQ ID NO: 157146 - DNA, 25 bp, Saccharomyces pastorianus
tttctggttagggttcttggccgca

SEQ ID NO: 157147 - DNA, 25 bp, Saccharomyces pastorianus
gctgcagtcgaaatatgttccgggc

SEQ ID NO: 157148 - DNA, 25 bp, Saccharomyces pastorianus
gtaatgatggacgtggattcctctg

SEQ ID NO: 157149 - DNA, 25 bp, Saccharomyces pastorianus
gtcaatgacttgcaccattctgaga

SEQ ID NO: 157150 - DNA, 25 bp, Saccharomyces pastorianus
gcaccattctgagaagaaatatgcg

SEQ ID NO: 157151 - DNA, 25 bp, Saccharomyces pastorianus
caatgacttgcaccattctgagaag

SEQ ID NO: 157152 - DNA, 25 bp, Saccharomyces pastorianus
ctagcactgcagtaatgatggacgt

SEQ ID NO: 157153 - DNA, 25 bp, Saccharomyces pastorianus
gggtcaatgacttgcaccattctga

SEQ ID NO: 157154 - DNA, 25 bp, Saccharomyces pastorianus
atgacttgcaccattctgagaagaa

SEQ ID NO: 157155 - DNA, 25 bp, Saccharomyces pastorianus
atggctagcactgcagtaatgatgg

SEQ ID NO: 157156 - DNA, 25 bp, Saccharomyces pastorianus
aatgatggacgtggattcctctggg

SEQ ID NO: 157157 - DNA, 25 bp, Saccharomyces pastorianus
actgcagtaatgatggacgtggatt

SEQ ID NO: 157158 - DNA, 25 bp, Saccharomyces pastorianus
acgtggattcctctggggtcaatga

SEQ ID NO: 157159 - DNA, 25 bp, Saccharomyces pastorianus
ggcaccgtaaaactcgttctgatgt

SEQ ID NO: 157160 - DNA, 25 bp, Saccharomyces pastorianus
atattagccaagtatctccgctgaa

SEQ ID NO: 157161 - DNA, 25 bp, Saccharomyces pastorianus
ggtcatttagtcgacatgcactcta

SEQ ID NO: 157162 - DNA, 25 bp, Saccharomyces pastorianus
cattagaaatatctctgccgcccta

SEQ ID NO: 157163 - DNA, 25 bp, Saccharomyces pastorianus
gcaggttcgattttccattccagat

SEQ ID NO: 157164 - DNA, 25 bp, Saccharomyces pastorianus
aggactccccactgaaaattgtatt

SEQ ID NO: 157165 - DNA, 25 bp, Saccharomyces pastorianus
atactggtcgatgtccctaaagaag

SEQ ID NO: 157166 - DNA, 25 bp, Saccharomyces pastorianus
gaatttatcatttgacaggcctcct

SEQ ID NO: 157167 - DNA, 25 bp, Saccharomyces pastorianus
tgagcatacacaatcgcaggttcga

SEQ ID NO: 157168 - DNA, 25 bp, Saccharomyces pastorianus
atttatatctcactcctgaatcgcc

SEQ ID NO: 157169 - DNA, 25 bp, Saccharomyces pastorianus
gaacacatatcgtgcaaccgaggtt

SEQ ID NO: 157170 - DNA, 25 bp, Saccharomyces pastorianus
ccagacttattcaggcggttacgtg

SEQ ID NO: 157171 - DNA, 25 bp, Saccharomyces pastorianus
aaaacggctgcaatggctgctaaga

SEQ ID NO: 157172 - DNA, 25 bp, Saccharomyces pastorianus
tacgaagaagagtcaccccattttg

SEQ ID NO: 157173 - DNA, 25 bp, Saccharomyces pastorianus
gaaaacgagtatccatccttccaga

SEQ ID NO: 157174 - DNA, 25 bp, Saccharomyces pastorianus
ctatccgtttttgagaccagactta

SEQ ID NO: 157175 - DNA, 25 bp, Saccharomyces pastorianus
gaaagtcccaaattccagttcgaag

SEQ ID NO: 157176 - DNA, 25 bp, Saccharomyces pastorianus
atgccacttccctaaatgagcaaag

SEQ ID NO: 157177 - DNA, 25 bp, Saccharomyces pastorianus
atttttgccgaaatcgtagtgcacg

SEQ ID NO: 157178 - DNA, 25 bp, Saccharomyces pastorianus
gaagatgccactgaacatgccactt

SEQ ID NO: 157179 - DNA, 25 bp, Saccharomyces pastorianus
atactcgcatggtgcatcccagaat

SEQ ID NO: 157180 - DNA, 25 bp, Saccharomyces pastorianus
gagtaaccccgcattaaacactacg

SEQ ID NO: 157181 - DNA, 25 bp, Saccharomyces pastorianus
gacaatatattacttgaacctagaa

SEQ ID NO: 157182 - DNA, 25 bp, Saccharomyces pastorianus
gagacaatatattacttgaacctag

SEQ ID NO: 157183 - DNA, 25 bp, Saccharomyces pastorianus
ccgactttacagaactttacagtag

SEQ ID NO: 157184 - DNA, 25 bp, Saccharomyces pastorianus
taaccgactttacagaactttacag

SEQ ID NO: 157185 - DNA, 25 bp, Saccharomyces pastorianus
aactttacagtagaattgccaatga

SEQ ID NO: 157186 - DNA, 25 bp, Saccharomyces pastorianus
ctttacagtagaattgccaatgaga

SEQ ID NO: 157187 - DNA, 25 bp, Saccharomyces pastorianus
gaaaaaacgatataaagaagcttgg

SEQ ID NO: 157188 - DNA, 25 bp, Saccharomyces pastorianus
gactttacagaactttacagtagaa

SEQ ID NO: 157189 - DNA, 25 bp, Saccharomyces pastorianus
tacagtagaattgccaatgagacaa

SEQ ID NO: 157190 - DNA, 25 bp, Saccharomyces pastorianus
ttgccaatgagacaatatattactt

SEQ ID NO: 157191 - DNA, 25 bp, Saccharomyces pastorianus
tatattacttgaacctagaagagaa

SEQ ID NO: 157192 - DNA, 25 bp, Saccharomyces pastorianus
atcgtggttccataagttctttgcc

SEQ ID NO: 157193 - DNA, 25 bp, Saccharomyces pastorianus
ttccatactgaatgctgcgtccatg

SEQ ID NO: 157194 - DNA, 25 bp, Saccharomyces pastorianus
atttgggccggttgtctgatcatta

SEQ ID NO: 157195 - DNA, 25 bp, Saccharomyces pastorianus
ggttgatatttgttgcgttcttttc

SEQ ID NO: 157196 - DNA, 25 bp, Saccharomyces pastorianus
gtatccgcacaactgctgaatatgg

SEQ ID NO: 157197 - DNA, 25 bp, Saccharomyces pastorianus
taggacccatggtgttcggtctaaa

SEQ ID NO: 157198 - DNA, 25 bp, Saccharomyces pastorianus
catatgctttgggtgccttaggacc

SEQ ID NO: 157199 - DNA, 25 bp, Saccharomyces pastorianus
attgtgaatacctcagtatccgcac

SEQ ID NO: 157200 - DNA, 25 bp, Saccharomyces pastorianus
gtaacggcaagaattttctctctta

SEQ ID NO: 157201 - DNA, 25 bp, Saccharomyces pastorianus
gtctgatcattattggtggtaccgt

SEQ ID NO: 157202 - DNA, 25 bp, Saccharomyces pastorianus
ctgtctttggtgcagaactgggttt

SEQ ID NO: 157203 - DNA, 25 bp, Saccharomyces pastorianus
ctaggtagactattttacgtcattt

SEQ ID NO: 157204 - DNA, 25 bp, Saccharomyces pastorianus
tattattgattaatgccgttgcagt

SEQ ID NO: 157205 - DNA, 25 bp, Saccharomyces pastorianus
ggactaggtagactattttacgtca

SEQ ID NO: 157206 - DNA, 25 bp, Saccharomyces pastorianus
ttgattaatgccgttgcagtactga

SEQ ID NO: 157207 - DNA, 25 bp, Saccharomyces pastorianus
actattttacgtcattttattattg

SEQ ID NO: 157208 - DNA, 25 bp, Saccharomyces pastorianus
gattaatgccgttgcagtactgagc

SEQ ID NO: 157209 - DNA, 25 bp, Saccharomyces pastorianus
ttattgattaatgccgttgcagtac

SEQ ID NO: 157210 - DNA, 25 bp, Saccharomyces pastorianus
ggtagactattttacgtcattttat

SEQ ID NO: 157211 - DNA, 25 bp, Saccharomyces pastorianus
tttggactaggtagactattttacg

SEQ ID NO: 157212 - DNA, 25 bp, Saccharomyces pastorianus
gactaggtagactattttacgtcat

SEQ ID NO: 157213 - DNA, 25 bp, Saccharomyces pastorianus
ttattattgattaatgccgttgcag

SEQ ID NO: 157214 - DNA, 25 bp, Saccharomyces pastorianus
tattgttatgcgcatgcacacgtgc

SEQ ID NO: 157215 - DNA, 25 bp, Saccharomyces pastorianus
acctcaggatactataccgtctcat

SEQ ID NO: 157216 - DNA, 25 bp, Saccharomyces pastorianus
ttttatgcgatcttattgttatgcg

SEQ ID NO: 157217 - DNA, 25 bp, Saccharomyces pastorianus
gatcttattgttatgcgcatgcaca

SEQ ID NO: 157218 - DNA, 25 bp, Saccharomyces pastorianus
ctcaggatactataccgtctcattt

SEQ ID NO: 157219 - DNA, 25 bp, Saccharomyces pastorianus
atgacctcaggatactataccgtct

SEQ ID NO: 157220 - DNA, 25 bp, Saccharomyces pastorianus
caggatactataccgtctcattttt

SEQ ID NO: 157221 - DNA, 25 bp, Saccharomyces pastorianus
tcttattgttatgcgcatgcacacg

SEQ ID NO: 157222 - DNA, 25 bp, Saccharomyces pastorianus
taccgtctcatttttttatgcgatc

SEQ ID NO: 157223 - DNA, 25 bp, Saccharomyces pastorianus
cgatcttattgttatgcgcatgcac

SEQ ID NO: 157224 - DNA, 25 bp, Saccharomyces pastorianus
attgttatgcgcatgcacacgtgct

SEQ ID NO: 157225 - DNA, 25 bp, Saccharomyces pastorianus
ctctctgcgctatatctttgggaaa

SEQ ID NO: 157226 - DNA, 25 bp, Saccharomyces pastorianus
tacatttcgtatttctttcctctct

SEQ ID NO: 157227 - DNA, 25 bp, Saccharomyces pastorianus
ttgtcccctttcaattcttgtgtta

SEQ ID NO: 157228 - DNA, 25 bp, Saccharomyces pastorianus
agtcgtgctcttctttccaaattaa

SEQ ID NO: 157229 - DNA, 25 bp, Saccharomyces pastorianus
gaatgagtccttggattctcgctaa

SEQ ID NO: 157230 - DNA, 25 bp, Saccharomyces pastorianus
tagtcttcttctttcttatcagtcg

SEQ ID NO: 157231 - DNA, 25 bp, Saccharomyces pastorianus
tatttagaaccttccacacatcgtc

SEQ ID NO: 157232 - DNA, 25 bp, Saccharomyces pastorianus
atatttgtatttctttcgccctgga

SEQ ID NO: 157233 - DNA, 25 bp, Saccharomyces pastorianus
gaatcacctggaattcgttctcatt

SEQ ID NO: 157234 - DNA, 25 bp, Saccharomyces pastorianus
caccatgcacctttacatttcgtat

SEQ ID NO: 157235 - DNA, 25 bp, Saccharomyces pastorianus
acatctttttccaccacgatacggg

SEQ ID NO: 157236 - DNA, 25 bp, Saccharomyces pastorianus
atatttcgcaatacttcccaagcag

SEQ ID NO: 157237 - DNA, 25 bp, Saccharomyces pastorianus
gatctgctgctacgtcatttaaagg

SEQ ID NO: 157238 - DNA, 25 bp, Saccharomyces pastorianus
gtttcatgcatcgatgtcttttctc

SEQ ID NO: 157239 - DNA, 25 bp, Saccharomyces pastorianus
gaattcgagcaagaacccttcctct

SEQ ID NO: 157240 - DNA, 25 bp, Saccharomyces pastorianus
agaaagactcgttgccttcgtttca

SEQ ID NO: 157241 - DNA, 25 bp, Saccharomyces pastorianus
gactcctaacgcgtgtcagttcaga

SEQ ID NO: 157242 - DNA, 25 bp, Saccharomyces pastorianus
tgagttcactacaacgtcatccatc

SEQ ID NO: 157243 - DNA, 25 bp, Saccharomyces pastorianus
atgtgatccactacgatgctcaacg

SEQ ID NO: 157244 - DNA, 25 bp, Saccharomyces pastorianus
tcaagatcacccacggcgatgaaac

SEQ ID NO: 157245 - DNA, 25 bp, Saccharomyces pastorianus
gatcgacatcaacacctatacgggc

SEQ ID NO: 157246 - DNA, 25 bp, Saccharomyces pastorianus
ttgggaccctcaagatgatctgctg

SEQ ID NO: 157247 - DNA, 25 bp, Saccharomyces pastorianus
gaagagaagacacaagacaccacca

SEQ ID NO: 157248 - DNA, 25 bp, Saccharomyces pastorianus
agaagacacaagacaccaccagaac

SEQ ID NO: 157249 - DNA, 25 bp, Saccharomyces pastorianus
cgaaccgaacgaacagaaagagaag

SEQ ID NO: 157250 - DNA, 25 bp, Saccharomyces pastorianus
tacatacctatatacgaaccgaacg

SEQ ID NO: 157251 - DNA, 25 bp, Saccharomyces pastorianus
gaaccaagagcatacaccactacca

SEQ ID NO: 157252 - DNA, 25 bp, Saccharomyces pastorianus
acaccaccagaaccaagagcataca

SEQ ID NO: 157253 - DNA, 25 bp, Saccharomyces pastorianus
ttgcaatgaaggatcttccatcctt

SEQ ID NO: 157254 - DNA, 25 bp, Saccharomyces pastorianus
aagacaccaccagaaccaagagcat

SEQ ID NO: 157255 - DNA, 25 bp, Saccharomyces pastorianus
cccacttgcaatgaaggatcttcca

SEQ ID NO: 157256 - DNA, 25 bp, Saccharomyces pastorianus
cttccatccttcattatatatacat

SEQ ID NO: 157257 - DNA, 25 bp, Saccharomyces pastorianus
gatcttccatccttcattatatata

SEQ ID NO: 157258 - DNA, 25 bp, Saccharomyces pastorianus
tcttagggattaccggtctggctac

SEQ ID NO: 157259 - DNA, 25 bp, Saccharomyces pastorianus
gagcctgaaacgtttacccaattag

SEQ ID NO: 157260 - DNA, 25 bp, Saccharomyces pastorianus
gaacgagatgttccgctacaagacg

SEQ ID NO: 157261 - DNA, 25 bp, Saccharomyces pastorianus
tggctaccgacgtgactactctgaa

SEQ ID NO: 157262 - DNA, 25 bp, Saccharomyces pastorianus
tccgggaagccctttattgcgggat

SEQ ID NO: 157263 - DNA, 25 bp, Saccharomyces pastorianus
tattgcgggattcgacctaatcggc

SEQ ID NO: 157264 - DNA, 25 bp, Saccharomyces pastorianus
atcttccactatgggcatgtgttct

SEQ ID NO: 157265 - DNA, 25 bp, Saccharomyces pastorianus
gttcatggcaatctcatggtcccaa

SEQ ID NO: 157266 - DNA, 25 bp, Saccharomyces pastorianus
tatcgttagcggtactgcatccgac

SEQ ID NO: 157267 - DNA, 25 bp, Saccharomyces pastorianus
atgtgtgagtccctgtacgaaccta

SEQ ID NO: 157268 - DNA, 25 bp, Saccharomyces pastorianus
tgaccgtgacgctctatcaggctgg

SEQ ID NO: 157269 - DNA, 25 bp, Saccharomyces pastorianus
ccggaaatcgcgtttattaatgtca

SEQ ID NO: 157270 - DNA, 25 bp, Saccharomyces pastorianus
cttctgttcctttccaaacgatatg

SEQ ID NO: 157271 - DNA, 25 bp, Saccharomyces pastorianus
gtcaatgcgcgatttctattatggg

SEQ ID NO: 157272 - DNA, 25 bp, Saccharomyces pastorianus
cgtttattaatgtcaatgcgcgatt

SEQ ID NO: 157273 - DNA, 25 bp, Saccharomyces pastorianus
atgcgcgatttctattatgggttga

SEQ ID NO: 157274 - DNA, 25 bp, Saccharomyces pastorianus
aaagttgcacttctgttcctttcca

SEQ ID NO: 157275 - DNA, 25 bp, Saccharomyces pastorianus
gcacttctgttcctttccaaacgat

SEQ ID NO: 157276 - DNA, 25 bp, Saccharomyces pastorianus
attaatgtcaatgcgcgatttctat

SEQ ID NO: 157277 - DNA, 25 bp, Saccharomyces pastorianus
tatgggttgaaaaagttgcacttct

SEQ ID NO: 157278 - DNA, 25 bp, Saccharomyces pastorianus
gaaaaagttgcacttctgttccttt

SEQ ID NO: 157279 - DNA, 25 bp, Saccharomyces pastorianus
agttgcacttctgttcctttccaaa

SEQ ID NO: 157280 - DNA, 25 bp, Saccharomyces pastorianus
cagccaacacaaaaattggtgctaa

SEQ ID NO: 157281 - DNA, 25 bp, Saccharomyces pastorianus
gccaacacaaaaattggtgctaaga

SEQ ID NO: 157282 - DNA, 25 bp, Saccharomyces pastorianus
tcgtcacaaaagatcagccactggt

SEQ ID NO: 157283 - DNA, 25 bp, Saccharomyces pastorianus
aattggtgctaagagaatccactct

SEQ ID NO: 157284 - DNA, 25 bp, Saccharomyces pastorianus
tcaaccagccaacacaaaaattggt

SEQ ID NO: 157285 - DNA, 25 bp, Saccharomyces pastorianus
atcagccactggtgctaaacgtgct

SEQ ID NO: 157286 - DNA, 25 bp, Saccharomyces pastorianus
tggtgctaaacgtgctcaattcaga

SEQ ID NO: 157287 - DNA, 25 bp, Saccharomyces pastorianus
gagctctaagaattgaaaccggtaa

SEQ ID NO: 157288 - DNA, 25 bp, Saccharomyces pastorianus
accagccaacacaaaaattggtgct

SEQ ID NO: 157289 - DNA, 25 bp, Saccharomyces pastorianus
aaattggtgctaagagaatccactc

SEQ ID NO: 157290 - DNA, 25 bp, Saccharomyces pastorianus
acaaaaattggtgctaagagaatcc

SEQ ID NO: 157291 - DNA, 25 bp, Saccharomyces pastorianus
atcgatttctatacttccattacaa

SEQ ID NO: 157292 - DNA, 25 bp, Saccharomyces pastorianus
taacgggtgaccagtcgtcgacgac

SEQ ID NO: 157293 - DNA, 25 bp, Saccharomyces pastorianus
gatcccaagaaattcgactatccca

SEQ ID NO: 157294 - DNA, 25 bp, Saccharomyces pastorianus
tacaggctgccatcttaacgggtga

SEQ ID NO: 157295 - DNA, 25 bp, Saccharomyces pastorianus
cgtcgacgacccaagatttactgtt

SEQ ID NO: 157296 - DNA, 25 bp, Saccharomyces pastorianus
aagtgttttccacctacgctgacaa

SEQ ID NO: 157297 - DNA, 25 bp, Saccharomyces pastorianus
gtcgcttatggtgctgccgtacagg

SEQ ID NO: 157298 - DNA, 25 bp, Saccharomyces pastorianus
tgctggatgttgcaccattatctct

SEQ ID NO: 157299 - DNA, 25 bp, Saccharomyces pastorianus
aaaccgttcgattaaccctgatgag

SEQ ID NO: 157300 - DNA, 25 bp, Saccharomyces pastorianus
taaccctgatgaggccgtcgcttat

SEQ ID NO: 157301 - DNA, 25 bp, Saccharomyces pastorianus
aatttgagttgagcggtattccacc

SEQ ID NO: 157302 - DNA, 25 bp, Saccharomyces pastorianus
tttttgccgcaaagtgtcctgataa

SEQ ID NO: 157303 - DNA, 25 bp, Saccharomyces pastorianus
gtgatcattgtctttgtagcacaga

SEQ ID NO: 157304 - DNA, 25 bp, Saccharomyces pastorianus
gtgtattccgcaattgatgagtcgt

SEQ ID NO: 157305 - DNA, 25 bp, Saccharomyces pastorianus
gacgactttcatttggatgcacgaa

SEQ ID NO: 157306 - DNA, 25 bp, Saccharomyces pastorianus
ataggacaattactgatacccaata

SEQ ID NO: 157307 - DNA, 25 bp, Saccharomyces pastorianus
aatccattcagctcttcaccaaata

SEQ ID NO: 157308 - DNA, 25 bp, Saccharomyces pastorianus
ggttctaaacgatttgagcgccact

SEQ ID NO: 157309 - DNA, 25 bp, Saccharomyces pastorianus
tcacgactttggttcctttttgagt

SEQ ID NO: 157310 - DNA, 25 bp, Saccharomyces pastorianus
gagcgccacttctgaaaatccattc

SEQ ID NO: 157311 - DNA, 25 bp, Saccharomyces pastorianus
gagaacttaatgatattgcctgtga

SEQ ID NO: 157312 - DNA, 25 bp, Saccharomyces pastorianus
gaatgaaaatctccgccttagttgc

SEQ ID NO: 157313 - DNA, 25 bp, Saccharomyces pastorianus
tggcgggtcaaacagcagaaacaac

SEQ ID NO: 157314 - DNA, 25 bp, Saccharomyces pastorianus
gaacttcgaggtttacaacagactg

SEQ ID NO: 157315 - DNA, 25 bp, Saccharomyces pastorianus
taagtttaatactccggctggcggg

SEQ ID NO: 157316 - DNA, 25 bp, Saccharomyces pastorianus
tatgtcttataactcccgacgtaaa

SEQ ID NO: 157317 - DNA, 25 bp, Saccharomyces pastorianus
tctgctttaaacttgaacttcgagg

SEQ ID NO: 157318 - DNA, 25 bp, Saccharomyces pastorianus
aagctcggttttaattgcatcacaa

SEQ ID NO: 157319 - DNA, 25 bp, Saccharomyces pastorianus
gttagctcgaaaccttcctcaaaag

SEQ ID NO: 157320 - DNA, 25 bp, Saccharomyces pastorianus
attgagcttgggtcagcaggactac

SEQ ID NO: 157321 - DNA, 25 bp, Saccharomyces pastorianus
tatagggaacactccactgcattta

SEQ ID NO: 157322 - DNA, 25 bp, Saccharomyces pastorianus
gactggtatatcttggtgcgtcaac

SEQ ID NO: 157323 - DNA, 25 bp, Saccharomyces pastorianus
gaatcgcctgcgtcaataatgaata

SEQ ID NO: 157324 - DNA, 25 bp, Saccharomyces pastorianus
cactctggagcatggttgcttgtca

SEQ ID NO: 157325 - DNA, 25 bp, Saccharomyces pastorianus
gcgcgtgtgacccaaataagcagca

SEQ ID NO: 157326 - DNA, 25 bp, Saccharomyces pastorianus
atttgagaggtaccaggtgcccgct

SEQ ID NO: 157327 - DNA, 25 bp, Saccharomyces pastorianus
tcaggacccgtgactctacgtttcg

SEQ ID NO: 157328 - DNA, 25 bp, Saccharomyces pastorianus
taaagtcatcatttacagcagaaat

SEQ ID NO: 157329 - DNA, 25 bp, Saccharomyces pastorianus
atcaaggaaaccaatcactctggag

SEQ ID NO: 157330 - DNA, 25 bp, Saccharomyces pastorianus
catggttgcttgtcaggacccgtga

SEQ ID NO: 157331 - DNA, 25 bp, Saccharomyces pastorianus
aaaacatggtgtccatcgacctgca

SEQ ID NO: 157332 - DNA, 25 bp, Saccharomyces pastorianus
aattgttgctacagggcgcgtgtga

SEQ ID NO: 157333 - DNA, 25 bp, Saccharomyces pastorianus
ataagcagcagaattaccttcaggg

SEQ ID NO: 157334 - DNA, 25 bp, Saccharomyces pastorianus
tggatttatcctctgtataccaata

SEQ ID NO: 157335 - DNA, 25 bp, Saccharomyces pastorianus
aattgcacacaatagacgttctttc

SEQ ID NO: 157336 - DNA, 25 bp, Saccharomyces pastorianus
gtagcgaccataacaccagtaacaa

SEQ ID NO: 157337 - DNA, 25 bp, Saccharomyces pastorianus
gccgacaacgaaccctggaacaaat

SEQ ID NO: 157338 - DNA, 25 bp, Saccharomyces pastorianus
agcccagaggccgtagtcgaaatca

SEQ ID NO: 157339 - DNA, 25 bp, Saccharomyces pastorianus
agtgcttccccgatgcttgacgcag

SEQ ID NO: 157340 - DNA, 25 bp, Saccharomyces pastorianus
ttcacaaacagcaaacactccgagt

SEQ ID NO: 157341 - DNA, 25 bp, Saccharomyces pastorianus
gataactgccatgacagcccagagg

SEQ ID NO: 157342 - DNA, 25 bp, Saccharomyces pastorianus
gatttgttttgaacctccagagaca

SEQ ID NO: 157343 - DNA, 25 bp, Saccharomyces pastorianus
acgtcttttgttgtccatgcttatt

SEQ ID NO: 157344 - DNA, 25 bp, Saccharomyces pastorianus
gagacagccctcatgacgttatgtg

SEQ ID NO: 157345 - DNA, 25 bp, Saccharomyces pastorianus
gatttatctctctttagagcacttg

SEQ ID NO: 157346 - DNA, 25 bp, Saccharomyces pastorianus
gtgctgacacttttacacacggcgt

SEQ ID NO: 157347 - DNA, 25 bp, Saccharomyces pastorianus
atctcttctgtagcgtacttgtgtg

SEQ ID NO: 157348 - DNA, 25 bp, Saccharomyces pastorianus
gttgcactatgtagcaccatcagat

SEQ ID NO: 157349 - DNA, 25 bp, Saccharomyces pastorianus
attgtgtttgacctagcgatcgcta

SEQ ID NO: 157350 - DNA, 25 bp, Saccharomyces pastorianus
tggtgtgggcgtctcttatatgatt

SEQ ID NO: 157351 - DNA, 25 bp, Saccharomyces pastorianus
ttgaggtacgcttccatggtggcca

SEQ ID NO: 157352 - DNA, 25 bp, Saccharomyces pastorianus
tcagtgctctgacgcggttgattaa

SEQ ID NO: 157353 - DNA, 25 bp, Saccharomyces pastorianus
gccccgctgtcttttctgaagaagt

SEQ ID NO: 157354 - DNA, 25 bp, Saccharomyces pastorianus
gatctgatgccccaaataatgtctg

SEQ ID NO: 157355 - DNA, 25 bp, Saccharomyces pastorianus
ggcgtgcgctatgcaaagcttgttc

SEQ ID NO: 157356 - DNA, 25 bp, Saccharomyces pastorianus
gagattcttcgcttgaaaggccgga

SEQ ID NO: 157357 - DNA, 25 bp, Saccharomyces pastorianus
atcaccttcagtacaatcttcctct

SEQ ID NO: 157358 - DNA, 25 bp, Saccharomyces pastorianus
gggtttgacgtttcctctaatgaag

SEQ ID NO: 157359 - DNA, 25 bp, Saccharomyces pastorianus
gaagccctctttaattccggacgct

SEQ ID NO: 157360 - DNA, 25 bp, Saccharomyces pastorianus
tcttcttctcatggcttagtggtga

SEQ ID NO: 157361 - DNA, 25 bp, Saccharomyces pastorianus
aagtctcttcctcttgagcaagaaa

SEQ ID NO: 157362 - DNA, 25 bp, Saccharomyces pastorianus
gaagacacgcggaaggaagccctct

SEQ ID NO: 157363 - DNA, 25 bp, Saccharomyces pastorianus
acgttaaaactcacgcttccttatg

SEQ ID NO: 157364 - DNA, 25 bp, Saccharomyces pastorianus
tccggacgcttccaagcaatttggt

SEQ ID NO: 157365 - DNA, 25 bp, Saccharomyces pastorianus
ggatatctctactcaaagcattgct

SEQ ID NO: 157366 - DNA, 25 bp, Saccharomyces pastorianus
gagtgaccacgcgataataaatccg

SEQ ID NO: 157367 - DNA, 25 bp, Saccharomyces pastorianus
ttggctgccatatcagaaccatcca

SEQ ID NO: 157368 - DNA, 25 bp, Saccharomyces pastorianus
gtactcaacttgtaattgtgatcca

SEQ ID NO: 157369 - DNA, 25 bp, Saccharomyces pastorianus
gcttgtgacaatctgactatatcat

SEQ ID NO: 157370 - DNA, 25 bp, Saccharomyces pastorianus
ttagccaggacatccatagcttgtg

SEQ ID NO: 157371 - DNA, 25 bp, Saccharomyces pastorianus
ttgtgatccatctttttgctttgaa

SEQ ID NO: 157372 - DNA, 25 bp, Saccharomyces pastorianus
ccatctttttgctttgaaatgatca

SEQ ID NO: 157373 - DNA, 25 bp, Saccharomyces pastorianus
acttatgctcgtactcaacttgtaa

SEQ ID NO: 157374 - DNA, 25 bp, Saccharomyces pastorianus
ctttcaacttatgctcgtactcaac

SEQ ID NO: 157375 - DNA, 25 bp, Saccharomyces pastorianus
ggacatccatagcttgtgacaatct

SEQ ID NO: 157376 - DNA, 25 bp, Saccharomyces pastorianus
aatttctccaattctttcaacttat

SEQ ID NO: 157377 - DNA, 25 bp, Saccharomyces pastorianus
gaaatgatcaacttagccaggacat

SEQ ID NO: 157378 - DNA, 25 bp, Saccharomyces pastorianus
ctgactatatcattttctgttggaa

SEQ ID NO: 157379 - DNA, 25 bp, Saccharomyces pastorianus
gaaaaagcgcccctgagtagaagaa

SEQ ID NO: 157380 - DNA, 25 bp, Saccharomyces pastorianus
attgccacgagaaagcgttgttact

SEQ ID NO: 157381 - DNA, 25 bp, Saccharomyces pastorianus
gttactgtaaacttagattcttcag

SEQ ID NO: 157382 - DNA, 25 bp, Saccharomyces pastorianus
aacagggttgaatgaattgccacga

SEQ ID NO: 157383 - DNA, 25 bp, Saccharomyces pastorianus
gagtcagaaggaagaaccagcccct

SEQ ID NO: 157384 - DNA, 25 bp, Saccharomyces pastorianus
ttcttcagatgatggcgtcgttacg

SEQ ID NO: 157385 - DNA, 25 bp, Saccharomyces pastorianus
taaggaaggctcttaacgagaaaga

SEQ ID NO: 157386 - DNA, 25 bp, Saccharomyces pastorianus
agcccctaccagatgccaagaagaa

SEQ ID NO: 157387 - DNA, 25 bp, Saccharomyces pastorianus
cgagaaagcgttgttactgtaaact

SEQ ID NO: 157388 - DNA, 25 bp, Saccharomyces pastorianus
agaggcagaaaaagcgcccctgagt

SEQ ID NO: 157389 - DNA, 25 bp, Saccharomyces pastorianus
agcgcccctgagtagaagaagaaga

SEQ ID NO: 157390 - DNA, 25 bp, Saccharomyces pastorianus
atttgcagaactaaggaggctcttt

SEQ ID NO: 157391 - DNA, 25 bp, Saccharomyces pastorianus
ctaaggaggctctttttcaacttga

SEQ ID NO: 157392 - DNA, 25 bp, Saccharomyces pastorianus
actatcggatgtatttgcagaacta

SEQ ID NO: 157393 - DNA, 25 bp, Saccharomyces pastorianus
cctgccctactatcggatgtatttg

SEQ ID NO: 157394 - DNA, 25 bp, Saccharomyces pastorianus
aatttgaattcctcactgttcatca

SEQ ID NO: 157395 - DNA, 25 bp, Saccharomyces pastorianus
ggctctttttcaacttgagtctcga

SEQ ID NO: 157396 - DNA, 25 bp, Saccharomyces pastorianus
gtgggtgatagcatagaggacatac

SEQ ID NO: 157397 - DNA, 25 bp, Saccharomyces pastorianus
tcactgttcatcataaaggccgcaa

SEQ ID NO: 157398 - DNA, 25 bp, Saccharomyces pastorianus
taaaggccgcaattggctgtttacc

SEQ ID NO: 157399 - DNA, 25 bp, Saccharomyces pastorianus
aaatttgattgggactcctgcccta

SEQ ID NO: 157400 - DNA, 25 bp, Saccharomyces pastorianus
aattggctgtttaccagaggtgggt

SEQ ID NO: 157401 - DNA, 25 bp, Saccharomyces pastorianus
gatgttccggataagtttaaatttg

SEQ ID NO: 157402 - DNA, 25 bp, Saccharomyces pastorianus
ggtcaagcttcgtgttttcaaagac

SEQ ID NO: 157403 - DNA, 25 bp, Saccharomyces pastorianus
aacgaaaactggaatggtcaagctt

SEQ ID NO: 157404 - DNA, 25 bp, Saccharomyces pastorianus
cagaagaagaaacctacgctaacaa

SEQ ID NO: 157405 - DNA, 25 bp, Saccharomyces pastorianus
aagacaggaaggatgttccggataa

SEQ ID NO: 157406 - DNA, 25 bp, Saccharomyces pastorianus
aatggtcaagcttcgtgttttcaaa

SEQ ID NO: 157407 - DNA, 25 bp, Saccharomyces pastorianus
atcctaatggttacgagcctcgagt

SEQ ID NO: 157408 - DNA, 25 bp, Saccharomyces pastorianus
gttacgagcctcgagtaaaggctac

SEQ ID NO: 157409 - DNA, 25 bp, Saccharomyces pastorianus
gagcctcgagtaaaggctacagaag

SEQ ID NO: 157410 - DNA, 25 bp, Saccharomyces pastorianus
gcatcctaatggttacgagcctcga

SEQ ID NO: 157411 - DNA, 25 bp, Saccharomyces pastorianus
ctacgctaacaaagacaggaaggat

SEQ ID NO: 157412 - DNA, 25 bp, Saccharomyces pastorianus
acaggctctatacctgatcgtgcca

SEQ ID NO: 157413 - DNA, 25 bp, Saccharomyces pastorianus
ccgtgccaggtggtcatttgggact

SEQ ID NO: 157414 - DNA, 25 bp, Saccharomyces pastorianus
aggattcagcgggtatgcagtacat

SEQ ID NO: 157415 - DNA, 25 bp, Saccharomyces pastorianus
gacagcagcggttattgtcgcagca

SEQ ID NO: 157416 - DNA, 25 bp, Saccharomyces pastorianus
tggaacccacattagcacgagtagc

SEQ ID NO: 157417 - DNA, 25 bp, Saccharomyces pastorianus
tgggtcgcagcaatctgtctcgcaa

SEQ ID NO: 157418 - DNA, 25 bp, Saccharomyces pastorianus
aactgctagcgaggtgtgtgcacct

SEQ ID NO: 157419 - DNA, 25 bp, Saccharomyces pastorianus
tatagctggtgctgttttggcgaca

SEQ ID NO: 157420 - DNA, 25 bp, Saccharomyces pastorianus
aagagttcgggctcggcaacaaagc

SEQ ID NO: 157421 - DNA, 25 bp, Saccharomyces pastorianus
tgttactttaatgcgccgtgccagg

SEQ ID NO: 157422 - DNA, 25 bp, Saccharomyces pastorianus
gatcgtgccaacactgttactttaa

SEQ ID NO: 157423 - DNA, 25 bp, Saccharomyces pastorianus
gaccatactatccaggtgagtttgt

SEQ ID NO: 157424 - DNA, 25 bp, Saccharomyces pastorianus
gaaacattgtagtcgatttggctag

SEQ ID NO: 157425 - DNA, 25 bp, Saccharomyces pastorianus
tgatcagttcaaatcaggttacctt

SEQ ID NO: 157426 - DNA, 25 bp, Saccharomyces pastorianus
tgatgcctacctacctaggaaagtt

SEQ ID NO: 157427 - DNA, 25 bp, Saccharomyces pastorianus
ttatcacgctacagaaggaccttca

SEQ ID NO: 157428 - DNA, 25 bp, Saccharomyces pastorianus
ggatatgcttttttaccaccttagg

SEQ ID NO: 157429 - DNA, 25 bp, Saccharomyces pastorianus
ggactagcttgtgcttacaacgtaa

SEQ ID NO: 157430 - DNA, 25 bp, Saccharomyces pastorianus
ggaccttcagaatttgaacggcatg

SEQ ID NO: 157431 - DNA, 25 bp, Saccharomyces pastorianus
gtacaagttacgatcgcgtcatttt

SEQ ID NO: 157432 - DNA, 25 bp, Saccharomyces pastorianus
gaatacggttttgggcctgatgata

SEQ ID NO: 157433 - DNA, 25 bp, Saccharomyces pastorianus
taccaccttaggactagcttgtgct

SEQ ID NO: 157434 - DNA, 25 bp, Saccharomyces pastorianus
atgaaagtttccgataagcgtaaat

SEQ ID NO: 157435 - DNA, 25 bp, Saccharomyces pastorianus
gagttggctctaaataacaaaaacg

SEQ ID NO: 157436 - DNA, 25 bp, Saccharomyces pastorianus
aatcgatgcgcacggaagtgcgatc

SEQ ID NO: 157437 - DNA, 25 bp, Saccharomyces pastorianus
atcgatgcgcacggaagtgcgatca

SEQ ID NO: 157438 - DNA, 25 bp, Saccharomyces pastorianus
gtgcgatcattctacgaagacgaaa

SEQ ID NO: 157439 - DNA, 25 bp, Saccharomyces pastorianus
gatgcgcacggaagtgcgatcattc

SEQ ID NO: 157440 - DNA, 25 bp, Saccharomyces pastorianus
tgaaagtttccgataagcgtaaatt

SEQ ID NO: 157441 - DNA, 25 bp, Saccharomyces pastorianus
aactttgaggagtttgagttggctc

SEQ ID NO: 157442 - DNA, 25 bp, Saccharomyces pastorianus
cgatgcgcacggaagtgcgatcatt

SEQ ID NO: 157443 - DNA, 25 bp, Saccharomyces pastorianus
tcgatgcgcacggaagtgcgatcat

SEQ ID NO: 157444 - DNA, 25 bp, Saccharomyces pastorianus
atgcgcacggaagtgcgatcattct

SEQ ID NO: 157445 - DNA, 25 bp, Saccharomyces pastorianus
agtagcatcctacgcaaatgaagtt

SEQ ID NO: 157446 - DNA, 25 bp, Saccharomyces pastorianus
ataatgggccttgaggtgccgtcat

SEQ ID NO: 157447 - DNA, 25 bp, Saccharomyces pastorianus
aaattacggcgatattgacactagt

SEQ ID NO: 157448 - DNA, 25 bp, Saccharomyces pastorianus
gggaacttttcaattttagtagcat

SEQ ID NO: 157449 - DNA, 25 bp, Saccharomyces pastorianus
cccgcagcaagcgtggaagtacgat

SEQ ID NO: 157450 - DNA, 25 bp, Saccharomyces pastorianus
atcatgggatgttttatttactgca

SEQ ID NO: 157451 - DNA, 25 bp, Saccharomyces pastorianus
agtacttcaagtatccaactccttt

SEQ ID NO: 157452 - DNA, 25 bp, Saccharomyces pastorianus
ggtttactaatttgccggatgatca

SEQ ID NO: 157453 - DNA, 25 bp, Saccharomyces pastorianus
ctttacaacaaggtttactcatggg

SEQ ID NO: 157454 - DNA, 25 bp, Saccharomyces pastorianus
gtctggagacttcccaagatgccga

SEQ ID NO: 157455 - DNA, 25 bp, Saccharomyces pastorianus
aggtgccgtcattggcaacttttct

SEQ ID NO: 157456 - DNA, 25 bp, Saccharomyces pastorianus
accaccgtgagctcatatttttcaa

SEQ ID NO: 157457 - DNA, 25 bp, Saccharomyces pastorianus
gtatcgactcgtcaacattgtcaag

SEQ ID NO: 157458 - DNA, 25 bp, Saccharomyces pastorianus
gttcttgtttgtgagcctataccga

SEQ ID NO: 157459 - DNA, 25 bp, Saccharomyces pastorianus
aatagctcggattcacctacgatga

SEQ ID NO: 157460 - DNA, 25 bp, Saccharomyces pastorianus
ttttcgcaacggaccaattccagtg

SEQ ID NO: 157461 - DNA, 25 bp, Saccharomyces pastorianus
gaaaatttgggctgtaccgtcgtca

SEQ ID NO: 157462 - DNA, 25 bp, Saccharomyces pastorianus
gcacttctgagattggataccacat

SEQ ID NO: 157463 - DNA, 25 bp, Saccharomyces pastorianus
gcgaccgactacaggctatatcaag

SEQ ID NO: 157464 - DNA, 25 bp, Saccharomyces pastorianus
agccttgaagcttccaaaacttggt

SEQ ID NO: 157465 - DNA, 25 bp, Saccharomyces pastorianus
tggccgaaagagctcgagcacttct

SEQ ID NO: 157466 - DNA, 25 bp, Saccharomyces pastorianus
aattccagtgatctctcggcagagg

SEQ ID NO: 157467 - DNA, 25 bp, Saccharomyces pastorianus
tgttctgttcatcgcatgtgcatat

SEQ ID NO: 157468 - DNA, 25 bp, Saccharomyces pastorianus
attgcccgattctaaccgtattttg

SEQ ID NO: 157469 - DNA, 25 bp, Saccharomyces pastorianus
gataaccagcaattcttcctttcag

SEQ ID NO: 157470 - DNA, 25 bp, Saccharomyces pastorianus
aaatctgggacctgtactcgagcgc

SEQ ID NO: 157471 - DNA, 25 bp, Saccharomyces pastorianus
acctttcttggcgtttgcataaccg

SEQ ID NO: 157472 - DNA, 25 bp, Saccharomyces pastorianus
taactctattatggacttctccgcc

SEQ ID NO: 157473 - DNA, 25 bp, Saccharomyces pastorianus
tcagacctgctcaacgacatggaca

SEQ ID NO: 157474 - DNA, 25 bp, Saccharomyces pastorianus
acgtctttccatcgaattaaccgca

SEQ ID NO: 157475 - DNA, 25 bp, Saccharomyces pastorianus
tgagcacgaacagagtcccgaacct

SEQ ID NO: 157476 - DNA, 25 bp, Saccharomyces pastorianus
gaacctcaacggatcttctgttttt

SEQ ID NO: 157477 - DNA, 25 bp, Saccharomyces pastorianus
gacctcgatgacaccgatactgata

SEQ ID NO: 157478 - DNA, 25 bp, Saccharomyces pastorianus
tacagcaagtgtgcagcgtccaaga

SEQ ID NO: 157479 - DNA, 25 bp, Saccharomyces pastorianus
aataataacagtcccagcatcgcca

SEQ ID NO: 157480 - DNA, 25 bp, Saccharomyces pastorianus
tccgctgtggaggaaggaccccaag

SEQ ID NO: 157481 - DNA, 25 bp, Saccharomyces pastorianus
catctatagtgaagcctggctcgcg

SEQ ID NO: 157482 - DNA, 25 bp, Saccharomyces pastorianus
gaacacctcatccaatccggatata

SEQ ID NO: 157483 - DNA, 25 bp, Saccharomyces pastorianus
tacttctgtgcaatcttcggctact

SEQ ID NO: 157484 - DNA, 25 bp, Saccharomyces pastorianus
agacaccaatagtcctttactgaga

SEQ ID NO: 157485 - DNA, 25 bp, Saccharomyces pastorianus
tcgcgaagaaattcctccgtgagga

SEQ ID NO: 157486 - DNA, 25 bp, Saccharomyces pastorianus
gatcaagtcttctacttctgtgcaa

SEQ ID NO: 157487 - DNA, 25 bp, Saccharomyces pastorianus
aagggtcttcccctgtgcaatgctt

SEQ ID NO: 157488 - DNA, 25 bp, Saccharomyces pastorianus
tcacaaggcctctgtcgttgaagac

SEQ ID NO: 157489 - DNA, 25 bp, Saccharomyces pastorianus
acccgctaggcttgcagaccgtcat

SEQ ID NO: 157490 - DNA, 25 bp, Saccharomyces pastorianus
cataatatccctagaggctctagat

SEQ ID NO: 157491 - DNA, 25 bp, Saccharomyces pastorianus
tacagcaatactattttctaatttg

SEQ ID NO: 157492 - DNA, 25 bp, Saccharomyces pastorianus
aataaccacccgctaggcttgcaga

SEQ ID NO: 157493 - DNA, 25 bp, Saccharomyces pastorianus
ttctaatttgcatttccacgcctgc

SEQ ID NO: 157494 - DNA, 25 bp, Saccharomyces pastorianus
taatttgcatttccacgcctgcgtt

SEQ ID NO: 157495 - DNA, 25 bp, Saccharomyces pastorianus
gcatttccacgcctgcgttgctaaa

SEQ ID NO: 157496 - DNA, 25 bp, Saccharomyces pastorianus
tgcgttgctaaacccacatttttca

SEQ ID NO: 157497 - DNA, 25 bp, Saccharomyces pastorianus
cgttgctaaacccacatttttcata

SEQ ID NO: 157498 - DNA, 25 bp, Saccharomyces pastorianus
cctctatgtactatacagcaatact

SEQ ID NO: 157499 - DNA, 25 bp, Saccharomyces pastorianus
aatatccctagaggctctagatgcc

SEQ ID NO: 157500 - DNA, 25 bp, Saccharomyces pastorianus
tatccccttaacagatgccagcaat

SEQ ID NO: 157501 - DNA, 25 bp, Saccharomyces pastorianus
tggcttctagtccttgtcccaagag

SEQ ID NO: 157502 - DNA, 25 bp, Saccharomyces pastorianus
ctgcaagttgcaacatatcccctta

SEQ ID NO: 157503 - DNA, 25 bp, Saccharomyces pastorianus
tttccttctttcaatttctacgtca

SEQ ID NO: 157504 - DNA, 25 bp, Saccharomyces pastorianus
aagggcccgtcaacacgtcgtcatt

SEQ ID NO: 157505 - DNA, 25 bp, Saccharomyces pastorianus
tcccctctttactacgtttctatgt

SEQ ID NO: 157506 - DNA, 25 bp, Saccharomyces pastorianus
tagtcttgctatttttaccgcctct

SEQ ID NO: 157507 - DNA, 25 bp, Saccharomyces pastorianus
atgcttgcgtatacctttccttctt

SEQ ID NO: 157508 - DNA, 25 bp, Saccharomyces pastorianus
agattttcacttggatttgcgcgtc

SEQ ID NO: 157509 - DNA, 25 bp, Saccharomyces pastorianus
ttctcccacttttctgtgtatcaag

SEQ ID NO: 157510 - DNA, 25 bp, Saccharomyces pastorianus
gtttctatgttattttgtgccgccc

SEQ ID NO: 157511 - DNA, 25 bp, Saccharomyces pastorianus
tcgtccttgcccaaaaagtcttgat

SEQ ID NO: 157512 - DNA, 25 bp, Saccharomyces pastorianus
gcaagtatatatctgtatgtatcca

SEQ ID NO: 157513 - DNA, 25 bp, Saccharomyces pastorianus
gagcttatatcattttatcgtcctt

SEQ ID NO: 157514 - DNA, 25 bp, Saccharomyces pastorianus
tatatcattttatcgtccttgccca

SEQ ID NO: 157515 - DNA, 25 bp, Saccharomyces pastorianus
ttctatgtagtataatggaccgatc

SEQ ID NO: 157516 - DNA, 25 bp, Saccharomyces pastorianus
atgtatccatatttagatggcagca

SEQ ID NO: 157517 - DNA, 25 bp, Saccharomyces pastorianus
atggaccgatctttgcaagtatata

SEQ ID NO: 157518 - DNA, 25 bp, Saccharomyces pastorianus
tcattttatcgtccttgcccaaaaa

SEQ ID NO: 157519 - DNA, 25 bp, Saccharomyces pastorianus
gatggcagcaagcaatatagatttg

SEQ ID NO: 157520 - DNA, 25 bp, Saccharomyces pastorianus
tttatcgtccttgcccaaaaagtct

SEQ ID NO: 157521 - DNA, 25 bp, Saccharomyces pastorianus
ttatcttttaattgctttctatgta

SEQ ID NO: 157522 - DNA, 25 bp, Saccharomyces pastorianus
gtaaaagtaatcctcctcaagtgcc

SEQ ID NO: 157523 - DNA, 25 bp, Saccharomyces pastorianus
aggtcctccaccaggtgttaacaat

SEQ ID NO: 157524 - DNA, 25 bp, Saccharomyces pastorianus
tcgtcaacaggcagaccaggctcct

SEQ ID NO: 157525 - DNA, 25 bp, Saccharomyces pastorianus
gaacaacatggccaagacccaaagg

SEQ ID NO: 157526 - DNA, 25 bp, Saccharomyces pastorianus
ttctggctggaaggctgtttttgat

SEQ ID NO: 157527 - DNA, 25 bp, Saccharomyces pastorianus
gcaagtgcaagcacgggcccaagca

SEQ ID NO: 157528 - DNA, 25 bp, Saccharomyces pastorianus
agcacagcaacctcgttactatcag

SEQ ID NO: 157529 - DNA, 25 bp, Saccharomyces pastorianus
tacgaacagctctcagtgggaacca

SEQ ID NO: 157530 - DNA, 25 bp, Saccharomyces pastorianus
ttattcttctcaatcaacaccgcaa

SEQ ID NO: 157531 - DNA, 25 bp, Saccharomyces pastorianus
tttgatgatgaataccagacttggt

SEQ ID NO: 157532 - DNA, 25 bp, Saccharomyces pastorianus
gagaagagttctcgtcaacaggcag

SEQ ID NO: 157533 - DNA, 25 bp, Saccharomyces pastorianus
agtgccgctgcagatggttcaataa

SEQ ID NO: 157534 - DNA, 25 bp, Saccharomyces pastorianus
tcgtccgtcgtctttggaatccatt

SEQ ID NO: 157535 - DNA, 25 bp, Saccharomyces pastorianus
gatgggcagagctttttagaaattc

SEQ ID NO: 157536 - DNA, 25 bp, Saccharomyces pastorianus
gggcaaaacacttgttgcagcagtt

SEQ ID NO: 157537 - DNA, 25 bp, Saccharomyces pastorianus
gcagggtcatacagctttggtcggt

SEQ ID NO: 157538 - DNA, 25 bp, Saccharomyces pastorianus
acaaatttttggtcagtgccgctgc

SEQ ID NO: 157539 - DNA, 25 bp, Saccharomyces pastorianus
gaaattggtccacgcaaatattcta

SEQ ID NO: 157540 - DNA, 25 bp, Saccharomyces pastorianus
ggaatccatttctacttctttgggt

SEQ ID NO: 157541 - DNA, 25 bp, Saccharomyces pastorianus
ttctacttctttgggtctaacgagg

SEQ ID NO: 157542 - DNA, 25 bp, Saccharomyces pastorianus
gttagcaatcccgtaaactcctcgt

SEQ ID NO: 157543 - DNA, 25 bp, Saccharomyces pastorianus
gttcaacatctataatctacggagt

SEQ ID NO: 157544 - DNA, 25 bp, Saccharomyces pastorianus
gagctattatatcagcgttccccta

SEQ ID NO: 157545 - DNA, 25 bp, Saccharomyces pastorianus
gatttgcaaagggtctcgacgtcaa

SEQ ID NO: 157546 - DNA, 25 bp, Saccharomyces pastorianus
acagccgttgttgagtttaatcgag

SEQ ID NO: 157547 - DNA, 25 bp, Saccharomyces pastorianus
aggtgagagttcgtgcggcatccat

SEQ ID NO: 157548 - DNA, 25 bp, Saccharomyces pastorianus
gaaagaaccatgttgccgccattgt

SEQ ID NO: 157549 - DNA, 25 bp, Saccharomyces pastorianus
gccgccattgttgactatgtttgtt

SEQ ID NO: 157550 - DNA, 25 bp, Saccharomyces pastorianus
agcggaactgcttcaacttactgag

SEQ ID NO: 157551 - DNA, 25 bp, Saccharomyces pastorianus
gctagctttcatccaacacttttta

SEQ ID NO: 157552 - DNA, 25 bp, Saccharomyces pastorianus
gtgcggcatccattttgtctgatat

SEQ ID NO: 157553 - DNA, 25 bp, Saccharomyces pastorianus
gtagcactatcttcaaaccaaacga

SEQ ID NO: 157554 - DNA, 25 bp, Saccharomyces pastorianus
ttgtctgatatcgtccataactgga

SEQ ID NO: 157555 - DNA, 25 bp, Saccharomyces pastorianus
tgaagttggctaatgaggtttatcc

SEQ ID NO: 157556 - DNA, 25 bp, Saccharomyces pastorianus
tgctgtttggagtgaagttggctaa

SEQ ID NO: 157557 - DNA, 25 bp, Saccharomyces pastorianus
atgctgtttggagtgaagttggcta

SEQ ID NO: 157558 - DNA, 25 bp, Saccharomyces pastorianus
aagttggctaatgaggtttatcctc

SEQ ID NO: 157559 - DNA, 25 bp, Saccharomyces pastorianus
gaagttggctaatgaggtttatcct

SEQ ID NO: 157560 - DNA, 25 bp, Saccharomyces pastorianus
gttggctaatgaggtttatcctcct

SEQ ID NO: 157561 - DNA, 25 bp, Saccharomyces pastorianus
gctgtttggagtgaagttggctaat

SEQ ID NO: 157562 - DNA, 25 bp, Saccharomyces pastorianus
agtgaagttggctaatgaggtttat

SEQ ID NO: 157563 - DNA, 25 bp, Saccharomyces pastorianus
ggctaatgaggtttatcctccttgg

SEQ ID NO: 157564 - DNA, 25 bp, Saccharomyces pastorianus
ttggctaatgaggtttatcctcctt

SEQ ID NO: 157565 - DNA, 25 bp, Saccharomyces pastorianus
tggctaatgaggtttatcctccttg

SEQ ID NO: 157566 - DNA, 25 bp, Saccharomyces pastorianus
gttgcaaatcccttgaaattcctga

SEQ ID NO: 157567 - DNA, 25 bp, Saccharomyces pastorianus
gatgtctgccagttctatgatttct

SEQ ID NO: 157568 - DNA, 25 bp, Saccharomyces pastorianus
agacaggatcctaagcaagcatatg

SEQ ID NO: 157569 - DNA, 25 bp, Saccharomyces pastorianus
atttggaggcagacggttcatccga

SEQ ID NO: 157570 - DNA, 25 bp, Saccharomyces pastorianus
tgagcgtattacctctcaaggtgat

SEQ ID NO: 157571 - DNA, 25 bp, Saccharomyces pastorianus
aagagcctcaacatcaagcagcagt

SEQ ID NO: 157572 - DNA, 25 bp, Saccharomyces pastorianus
ttcattggattcttcgatgtctgcc

SEQ ID NO: 157573 - DNA, 25 bp, Saccharomyces pastorianus
gaggcgagtatgctaagtttcctta

SEQ ID NO: 157574 - DNA, 25 bp, Saccharomyces pastorianus
agcagtaccggtatctcacgaggaa

SEQ ID NO: 157575 - DNA, 25 bp, Saccharomyces pastorianus
gattcattcgacagagagcgtccaa

SEQ ID NO: 157576 - DNA, 25 bp, Saccharomyces pastorianus
tagagaccctaatacctggcataga

SEQ ID NO: 157577 - DNA, 25 bp, Saccharomyces pastorianus
agatggtgatccttatcgtctagct

SEQ ID NO: 157578 - DNA, 25 bp, Saccharomyces pastorianus
catctcgcttctcaaactattactt

SEQ ID NO: 157579 - DNA, 25 bp, Saccharomyces pastorianus
tccttatcgtctagctgtctacaag

SEQ ID NO: 157580 - DNA, 25 bp, Saccharomyces pastorianus
ggacgcggagaatgatcctgtttat

SEQ ID NO: 157581 - DNA, 25 bp, Saccharomyces pastorianus
gggatatcaggttcgcaaacatact

SEQ ID NO: 157582 - DNA, 25 bp, Saccharomyces pastorianus
gacccttttgttaagtgggctctat

SEQ ID NO: 157583 - DNA, 25 bp, Saccharomyces pastorianus
gggctctatggattggctattgact

SEQ ID NO: 157584 - DNA, 25 bp, Saccharomyces pastorianus
gattgatagctcaacgcgcttgacc

SEQ ID NO: 157585 - DNA, 25 bp, Saccharomyces pastorianus
gatgtcgagttatgccatgaggcgt

SEQ ID NO: 157586 - DNA, 25 bp, Saccharomyces pastorianus
aatatcgtatggaccatctcgcttc

SEQ ID NO: 157587 - DNA, 25 bp, Saccharomyces pastorianus
atgaaggacctaccgatgtcgagtt

SEQ ID NO: 157588 - DNA, 25 bp, Saccharomyces pastorianus
aagaagccaggaggcaatgcctaca

SEQ ID NO: 157589 - DNA, 25 bp, Saccharomyces pastorianus
gcagttttgcagcttcgagcaactc

SEQ ID NO: 157590 - DNA, 25 bp, Saccharomyces pastorianus
gatgatggatcctcttcttccggat

SEQ ID NO: 157591 - DNA, 25 bp, Saccharomyces pastorianus
gatatgctgcatttttcatccacaa

SEQ ID NO: 157592 - DNA, 25 bp, Saccharomyces pastorianus
aactcaagatcctccaagaagccag

SEQ ID NO: 157593 - DNA, 25 bp, Saccharomyces pastorianus
aaaaagaccaagatatgctgcattt

SEQ ID NO: 157594 - DNA, 25 bp, Saccharomyces pastorianus
atgcctacaaggcacaatgtaagat

SEQ ID NO: 157595 - DNA, 25 bp, Saccharomyces pastorianus
aagaggttcccgcagttttgcagct

SEQ ID NO: 157596 - DNA, 25 bp, Saccharomyces pastorianus
gcagcttcgagcaactcaagatcct

SEQ ID NO: 157597 - DNA, 25 bp, Saccharomyces pastorianus
cagatgatgatggatcctcttcttc

SEQ ID NO: 157598 - DNA, 25 bp, Saccharomyces pastorianus
gaagagtgcaaccatcattcagatg

SEQ ID NO: 157599 - DNA, 25 bp, Saccharomyces pastorianus
agccattggattactcagctgtatg

SEQ ID NO: 157600 - DNA, 25 bp, Saccharomyces pastorianus
gcctgaggccagtgagtctgttaca

SEQ ID NO: 157601 - DNA, 25 bp, Saccharomyces pastorianus
aacagcgttgatgatctcccacaaa

SEQ ID NO: 157602 - DNA, 25 bp, Saccharomyces pastorianus
gtttgaccgtaacagtgatcatcct

SEQ ID NO: 157603 - DNA, 25 bp, Saccharomyces pastorianus
gccggaattttcaccctttgaagat

SEQ ID NO: 157604 - DNA, 25 bp, Saccharomyces pastorianus
gaactaacgcgattaccgcagtttt

SEQ ID NO: 157605 - DNA, 25 bp, Saccharomyces pastorianus
gactctcgatttgccggaattttca

SEQ ID NO: 157606 - DNA, 25 bp, Saccharomyces pastorianus
aattttgcacgtcaagtatcgctta

SEQ ID NO: 157607 - DNA, 25 bp, Saccharomyces pastorianus
gaagccgagcttttattttctgaag

SEQ ID NO: 157608 - DNA, 25 bp, Saccharomyces pastorianus
tcctctactagcaccgtttttgaac

SEQ ID NO: 157609 - DNA, 25 bp, Saccharomyces pastorianus
accattttgggttctgactctcgat

SEQ ID NO: 157610 - DNA, 25 bp, Saccharomyces pastorianus
atttatggagcacgccgattagccg

SEQ ID NO: 157611 - DNA, 25 bp, Saccharomyces pastorianus
atgggccgttgagacgcaagccttt

SEQ ID NO: 157612 - DNA, 25 bp, Saccharomyces pastorianus
agtatcgaattctaccttgggtgta

SEQ ID NO: 157613 - DNA, 25 bp, Saccharomyces pastorianus
gcctttgaggagaacggttaccgct

SEQ ID NO: 157614 - DNA, 25 bp, Saccharomyces pastorianus
tagtgctcgctgctcattatgatac

SEQ ID NO: 157615 - DNA, 25 bp, Saccharomyces pastorianus
tatatacggcccagttcctaacgca

SEQ ID NO: 157616 - DNA, 25 bp, Saccharomyces pastorianus
gttaccgcttcaataaccttgttat

SEQ ID NO: 157617 - DNA, 25 bp, Saccharomyces pastorianus
gcacttcaacaatacgctggcggga

SEQ ID NO: 157618 - DNA, 25 bp, Saccharomyces pastorianus
ccaatggcttgctgacggcacgatg

SEQ ID NO: 157619 - DNA, 25 bp, Saccharomyces pastorianus
tatgataccaagatagcgcccacgg

SEQ ID NO: 157620 - DNA, 25 bp, Saccharomyces pastorianus
tcgtgtgccgcgctgctatatacgg

SEQ ID NO: 157621 - DNA, 25 bp, Saccharomyces pastorianus
gaactccccacacatgagagatctt

SEQ ID NO: 157622 - DNA, 25 bp, Saccharomyces pastorianus
atattaccagtactcacatgcgaat

SEQ ID NO: 157623 - DNA, 25 bp, Saccharomyces pastorianus
cttctacatattctgggttcatcaa

SEQ ID NO: 157624 - DNA, 25 bp, Saccharomyces pastorianus
catcgtcacgacatcttgggaaaga

SEQ ID NO: 157625 - DNA, 25 bp, Saccharomyces pastorianus
aaatgtgcacggaatagctgagtat

SEQ ID NO: 157626 - DNA, 25 bp, Saccharomyces pastorianus
gagagatctttcgtcaatgaatagc

SEQ ID NO: 157627 - DNA, 25 bp, Saccharomyces pastorianus
ttctcatccacaaattaccccatat

SEQ ID NO: 157628 - DNA, 25 bp, Saccharomyces pastorianus
aaatttaagcgctgtctgcaataag

SEQ ID NO: 157629 - DNA, 25 bp, Saccharomyces pastorianus
gtaggaggaagcatcgtcacgacat

SEQ ID NO: 157630 - DNA, 25 bp, Saccharomyces pastorianus
tgcgaatagtttgaactccccacac

SEQ ID NO: 157631 - DNA, 25 bp, Saccharomyces pastorianus
ggaatgcgcaatatacacacctctt

SEQ ID NO: 157632 - DNA, 25 bp, Saccharomyces pastorianus
gacagtacaaaaagatcacgagaag

SEQ ID NO: 157633 - DNA, 25 bp, Saccharomyces pastorianus
gaacgaccaggatttgacagtacaa

SEQ ID NO: 157634 - DNA, 25 bp, Saccharomyces pastorianus
tgaatattttgaacgaccaggattt

SEQ ID NO: 157635 - DNA, 25 bp, Saccharomyces pastorianus
ttttgaacgaccaggatttgacagt

SEQ ID NO: 157636 - DNA, 25 bp, Saccharomyces pastorianus
aatattttgaacgaccaggatttga

SEQ ID NO: 157637 - DNA, 25 bp, Saccharomyces pastorianus
tattttgaacgaccaggatttgaca

SEQ ID NO: 157638 - DNA, 25 bp, Saccharomyces pastorianus
gaccaggatttgacagtacaaaaag

SEQ ID NO: 157639 - DNA, 25 bp, Saccharomyces pastorianus
acgaccaggatttgacagtacaaaa

SEQ ID NO: 157640 - DNA, 25 bp, Saccharomyces pastorianus
acgagaagaaactctcattcacccc

SEQ ID NO: 157641 - DNA, 25 bp, Saccharomyces pastorianus
gatcacgagaagaaactctcattca

SEQ ID NO: 157642 - DNA, 25 bp, Saccharomyces pastorianus
ttgaacgaccaggatttgacagtac

SEQ ID NO: 157643 - DNA, 25 bp, Saccharomyces pastorianus
atcacgctgggtggtaacgtctccg

SEQ ID NO: 157644 - DNA, 25 bp, Saccharomyces pastorianus
tttctgctgggcctcttggtagaag

SEQ ID NO: 157645 - DNA, 25 bp, Saccharomyces pastorianus
tggtaggataagaccgcctccagca

SEQ ID NO: 157646 - DNA, 25 bp, Saccharomyces pastorianus
tggtgtggctgcagtttttgcctat

SEQ ID NO: 157647 - DNA, 25 bp, Saccharomyces pastorianus
ggatgctgttaagtcgttttctgaa

SEQ ID NO: 157648 - DNA, 25 bp, Saccharomyces pastorianus
ccattgtttcgtgttttagagtcca

SEQ ID NO: 157649 - DNA, 25 bp, Saccharomyces pastorianus
agagtccagggcgtttaattacaga

SEQ ID NO: 157650 - DNA, 25 bp, Saccharomyces pastorianus
caacggtggtcgtggcagtttcgat

SEQ ID NO: 157651 - DNA, 25 bp, Saccharomyces pastorianus
gcctccagcagttgatccattgttt

SEQ ID NO: 157652 - DNA, 25 bp, Saccharomyces pastorianus
taattacagaccctccaacggtggt

SEQ ID NO: 157653 - DNA, 25 bp, Saccharomyces pastorianus
tgaatttgggaccatcacgctgggt

SEQ ID NO: 157654 - DNA, 25 bp, Saccharomyces pastorianus
gttgcactctatttgctcgaaaatt

SEQ ID NO: 157655 - DNA, 25 bp, Saccharomyces pastorianus
gttgagtagctcatcaagggcaatc

SEQ ID NO: 157656 - DNA, 25 bp, Saccharomyces pastorianus
cactactttctattccctggaatgg

SEQ ID NO: 157657 - DNA, 25 bp, Saccharomyces pastorianus
attaaccattactacaacaccacga

SEQ ID NO: 157658 - DNA, 25 bp, Saccharomyces pastorianus
cttttccgccatcaaatctcagagg

SEQ ID NO: 157659 - DNA, 25 bp, Saccharomyces pastorianus
caagggcaatcaaggttccaatctt

SEQ ID NO: 157660 - DNA, 25 bp, Saccharomyces pastorianus
ggaatggacctcctgagtcattgag

SEQ ID NO: 157661 - DNA, 25 bp, Saccharomyces pastorianus
attaatcttattgaactcgaaccgc

SEQ ID NO: 157662 - DNA, 25 bp, Saccharomyces pastorianus
gaactcgaaccgcaagttgcactct

SEQ ID NO: 157663 - DNA, 25 bp, Saccharomyces pastorianus
aacaattcatgtgtcgcttttccgc

SEQ ID NO: 157664 - DNA, 25 bp, Saccharomyces pastorianus
tatgcaactgcactactttctattc

SEQ ID NO: 157665 - DNA, 25 bp, Saccharomyces pastorianus
gagtcatatgtataccggcaatagt

SEQ ID NO: 157666 - DNA, 25 bp, Saccharomyces pastorianus
ccttctcgctgtcttttcgaaagag

SEQ ID NO: 157667 - DNA, 25 bp, Saccharomyces pastorianus
gtaatccaacttcccatgcgaatag

SEQ ID NO: 157668 - DNA, 25 bp, Saccharomyces pastorianus
gttttatgccatttttccagtgtcc

SEQ ID NO: 157669 - DNA, 25 bp, Saccharomyces pastorianus
taatgccgcagatgataccatacta

SEQ ID NO: 157670 - DNA, 25 bp, Saccharomyces pastorianus
aaatgatatctcctctgcttcatcg

SEQ ID NO: 157671 - DNA, 25 bp, Saccharomyces pastorianus
gaagataacgaacccagcgcaacga

SEQ ID NO: 157672 - DNA, 25 bp, Saccharomyces pastorianus
atcattatcccaaagtttcgcgcaa

SEQ ID NO: 157673 - DNA, 25 bp, Saccharomyces pastorianus
aatgccgttgtatttgctagccagt

SEQ ID NO: 157674 - DNA, 25 bp, Saccharomyces pastorianus
gagaaggactacaagcgccgccggt

SEQ ID NO: 157675 - DNA, 25 bp, Saccharomyces pastorianus
atccatgcaggataccaacggcaca

SEQ ID NO: 157676 - DNA, 25 bp, Saccharomyces pastorianus
ccacgtttctaatcggtccatacga

SEQ ID NO: 157677 - DNA, 25 bp, Saccharomyces pastorianus
gttttggctaatattctgccgccaa

SEQ ID NO: 157678 - DNA, 25 bp, Saccharomyces pastorianus
aattgtccgatgacgtctgcacagg

SEQ ID NO: 157679 - DNA, 25 bp, Saccharomyces pastorianus
aattctgaaaccattccttttgaga

SEQ ID NO: 157680 - DNA, 25 bp, Saccharomyces pastorianus
gacgtctgggaaattacaaatctta

SEQ ID NO: 157681 - DNA, 25 bp, Saccharomyces pastorianus
tttacacccagaagacttgactttg

SEQ ID NO: 157682 - DNA, 25 bp, Saccharomyces pastorianus
tttatttcccatatttacacccaga

SEQ ID NO: 157683 - DNA, 25 bp, Saccharomyces pastorianus
gatttccaatttacacacaattctg

SEQ ID NO: 157684 - DNA, 25 bp, Saccharomyces pastorianus
gaatatatcggccacgtttctaatc

SEQ ID NO: 157685 - DNA, 25 bp, Saccharomyces pastorianus
atagaatcaatccaaccttgttgca

SEQ ID NO: 157686 - DNA, 25 bp, Saccharomyces pastorianus
cggtccatacgagatttcatcaatt

SEQ ID NO: 157687 - DNA, 25 bp, Saccharomyces pastorianus
gctactgagggccaactgactgata

SEQ ID NO: 157688 - DNA, 25 bp, Saccharomyces pastorianus
acaaagcgggtgtcaatgtcactaa

SEQ ID NO: 157689 - DNA, 25 bp, Saccharomyces pastorianus
ttgaccaacagatctcttgaagcgt

SEQ ID NO: 157690 - DNA, 25 bp, Saccharomyces pastorianus
tgaagcgtacaaggccaacagagtc

SEQ ID NO: 157691 - DNA, 25 bp, Saccharomyces pastorianus
acaggtgtcaccgtattggccaaga

SEQ ID NO: 157692 - DNA, 25 bp, Saccharomyces pastorianus
atgttatattgaccagagcggccaa

SEQ ID NO: 157693 - DNA, 25 bp, Saccharomyces pastorianus
tttacaagccatggacaggtgtcac

SEQ ID NO: 157694 - DNA, 25 bp, Saccharomyces pastorianus
gtattggccaagaatcaccggttat

SEQ ID NO: 157695 - DNA, 25 bp, Saccharomyces pastorianus
gtccaggagttatctatgcttttaa

SEQ ID NO: 157696 - DNA, 25 bp, Saccharomyces pastorianus
acagagtcgtagatctaccgcacgt

SEQ ID NO: 157697 - DNA, 25 bp, Saccharomyces pastorianus
tttcctattgtccacaagggcggca

SEQ ID NO: 157698 - DNA, 25 bp, Saccharomyces pastorianus
taccaggtgccgaggactgtcaatt

SEQ ID NO: 157699 - DNA, 25 bp, Saccharomyces pastorianus
ctggatttggctgcttggctcggaa

SEQ ID NO: 157700 - DNA, 25 bp, Saccharomyces pastorianus
caaatacaaccgtcattttcctcga

SEQ ID NO: 157701 - DNA, 25 bp, Saccharomyces pastorianus
cactcttttttgatgctcatgcgca

SEQ ID NO: 157702 - DNA, 25 bp, Saccharomyces pastorianus
caggcttattttccattgtccttaa

SEQ ID NO: 157703 - DNA, 25 bp, Saccharomyces pastorianus
tgggttcgtgactacaaaggttctt

SEQ ID NO: 157704 - DNA, 25 bp, Saccharomyces pastorianus
tattggtctggcctccgcaaatgaa

SEQ ID NO: 157705 - DNA, 25 bp, Saccharomyces pastorianus
aggatattccagctttggtctctgt

SEQ ID NO: 157706 - DNA, 25 bp, Saccharomyces pastorianus
ttgggtggtcattcagatcttctta

SEQ ID NO: 157707 - DNA, 25 bp, Saccharomyces pastorianus
atgcgcatggtatcgatatttcggt

SEQ ID NO: 157708 - DNA, 25 bp, Saccharomyces pastorianus
cgcctttgaagattgtcccggacat

SEQ ID NO: 157709 - DNA, 25 bp, Saccharomyces pastorianus
ttggacctactagtgtctatagtaa

SEQ ID NO: 157710 - DNA, 25 bp, Saccharomyces pastorianus
atatttggacctactagtgtctata

SEQ ID NO: 157711 - DNA, 25 bp, Saccharomyces pastorianus
tagtgtctatagtaagtgctcggcc

SEQ ID NO: 157712 - DNA, 25 bp, Saccharomyces pastorianus
gatatttggacctactagtgtctat

SEQ ID NO: 157713 - DNA, 25 bp, Saccharomyces pastorianus
tgatatttggacctactagtgtcta

SEQ ID NO: 157714 - DNA, 25 bp, Saccharomyces pastorianus
atttggacctactagtgtctatagt

SEQ ID NO: 157715 - DNA, 25 bp, Saccharomyces pastorianus
tatttggacctactagtgtctatag

SEQ ID NO: 157716 - DNA, 25 bp, Saccharomyces pastorianus
ggacctactagtgtctatagtaagt

SEQ ID NO: 157717 - DNA, 25 bp, Saccharomyces pastorianus
atgatatttggacctactagtgtct

SEQ ID NO: 157718 - DNA, 25 bp, Saccharomyces pastorianus
tttggacctactagtgtctatagta

SEQ ID NO: 157719 - DNA, 25 bp, Saccharomyces pastorianus
tggacctactagtgtctatagtaag

SEQ ID NO: 157720 - DNA, 25 bp, Saccharomyces pastorianus
tcacttggcccaatactacatgttc

SEQ ID NO: 157721 - DNA, 25 bp, Saccharomyces pastorianus
gctgccatcgctgctactgcttccg

SEQ ID NO: 157722 - DNA, 25 bp, Saccharomyces pastorianus
cacttggcccaatactacatgttcc

SEQ ID NO: 157723 - DNA, 25 bp, Saccharomyces pastorianus
tgccatcgctgctactgcttccgca

SEQ ID NO: 157724 - DNA, 25 bp, Saccharomyces pastorianus
acttggcccaatactacatgttcca

SEQ ID NO: 157725 - DNA, 25 bp, Saccharomyces pastorianus
gccgctggtgtcgctgccatcgctg

SEQ ID NO: 157726 - DNA, 25 bp, Saccharomyces pastorianus
tactgcttccgcaaccaccactcta

SEQ ID NO: 157727 - DNA, 25 bp, Saccharomyces pastorianus
tgttccaagccgcccacccaacgga

SEQ ID NO: 157728 - DNA, 25 bp, Saccharomyces pastorianus
cgccgctggtgtcgctgccatcgct

SEQ ID NO: 157729 - DNA, 25 bp, Saccharomyces pastorianus
ccgctggtgtcgctgccatcgctgc

SEQ ID NO: 157730 - DNA, 25 bp, Saccharomyces pastorianus
cttggcccaatactacatgttccaa

SEQ ID NO: 157731 - DNA, 25 bp, Saccharomyces pastorianus
tattgttttatggcactcatgtgta

SEQ ID NO: 157732 - DNA, 25 bp, Saccharomyces pastorianus
ttgttttatggcactcatgtgtatt

SEQ ID NO: 157733 - DNA, 25 bp, Saccharomyces pastorianus
gtattgttttatggcactcatgtgt

SEQ ID NO: 157734 - DNA, 25 bp, Saccharomyces pastorianus
tggagtattgttttatggcactcat

SEQ ID NO: 157735 - DNA, 25 bp, Saccharomyces pastorianus
attgttttatggcactcatgtgtat

SEQ ID NO: 157736 - DNA, 25 bp, Saccharomyces pastorianus
ggagtattgttttatggcactcatg

SEQ ID NO: 157737 - DNA, 25 bp, Saccharomyces pastorianus
ttcatagacttcgtatgtggagtat

SEQ ID NO: 157738 - DNA, 25 bp, Saccharomyces pastorianus
agtattgttttatggcactcatgtg

SEQ ID NO: 157739 - DNA, 25 bp, Saccharomyces pastorianus
tgtggagtattgttttatggcactc

SEQ ID NO: 157740 - DNA, 25 bp, Saccharomyces pastorianus
gtggagtattgttttatggcactca

SEQ ID NO: 157741 - DNA, 25 bp, Saccharomyces pastorianus
gagtattgttttatggcactcatgt

SEQ ID NO: 157742 - DNA, 25 bp, Saccharomyces pastorianus
tatgcgtcaagcctacaataccctt

SEQ ID NO: 157743 - DNA, 25 bp, Saccharomyces pastorianus
acatcctatgcgtcaagcctacaat

SEQ ID NO: 157744 - DNA, 25 bp, Saccharomyces pastorianus
actttgggagcatcttattcggtgc

SEQ ID NO: 157745 - DNA, 25 bp, Saccharomyces pastorianus
ttggacggcaacttgtatggtaaaa

SEQ ID NO: 157746 - DNA, 25 bp, Saccharomyces pastorianus
aattatcacagcacagagtgttgca

SEQ ID NO: 157747 - DNA, 25 bp, Saccharomyces pastorianus
gttgtagatattcagtttccagtgc

SEQ ID NO: 157748 - DNA, 25 bp, Saccharomyces pastorianus
aaagtaagtacgcagaacagctctg

SEQ ID NO: 157749 - DNA, 25 bp, Saccharomyces pastorianus
cagagtgttgcaattttggacggca

SEQ ID NO: 157750 - DNA, 25 bp, Saccharomyces pastorianus
gcatcttattcggtgcagtcgataa

SEQ ID NO: 157751 - DNA, 25 bp, Saccharomyces pastorianus
gcctacaatacccttgattcaaact

SEQ ID NO: 157752 - DNA, 25 bp, Saccharomyces pastorianus
agaacagctctgcacacatcctatg

SEQ ID NO: 157753 - DNA, 25 bp, Saccharomyces pastorianus
gttaaaccgaatccatcttgcgtct

SEQ ID NO: 157754 - DNA, 25 bp, Saccharomyces pastorianus
cgggtcctctttgccactttttgat

SEQ ID NO: 157755 - DNA, 25 bp, Saccharomyces pastorianus
ttgcgtctccaactgcctcaaattt

SEQ ID NO: 157756 - DNA, 25 bp, Saccharomyces pastorianus
aaagcacctgctaatctggtggata

SEQ ID NO: 157757 - DNA, 25 bp, Saccharomyces pastorianus
gaagcaataactgattcggccagaa

SEQ ID NO: 157758 - DNA, 25 bp, Saccharomyces pastorianus
atcggacatcctactattttctctt

SEQ ID NO: 157759 - DNA, 25 bp, Saccharomyces pastorianus
tcggccagaaatttagctacggttt

SEQ ID NO: 157760 - DNA, 25 bp, Saccharomyces pastorianus
ataacggcaggtttgtggaagcaat

SEQ ID NO: 157761 - DNA, 25 bp, Saccharomyces pastorianus
cggtttccaaatcggacatcctact

SEQ ID NO: 157762 - DNA, 25 bp, Saccharomyces pastorianus
gtagcaataaacagagcgggtcctc

SEQ ID NO: 157763 - DNA, 25 bp, Saccharomyces pastorianus
aactgcctcaaatttctttccgaag

SEQ ID NO: 157764 - DNA, 25 bp, Saccharomyces pastorianus
aaactctacgagtgcattcccgatt

SEQ ID NO: 157765 - DNA, 25 bp, Saccharomyces pastorianus
tgcaaactactcttgaaccgcgtac

SEQ ID NO: 157766 - DNA, 25 bp, Saccharomyces pastorianus
catcccaatgcatgttgtcaccaaa

SEQ ID NO: 157767 - DNA, 25 bp, Saccharomyces pastorianus
caatacgggcgcttcaaaatttcaa

SEQ ID NO: 157768 - DNA, 25 bp, Saccharomyces pastorianus
gagccgataacgcagacttcagact

SEQ ID NO: 157769 - DNA, 25 bp, Saccharomyces pastorianus
gcattcccgatttacccattaattt

SEQ ID NO: 157770 - DNA, 25 bp, Saccharomyces pastorianus
acggattcaaggtatcactgcggca

SEQ ID NO: 157771 - DNA, 25 bp, Saccharomyces pastorianus
ttgccgcaagattacgattaccgtc

SEQ ID NO: 157772 - DNA, 25 bp, Saccharomyces pastorianus
ggattatatctcctgtccgtttaag

SEQ ID NO: 157773 - DNA, 25 bp, Saccharomyces pastorianus
agactgacgccgattggtgctcaac

SEQ ID NO: 157774 - DNA, 25 bp, Saccharomyces pastorianus
accgcgtacagccattgaccatagg

SEQ ID NO: 157775 - DNA, 25 bp, Saccharomyces pastorianus
gtgggacgatgatttactttctata

SEQ ID NO: 157776 - DNA, 25 bp, Saccharomyces pastorianus
gtttaagactcagatctcatcccgc

SEQ ID NO: 157777 - DNA, 25 bp, Saccharomyces pastorianus
ggcactgtatctccacttgatgatg

SEQ ID NO: 157778 - DNA, 25 bp, Saccharomyces pastorianus
atgccctcaagagacactgacagat

SEQ ID NO: 157779 - DNA, 25 bp, Saccharomyces pastorianus
aacggtgcagcctacgattgaaatc

SEQ ID NO: 157780 - DNA, 25 bp, Saccharomyces pastorianus
gtcgattttgtgaattcgtccacct

SEQ ID NO: 157781 - DNA, 25 bp, Saccharomyces pastorianus
gagaccatctcattcggagaaccgt

SEQ ID NO: 157782 - DNA, 25 bp, Saccharomyces pastorianus
atacgaacctcaatgatggcactgt

SEQ ID NO: 157783 - DNA, 25 bp, Saccharomyces pastorianus
gaatccctattcgagacactattta

SEQ ID NO: 157784 - DNA, 25 bp, Saccharomyces pastorianus
ggagttttcctcgaagtgggacgat

SEQ ID NO: 157785 - DNA, 25 bp, Saccharomyces pastorianus
cacacatttggatacactctctact

SEQ ID NO: 157786 - DNA, 25 bp, Saccharomyces pastorianus
tgtttgatgaaacctcttcccaagc

SEQ ID NO: 157787 - DNA, 25 bp, Saccharomyces pastorianus
cttcccaagcccgtgtatacaaaga

SEQ ID NO: 157788 - DNA, 25 bp, Saccharomyces pastorianus
cttacggtgctactggttgtggcaa

SEQ ID NO: 157789 - DNA, 25 bp, Saccharomyces pastorianus
aagcttgtagacttgacctcgcaac

SEQ ID NO: 157790 - DNA, 25 bp, Saccharomyces pastorianus
taaacaggactacgtcaccgacgga

SEQ ID NO: 157791 - DNA, 25 bp, Saccharomyces pastorianus
gaatttgtcgtatcaccacccaaat

SEQ ID NO: 157792 - DNA, 25 bp, Saccharomyces pastorianus
tatactgtgagtggcacaccttcac

SEQ ID NO: 157793 - DNA, 25 bp, Saccharomyces pastorianus
gcccgctcctagattctgttttaga

SEQ ID NO: 157794 - DNA, 25 bp, Saccharomyces pastorianus
cgagatttcactgtcttacttggaa

SEQ ID NO: 157795 - DNA, 25 bp, Saccharomyces pastorianus
gggatcatatttctagccatggagg

SEQ ID NO: 157796 - DNA, 25 bp, Saccharomyces pastorianus
aagtatcttcacgatctcatgcagt

SEQ ID NO: 157797 - DNA, 25 bp, Saccharomyces pastorianus
gatgtggatatctgtcgtcaaataa

SEQ ID NO: 157798 - DNA, 25 bp, Saccharomyces pastorianus
ttatagacatcatccaaagtggcga

SEQ ID NO: 157799 - DNA, 25 bp, Saccharomyces pastorianus
tttgttgacggcaatagatgcgcta

SEQ ID NO: 157800 - DNA, 25 bp, Saccharomyces pastorianus
aagaatctggaagcagtgaggccca

SEQ ID NO: 157801 - DNA, 25 bp, Saccharomyces pastorianus
catgttgctggaaggactggagaaa

SEQ ID NO: 157802 - DNA, 25 bp, Saccharomyces pastorianus
ttctgccgatggtgcagccttgaag

SEQ ID NO: 157803 - DNA, 25 bp, Saccharomyces pastorianus
gagaatgacacttctgccgatggtg

SEQ ID NO: 157804 - DNA, 25 bp, Saccharomyces pastorianus
catttgcaaggcgtgcatgttgctg

SEQ ID NO: 157805 - DNA, 25 bp, Saccharomyces pastorianus
cgctggaaagagagtcgtcaaattt

SEQ ID NO: 157806 - DNA, 25 bp, Saccharomyces pastorianus
agcccaagtggcaatcgagaatgac

SEQ ID NO: 157807 - DNA, 25 bp, Saccharomyces pastorianus
tgaggcccagttgcattatagacat

SEQ ID NO: 157808 - DNA, 25 bp, Saccharomyces pastorianus
aacgacatttcagccaattgcgacc

SEQ ID NO: 157809 - DNA, 25 bp, Saccharomyces pastorianus
agtgctgaatgccttagtctcgcag

SEQ ID NO: 157810 - DNA, 25 bp, Saccharomyces pastorianus
gtctcgcagatactacttccattgg

SEQ ID NO: 157811 - DNA, 25 bp, Saccharomyces pastorianus
gttctcgagcctatttgtgtctagt

SEQ ID NO: 157812 - DNA, 25 bp, Saccharomyces pastorianus
gtcctgtcgctcatgaaactggtgg

SEQ ID NO: 157813 - DNA, 25 bp, Saccharomyces pastorianus
ttctctatttgtatcgcatgcgcgg

SEQ ID NO: 157814 - DNA, 25 bp, Saccharomyces pastorianus
gggtattgcttattcccacaagtgc

SEQ ID NO: 157815 - DNA, 25 bp, Saccharomyces pastorianus
ttatcgagatataccctctggcact

SEQ ID NO: 157816 - DNA, 25 bp, Saccharomyces pastorianus
gagggtgtcgctgatttcgtacatc

SEQ ID NO: 157817 - DNA, 25 bp, Saccharomyces pastorianus
acgctcgacgagactgtgctgcaaa

SEQ ID NO: 157818 - DNA, 25 bp, Saccharomyces pastorianus
cgccccttgcgtttatcatattgta

SEQ ID NO: 157819 - DNA, 25 bp, Saccharomyces pastorianus
aaacaattgggccacggacttccat

SEQ ID NO: 157820 - DNA, 25 bp, Saccharomyces pastorianus
aagaatttcggtaggcctgcttccg

SEQ ID NO: 157821 - DNA, 25 bp, Saccharomyces pastorianus
accctgttgcgttccagagtttatt

SEQ ID NO: 157822 - DNA, 25 bp, Saccharomyces pastorianus
aagagggcaggtcttgctttcgact

SEQ ID NO: 157823 - DNA, 25 bp, Saccharomyces pastorianus
gtggcgtaccaatcaaatttcgtgc

SEQ ID NO: 157824 - DNA, 25 bp, Saccharomyces pastorianus
gacttccattggctaaacgcactac

SEQ ID NO: 157825 - DNA, 25 bp, Saccharomyces pastorianus
atatagtttaccctgttgcgttcca

SEQ ID NO: 157826 - DNA, 25 bp, Saccharomyces pastorianus
gcctgcttccggcaagaaatggtcg

SEQ ID NO: 157827 - DNA, 25 bp, Saccharomyces pastorianus
tttcgtgcacacgtaaaaacgcata

SEQ ID NO: 157828 - DNA, 25 bp, Saccharomyces pastorianus
gagtttattcctcttttgagcaatt

SEQ ID NO: 157829 - DNA, 25 bp, Saccharomyces pastorianus
gctttcgactctccagaatttttga

SEQ ID NO: 157830 - DNA, 25 bp, Saccharomyces pastorianus
cagcggttaccgatcttccagaatg

SEQ ID NO: 157831 - DNA, 25 bp, Saccharomyces pastorianus
attcaagtctgaatgccaattctta

SEQ ID NO: 157832 - DNA, 25 bp, Saccharomyces pastorianus
gtccgttttctttactgttatccat

SEQ ID NO: 157833 - DNA, 25 bp, Saccharomyces pastorianus
tttcctatagctccagcggttaccg

SEQ ID NO: 157834 - DNA, 25 bp, Saccharomyces pastorianus
gtttataacaagtttcacaagcacg

SEQ ID NO: 157835 - DNA, 25 bp, Saccharomyces pastorianus
ttttctttactgttatccatctccc

SEQ ID NO: 157836 - DNA, 25 bp, Saccharomyces pastorianus
caatgttaacttatatggtccgttt

SEQ ID NO: 157837 - DNA, 25 bp, Saccharomyces pastorianus
gtctgaatgccaattcttatttttt

SEQ ID NO: 157838 - DNA, 25 bp, Saccharomyces pastorianus
tgttatccatctccctttcctatag

SEQ ID NO: 157839 - DNA, 25 bp, Saccharomyces pastorianus
tatatggtccgttttctttactgtt

SEQ ID NO: 157840 - DNA, 25 bp, Saccharomyces pastorianus
gttaccgatcttccagaatgccggg

SEQ ID NO: 157841 - DNA, 25 bp, Saccharomyces pastorianus
gacagctcaaagatgtgtattcact

SEQ ID NO: 157842 - DNA, 25 bp, Saccharomyces pastorianus
agttccatgccttctactatacatt

SEQ ID NO: 157843 - DNA, 25 bp, Saccharomyces pastorianus
ataacaagttccatgccttctacta

SEQ ID NO: 157844 - DNA, 25 bp, Saccharomyces pastorianus
acagttttggaatgatcttcaggat

SEQ ID NO: 157845 - DNA, 25 bp, Saccharomyces pastorianus
attatatttgcaacgccgcagtcca

SEQ ID NO: 157846 - DNA, 25 bp, Saccharomyces pastorianus
gatgacatcctaagagcaccgcttt

SEQ ID NO: 157847 - DNA, 25 bp, Saccharomyces pastorianus
gccgcagtccattcaatttgaccag

SEQ ID NO: 157848 - DNA, 25 bp, Saccharomyces pastorianus
accgctttctggacagctcaaagat

SEQ ID NO: 157849 - DNA, 25 bp, Saccharomyces pastorianus
gtcttacagtttgaacagttttgga

SEQ ID NO: 157850 - DNA, 25 bp, Saccharomyces pastorianus
taagagcaccgctttctggacagct

SEQ ID NO: 157851 - DNA, 25 bp, Saccharomyces pastorianus
tgatccagaattatgatgacatcct

SEQ ID NO: 157852 - DNA, 25 bp, Saccharomyces pastorianus
tatccacctacattcggctttcata

SEQ ID NO: 157853 - DNA, 25 bp, Saccharomyces pastorianus
gggcgctacttcatttatggttcaa

SEQ ID NO: 157854 - DNA, 25 bp, Saccharomyces pastorianus
aaggcctaatgcttatatctggaat

SEQ ID NO: 157855 - DNA, 25 bp, Saccharomyces pastorianus
agatatcggatgacgggcgctactt

SEQ ID NO: 157856 - DNA, 25 bp, Saccharomyces pastorianus
ggaaatattaccctctatccaatag

SEQ ID NO: 157857 - DNA, 25 bp, Saccharomyces pastorianus
ttccagtttgaatctatccacctac

SEQ ID NO: 157858 - DNA, 25 bp, Saccharomyces pastorianus
gaggacattctgaccgaaatcccgg

SEQ ID NO: 157859 - DNA, 25 bp, Saccharomyces pastorianus
gtttgatgctgtggaacctctaggt

SEQ ID NO: 157860 - DNA, 25 bp, Saccharomyces pastorianus
gagagcagtacttcaccttacgata

SEQ ID NO: 157861 - DNA, 25 bp, Saccharomyces pastorianus
tagcagatacgttcctggaggacat

SEQ ID NO: 157862 - DNA, 25 bp, Saccharomyces pastorianus
tacagtactccaagaccaacggtat

SEQ ID NO: 157863 - DNA, 25 bp, Saccharomyces pastorianus
agataatataaagcgacaatgtgtt

SEQ ID NO: 157864 - DNA, 25 bp, Saccharomyces pastorianus
gacgaaccagtacagaaaagataat

SEQ ID NO: 157865 - DNA, 25 bp, Saccharomyces pastorianus
ttcgcatatctgaaaatcaaagcat

SEQ ID NO: 157866 - DNA, 25 bp, Saccharomyces pastorianus
aatcaaagcatttctaccacgggaa

SEQ ID NO: 157867 - DNA, 25 bp, Saccharomyces pastorianus
tattatgatagagaacgtcgacgtt

SEQ ID NO: 157868 - DNA, 25 bp, Saccharomyces pastorianus
agaacgtcgacgttattttcgcata

SEQ ID NO: 157869 - DNA, 25 bp, Saccharomyces pastorianus
cacgggaacgacgaaccagtacaga

SEQ ID NO: 157870 - DNA, 25 bp, Saccharomyces pastorianus
gcgacaatgtgttgaggaaaattac

SEQ ID NO: 157871 - DNA, 25 bp, Saccharomyces pastorianus
agcatttctaccacgggaacgacga

SEQ ID NO: 157872 - DNA, 25 bp, Saccharomyces pastorianus
acttaccagggttttattatgatag

SEQ ID NO: 157873 - DNA, 25 bp, Saccharomyces pastorianus
tctaccacgggaacgacgaaccagt

SEQ ID NO: 157874 - DNA, 25 bp, Saccharomyces pastorianus
gattcgaattctattactccaggta

SEQ ID NO: 157875 - DNA, 25 bp, Saccharomyces pastorianus
gaagattttctacatggctattgat

SEQ ID NO: 157876 - DNA, 25 bp, Saccharomyces pastorianus
gacgagattcctaagggtgagccat

SEQ ID NO: 157877 - DNA, 25 bp, Saccharomyces pastorianus
gagttcgataacttatacctggata

SEQ ID NO: 157878 - DNA, 25 bp, Saccharomyces pastorianus
gagctcgtagattcagaaccgctat

SEQ ID NO: 157879 - DNA, 25 bp, Saccharomyces pastorianus
tgtggcccctcgtgccaagatgaat

SEQ ID NO: 157880 - DNA, 25 bp, Saccharomyces pastorianus
ttcagaaccgctatggatgcagaaa

SEQ ID NO: 157881 - DNA, 25 bp, Saccharomyces pastorianus
gctattgatggtgtggcccctcgtg

SEQ ID NO: 157882 - DNA, 25 bp, Saccharomyces pastorianus
gggtgagccatttgattcgaattct

SEQ ID NO: 157883 - DNA, 25 bp, Saccharomyces pastorianus
aatctgtacgtatattgatcacctt

SEQ ID NO: 157884 - DNA, 25 bp, Saccharomyces pastorianus
acgacgatgatgtaaccaagcgatt

SEQ ID NO: 157885 - DNA, 25 bp, Saccharomyces pastorianus
gaatttcctgacttttcaattgtct

SEQ ID NO: 157886 - DNA, 25 bp, Saccharomyces pastorianus
agaagcctcagatatggtcttaact

SEQ ID NO: 157887 - DNA, 25 bp, Saccharomyces pastorianus
aattactacaaggtggtgtccatat

SEQ ID NO: 157888 - DNA, 25 bp, Saccharomyces pastorianus
ctcgtgctacgcctgagcataagtt

SEQ ID NO: 157889 - DNA, 25 bp, Saccharomyces pastorianus
agcgtttaaactacccaatccactg

SEQ ID NO: 157890 - DNA, 25 bp, Saccharomyces pastorianus
gtcatcgaccacgttaatatttttg

SEQ ID NO: 157891 - DNA, 25 bp, Saccharomyces pastorianus
gatcaactggccaatgtcatcgacc

SEQ ID NO: 157892 - DNA, 25 bp, Saccharomyces pastorianus
caatccactgaacgcaatgcaaatt

SEQ ID NO: 157893 - DNA, 25 bp, Saccharomyces pastorianus
gttgccgcactatcattagttgcac

SEQ ID NO: 157894 - DNA, 25 bp, Saccharomyces pastorianus
ggatgggccaccagctcaatcctta

SEQ ID NO: 157895 - DNA, 25 bp, Saccharomyces pastorianus
agttgcactatccacagcgtttaaa

SEQ ID NO: 157896 - DNA, 25 bp, Saccharomyces pastorianus
gtccaataagctaaacgtcctctca

SEQ ID NO: 157897 - DNA, 25 bp, Saccharomyces pastorianus
atatcggtatccttagcggttgctg

SEQ ID NO: 157898 - DNA, 25 bp, Saccharomyces pastorianus
gtgttctgagaatggccaagcgtaa

SEQ ID NO: 157899 - DNA, 25 bp, Saccharomyces pastorianus
gttactttggcattgggtgttctga

SEQ ID NO: 157900 - DNA, 25 bp, Saccharomyces pastorianus
ggacttgtcactggttagcttcata

SEQ ID NO: 157901 - DNA, 25 bp, Saccharomyces pastorianus
gcggttgctgctattccagaagggt

SEQ ID NO: 157902 - DNA, 25 bp, Saccharomyces pastorianus
taggctctgtcaacgttatctgctc

SEQ ID NO: 157903 - DNA, 25 bp, Saccharomyces pastorianus
ggtacactaacctcaaaccacatga

SEQ ID NO: 157904 - DNA, 25 bp, Saccharomyces pastorianus
aaaccgaagactccattgcagttaa

SEQ ID NO: 157905 - DNA, 25 bp, Saccharomyces pastorianus
gtatctaaactttggtgcttggaca

SEQ ID NO: 157906 - DNA, 25 bp, Saccharomyces pastorianus
gggaaactctaactatcggtaatct

SEQ ID NO: 157907 - DNA, 25 bp, Saccharomyces pastorianus
gaataactcgactgctggaaagggt

SEQ ID NO: 157908 - DNA, 25 bp, Saccharomyces pastorianus
gcagtaaggcagaatccgcaccatt

SEQ ID NO: 157909 - DNA, 25 bp, Saccharomyces pastorianus
accgtacctgatagcccaaacatga

SEQ ID NO: 157910 - DNA, 25 bp, Saccharomyces pastorianus
tgctgtatggatcactgccacggtg

SEQ ID NO: 157911 - DNA, 25 bp, Saccharomyces pastorianus
ctgccacggtggtaatgatcaattt

SEQ ID NO: 157912 - DNA, 25 bp, Saccharomyces pastorianus
attgtccgcggtactgacgtttaga

SEQ ID NO: 157913 - DNA, 25 bp, Saccharomyces pastorianus
gagcccaacccatttgatgatgcca

SEQ ID NO: 157914 - DNA, 25 bp, Saccharomyces pastorianus
gatgattttggcaacgagcccaacc

SEQ ID NO: 157915 - DNA, 25 bp, Saccharomyces pastorianus
ttgatgatgccaccgtacctgatag

SEQ ID NO: 157916 - DNA, 25 bp, Saccharomyces pastorianus
gaatccgcaccattacagggtcaaa

SEQ ID NO: 157917 - DNA, 25 bp, Saccharomyces pastorianus
aatacttccagatcgatttgacgca

SEQ ID NO: 157918 - DNA, 25 bp, Saccharomyces pastorianus
atatcgctccacataatctcatcga

SEQ ID NO: 157919 - DNA, 25 bp, Saccharomyces pastorianus
aaagcgcttgcattttggtagattc

SEQ ID NO: 157920 - DNA, 25 bp, Saccharomyces pastorianus
aaggtaatggcgctgtttctaacag

SEQ ID NO: 157921 - DNA, 25 bp, Saccharomyces pastorianus
tggtaccggtctccaagcattttgg

SEQ ID NO: 157922 - DNA, 25 bp, Saccharomyces pastorianus
aatcgattccaatatcgctccacat

SEQ ID NO: 157923 - DNA, 25 bp, Saccharomyces pastorianus
acttgtttttgaggcagttgctaaa

SEQ ID NO: 157924 - DNA, 25 bp, Saccharomyces pastorianus
tactctagagcccaacttgtttttg

SEQ ID NO: 157925 - DNA, 25 bp, Saccharomyces pastorianus
gaagttacaaaccagtgatgcacga

SEQ ID NO: 157926 - DNA, 25 bp, Saccharomyces pastorianus
atcatgtcagggattgttggcgaat

SEQ ID NO: 157927 - DNA, 25 bp, Saccharomyces pastorianus
atctttggttgtctacctactctag

SEQ ID NO: 157928 - DNA, 25 bp, Saccharomyces pastorianus
taacatgttttggtaccggtctcca

SEQ ID NO: 157929 - DNA, 25 bp, Saccharomyces pastorianus
taagattgtgctacacactgcctcc

SEQ ID NO: 157930 - DNA, 25 bp, Saccharomyces pastorianus
tggcgcaaccggtttcattgctcta

SEQ ID NO: 157931 - DNA, 25 bp, Saccharomyces pastorianus
aaatatgctgcagacactgttgaaa

SEQ ID NO: 157932 - DNA, 25 bp, Saccharomyces pastorianus
ttcgtctactgctgctctggtgaca

SEQ ID NO: 157933 - DNA, 25 bp, Saccharomyces pastorianus
gcctccccattccattttgaaacta

SEQ ID NO: 157934 - DNA, 25 bp, Saccharomyces pastorianus
gaacgatctgttgaaagctggctat

SEQ ID NO: 157935 - DNA, 25 bp, Saccharomyces pastorianus
atgaccactgataccactgttttcg

SEQ ID NO: 157936 - DNA, 25 bp, Saccharomyces pastorianus
aggatttactaacccctgcagtgaa

SEQ ID NO: 157937 - DNA, 25 bp, Saccharomyces pastorianus
tggctatacagtcatcggctcaggt

SEQ ID NO: 157938 - DNA, 25 bp, Saccharomyces pastorianus
gaacggtacacaatctatcttggaa

SEQ ID NO: 157939 - DNA, 25 bp, Saccharomyces pastorianus
actgttttcgtttctggcgcaaccg

SEQ ID NO: 157940 - DNA, 25 bp, Saccharomyces pastorianus
gaagccggatcttacgatcgtttga

SEQ ID NO: 157941 - DNA, 25 bp, Saccharomyces pastorianus
gtaaataaacttcttccaccgcatc

SEQ ID NO: 157942 - DNA, 25 bp, Saccharomyces pastorianus
ggaagaacgcacacatctactgctg

SEQ ID NO: 157943 - DNA, 25 bp, Saccharomyces pastorianus
gcttactagagcttcgaccgggtgt

SEQ ID NO: 157944 - DNA, 25 bp, Saccharomyces pastorianus
gctgccgtggttgtgttacctcaaa

SEQ ID NO: 157945 - DNA, 25 bp, Saccharomyces pastorianus
gaaacgacctcctcaagattggtaa

SEQ ID NO: 157946 - DNA, 25 bp, Saccharomyces pastorianus
tgaagccatgatttttacccagaat

SEQ ID NO: 157947 - DNA, 25 bp, Saccharomyces pastorianus
tcttgcggcattcattttgacgtga

SEQ ID NO: 157948 - DNA, 25 bp, Saccharomyces pastorianus
gacaaagacctttcttgcggcattc

SEQ ID NO: 157949 - DNA, 25 bp, Saccharomyces pastorianus
gcatccgttcgcagataaacctagc

SEQ ID NO: 157950 - DNA, 25 bp, Saccharomyces pastorianus
cagcgctcactgatacatttattga

SEQ ID NO: 157951 - DNA, 25 bp, Saccharomyces pastorianus
gatacctaagataactgcgcatttg

SEQ ID NO: 157952 - DNA, 25 bp, Saccharomyces pastorianus
tgatatttggcctagcttacgcaat

SEQ ID NO: 157953 - DNA, 25 bp, Saccharomyces pastorianus
tagggagttcttggcatgagctaac

SEQ ID NO: 157954 - DNA, 25 bp, Saccharomyces pastorianus
atttgggagcagctcctgcgatgct

SEQ ID NO: 157955 - DNA, 25 bp, Saccharomyces pastorianus
atggctgtattatttcccctgtgac

SEQ ID NO: 157956 - DNA, 25 bp, Saccharomyces pastorianus
ttgcgcagcgatgtttagggagttc

SEQ ID NO: 157957 - DNA, 25 bp, Saccharomyces pastorianus
aatcgactgttaatactacggtagc

SEQ ID NO: 157958 - DNA, 25 bp, Saccharomyces pastorianus
tagcttacgcaatcttcggccggtt

SEQ ID NO: 157959 - DNA, 25 bp, Saccharomyces pastorianus
ggcacagcagcacgtattgcactat

SEQ ID NO: 157960 - DNA, 25 bp, Saccharomyces pastorianus
ccctgtgacagaatcctcgcgaaga

SEQ ID NO: 157961 - DNA, 25 bp, Saccharomyces pastorianus
atccatggtgctatctattgcataa

SEQ ID NO: 157962 - DNA, 25 bp, Saccharomyces pastorianus
agtcataaatcatgttttccctttc

SEQ ID NO: 157963 - DNA, 25 bp, Saccharomyces pastorianus
tcctctcagtcataaatcatgtttt

SEQ ID NO: 157964 - DNA, 25 bp, Saccharomyces pastorianus
tgccgtcgtcctctcagtcataaat

SEQ ID NO: 157965 - DNA, 25 bp, Saccharomyces pastorianus
tcataaatcatgttttccctttccc

SEQ ID NO: 157966 - DNA, 25 bp, Saccharomyces pastorianus
cataaatcatgttttccctttccct

SEQ ID NO: 157967 - DNA, 25 bp, Saccharomyces pastorianus
ctcagtcataaatcatgttttccct

SEQ ID NO: 157968 - DNA, 25 bp, Saccharomyces pastorianus
cgtcgtcctctcagtcataaatcat

SEQ ID NO: 157969 - DNA, 25 bp, Saccharomyces pastorianus
gtcgtcctctcagtcataaatcatg

SEQ ID NO: 157970 - DNA, 25 bp, Saccharomyces pastorianus
ttactgccgtcgtcctctcagtcat

SEQ ID NO: 157971 - DNA, 25 bp, Saccharomyces pastorianus
gtcctctcagtcataaatcatgttt

SEQ ID NO: 157972 - DNA, 25 bp, Saccharomyces pastorianus
tcgtcctctcagtcataaatcatgt

SEQ ID NO: 157973 - DNA, 25 bp, Saccharomyces pastorianus
gtatccagtttctctcaccaaagaa

SEQ ID NO: 157974 - DNA, 25 bp, Saccharomyces pastorianus
aacaatctgctcaagctgcccaatg

SEQ ID NO: 157975 - DNA, 25 bp, Saccharomyces pastorianus
ttcaaagtatccagtttctctcacc

SEQ ID NO: 157976 - DNA, 25 bp, Saccharomyces pastorianus
caacaccttcattgtgtccattttg

SEQ ID NO: 157977 - DNA, 25 bp, Saccharomyces pastorianus
taaggatttagtggcaagctccaag

SEQ ID NO: 157978 - DNA, 25 bp, Saccharomyces pastorianus
gtgtccattttgtacccaacatcta

SEQ ID NO: 157979 - DNA, 25 bp, Saccharomyces pastorianus
ttttgtacccaacatctaccgacgt

SEQ ID NO: 157980 - DNA, 25 bp, Saccharomyces pastorianus
gtcaagtcaatttataccacataca

SEQ ID NO: 157981 - DNA, 25 bp, Saccharomyces pastorianus
aagctgcccaatgggaatcggttct

SEQ ID NO: 157982 - DNA, 25 bp, Saccharomyces pastorianus
gaaatggatcgattacatgcaaaac

SEQ ID NO: 157983 - DNA, 25 bp, Saccharomyces pastorianus
aagctccaaggatgtcaagtcaatt

SEQ ID NO: 157984 - DNA, 25 bp, Saccharomyces pastorianus
agcctattagcatttcccgaggtaa

SEQ ID NO: 157985 - DNA, 25 bp, Saccharomyces pastorianus
attggtccttctccacagagaggca

SEQ ID NO: 157986 - DNA, 25 bp, Saccharomyces pastorianus
tggcacaacctcatccggtaaatga

SEQ ID NO: 157987 - DNA, 25 bp, Saccharomyces pastorianus
ataagtacgaactcggtccgcggat

SEQ ID NO: 157988 - DNA, 25 bp, Saccharomyces pastorianus
tagcagttggtagcccagttaaccc

SEQ ID NO: 157989 - DNA, 25 bp, Saccharomyces pastorianus
aggcattcagaatcacaacgctatt

SEQ ID NO: 157990 - DNA, 25 bp, Saccharomyces pastorianus
tatctcaactcccaatttctatcaa

SEQ ID NO: 157991 - DNA, 25 bp, Saccharomyces pastorianus
taccaaaggccaccgtttcaattct

SEQ ID NO: 157992 - DNA, 25 bp, Saccharomyces pastorianus
tcgcagcccgagtatgagcatatct

SEQ ID NO: 157993 - DNA, 25 bp, Saccharomyces pastorianus
ggtggttatacaaatcctcagccta

SEQ ID NO: 157994 - DNA, 25 bp, Saccharomyces pastorianus
caacctaatccttcatttgttccta

SEQ ID NO: 157995 - DNA, 25 bp, Saccharomyces pastorianus
gactttccttcactatttatttact

SEQ ID NO: 157996 - DNA, 25 bp, Saccharomyces pastorianus
attgctttattcgactttccttcac

SEQ ID NO: 157997 - DNA, 25 bp, Saccharomyces pastorianus
atgcagcatccattgctttattcga

SEQ ID NO: 157998 - DNA, 25 bp, Saccharomyces pastorianus
attcgactttccttcactatttatt

SEQ ID NO: 157999 - DNA, 25 bp, Saccharomyces pastorianus
ttttcttagctataaaaggcagatc

SEQ ID NO: 158000 - DNA, 25 bp, Saccharomyces pastorianus
tccattgctttattcgactttcctt

SEQ ID NO: 158001 - DNA, 25 bp, Saccharomyces pastorianus
tactttccatttcttattttagtgt

SEQ ID NO: 158002 - DNA, 25 bp, Saccharomyces pastorianus
cactatttatttactttccatttct

SEQ ID NO: 158003 - DNA, 25 bp, Saccharomyces pastorianus
gatcaatgcagcatccattgcttta

SEQ ID NO: 158004 - DNA, 25 bp, Saccharomyces pastorianus
ctttattcgactttccttcactatt

SEQ ID NO: 158005 - DNA, 25 bp, Saccharomyces pastorianus
gcatccattgctttattcgactttc

SEQ ID NO: 158006 - DNA, 25 bp, Saccharomyces pastorianus
atcctacgcgattcctataacagag

SEQ ID NO: 158007 - DNA, 25 bp, Saccharomyces pastorianus
gttcattcttcaacacccagtatta

SEQ ID NO: 158008 - DNA, 25 bp, Saccharomyces pastorianus
atgattcgatcagcaccactagcaa

SEQ ID NO: 158009 - DNA, 25 bp, Saccharomyces pastorianus
gattctgctgatttctcagaggcac

SEQ ID NO: 158010 - DNA, 25 bp, Saccharomyces pastorianus
taacgatatccctcagtcaagcaat

SEQ ID NO: 158011 - DNA, 25 bp, Saccharomyces pastorianus
aagagactttttcggctgttcattc

SEQ ID NO: 158012 - DNA, 25 bp, Saccharomyces pastorianus
caagcaatttgctacccacggatgc

SEQ ID NO: 158013 - DNA, 25 bp, Saccharomyces pastorianus
gtattaattctcaatcctacgcgat

SEQ ID NO: 158014 - DNA, 25 bp, Saccharomyces pastorianus
ggatcctggtccaatatttgacgtt

SEQ ID NO: 158015 - DNA, 25 bp, Saccharomyces pastorianus
gaggcactttctctacagaccaaaa

SEQ ID NO: 158016 - DNA, 25 bp, Saccharomyces pastorianus
gcaactcaagtggtagcttcgatag

SEQ ID NO: 158017 - DNA, 25 bp, Saccharomyces pastorianus
ttgaccccagaatctcagttgaaga

SEQ ID NO: 158018 - DNA, 25 bp, Saccharomyces pastorianus
atcttgaccccagaatctcagttga

SEQ ID NO: 158019 - DNA, 25 bp, Saccharomyces pastorianus
tcttgaccccagaatctcagttgaa

SEQ ID NO: 158020 - DNA, 25 bp, Saccharomyces pastorianus
tcagttgaagaagtctaaggctcaa

SEQ ID NO: 158021 - DNA, 25 bp, Saccharomyces pastorianus
gaccccagaatctcagttgaagaag

SEQ ID NO: 158022 - DNA, 25 bp, Saccharomyces pastorianus
aatcttgaccccagaatctcagttg

SEQ ID NO: 158023 - DNA, 25 bp, Saccharomyces pastorianus
ccagaatctcagttgaagaagtcta

SEQ ID NO: 158024 - DNA, 25 bp, Saccharomyces pastorianus
taaggctcaacaaaagactgctgaa

SEQ ID NO: 158025 - DNA, 25 bp, Saccharomyces pastorianus
tctcagttgaagaagtctaaggctc

SEQ ID NO: 158026 - DNA, 25 bp, Saccharomyces pastorianus
aaatcttgaccccagaatctcagtt

SEQ ID NO: 158027 - DNA, 25 bp, Saccharomyces pastorianus
cttgaccccagaatctcagttgaag

SEQ ID NO: 158028 - DNA, 25 bp, Saccharomyces pastorianus
agatattattaacccctcgttggat

SEQ ID NO: 158029 - DNA, 25 bp, Saccharomyces pastorianus
tcgttggatccgcagtcagcagcat

SEQ ID NO: 158030 - DNA, 25 bp, Saccharomyces pastorianus
ttccacagccattgaagatattatt

SEQ ID NO: 158031 - DNA, 25 bp, Saccharomyces pastorianus
tgagtcaaacgtgagcgatgctccc

SEQ ID NO: 158032 - DNA, 25 bp, Saccharomyces pastorianus
tacgaccgatcgtaccgatgcaagt

SEQ ID NO: 158033 - DNA, 25 bp, Saccharomyces pastorianus
accgaacgatatctttacgaccgat

SEQ ID NO: 158034 - DNA, 25 bp, Saccharomyces pastorianus
agtcagcagcatcgccggttccttc

SEQ ID NO: 158035 - DNA, 25 bp, Saccharomyces pastorianus
tccttcttcctcttttttacatgac

SEQ ID NO: 158036 - DNA, 25 bp, Saccharomyces pastorianus
gatgctccccgtattgagcctttac

SEQ ID NO: 158037 - DNA, 25 bp, Saccharomyces pastorianus
cctcttttttacatgactcaaggaa

SEQ ID NO: 158038 - DNA, 25 bp, Saccharomyces pastorianus
atgcaagtactacatcttccacagc

SEQ ID NO: 158039 - DNA, 25 bp, Saccharomyces pastorianus
agatcacattgcgagaggacacagt

SEQ ID NO: 158040 - DNA, 25 bp, Saccharomyces pastorianus
ccggagttctcttttgcatcgaaac

SEQ ID NO: 158041 - DNA, 25 bp, Saccharomyces pastorianus
tggaatgcaatacaacccaccacac

SEQ ID NO: 158042 - DNA, 25 bp, Saccharomyces pastorianus
tcttcgacgtaggagccatttccga

SEQ ID NO: 158043 - DNA, 25 bp, Saccharomyces pastorianus
atgagctgtgccgtttgcaggacac

SEQ ID NO: 158044 - DNA, 25 bp, Saccharomyces pastorianus
actgtggcagcggatactatggaat

SEQ ID NO: 158045 - DNA, 25 bp, Saccharomyces pastorianus
gtgagattctcaccaagctcttcga

SEQ ID NO: 158046 - DNA, 25 bp, Saccharomyces pastorianus
ggtaccaataccttatcccagaatt

SEQ ID NO: 158047 - DNA, 25 bp, Saccharomyces pastorianus
gaaaaattcctttatggcagcggca

SEQ ID NO: 158048 - DNA, 25 bp, Saccharomyces pastorianus
gtttaatgctagatccgcgtgcgat

SEQ ID NO: 158049 - DNA, 25 bp, Saccharomyces pastorianus
gctatgttgaatctactgtcgctaa

SEQ ID NO: 158050 - DNA, 25 bp, Saccharomyces pastorianus
tctaacctcaataacacgaccaata

SEQ ID NO: 158051 - DNA, 25 bp, Saccharomyces pastorianus
taacttgccagtatacgttaatcaa

SEQ ID NO: 158052 - DNA, 25 bp, Saccharomyces pastorianus
ggtatgtaaatctacgaattccatt

SEQ ID NO: 158053 - DNA, 25 bp, Saccharomyces pastorianus
ggagcaagcgataatatttcggcta

SEQ ID NO: 158054 - DNA, 25 bp, Saccharomyces pastorianus
atcacaacgcaatccttactcaaag

SEQ ID NO: 158055 - DNA, 25 bp, Saccharomyces pastorianus
cattctcaagctggttatattcata

SEQ ID NO: 158056 - DNA, 25 bp, Saccharomyces pastorianus
tcggctaacagcaattctataagat

SEQ ID NO: 158057 - DNA, 25 bp, Saccharomyces pastorianus
gatcaacattcattctcaagctggt

SEQ ID NO: 158058 - DNA, 25 bp, Saccharomyces pastorianus
gataaaaaatgttacggccgcatta

SEQ ID NO: 158059 - DNA, 25 bp, Saccharomyces pastorianus
gatgggagtactttacacaacgtga

SEQ ID NO: 158060 - DNA, 25 bp, Saccharomyces pastorianus
aactgattccacagattttcaatga

SEQ ID NO: 158061 - DNA, 25 bp, Saccharomyces pastorianus
acactccctactgcttttatgatga

SEQ ID NO: 158062 - DNA, 25 bp, Saccharomyces pastorianus
acctttccaaggcagctgagatcga

SEQ ID NO: 158063 - DNA, 25 bp, Saccharomyces pastorianus
tattttttcatgatggccccggtac

SEQ ID NO: 158064 - DNA, 25 bp, Saccharomyces pastorianus
ggttgcatctgtaggcgagttcatt

SEQ ID NO: 158065 - DNA, 25 bp, Saccharomyces pastorianus
agattgccaccattattttctacgc

SEQ ID NO: 158066 - DNA, 25 bp, Saccharomyces pastorianus
gtattttcattgttctgttcccttc

SEQ ID NO: 158067 - DNA, 25 bp, Saccharomyces pastorianus
agtgattatcttcctgcttaacgtg

SEQ ID NO: 158068 - DNA, 25 bp, Saccharomyces pastorianus
tgaatcttttacttttcactccggc

SEQ ID NO: 158069 - DNA, 25 bp, Saccharomyces pastorianus
tagcccaccaattggagccactgaa

SEQ ID NO: 158070 - DNA, 25 bp, Saccharomyces pastorianus
aatgtggctcttcctgatgaaatat

SEQ ID NO: 158071 - DNA, 25 bp, Saccharomyces pastorianus
gggattcaccaaccagcaatgttac

SEQ ID NO: 158072 - DNA, 25 bp, Saccharomyces pastorianus
gttctagaaatcttacatgtcttgg

SEQ ID NO: 158073 - DNA, 25 bp, Saccharomyces pastorianus
gctgcagttctagaaatcttacatg

SEQ ID NO: 158074 - DNA, 25 bp, Saccharomyces pastorianus
gaaatcttacatgtcttggataaag

SEQ ID NO: 158075 - DNA, 25 bp, Saccharomyces pastorianus
atggatagtaaggaagtactggtac

SEQ ID NO: 158076 - DNA, 25 bp, Saccharomyces pastorianus
ctggtacatgttaagaatctagaaa

SEQ ID NO: 158077 - DNA, 25 bp, Saccharomyces pastorianus
gatgctgcagttctagaaatcttac

SEQ ID NO: 158078 - DNA, 25 bp, Saccharomyces pastorianus
gcagttctagaaatcttacatgtct

SEQ ID NO: 158079 - DNA, 25 bp, Saccharomyces pastorianus
gtactggtacatgttaagaatctag

SEQ ID NO: 158080 - DNA, 25 bp, Saccharomyces pastorianus
agaacaaaagtaatgatgctgcagt

SEQ ID NO: 158081 - DNA, 25 bp, Saccharomyces pastorianus
cgtccccactgaaaagttactgaga

SEQ ID NO: 158082 - DNA, 25 bp, Saccharomyces pastorianus
ctagaaatcttacatgtcttggata

SEQ ID NO: 158083 - DNA, 25 bp, Saccharomyces pastorianus
caaagtctacaggatgattgggatc

SEQ ID NO: 158084 - DNA, 25 bp, Saccharomyces pastorianus
atgattgggatccagcaaatgatga

SEQ ID NO: 158085 - DNA, 25 bp, Saccharomyces pastorianus
caaatgatgagattgtcaagcggat

SEQ ID NO: 158086 - DNA, 25 bp, Saccharomyces pastorianus
gattgtcaagcggataatgtctgaa

SEQ ID NO: 158087 - DNA, 25 bp, Saccharomyces pastorianus
tggtatgtattttgaacattttcga

SEQ ID NO: 158088 - DNA, 25 bp, Saccharomyces pastorianus
aatgtctgaagatacgctgctacaa

SEQ ID NO: 158089 - DNA, 25 bp, Saccharomyces pastorianus
ctacaggatgattgggatccagcaa

SEQ ID NO: 158090 - DNA, 25 bp, Saccharomyces pastorianus
tacgctgctacaaaaagaaatcacg

SEQ ID NO: 158091 - DNA, 25 bp, Saccharomyces pastorianus
gaagatctcctaacaatcattgaaa

SEQ ID NO: 158092 - DNA, 25 bp, Saccharomyces pastorianus
agatttgcaaaaacctaattgctac

SEQ ID NO: 158093 - DNA, 25 bp, Saccharomyces pastorianus
gaatcaaaattacaaagtctacagg

SEQ ID NO: 158094 - DNA, 25 bp, Saccharomyces pastorianus
gcgccgagcgaaattttaaagagaa

SEQ ID NO: 158095 - DNA, 25 bp, Saccharomyces pastorianus
agaaacagtcaccaagacttcttca

SEQ ID NO: 158096 - DNA, 25 bp, Saccharomyces pastorianus
gcgcaaaacggacacaacagcagta

SEQ ID NO: 158097 - DNA, 25 bp, Saccharomyces pastorianus
ggaatggactcgattataccggcag

SEQ ID NO: 158098 - DNA, 25 bp, Saccharomyces pastorianus
gacacaacagcagtaaagacaaccg

SEQ ID NO: 158099 - DNA, 25 bp, Saccharomyces pastorianus
gacaaccggaatggactcgattata

SEQ ID NO: 158100 - DNA, 25 bp, Saccharomyces pastorianus
tggactcgattataccggcaggcgt

SEQ ID NO: 158101 - DNA, 25 bp, Saccharomyces pastorianus
aaagacaaccggaatggactcgatt

SEQ ID NO: 158102 - DNA, 25 bp, Saccharomyces pastorianus
gagaacaacagaaacagtcaccaag

SEQ ID NO: 158103 - DNA, 25 bp, Saccharomyces pastorianus
acttcttcaattaggcagcgcaaaa

SEQ ID NO: 158104 - DNA, 25 bp, Saccharomyces pastorianus
agacttcttcaattaggcagcgcaa

SEQ ID NO: 158105 - DNA, 25 bp, Saccharomyces pastorianus
gtaaatcatctagcttgacgcctgc

SEQ ID NO: 158106 - DNA, 25 bp, Saccharomyces pastorianus
aatcgcaacggcagaatttcatcgc

SEQ ID NO: 158107 - DNA, 25 bp, Saccharomyces pastorianus
tataatcgagtccattccggttgtc

SEQ ID NO: 158108 - DNA, 25 bp, Saccharomyces pastorianus
tgacgcctgccggtataatcgagtc

SEQ ID NO: 158109 - DNA, 25 bp, Saccharomyces pastorianus
tactgctgttgtgtccgttttgcgc

SEQ ID NO: 158110 - DNA, 25 bp, Saccharomyces pastorianus
tccgttttgcgctgcctaattgaag

SEQ ID NO: 158111 - DNA, 25 bp, Saccharomyces pastorianus
attccggttgtctttactgctgttg

SEQ ID NO: 158112 - DNA, 25 bp, Saccharomyces pastorianus
gtttcattctcgttcttagccaata

SEQ ID NO: 158113 - DNA, 25 bp, Saccharomyces pastorianus
tgactgtttctgttgttctctttaa

SEQ ID NO: 158114 - DNA, 25 bp, Saccharomyces pastorianus
aatttcatcgcgtgcttcgttgatc

SEQ ID NO: 158115 - DNA, 25 bp, Saccharomyces pastorianus
tcgttgatctgcttacacactttgt

SEQ ID NO: 158116 - DNA, 25 bp, Saccharomyces pastorianus
atcatcacgtttgtttgcagtcatc

SEQ ID NO: 158117 - DNA, 25 bp, Saccharomyces pastorianus
atagggctaccaaatatctcgtcaa

SEQ ID NO: 158118 - DNA, 25 bp, Saccharomyces pastorianus
tatagccattgtccccggttatata

SEQ ID NO: 158119 - DNA, 25 bp, Saccharomyces pastorianus
gaattcgacccctggttcaattata

SEQ ID NO: 158120 - DNA, 25 bp, Saccharomyces pastorianus
aagactggctctatcatgcacgcaa

SEQ ID NO: 158121 - DNA, 25 bp, Saccharomyces pastorianus
aaacgtttgtgtgctatttgcgcca

SEQ ID NO: 158122 - DNA, 25 bp, Saccharomyces pastorianus
ggatacgtgttcatcaccaacttga

SEQ ID NO: 158123 - DNA, 25 bp, Saccharomyces pastorianus
gcagctttattctacttctacatgg

SEQ ID NO: 158124 - DNA, 25 bp, Saccharomyces pastorianus
atgacgactagtgcgttcatctggc

SEQ ID NO: 158125 - DNA, 25 bp, Saccharomyces pastorianus
tgggcttgcccattgacatcagaaa

SEQ ID NO: 158126 - DNA, 25 bp, Saccharomyces pastorianus
gaggccattgccattacactattaa

SEQ ID NO: 158127 - DNA, 25 bp, Saccharomyces pastorianus
actttctcttcttccactgttaaga

SEQ ID NO: 158128 - DNA, 25 bp, Saccharomyces pastorianus
gttgaaggtgtttctccagacgact

SEQ ID NO: 158129 - DNA, 25 bp, Saccharomyces pastorianus
ttgaaggtgtttctccagacgactt

SEQ ID NO: 158130 - DNA, 25 bp, Saccharomyces pastorianus
attggttttggtcattgccactttg

SEQ ID NO: 158131 - DNA, 25 bp, Saccharomyces pastorianus
aactttctcttcttccactgttaag

SEQ ID NO: 158132 - DNA, 25 bp, Saccharomyces pastorianus
tgaaggtgtttctccagacgacttg

SEQ ID NO: 158133 - DNA, 25 bp, Saccharomyces pastorianus
tattggttttggtcattgccacttt

SEQ ID NO: 158134 - DNA, 25 bp, Saccharomyces pastorianus
ttattggttttggtcattgccactt

SEQ ID NO: 158135 - DNA, 25 bp, Saccharomyces pastorianus
ttggttttggtcattgccactttgt

SEQ ID NO: 158136 - DNA, 25 bp, Saccharomyces pastorianus
cttattggttttggtcattgccact

SEQ ID NO: 158137 - DNA, 25 bp, Saccharomyces pastorianus
acaacactttcgttggtagagctgc

SEQ ID NO: 158138 - DNA, 25 bp, Saccharomyces pastorianus
ttggtattatcttattggttttggt

SEQ ID NO: 158139 - DNA, 25 bp, Saccharomyces pastorianus
ggtgtcgaaatcttgtgttccgaca

SEQ ID NO: 158140 - DNA, 25 bp, Saccharomyces pastorianus
gctaccggtgacaacactttcgttg

SEQ ID NO: 158141 - DNA, 25 bp, Saccharomyces pastorianus
gaaggtttcatggttgttaccgcta

SEQ ID NO: 158142 - DNA, 25 bp, Saccharomyces pastorianus
gaacggtattggtattatcttattg

SEQ ID NO: 158143 - DNA, 25 bp, Saccharomyces pastorianus
gtctggactgcttgtttctacagaa

SEQ ID NO: 158144 - DNA, 25 bp, Saccharomyces pastorianus
tcatggttgttaccgctaccggtga

SEQ ID NO: 158145 - DNA, 25 bp, Saccharomyces pastorianus
cactgaagttttgaacggtattggt

SEQ ID NO: 158146 - DNA, 25 bp, Saccharomyces pastorianus
gttgttaccgctaccggtgacaaca

SEQ ID NO: 158147 - DNA, 25 bp, Saccharomyces pastorianus
aacggtattgttagaatcttgagat

SEQ ID NO: 158148 - DNA, 25 bp, Saccharomyces pastorianus
gatctccgtatcgagaactgagttg

SEQ ID NO: 158149 - DNA, 25 bp, Saccharomyces pastorianus
caattaccggaagcggccgactaga

SEQ ID NO: 158150 - DNA, 25 bp, Saccharomyces pastorianus
tcgcataggtttttccggccgggtg

SEQ ID NO: 158151 - DNA, 25 bp, Saccharomyces pastorianus
tactgtttacatttgcccgcttcgg

SEQ ID NO: 158152 - DNA, 25 bp, Saccharomyces pastorianus
ggtgctctgccgatgtactgtttac

SEQ ID NO: 158153 - DNA, 25 bp, Saccharomyces pastorianus
gaaattctcgcataggtttttccgg

SEQ ID NO: 158154 - DNA, 25 bp, Saccharomyces pastorianus
tgggtgtgcccatgcggcaattatt

SEQ ID NO: 158155 - DNA, 25 bp, Saccharomyces pastorianus
gcaattattgccagatctccgtatc

SEQ ID NO: 158156 - DNA, 25 bp, Saccharomyces pastorianus
aagcggccgactagacccgtcgtgg

SEQ ID NO: 158157 - DNA, 25 bp, Saccharomyces pastorianus
cccgcttcgggcaaatgtattttcg

SEQ ID NO: 158158 - DNA, 25 bp, Saccharomyces pastorianus
aactgagttgttggccaattaccgg

SEQ ID NO: 158159 - DNA, 25 bp, Saccharomyces pastorianus
gactcaccaaatatagctgctcttg

SEQ ID NO: 158160 - DNA, 25 bp, Saccharomyces pastorianus
gctatttaacagtcacaagggctta

SEQ ID NO: 158161 - DNA, 25 bp, Saccharomyces pastorianus
ggcaagaaccctttattggctctaa

SEQ ID NO: 158162 - DNA, 25 bp, Saccharomyces pastorianus
tcagagccataagtgttgcccacaa

SEQ ID NO: 158163 - DNA, 25 bp, Saccharomyces pastorianus
gttgcccacaaagatttctgcgaat

SEQ ID NO: 158164 - DNA, 25 bp, Saccharomyces pastorianus
aacagccttactcagtttggcaaga

SEQ ID NO: 158165 - DNA, 25 bp, Saccharomyces pastorianus
ttctgcgaatgtgatagctggcccc

SEQ ID NO: 158166 - DNA, 25 bp, Saccharomyces pastorianus
agttctcgtaaatgggccggcttag

SEQ ID NO: 158167 - DNA, 25 bp, Saccharomyces pastorianus
agaccctttacgtgcaggcgttagg

SEQ ID NO: 158168 - DNA, 25 bp, Saccharomyces pastorianus
tggtttacttgggatccagaccctt

SEQ ID NO: 158169 - DNA, 25 bp, Saccharomyces pastorianus
gctgctcttgacttgctatttaaca

SEQ ID NO: 158170 - DNA, 25 bp, Saccharomyces pastorianus
acaggtctggttagttagattgccc

SEQ ID NO: 158171 - DNA, 25 bp, Saccharomyces pastorianus
aacttgcatggccaagaactgggta

SEQ ID NO: 158172 - DNA, 25 bp, Saccharomyces pastorianus
gtacagtttgccacgaatgtcaggt

SEQ ID NO: 158173 - DNA, 25 bp, Saccharomyces pastorianus
aaaccgccattgtgggtacagtttg

SEQ ID NO: 158174 - DNA, 25 bp, Saccharomyces pastorianus
agcaaaggcaagcttacctgaagaa

SEQ ID NO: 158175 - DNA, 25 bp, Saccharomyces pastorianus
ataccatatgtgaagacgattccca

SEQ ID NO: 158176 - DNA, 25 bp, Saccharomyces pastorianus
tggagggacagaaacaacttgcatg

SEQ ID NO: 158177 - DNA, 25 bp, Saccharomyces pastorianus
agattgcccatgtttctagcagaga

SEQ ID NO: 158178 - DNA, 25 bp, Saccharomyces pastorianus
tgataacgattctataccgcacgaa

SEQ ID NO: 158179 - DNA, 25 bp, Saccharomyces pastorianus
ccacgaatgtcaggttatgccatca

SEQ ID NO: 158180 - DNA, 25 bp, Saccharomyces pastorianus
gggagtaaaatcacacttctattga

SEQ ID NO: 158181 - DNA, 25 bp, Saccharomyces pastorianus
tatcatccggagctgttcttagaca

SEQ ID NO: 158182 - DNA, 25 bp, Saccharomyces pastorianus
ggcattcatgctcgtagtgcacatt

SEQ ID NO: 158183 - DNA, 25 bp, Saccharomyces pastorianus
ttgcgaccgttctctatcatttaca

SEQ ID NO: 158184 - DNA, 25 bp, Saccharomyces pastorianus
ctggcctattggtgttactagcgta

SEQ ID NO: 158185 - DNA, 25 bp, Saccharomyces pastorianus
gaaggaaccagcttgccccggattt

SEQ ID NO: 158186 - DNA, 25 bp, Saccharomyces pastorianus
gatattaggaccaccattagcaaat

SEQ ID NO: 158187 - DNA, 25 bp, Saccharomyces pastorianus
aaatttagccgttcagtcctatatg

SEQ ID NO: 158188 - DNA, 25 bp, Saccharomyces pastorianus
aaggcgtctttggaagcttatcatc

SEQ ID NO: 158189 - DNA, 25 bp, Saccharomyces pastorianus
aaggaggccggaatgctgctaacat

SEQ ID NO: 158190 - DNA, 25 bp, Saccharomyces pastorianus
atattatctcgttggaaggcgtctt

SEQ ID NO: 158191 - DNA, 25 bp, Saccharomyces pastorianus
gatttatttatttcccttgcgaccg

SEQ ID NO: 158192 - DNA, 25 bp, Saccharomyces pastorianus
actgctataagttggtgaaagagat

SEQ ID NO: 158193 - DNA, 25 bp, Saccharomyces pastorianus
tttgcaggctcgtcgaacagtttca

SEQ ID NO: 158194 - DNA, 25 bp, Saccharomyces pastorianus
atgttgttcatggtgatgatatcac

SEQ ID NO: 158195 - DNA, 25 bp, Saccharomyces pastorianus
gaagcggcgccatatgttacagatc

SEQ ID NO: 158196 - DNA, 25 bp, Saccharomyces pastorianus
catgcgggagccattttgcaggctc

SEQ ID NO: 158197 - DNA, 25 bp, Saccharomyces pastorianus
catatgttacagatcccaattggat

SEQ ID NO: 158198 - DNA, 25 bp, Saccharomyces pastorianus
ccattttgcaggctcgtcgaacagt

SEQ ID NO: 158199 - DNA, 25 bp, Saccharomyces pastorianus
ggcgccatatgttacagatcccaat

SEQ ID NO: 158200 - DNA, 25 bp, Saccharomyces pastorianus
gatgatatcaccttagatgctaatg

SEQ ID NO: 158201 - DNA, 25 bp, Saccharomyces pastorianus
gagcatactagatcaaataggtggt

SEQ ID NO: 158202 - DNA, 25 bp, Saccharomyces pastorianus
atatcagtgccaatatgttgttcat

SEQ ID NO: 158203 - DNA, 25 bp, Saccharomyces pastorianus
gattctttccctccgtggaacaatc

SEQ ID NO: 158204 - DNA, 25 bp, Saccharomyces pastorianus
gagggccgattctttccctccgtgg

SEQ ID NO: 158205 - DNA, 25 bp, Saccharomyces pastorianus
attatctccgcaagtgatagaactc

SEQ ID NO: 158206 - DNA, 25 bp, Saccharomyces pastorianus
gaaaaaagtgagttcacccgcggcg

SEQ ID NO: 158207 - DNA, 25 bp, Saccharomyces pastorianus
gagggtattatctccgcaagtgata

SEQ ID NO: 158208 - DNA, 25 bp, Saccharomyces pastorianus
aaagtgagttcacccgcggcgctct

SEQ ID NO: 158209 - DNA, 25 bp, Saccharomyces pastorianus
cccgcggcgtcagagggtattatct

SEQ ID NO: 158210 - DNA, 25 bp, Saccharomyces pastorianus
gcgtcagagggtattatctccgcaa

SEQ ID NO: 158211 - DNA, 25 bp, Saccharomyces pastorianus
tctttccctccgtggaacaatcggc

SEQ ID NO: 158212 - DNA, 25 bp, Saccharomyces pastorianus
gctctcgtaaaacccgagggccgat

SEQ ID NO: 158213 - DNA, 25 bp, Saccharomyces pastorianus
gcggcgctctcgtaaaacccgaggg

SEQ ID NO: 158214 - DNA, 25 bp, Saccharomyces pastorianus
tctaacttccttttacctgttgcaa

SEQ ID NO: 158215 - DNA, 25 bp, Saccharomyces pastorianus
agctgtctcatacccgcgctgaaaa

SEQ ID NO: 158216 - DNA, 25 bp, Saccharomyces pastorianus
tccagatacttccatgtgcaatttc

SEQ ID NO: 158217 - DNA, 25 bp, Saccharomyces pastorianus
tcaggcagcatcatcgttcccttca

SEQ ID NO: 158218 - DNA, 25 bp, Saccharomyces pastorianus
tttgttctcaggcagcatcatcgtt

SEQ ID NO: 158219 - DNA, 25 bp, Saccharomyces pastorianus
ttgtcccaatattacgctcggcttt

SEQ ID NO: 158220 - DNA, 25 bp, Saccharomyces pastorianus
gctgagaactgggtattgtcccaat

SEQ ID NO: 158221 - DNA, 25 bp, Saccharomyces pastorianus
tattacgctcggcttttcttttcaa

SEQ ID NO: 158222 - DNA, 25 bp, Saccharomyces pastorianus
gaagctgcatttttgttctcaggca

SEQ ID NO: 158223 - DNA, 25 bp, Saccharomyces pastorianus
ttacctgttgcaagctgtctcatac

SEQ ID NO: 158224 - DNA, 25 bp, Saccharomyces pastorianus
aactttgtattccagatacttccat

SEQ ID NO: 158225 - DNA, 25 bp, Saccharomyces pastorianus
tagtccaaacaatagtggtcccacc

SEQ ID NO: 158226 - DNA, 25 bp, Saccharomyces pastorianus
gaaatcgttttcagtagcatcatgt

SEQ ID NO: 158227 - DNA, 25 bp, Saccharomyces pastorianus
aactgtaataagattctcctgcccc

SEQ ID NO: 158228 - DNA, 25 bp, Saccharomyces pastorianus
gggcaacaggaaacaatatcaattt

SEQ ID NO: 158229 - DNA, 25 bp, Saccharomyces pastorianus
agtagcatcatgtttgccactctct

SEQ ID NO: 158230 - DNA, 25 bp, Saccharomyces pastorianus
ccactctctcctaatttcctaaaga

SEQ ID NO: 158231 - DNA, 25 bp, Saccharomyces pastorianus
aagccattgaacctatctcaacgag

SEQ ID NO: 158232 - DNA, 25 bp, Saccharomyces pastorianus
gaacaaccattgttaagggcaacag

SEQ ID NO: 158233 - DNA, 25 bp, Saccharomyces pastorianus
gtcccaccccaggtaaacatggaat

SEQ ID NO: 158234 - DNA, 25 bp, Saccharomyces pastorianus
tgaactcggcccctaagcaacaaga

SEQ ID NO: 158235 - DNA, 25 bp, Saccharomyces pastorianus
gtaattacacctacgtgaactcggc

SEQ ID NO: 158236 - DNA, 25 bp, Saccharomyces pastorianus
gtaaaccccaatgttcacctaatgt

SEQ ID NO: 158237 - DNA, 25 bp, Saccharomyces pastorianus
gtcagagctacctttcatcaacaga

SEQ ID NO: 158238 - DNA, 25 bp, Saccharomyces pastorianus
atgtttcgtaatgcagcagccgatc

SEQ ID NO: 158239 - DNA, 25 bp, Saccharomyces pastorianus
cccctctttatttgcgaacgttatg

SEQ ID NO: 158240 - DNA, 25 bp, Saccharomyces pastorianus
attgcaagctcggatgtttcaccat

SEQ ID NO: 158241 - DNA, 25 bp, Saccharomyces pastorianus
tacttcatcattcttcctcatttgt

SEQ ID NO: 158242 - DNA, 25 bp, Saccharomyces pastorianus
attaccgacattgtcagcttccaac

SEQ ID NO: 158243 - DNA, 25 bp, Saccharomyces pastorianus
aggtatcgacctcgtgcttacttca

SEQ ID NO: 158244 - DNA, 25 bp, Saccharomyces pastorianus
tgaaactagtgcaaacccctcttta

SEQ ID NO: 158245 - DNA, 25 bp, Saccharomyces pastorianus
agtctttcacgctggcatctttaaa

SEQ ID NO: 158246 - DNA, 25 bp, Saccharomyces pastorianus
gaaaccttgatcaccacgaacttat

SEQ ID NO: 158247 - DNA, 25 bp, Saccharomyces pastorianus
tgtttcattttccttctatttcttt

SEQ ID NO: 158248 - DNA, 25 bp, Saccharomyces pastorianus
ttgccatcttatactcatcctaatc

SEQ ID NO: 158249 - DNA, 25 bp, Saccharomyces pastorianus
gccatcttatactcatcctaatcat

SEQ ID NO: 158250 - DNA, 25 bp, Saccharomyces pastorianus
atactcatcctaatcatctgtttca

SEQ ID NO: 158251 - DNA, 25 bp, Saccharomyces pastorianus
tcttatactcatcctaatcatctgt

SEQ ID NO: 158252 - DNA, 25 bp, Saccharomyces pastorianus
atcctaatcatctgtttcattttcc

SEQ ID NO: 158253 - DNA, 25 bp, Saccharomyces pastorianus
atctgtttcattttccttctatttc

SEQ ID NO: 158254 - DNA, 25 bp, Saccharomyces pastorianus
ttttttacttttgccatcttatact

SEQ ID NO: 158255 - DNA, 25 bp, Saccharomyces pastorianus
actcatcctaatcatctgtttcatt

SEQ ID NO: 158256 - DNA, 25 bp, Saccharomyces pastorianus
acttttgccatcttatactcatcct

SEQ ID NO: 158257 - DNA, 25 bp, Saccharomyces pastorianus
aatcatctgtttcattttccttcta

SEQ ID NO: 158258 - DNA, 25 bp, Saccharomyces pastorianus
agcttcgatggatctcactttacaa

SEQ ID NO: 158259 - DNA, 25 bp, Saccharomyces pastorianus
aacagaattgcgcatgagctgccta

SEQ ID NO: 158260 - DNA, 25 bp, Saccharomyces pastorianus
ggaatggtgcctaaatcccatggaa

SEQ ID NO: 158261 - DNA, 25 bp, Saccharomyces pastorianus
ttaaccgcaccactaacagaagatt

SEQ ID NO: 158262 - DNA, 25 bp, Saccharomyces pastorianus
gatattcatattcctatctcggatt

SEQ ID NO: 158263 - DNA, 25 bp, Saccharomyces pastorianus
gtaaattcgacatcttcaatacggt

SEQ ID NO: 158264 - DNA, 25 bp, Saccharomyces pastorianus
gacgtagagcttttatgtaacacca

SEQ ID NO: 158265 - DNA, 25 bp, Saccharomyces pastorianus
ggatcaattttcgatgcttgcctag

SEQ ID NO: 158266 - DNA, 25 bp, Saccharomyces pastorianus
gagctgcctaatgcataccatgact

SEQ ID NO: 158267 - DNA, 25 bp, Saccharomyces pastorianus
gcttgcctagtgacattatattcca

SEQ ID NO: 158268 - DNA, 25 bp, Saccharomyces pastorianus
ttcgggatgatctattacgctatgt

SEQ ID NO: 158269 - DNA, 25 bp, Saccharomyces pastorianus
tacacgtagacacggctatgattcg

SEQ ID NO: 158270 - DNA, 25 bp, Saccharomyces pastorianus
gatccctcctttaactaccaatata

SEQ ID NO: 158271 - DNA, 25 bp, Saccharomyces pastorianus
aatttaccgctgaacttctttgaga

SEQ ID NO: 158272 - DNA, 25 bp, Saccharomyces pastorianus
tatgattcgttaaccttcaattccg

SEQ ID NO: 158273 - DNA, 25 bp, Saccharomyces pastorianus
atttcccaattagtagccatagtca

SEQ ID NO: 158274 - DNA, 25 bp, Saccharomyces pastorianus
ggaatcaaatcaacctctttacttg

SEQ ID NO: 158275 - DNA, 25 bp, Saccharomyces pastorianus
tacacaattaccctttactatccat

SEQ ID NO: 158276 - DNA, 25 bp, Saccharomyces pastorianus
gaatttcacagtgggagactccaat

SEQ ID NO: 158277 - DNA, 25 bp, Saccharomyces pastorianus
tggtcccattttctagcaattgaaa

SEQ ID NO: 158278 - DNA, 25 bp, Saccharomyces pastorianus
gtagccatagtcatagcctcagaaa

SEQ ID NO: 158279 - DNA, 25 bp, Saccharomyces pastorianus
gcagtaattacctttctatttccca

SEQ ID NO: 158280 - DNA, 25 bp, Saccharomyces pastorianus
gtacttgactggaggacagcaacct

SEQ ID NO: 158281 - DNA, 25 bp, Saccharomyces pastorianus
aatcttacctgattccttgaacctg

SEQ ID NO: 158282 - DNA, 25 bp, Saccharomyces pastorianus
ggacagcaacctactgcaagtgaca

SEQ ID NO: 158283 - DNA, 25 bp, Saccharomyces pastorianus
gaacagtaatggtattgcgatggct

SEQ ID NO: 158284 - DNA, 25 bp, Saccharomyces pastorianus
attgcgatggctagtctgtacttga

SEQ ID NO: 158285 - DNA, 25 bp, Saccharomyces pastorianus
tgcgcaatgagcaggttaccataga

SEQ ID NO: 158286 - DNA, 25 bp, Saccharomyces pastorianus
acctggattcacttttggttgacca

SEQ ID NO: 158287 - DNA, 25 bp, Saccharomyces pastorianus
tgaatgctatcttaactgacgtgaa

SEQ ID NO: 158288 - DNA, 25 bp, Saccharomyces pastorianus
aagtgacaacatagcaagtttgcaa

SEQ ID NO: 158289 - DNA, 25 bp, Saccharomyces pastorianus
gggcacactgcagtcagtatcacca

SEQ ID NO: 158290 - DNA, 25 bp, Saccharomyces pastorianus
tgaagttgaccctaccacaacctcg

SEQ ID NO: 158291 - DNA, 25 bp, Saccharomyces pastorianus
gaatcccggacttggaaaacacatt

SEQ ID NO: 158292 - DNA, 25 bp, Saccharomyces pastorianus
taagttccaagaacggctttctaag

SEQ ID NO: 158293 - DNA, 25 bp, Saccharomyces pastorianus
cgcaggctccattcatcgaaaatgt

SEQ ID NO: 158294 - DNA, 25 bp, Saccharomyces pastorianus
gcaatcacagcgacgagggcgatgc

SEQ ID NO: 158295 - DNA, 25 bp, Saccharomyces pastorianus
aatgccagaggcataccgcaggctc

SEQ ID NO: 158296 - DNA, 25 bp, Saccharomyces pastorianus
atgcaggaatctaaattggctacga

SEQ ID NO: 158297 - DNA, 25 bp, Saccharomyces pastorianus
agcgacttcgaattgtgcttcaata

SEQ ID NO: 158298 - DNA, 25 bp, Saccharomyces pastorianus
ttaaggacccaagcgacttcgaatt

SEQ ID NO: 158299 - DNA, 25 bp, Saccharomyces pastorianus
agggcgatgcgagcgatgaacctat

SEQ ID NO: 158300 - DNA, 25 bp, Saccharomyces pastorianus
tatgccaaagtctgcgcaatcacag

SEQ ID NO: 158301 - DNA, 25 bp, Saccharomyces pastorianus
gcagctgaagactagaatcccggac

SEQ ID NO: 158302 - DNA, 25 bp, Saccharomyces pastorianus
tgcggcatgtttggctttagttgat

SEQ ID NO: 158303 - DNA, 25 bp, Saccharomyces pastorianus
gtgatatcattgtcgatcccactgc

SEQ ID NO: 158304 - DNA, 25 bp, Saccharomyces pastorianus
gtaacaggccctattgaaccaaaag

SEQ ID NO: 158305 - DNA, 25 bp, Saccharomyces pastorianus
agctctgccagataacttgtcaaat

SEQ ID NO: 158306 - DNA, 25 bp, Saccharomyces pastorianus
gtcattgttacccaagacagctctg

SEQ ID NO: 158307 - DNA, 25 bp, Saccharomyces pastorianus
agatgaagccgaattctccctgaga

SEQ ID NO: 158308 - DNA, 25 bp, Saccharomyces pastorianus
aattgaagatttcgctctctgtcca

SEQ ID NO: 158309 - DNA, 25 bp, Saccharomyces pastorianus
taaattacgggcagttctgacccca

SEQ ID NO: 158310 - DNA, 25 bp, Saccharomyces pastorianus
acactttagctctggagttcgtcaa

SEQ ID NO: 158311 - DNA, 25 bp, Saccharomyces pastorianus
ggttcatctgaattcgtatcacaag

SEQ ID NO: 158312 - DNA, 25 bp, Saccharomyces pastorianus
tagtatgtgcgcaagcatccctatt

SEQ ID NO: 158313 - DNA, 25 bp, Saccharomyces pastorianus
aaaatatctctgcatatatggtaat

SEQ ID NO: 158314 - DNA, 25 bp, Saccharomyces pastorianus
gaaccagttaagatgcataaaatat

SEQ ID NO: 158315 - DNA, 25 bp, Saccharomyces pastorianus
atctctgcatatatggtaataacaa

SEQ ID NO: 158316 - DNA, 25 bp, Saccharomyces pastorianus
gttaagatgcataaaatatctctgc

SEQ ID NO: 158317 - DNA, 25 bp, Saccharomyces pastorianus
atggtaataacaaggagcccaatac

SEQ ID NO: 158318 - DNA, 25 bp, Saccharomyces pastorianus
gtaataacaaggagcccaataccaa

SEQ ID NO: 158319 - DNA, 25 bp, Saccharomyces pastorianus
taataacaaggagcccaataccaag

SEQ ID NO: 158320 - DNA, 25 bp, Saccharomyces pastorianus
taacaaggagcccaataccaagaat

SEQ ID NO: 158321 - DNA, 25 bp, Saccharomyces pastorianus
gcataaaatatctctgcatatatgg

SEQ ID NO: 158322 - DNA, 25 bp, Saccharomyces pastorianus
atatctctgcatatatggtaataac

SEQ ID NO: 158323 - DNA, 25 bp, Saccharomyces pastorianus
catatatggtaataacaaggagccc

SEQ ID NO: 158324 - DNA, 25 bp, Saccharomyces pastorianus
aaacattgttatggcacattcttta

SEQ ID NO: 158325 - DNA, 25 bp, Saccharomyces pastorianus
gagagataatattcacagcgttcaa

SEQ ID NO: 158326 - DNA, 25 bp, Saccharomyces pastorianus
aaagaaatcttgtgaaccgacctga

SEQ ID NO: 158327 - DNA, 25 bp, Saccharomyces pastorianus
tccattcgagtatccgagagataat

SEQ ID NO: 158328 - DNA, 25 bp, Saccharomyces pastorianus
accgacctgagaaaaacattgttat

SEQ ID NO: 158329 - DNA, 25 bp, Saccharomyces pastorianus
gtttccattcgagtatccgagagat

SEQ ID NO: 158330 - DNA, 25 bp, Saccharomyces pastorianus
tcttcaagacctaagtttccattcg

SEQ ID NO: 158331 - DNA, 25 bp, Saccharomyces pastorianus
aagtttccattcgagtatccgagag

SEQ ID NO: 158332 - DNA, 25 bp, Saccharomyces pastorianus
cctaagtttccattcgagtatccga

SEQ ID NO: 158333 - DNA, 25 bp, Saccharomyces pastorianus
aaatcttgtgaaccgacctgagaaa

SEQ ID NO: 158334 - DNA, 25 bp, Saccharomyces pastorianus
aagacctaagtttccattcgagtat

SEQ ID NO: 158335 - DNA, 25 bp, Saccharomyces pastorianus
gggtcttacttgatggctttatatt

SEQ ID NO: 158336 - DNA, 25 bp, Saccharomyces pastorianus
gtttgaagccttgcatagatacgca

SEQ ID NO: 158337 - DNA, 25 bp, Saccharomyces pastorianus
aaccgcctccttggtggtatgtcaa

SEQ ID NO: 158338 - DNA, 25 bp, Saccharomyces pastorianus
gatttcaacaatactgcttcagagg

SEQ ID NO: 158339 - DNA, 25 bp, Saccharomyces pastorianus
atggcacattctttagggtcttact

SEQ ID NO: 158340 - DNA, 25 bp, Saccharomyces pastorianus
aaaaagctgatcctttgttccccag

SEQ ID NO: 158341 - DNA, 25 bp, Saccharomyces pastorianus
gtgatccagaacagtcaaaacggtt

SEQ ID NO: 158342 - DNA, 25 bp, Saccharomyces pastorianus
aggaatctccatcttttaaaaagct

SEQ ID NO: 158343 - DNA, 25 bp, Saccharomyces pastorianus
gtcatatcggcgctttaagcacatt

SEQ ID NO: 158344 - DNA, 25 bp, Saccharomyces pastorianus
cgccagttaggttcgaagattacaa

SEQ ID NO: 158345 - DNA, 25 bp, Saccharomyces pastorianus
tccccagcaggcgtgtcttatagag

SEQ ID NO: 158346 - DNA, 25 bp, Saccharomyces pastorianus
aaacatctggttttcattcatgggt

SEQ ID NO: 158347 - DNA, 25 bp, Saccharomyces pastorianus
tgacccatcgaatacacggccacag

SEQ ID NO: 158348 - DNA, 25 bp, Saccharomyces pastorianus
tagagcctccgcaagagatgttaca

SEQ ID NO: 158349 - DNA, 25 bp, Saccharomyces pastorianus
aatgaattttgcatacgccctcgaa

SEQ ID NO: 158350 - DNA, 25 bp, Saccharomyces pastorianus
tcattcatgggtatggcgccggatt

SEQ ID NO: 158351 - DNA, 25 bp, Saccharomyces pastorianus
gatattaagaactccgtcagcacca

SEQ ID NO: 158352 - DNA, 25 bp, Saccharomyces pastorianus
ttttgaaaacgctgccattctaccc

SEQ ID NO: 158353 - DNA, 25 bp, Saccharomyces pastorianus
gtcagcaccaactgcaataccatta

SEQ ID NO: 158354 - DNA, 25 bp, Saccharomyces pastorianus
tatagagtcccaagcttgtttcctc

SEQ ID NO: 158355 - DNA, 25 bp, Saccharomyces pastorianus
gtgcctgaggctgacttaaaacatc

SEQ ID NO: 158356 - DNA, 25 bp, Saccharomyces pastorianus
gaggatgcattccagactgaacttt

SEQ ID NO: 158357 - DNA, 25 bp, Saccharomyces pastorianus
agccaagaggtttgaactctgctag

SEQ ID NO: 158358 - DNA, 25 bp, Saccharomyces pastorianus
gccaagaggtttgaactctgctaga

SEQ ID NO: 158359 - DNA, 25 bp, Saccharomyces pastorianus
ccaagaggtttgaactctgctagaa

SEQ ID NO: 158360 - DNA, 25 bp, Saccharomyces pastorianus
agaggtttgaactctgctagaaagc

SEQ ID NO: 158361 - DNA, 25 bp, Saccharomyces pastorianus
aagaggtttgaactctgctagaaag

SEQ ID NO: 158362 - DNA, 25 bp, Saccharomyces pastorianus
aagccaagaggtttgaactctgcta

SEQ ID NO: 158363 - DNA, 25 bp, Saccharomyces pastorianus
gtaagccaagaggtttgaactctgc

SEQ ID NO: 158364 - DNA, 25 bp, Saccharomyces pastorianus
aggtaagccaagaggtttgaactct

SEQ ID NO: 158365 - DNA, 25 bp, Saccharomyces pastorianus
gaggtttgaactctgctagaaagct

SEQ ID NO: 158366 - DNA, 25 bp, Saccharomyces pastorianus
aggtttgaactctgctagaaagcta

SEQ ID NO: 158367 - DNA, 25 bp, Saccharomyces pastorianus
taagccaagaggtttgaactctgct

SEQ ID NO: 158368 - DNA, 25 bp, Saccharomyces pastorianus
atggatgtgcatcgcaaagggaaaa

SEQ ID NO: 158369 - DNA, 25 bp, Saccharomyces pastorianus
agaaatacgtttgtccctaagtgct

SEQ ID NO: 158370 - DNA, 25 bp, Saccharomyces pastorianus
gtcaagacacaagtacaagttatgg

SEQ ID NO: 158371 - DNA, 25 bp, Saccharomyces pastorianus
tacgtttgtccctaagtgctcttat

SEQ ID NO: 158372 - DNA, 25 bp, Saccharomyces pastorianus
atacgtttgtccctaagtgctctta

SEQ ID NO: 158373 - DNA, 25 bp, Saccharomyces pastorianus
acgtttgtccctaagtgctcttatg

SEQ ID NO: 158374 - DNA, 25 bp, Saccharomyces pastorianus
gtttgtccctaagtgctcttatgct

SEQ ID NO: 158375 - DNA, 25 bp, Saccharomyces pastorianus
gtacaagttatggatgtgcatcgca

SEQ ID NO: 158376 - DNA, 25 bp, Saccharomyces pastorianus
gaaatacgtttgtccctaagtgctc

SEQ ID NO: 158377 - DNA, 25 bp, Saccharomyces pastorianus
aaatacgtttgtccctaagtgctct

SEQ ID NO: 158378 - DNA, 25 bp, Saccharomyces pastorianus
atgtgcatcgcaaagggaaaaaggg

SEQ ID NO: 158379 - DNA, 25 bp, Saccharomyces pastorianus
aaaactcaactatcggcaattacca

SEQ ID NO: 158380 - DNA, 25 bp, Saccharomyces pastorianus
aaacgctgatgaggccttgaagcaa

SEQ ID NO: 158381 - DNA, 25 bp, Saccharomyces pastorianus
aataccaaatgaccgttcacaaaag

SEQ ID NO: 158382 - DNA, 25 bp, Saccharomyces pastorianus
gctgaaggtatacacgcggctgaaa

SEQ ID NO: 158383 - DNA, 25 bp, Saccharomyces pastorianus
gcgcatcaggctcaattagatcatg

SEQ ID NO: 158384 - DNA, 25 bp, Saccharomyces pastorianus
gaggaacaagcgcatcaggctcaat

SEQ ID NO: 158385 - DNA, 25 bp, Saccharomyces pastorianus
aatgaccaattgactgaactacagg

SEQ ID NO: 158386 - DNA, 25 bp, Saccharomyces pastorianus
actacaggataagctggcagccgaa

SEQ ID NO: 158387 - DNA, 25 bp, Saccharomyces pastorianus
gctattgaggaacaaacgcgccaga

SEQ ID NO: 158388 - DNA, 25 bp, Saccharomyces pastorianus
gcgccgcgctcatgaagaacagttg

SEQ ID NO: 158389 - DNA, 25 bp, Saccharomyces pastorianus
aagactcgaagatgagcgccgcgct

SEQ ID NO: 158390 - DNA, 25 bp, Saccharomyces pastorianus
ataccacagaataaagatgctaatt

SEQ ID NO: 158391 - DNA, 25 bp, Saccharomyces pastorianus
aacgaattgtgctaaaactcatgcg

SEQ ID NO: 158392 - DNA, 25 bp, Saccharomyces pastorianus
gtgctaaaactcatgcgattttcag

SEQ ID NO: 158393 - DNA, 25 bp, Saccharomyces pastorianus
gctaaaactcatgcgattttcagca

SEQ ID NO: 158394 - DNA, 25 bp, Saccharomyces pastorianus
aactcatgcgattttcagcaaaata

SEQ ID NO: 158395 - DNA, 25 bp, Saccharomyces pastorianus
gcgattttcagcaaaataccacaga

SEQ ID NO: 158396 - DNA, 25 bp, Saccharomyces pastorianus
attgtgctaaaactcatgcgatttt

SEQ ID NO: 158397 - DNA, 25 bp, Saccharomyces pastorianus
aaaactcatgcgattttcagcaaaa

SEQ ID NO: 158398 - DNA, 25 bp, Saccharomyces pastorianus
gaattgtgctaaaactcatgcgatt

SEQ ID NO: 158399 - DNA, 25 bp, Saccharomyces pastorianus
agattaggtctaaaatgccaaagga

SEQ ID NO: 158400 - DNA, 25 bp, Saccharomyces pastorianus
ttaggtctaaaatgccaaaggagta

SEQ ID NO: 158401 - DNA, 25 bp, Saccharomyces pastorianus
caacaaattccaattccttttcaga

SEQ ID NO: 158402 - DNA, 25 bp, Saccharomyces pastorianus
cgcgctagctattatatcgaatttt

SEQ ID NO: 158403 - DNA, 25 bp, Saccharomyces pastorianus
ggtcttccaaaggtttggcttacag

SEQ ID NO: 158404 - DNA, 25 bp, Saccharomyces pastorianus
aatgcatcgcgctagctattatatc

SEQ ID NO: 158405 - DNA, 25 bp, Saccharomyces pastorianus
aatctctgctggaaaaatgcatcgc

SEQ ID NO: 158406 - DNA, 25 bp, Saccharomyces pastorianus
ttttcatttgttattgggtcttcca

SEQ ID NO: 158407 - DNA, 25 bp, Saccharomyces pastorianus
tgctaattcgaatttctcaacaaat

SEQ ID NO: 158408 - DNA, 25 bp, Saccharomyces pastorianus
ggttctgcattaccagtcacattat

SEQ ID NO: 158409 - DNA, 25 bp, Saccharomyces pastorianus
gtcacattatgaaacactaacgaat

SEQ ID NO: 158410 - DNA, 25 bp, Saccharomyces pastorianus
tttaggtattggactggttctgcat

SEQ ID NO: 158411 - DNA, 25 bp, Saccharomyces pastorianus
tggcttacagtttaccaaatacttt

SEQ ID NO: 158412 - DNA, 25 bp, Saccharomyces pastorianus
ggtcccggctagaaggtcgtctcca

SEQ ID NO: 158413 - DNA, 25 bp, Saccharomyces pastorianus
agctgtagcacgtgatccttgcaga

SEQ ID NO: 158414 - DNA, 25 bp, Saccharomyces pastorianus
aaaaaatcaactgcaccatccggtc

SEQ ID NO: 158415 - DNA, 25 bp, Saccharomyces pastorianus
ggtcgtctccatttttcgaaggcga

SEQ ID NO: 158416 - DNA, 25 bp, Saccharomyces pastorianus
gatccttgcagactttcgacgtcgt

SEQ ID NO: 158417 - DNA, 25 bp, Saccharomyces pastorianus
gctacctccagagccgtaaacatga

SEQ ID NO: 158418 - DNA, 25 bp, Saccharomyces pastorianus
acaaacttcagttacaagagccatg

SEQ ID NO: 158419 - DNA, 25 bp, Saccharomyces pastorianus
aagagccatgacaccagctgtagca

SEQ ID NO: 158420 - DNA, 25 bp, Saccharomyces pastorianus
aagaaggctgttgccaaaccatgca

SEQ ID NO: 158421 - DNA, 25 bp, Saccharomyces pastorianus
aagacgctattgtagtaagacttct

SEQ ID NO: 158422 - DNA, 25 bp, Saccharomyces pastorianus
tcttcgtcaccaatgtcagcacaga

SEQ ID NO: 158423 - DNA, 25 bp, Saccharomyces pastorianus
gctttattttctccagtttcacttc

SEQ ID NO: 158424 - DNA, 25 bp, Saccharomyces pastorianus
gaagagtcttcttcctacgataaga

SEQ ID NO: 158425 - DNA, 25 bp, Saccharomyces pastorianus
tatggagtttgaaccgtacccgcag

SEQ ID NO: 158426 - DNA, 25 bp, Saccharomyces pastorianus
cttcagggtctctctgatgcagaac

SEQ ID NO: 158427 - DNA, 25 bp, Saccharomyces pastorianus
atcatgctgttcacctttgtcatag

SEQ ID NO: 158428 - DNA, 25 bp, Saccharomyces pastorianus
ttcgccctaaggaccatatctgatg

SEQ ID NO: 158429 - DNA, 25 bp, Saccharomyces pastorianus
gcagcagcccgatactgtttggaac

SEQ ID NO: 158430 - DNA, 25 bp, Saccharomyces pastorianus
aaatatcttagtctgcatcatgctg

SEQ ID NO: 158431 - DNA, 25 bp, Saccharomyces pastorianus
gatctagcttataccttcctgttga

SEQ ID NO: 158432 - DNA, 25 bp, Saccharomyces pastorianus
ggcgttaacaacgttctctagacag

SEQ ID NO: 158433 - DNA, 25 bp, Saccharomyces pastorianus
gtttcacttcgtcagactgttacag

SEQ ID NO: 158434 - DNA, 25 bp, Saccharomyces pastorianus
gcttgtatgcaaaggttgatccgtt

SEQ ID NO: 158435 - DNA, 25 bp, Saccharomyces pastorianus
tgtactaatacctcaagtctcaata

SEQ ID NO: 158436 - DNA, 25 bp, Saccharomyces pastorianus
gaaacctctttcgtattcaaagcta

SEQ ID NO: 158437 - DNA, 25 bp, Saccharomyces pastorianus
gatactaccgagtttgacgaagcac

SEQ ID NO: 158438 - DNA, 25 bp, Saccharomyces pastorianus
ggttgatccgttaaagttgctgaat

SEQ ID NO: 158439 - DNA, 25 bp, Saccharomyces pastorianus
tctctgttttcgtcgagcctaaggg

SEQ ID NO: 158440 - DNA, 25 bp, Saccharomyces pastorianus
agcacttgaagaagtctctgttttc

SEQ ID NO: 158441 - DNA, 25 bp, Saccharomyces pastorianus
ggccttgccgacaatggtgttttta

SEQ ID NO: 158442 - DNA, 25 bp, Saccharomyces pastorianus
gttcctgactacctaactgaagata

SEQ ID NO: 158443 - DNA, 25 bp, Saccharomyces pastorianus
gagcctaagggccttgccgacaatg

SEQ ID NO: 158444 - DNA, 25 bp, Saccharomyces pastorianus
aagctactaagatcagttcctgact

SEQ ID NO: 158445 - DNA, 25 bp, Saccharomyces pastorianus
aacggcagcaattctagttccccag

SEQ ID NO: 158446 - DNA, 25 bp, Saccharomyces pastorianus
agacgcaatccaccaggcagtagaa

SEQ ID NO: 158447 - DNA, 25 bp, Saccharomyces pastorianus
atgtccagacgcaatccaccaggca

SEQ ID NO: 158448 - DNA, 25 bp, Saccharomyces pastorianus
gacgcaatccaccaggcagtagaaa

SEQ ID NO: 158449 - DNA, 25 bp, Saccharomyces pastorianus
gggtcaaaacggcagcaattctagt

SEQ ID NO: 158450 - DNA, 25 bp, Saccharomyces pastorianus
ggaggtccgacgaatgcctctccct

SEQ ID NO: 158451 - DNA, 25 bp, Saccharomyces pastorianus
acgaatgcctctcccttcattaaaa

SEQ ID NO: 158452 - DNA, 25 bp, Saccharomyces pastorianus
cggcagcaattctagttccccagcg

SEQ ID NO: 158453 - DNA, 25 bp, Saccharomyces pastorianus
gagaatgggtcaaaacggcagcaat

SEQ ID NO: 158454 - DNA, 25 bp, Saccharomyces pastorianus
aaacggcagcaattctagttcccca

SEQ ID NO: 158455 - DNA, 25 bp, Saccharomyces pastorianus
caatccaccaggcagtagaaacggg

SEQ ID NO: 158456 - DNA, 25 bp, Saccharomyces pastorianus
ctgaatcagacaaaaatagcttatg

SEQ ID NO: 158457 - DNA, 25 bp, Saccharomyces pastorianus
tagctcatctcaaaaagagcagcat

SEQ ID NO: 158458 - DNA, 25 bp, Saccharomyces pastorianus
tttccgcaatcgaaaggcgttagct

SEQ ID NO: 158459 - DNA, 25 bp, Saccharomyces pastorianus
atcgaaaggcgttagctcatctcaa

SEQ ID NO: 158460 - DNA, 25 bp, Saccharomyces pastorianus
agagcagcatagtcaactgaatcag

SEQ ID NO: 158461 - DNA, 25 bp, Saccharomyces pastorianus
tacgaggctatgaatcagataaaga

SEQ ID NO: 158462 - DNA, 25 bp, Saccharomyces pastorianus
atagcttatgaacagagacttctaa

SEQ ID NO: 158463 - DNA, 25 bp, Saccharomyces pastorianus
gcagcatagtcaactgaatcagaca

SEQ ID NO: 158464 - DNA, 25 bp, Saccharomyces pastorianus
gataaagacacatttccgcaatcga

SEQ ID NO: 158465 - DNA, 25 bp, Saccharomyces pastorianus
gacacatttccgcaatcgaaaggcg

SEQ ID NO: 158466 - DNA, 25 bp, Saccharomyces pastorianus
atgaacagagacttctaaatgattt

SEQ ID NO: 158467 - DNA, 25 bp, Saccharomyces pastorianus
ggtggtgacccagacaatgctgctg

SEQ ID NO: 158468 - DNA, 25 bp, Saccharomyces pastorianus
gggttacccacaatctcctatgtac

SEQ ID NO: 158469 - DNA, 25 bp, Saccharomyces pastorianus
aagtgagggttacccacaatctcct

SEQ ID NO: 158470 - DNA, 25 bp, Saccharomyces pastorianus
gacccagacaatgctgctggtacca

SEQ ID NO: 158471 - DNA, 25 bp, Saccharomyces pastorianus
gacaatgctgctggtaccattgaat

SEQ ID NO: 158472 - DNA, 25 bp, Saccharomyces pastorianus
tgagggttacccacaatctcctatg

SEQ ID NO: 158473 - DNA, 25 bp, Saccharomyces pastorianus
tggtgaaaccaactacaatgacgct

SEQ ID NO: 158474 - DNA, 25 bp, Saccharomyces pastorianus
gggctggtggtgaaaccaactacaa

SEQ ID NO: 158475 - DNA, 25 bp, Saccharomyces pastorianus
ttatcaaacacatcaagtgagggtt

SEQ ID NO: 158476 - DNA, 25 bp, Saccharomyces pastorianus
cagagtattatcaaacacatcaagt

SEQ ID NO: 158477 - DNA, 25 bp, Saccharomyces pastorianus
ggtgacccagacaatgctgctggta

SEQ ID NO: 158478 - DNA, 25 bp, Saccharomyces pastorianus
gggttcttccaacgttgacatcgcc

SEQ ID NO: 158479 - DNA, 25 bp, Saccharomyces pastorianus
gttcttccaacgttgacatcgccat

SEQ ID NO: 158480 - DNA, 25 bp, Saccharomyces pastorianus
agcacatcattgtcgatggtaagaa

SEQ ID NO: 158481 - DNA, 25 bp, Saccharomyces pastorianus
taagaagattgctacttaccaagaa

SEQ ID NO: 158482 - DNA, 25 bp, Saccharomyces pastorianus
ttgtctagaccaaacgtcgaagttg

SEQ ID NO: 158483 - DNA, 25 bp, Saccharomyces pastorianus
ggttcttccaacgttgacatcgcca

SEQ ID NO: 158484 - DNA, 25 bp, Saccharomyces pastorianus
gtctagaccaaacgtcgaagttgtt

SEQ ID NO: 158485 - DNA, 25 bp, Saccharomyces pastorianus
acaagcacatcattgtcgatggtaa

SEQ ID NO: 158486 - DNA, 25 bp, Saccharomyces pastorianus
tcttccaacgttgacatcgccattg

SEQ ID NO: 158487 - DNA, 25 bp, Saccharomyces pastorianus
ttcttccaacgttgacatcgccatt

SEQ ID NO: 158488 - DNA, 25 bp, Saccharomyces pastorianus
tcgatggtaagaagattgctactta

SEQ ID NO: 158489 - DNA, 25 bp, Saccharomyces pastorianus
gcgaactcgatacttgctcatcatt

SEQ ID NO: 158490 - DNA, 25 bp, Saccharomyces pastorianus
acttgatccatctgtcgagcgacaa

SEQ ID NO: 158491 - DNA, 25 bp, Saccharomyces pastorianus
tgtgcgccagttgttgggtcccgaa

SEQ ID NO: 158492 - DNA, 25 bp, Saccharomyces pastorianus
aagaggcttagtgcgttccttgaag

SEQ ID NO: 158493 - DNA, 25 bp, Saccharomyces pastorianus
tattcatcccttttaatagccgcac

SEQ ID NO: 158494 - DNA, 25 bp, Saccharomyces pastorianus
taatagccgcacctttaaacgacac

SEQ ID NO: 158495 - DNA, 25 bp, Saccharomyces pastorianus
attgatttcggcatccttgtgtaga

SEQ ID NO: 158496 - DNA, 25 bp, Saccharomyces pastorianus
ggaccgcatgacgagtggacgctta

SEQ ID NO: 158497 - DNA, 25 bp, Saccharomyces pastorianus
aggtgacttcaaaactcgtgcagat

SEQ ID NO: 158498 - DNA, 25 bp, Saccharomyces pastorianus
ggctattgactactacttgatccat

SEQ ID NO: 158499 - DNA, 25 bp, Saccharomyces pastorianus
gtgacgcccagcaactttacgaaaa

SEQ ID NO: 158500 - DNA, 25 bp, Saccharomyces pastorianus
gctgttacaaggacgtggtttacca

SEQ ID NO: 158501 - DNA, 25 bp, Saccharomyces pastorianus
gggcccacaaggctcaggcaaaagt

SEQ ID NO: 158502 - DNA, 25 bp, Saccharomyces pastorianus
gatgatttttatttaactcacgagg

SEQ ID NO: 158503 - DNA, 25 bp, Saccharomyces pastorianus
ggtgaaaaatctatcggttacgcct

SEQ ID NO: 158504 - DNA, 25 bp, Saccharomyces pastorianus
aaatgccccttgttcattttcttct

SEQ ID NO: 158505 - DNA, 25 bp, Saccharomyces pastorianus
caaggctcaggcaaaagttttacaa

SEQ ID NO: 158506 - DNA, 25 bp, Saccharomyces pastorianus
tatcggttacgcctcaattgatgat

SEQ ID NO: 158507 - DNA, 25 bp, Saccharomyces pastorianus
gagacgggaaataaatgccccttgt

SEQ ID NO: 158508 - DNA, 25 bp, Saccharomyces pastorianus
ttcattttcttctcgggcccacaag

SEQ ID NO: 158509 - DNA, 25 bp, Saccharomyces pastorianus
taactcacgaggaccaattgaaact

SEQ ID NO: 158510 - DNA, 25 bp, Saccharomyces pastorianus
gtggtttaccaggtactcatgatat

SEQ ID NO: 158511 - DNA, 25 bp, Saccharomyces pastorianus
gagattgaacactccgcgttacgta

SEQ ID NO: 158512 - DNA, 25 bp, Saccharomyces pastorianus
gatattgctgtcgaagaagccatca

SEQ ID NO: 158513 - DNA, 25 bp, Saccharomyces pastorianus
tggctccgccaaagctcaggatatt

SEQ ID NO: 158514 - DNA, 25 bp, Saccharomyces pastorianus
ttgaagcctccttaccaatggttat

SEQ ID NO: 158515 - DNA, 25 bp, Saccharomyces pastorianus
taagaccttaactgggattgcaacc

SEQ ID NO: 158516 - DNA, 25 bp, Saccharomyces pastorianus
ttggccacaggcaacaaatgcggca

SEQ ID NO: 158517 - DNA, 25 bp, Saccharomyces pastorianus
tattctaagaaattgcctcgctaag

SEQ ID NO: 158518 - DNA, 25 bp, Saccharomyces pastorianus
gacacctgtagtttaattgactctg

SEQ ID NO: 158519 - DNA, 25 bp, Saccharomyces pastorianus
acgcatgcagtttctattggctccg

SEQ ID NO: 158520 - DNA, 25 bp, Saccharomyces pastorianus
gcgttacgtaggactgcccaaagta

SEQ ID NO: 158521 - DNA, 25 bp, Saccharomyces pastorianus
gatttccagatcaagcctagagtaa

SEQ ID NO: 158522 - DNA, 25 bp, Saccharomyces pastorianus
aagttcgttgagtacttccctgacg

SEQ ID NO: 158523 - DNA, 25 bp, Saccharomyces pastorianus
gtacttccctgacgaaaccttatgg

SEQ ID NO: 158524 - DNA, 25 bp, Saccharomyces pastorianus
aaatcagaggccttttggcacccca

SEQ ID NO: 158525 - DNA, 25 bp, Saccharomyces pastorianus
ttcaagccccttgctatattaagga

SEQ ID NO: 158526 - DNA, 25 bp, Saccharomyces pastorianus
ttccatttaggatcatatcgccggg

SEQ ID NO: 158527 - DNA, 25 bp, Saccharomyces pastorianus
attttatcagcttgctttacaggca

SEQ ID NO: 158528 - DNA, 25 bp, Saccharomyces pastorianus
gaaatatggtatcccacagttggta

SEQ ID NO: 158529 - DNA, 25 bp, Saccharomyces pastorianus
ggattcttcgacttgtaaacgtgga

SEQ ID NO: 158530 - DNA, 25 bp, Saccharomyces pastorianus
tggatactggtatgccctcaattct

SEQ ID NO: 158531 - DNA, 25 bp, Saccharomyces pastorianus
atcttctgtcagtttttggctaggt

SEQ ID NO: 158532 - DNA, 25 bp, Saccharomyces pastorianus
ccaagagcctttgcgagatcatcgt

SEQ ID NO: 158533 - DNA, 25 bp, Saccharomyces pastorianus
ggagcggtatctatattggaccatc

SEQ ID NO: 158534 - DNA, 25 bp, Saccharomyces pastorianus
cagcaagtctgtggtacgttattaa

SEQ ID NO: 158535 - DNA, 25 bp, Saccharomyces pastorianus
attccacttatcaagctcaggcaca

SEQ ID NO: 158536 - DNA, 25 bp, Saccharomyces pastorianus
gatgcaccttgcctgagaaatgatt

SEQ ID NO: 158537 - DNA, 25 bp, Saccharomyces pastorianus
taccgtgtattggatgcaccttgcc

SEQ ID NO: 158538 - DNA, 25 bp, Saccharomyces pastorianus
gttgctccgtatacatctggtctga

SEQ ID NO: 158539 - DNA, 25 bp, Saccharomyces pastorianus
gtgtctcattctgtccttacaatac

SEQ ID NO: 158540 - DNA, 25 bp, Saccharomyces pastorianus
gtcacatattccataccgtgtattg

SEQ ID NO: 158541 - DNA, 25 bp, Saccharomyces pastorianus
aatggcaatgtgagcctcttcgaaa

SEQ ID NO: 158542 - DNA, 25 bp, Saccharomyces pastorianus
aaatccaaagacctgctaaacgagt

SEQ ID NO: 158543 - DNA, 25 bp, Saccharomyces pastorianus
taaagagtttgcatttccccataaa

SEQ ID NO: 158544 - DNA, 25 bp, Saccharomyces pastorianus
aagtggcagctgaacagccttctac

SEQ ID NO: 158545 - DNA, 25 bp, Saccharomyces pastorianus
aaaatctcaacctgacacatccttg

SEQ ID NO: 158546 - DNA, 25 bp, Saccharomyces pastorianus
gatacgaaatttgtcattgctgaaa

SEQ ID NO: 158547 - DNA, 25 bp, Saccharomyces pastorianus
gaatttctgttatcgtttgccaacg

SEQ ID NO: 158548 - DNA, 25 bp, Saccharomyces pastorianus
gaagacgaacagcaaccaaaggttg

SEQ ID NO: 158549 - DNA, 25 bp, Saccharomyces pastorianus
gtacaatctgttcaagatcacgaat

SEQ ID NO: 158550 - DNA, 25 bp, Saccharomyces pastorianus
gaaatacgtgcctgccttgcaaaag

SEQ ID NO: 158551 - DNA, 25 bp, Saccharomyces pastorianus
gacacatccttgcaggagcagaaat

SEQ ID NO: 158552 - DNA, 25 bp, Saccharomyces pastorianus
agccttggacaagcagagcatgaaa

SEQ ID NO: 158553 - DNA, 25 bp, Saccharomyces pastorianus
ctaccctcaacgcagaatccataaa

SEQ ID NO: 158554 - DNA, 25 bp, Saccharomyces pastorianus
gaacctagcgaagcggagactacaa

SEQ ID NO: 158555 - DNA, 25 bp, Saccharomyces pastorianus
tttcgccagagtttacgaacgctgt

SEQ ID NO: 158556 - DNA, 25 bp, Saccharomyces pastorianus
ttgcccaccatatacagaaccttag

SEQ ID NO: 158557 - DNA, 25 bp, Saccharomyces pastorianus
tgtagtggcccaatttaatgcgtca

SEQ ID NO: 158558 - DNA, 25 bp, Saccharomyces pastorianus
agaccggatgtggtgcaattgccca

SEQ ID NO: 158559 - DNA, 25 bp, Saccharomyces pastorianus
gccaaatccgccgaactgattggtg

SEQ ID NO: 158560 - DNA, 25 bp, Saccharomyces pastorianus
atgttgcttctttaacaggtaccaa

SEQ ID NO: 158561 - DNA, 25 bp, Saccharomyces pastorianus
aaagtttccaggttgattcgcgaga

SEQ ID NO: 158562 - DNA, 25 bp, Saccharomyces pastorianus
agagtgttgccttccattgttaatg

SEQ ID NO: 158563 - DNA, 25 bp, Saccharomyces pastorianus
aaagatcttggctagctctccaaat

SEQ ID NO: 158564 - DNA, 25 bp, Saccharomyces pastorianus
acagccagggacattgcaaagatct

SEQ ID NO: 158565 - DNA, 25 bp, Saccharomyces pastorianus
attacgtacatgactttttcgccag

SEQ ID NO: 158566 - DNA, 25 bp, Saccharomyces pastorianus
cagaacagagagtagctatgacgaa

SEQ ID NO: 158567 - DNA, 25 bp, Saccharomyces pastorianus
atatattatgttagggctggtgggc

SEQ ID NO: 158568 - DNA, 25 bp, Saccharomyces pastorianus
ggttcctgcacatagcttagacaac

SEQ ID NO: 158569 - DNA, 25 bp, Saccharomyces pastorianus
tcaacggcgtagacacaactaaggc

SEQ ID NO: 158570 - DNA, 25 bp, Saccharomyces pastorianus
agcttagacaacatcaacggcgtag

SEQ ID NO: 158571 - DNA, 25 bp, Saccharomyces pastorianus
atacggttcctgcacatagcttaga

SEQ ID NO: 158572 - DNA, 25 bp, Saccharomyces pastorianus
ggcacaaagagttgtgagaactcca

SEQ ID NO: 158573 - DNA, 25 bp, Saccharomyces pastorianus
ggagaggctatacggttcctgcaca

SEQ ID NO: 158574 - DNA, 25 bp, Saccharomyces pastorianus
taccgaccgcatacatgaggagagg

SEQ ID NO: 158575 - DNA, 25 bp, Saccharomyces pastorianus
gattcaggaatatactcagaggcac

SEQ ID NO: 158576 - DNA, 25 bp, Saccharomyces pastorianus
caactaaggcgtctgttatgggtac

SEQ ID NO: 158577 - DNA, 25 bp, Saccharomyces pastorianus
tgaagacgttgatgccaactgggaa

SEQ ID NO: 158578 - DNA, 25 bp, Saccharomyces pastorianus
gaatgccgccatggaagtacaagaa

SEQ ID NO: 158579 - DNA, 25 bp, Saccharomyces pastorianus
gctgcaggcattaataccattagag

SEQ ID NO: 158580 - DNA, 25 bp, Saccharomyces pastorianus
gtgcacctttggctatcgatgagat

SEQ ID NO: 158581 - DNA, 25 bp, Saccharomyces pastorianus
agaaatatgctctcgtgcacctttg

SEQ ID NO: 158582 - DNA, 25 bp, Saccharomyces pastorianus
gatgagattctactacaggatctgg

SEQ ID NO: 158583 - DNA, 25 bp, Saccharomyces pastorianus
gttgtatagagacgtggcaccagaa

SEQ ID NO: 158584 - DNA, 25 bp, Saccharomyces pastorianus
attgctggtatcgaactgttagcca

SEQ ID NO: 158585 - DNA, 25 bp, Saccharomyces pastorianus
gatatagatcccgaagctgccttcc

SEQ ID NO: 158586 - DNA, 25 bp, Saccharomyces pastorianus
tttggtgccgacaacagtgttcaag

SEQ ID NO: 158587 - DNA, 25 bp, Saccharomyces pastorianus
aaagaccgcaatttggtgccgacaa

SEQ ID NO: 158588 - DNA, 25 bp, Saccharomyces pastorianus
gatccaatgactattcctggcttga

SEQ ID NO: 158589 - DNA, 25 bp, Saccharomyces pastorianus
gaggcctggtttagagcaattcaaa

SEQ ID NO: 158590 - DNA, 25 bp, Saccharomyces pastorianus
aagcgtggtccacacgatgcagcaa

SEQ ID NO: 158591 - DNA, 25 bp, Saccharomyces pastorianus
tttctgtgccatcagttcgacggaa

SEQ ID NO: 158592 - DNA, 25 bp, Saccharomyces pastorianus
aaagaagccggctggactcccgaga

SEQ ID NO: 158593 - DNA, 25 bp, Saccharomyces pastorianus
tattattacaagaagcggccctgcg

SEQ ID NO: 158594 - DNA, 25 bp, Saccharomyces pastorianus
aaaatcatgcagcagcttggccctt

SEQ ID NO: 158595 - DNA, 25 bp, Saccharomyces pastorianus
acgcggttatggtgcgcatctaatg

SEQ ID NO: 158596 - DNA, 25 bp, Saccharomyces pastorianus
ggtacgctgatgcaatgttctatgt

SEQ ID NO: 158597 - DNA, 25 bp, Saccharomyces pastorianus
ttcgacggaacaggtacgcggttat

SEQ ID NO: 158598 - DNA, 25 bp, Saccharomyces pastorianus
gaaatcgcatattgtgaggcctggt

SEQ ID NO: 158599 - DNA, 25 bp, Saccharomyces pastorianus
aacctgagcaggctgagaccaataa

SEQ ID NO: 158600 - DNA, 25 bp, Saccharomyces pastorianus
tgaagaaatacaacctgagcaggct

SEQ ID NO: 158601 - DNA, 25 bp, Saccharomyces pastorianus
gatcacttggatggagctacgacgg

SEQ ID NO: 158602 - DNA, 25 bp, Saccharomyces pastorianus
catcagattgaagaggatcacttgg

SEQ ID NO: 158603 - DNA, 25 bp, Saccharomyces pastorianus
gagctacgacggatcccgaagttaa

SEQ ID NO: 158604 - DNA, 25 bp, Saccharomyces pastorianus
gaccaataaacagagggcaccgata

SEQ ID NO: 158605 - DNA, 25 bp, Saccharomyces pastorianus
cagagggcaccgataaagagaataa

SEQ ID NO: 158606 - DNA, 25 bp, Saccharomyces pastorianus
gatggagctacgacggatcccgaag

SEQ ID NO: 158607 - DNA, 25 bp, Saccharomyces pastorianus
atacaacctgagcaggctgagacca

SEQ ID NO: 158608 - DNA, 25 bp, Saccharomyces pastorianus
ctgagcaggctgagaccaataaaca

SEQ ID NO: 158609 - DNA, 25 bp, Saccharomyces pastorianus
cacttggatggagctacgacggatc

SEQ ID NO: 158610 - DNA, 25 bp, Saccharomyces pastorianus
gatccaaattttgtccacgttaata

SEQ ID NO: 158611 - DNA, 25 bp, Saccharomyces pastorianus
gatcatatggaatcccacaacctct

SEQ ID NO: 158612 - DNA, 25 bp, Saccharomyces pastorianus
cgttttccccaaagatcctattgtg

SEQ ID NO: 158613 - DNA, 25 bp, Saccharomyces pastorianus
gcaattcacttcttatcgatcttag

SEQ ID NO: 158614 - DNA, 25 bp, Saccharomyces pastorianus
ttatctcgatgtggccaattgtcaa

SEQ ID NO: 158615 - DNA, 25 bp, Saccharomyces pastorianus
gcttctgtcctagatgcatacgtga

SEQ ID NO: 158616 - DNA, 25 bp, Saccharomyces pastorianus
atggcggttaagtcattatctcgat

SEQ ID NO: 158617 - DNA, 25 bp, Saccharomyces pastorianus
gaccagacactatttttaccctaca

SEQ ID NO: 158618 - DNA, 25 bp, Saccharomyces pastorianus
atgtccggacgttttgaggaggcta

SEQ ID NO: 158619 - DNA, 25 bp, Saccharomyces pastorianus
ttgccagtgctcatttcccagaaaa

SEQ ID NO: 158620 - DNA, 25 bp, Saccharomyces pastorianus
gagtttggctgataatgctcgtgca

SEQ ID NO: 158621 - DNA, 25 bp, Saccharomyces pastorianus
tcggcaaggttcatatcgggtatat

SEQ ID NO: 158622 - DNA, 25 bp, Saccharomyces pastorianus
aaccattaggtgtagccgttgttat

SEQ ID NO: 158623 - DNA, 25 bp, Saccharomyces pastorianus
cgggatcttctacggtaacttcttg

SEQ ID NO: 158624 - DNA, 25 bp, Saccharomyces pastorianus
atttggtgccatttttcggcaaggt

SEQ ID NO: 158625 - DNA, 25 bp, Saccharomyces pastorianus
gcaatggccctaagtgatattctaa

SEQ ID NO: 158626 - DNA, 25 bp, Saccharomyces pastorianus
ggaacgaattcaacgcatttcaggc

SEQ ID NO: 158627 - DNA, 25 bp, Saccharomyces pastorianus
agccgttgttatggaagcttctcat

SEQ ID NO: 158628 - DNA, 25 bp, Saccharomyces pastorianus
atgcgagaaggctccaagttcaaga

SEQ ID NO: 158629 - DNA, 25 bp, Saccharomyces pastorianus
acggtaacttcttgtatgcttggag

SEQ ID NO: 158630 - DNA, 25 bp, Saccharomyces pastorianus
ggtctactagatactccacaaagat

SEQ ID NO: 158631 - DNA, 25 bp, Saccharomyces pastorianus
gcatttcaggcgctatcaagacaat

SEQ ID NO: 158632 - DNA, 25 bp, Saccharomyces pastorianus
gtttcttactatggcaaccctacga

SEQ ID NO: 158633 - DNA, 25 bp, Saccharomyces pastorianus
aagagctacgtcagcaagagataga

SEQ ID NO: 158634 - DNA, 25 bp, Saccharomyces pastorianus
gaaaatggacccacagacgctcatt

SEQ ID NO: 158635 - DNA, 25 bp, Saccharomyces pastorianus
gtaccaaccatctaaggtgagctcc

SEQ ID NO: 158636 - DNA, 25 bp, Saccharomyces pastorianus
gacatcgcacactaagggtgataca

SEQ ID NO: 158637 - DNA, 25 bp, Saccharomyces pastorianus
tgctccttctgctaaccaaggagat

SEQ ID NO: 158638 - DNA, 25 bp, Saccharomyces pastorianus
ggtgagctccaatgtgcagcaacca

SEQ ID NO: 158639 - DNA, 25 bp, Saccharomyces pastorianus
tacaagtaaggccaacggtgctcct

SEQ ID NO: 158640 - DNA, 25 bp, Saccharomyces pastorianus
aaagtcgttgatgacatcgcacact

SEQ ID NO: 158641 - DNA, 25 bp, Saccharomyces pastorianus
gatgaagctcttagtgtggatgata

SEQ ID NO: 158642 - DNA, 25 bp, Saccharomyces pastorianus
gacgctcattactaaggccaataag

SEQ ID NO: 158643 - DNA, 25 bp, Saccharomyces pastorianus
aactgttgactttacccatggtggc

SEQ ID NO: 158644 - DNA, 25 bp, Saccharomyces pastorianus
tgatggcgcctggttccaagatgac

SEQ ID NO: 158645 - DNA, 25 bp, Saccharomyces pastorianus
gatttggttctatccgaacaacagt

SEQ ID NO: 158646 - DNA, 25 bp, Saccharomyces pastorianus
agttctgttcattccaggtttacaa

SEQ ID NO: 158647 - DNA, 25 bp, Saccharomyces pastorianus
gtttcatacatttcccgtgatggcg

SEQ ID NO: 158648 - DNA, 25 bp, Saccharomyces pastorianus
tcccacatctttgcactagactgtg

SEQ ID NO: 158649 - DNA, 25 bp, Saccharomyces pastorianus
ggagaaattgcctccacgtttcata

SEQ ID NO: 158650 - DNA, 25 bp, Saccharomyces pastorianus
ggcaaacgattacccactggattct

SEQ ID NO: 158651 - DNA, 25 bp, Saccharomyces pastorianus
tcttttcgccctacaattcatttat

SEQ ID NO: 158652 - DNA, 25 bp, Saccharomyces pastorianus
ggtgaaacctgatgtccccatagtg

SEQ ID NO: 158653 - DNA, 25 bp, Saccharomyces pastorianus
ggttccaagatgacgctcttttcgc

SEQ ID NO: 158654 - DNA, 25 bp, Saccharomyces pastorianus
tcacgaatccaggttatttttacag

SEQ ID NO: 158655 - DNA, 25 bp, Saccharomyces pastorianus
gtttccgctggaaggagacgacgaa

SEQ ID NO: 158656 - DNA, 25 bp, Saccharomyces pastorianus
ttactgccataggattgggcctgct

SEQ ID NO: 158657 - DNA, 25 bp, Saccharomyces pastorianus
ttaaggctaaactccagcaagcttg

SEQ ID NO: 158658 - DNA, 25 bp, Saccharomyces pastorianus
agagagtcacaaccaacccaagggc

SEQ ID NO: 158659 - DNA, 25 bp, Saccharomyces pastorianus
ccagcaagcttgacggaatgtttcc

SEQ ID NO: 158660 - DNA, 25 bp, Saccharomyces pastorianus
gattgggcctgctcacagaggatat

SEQ ID NO: 158661 - DNA, 25 bp, Saccharomyces pastorianus
gaatttcttccaatggactgtctta

SEQ ID NO: 158662 - DNA, 25 bp, Saccharomyces pastorianus
aaaacgtgctagatccagaactcca

SEQ ID NO: 158663 - DNA, 25 bp, Saccharomyces pastorianus
gatcaagatcgccatttacagtgga

SEQ ID NO: 158664 - DNA, 25 bp, Saccharomyces pastorianus
caggactccgccaagaagaccgaaa

SEQ ID NO: 158665 - DNA, 25 bp, Saccharomyces pastorianus
atctgactcaaacatggacggcccc

SEQ ID NO: 158666 - DNA, 25 bp, Saccharomyces pastorianus
ctttagcagtgtctttctcatggga

SEQ ID NO: 158667 - DNA, 25 bp, Saccharomyces pastorianus
ataggtcagcattccatatttggtt

SEQ ID NO: 158668 - DNA, 25 bp, Saccharomyces pastorianus
gaagccgctttagtctgtgatgtct

SEQ ID NO: 158669 - DNA, 25 bp, Saccharomyces pastorianus
gaccgtgttgcagcggattttaact

SEQ ID NO: 158670 - DNA, 25 bp, Saccharomyces pastorianus
tatcgtgaacgcaccttcgggaaac

SEQ ID NO: 158671 - DNA, 25 bp, Saccharomyces pastorianus
cattcggccatcgttatcttagtta

SEQ ID NO: 158672 - DNA, 25 bp, Saccharomyces pastorianus
aatccaggttttttgaggcgtcatt

SEQ ID NO: 158673 - DNA, 25 bp, Saccharomyces pastorianus
atgtctttgaatcctccaatgccaa

SEQ ID NO: 158674 - DNA, 25 bp, Saccharomyces pastorianus
gaagttcctttacttggtattgcta

SEQ ID NO: 158675 - DNA, 25 bp, Saccharomyces pastorianus
gaaggttttttcaggcatcggtggt

SEQ ID NO: 158676 - DNA, 25 bp, Saccharomyces pastorianus
taagattccctccaactgcttgtct

SEQ ID NO: 158677 - DNA, 25 bp, Saccharomyces pastorianus
aagtttagtctgttgcgctcttgct

SEQ ID NO: 158678 - DNA, 25 bp, Saccharomyces pastorianus
agcatcccctataggagctggcgcg

SEQ ID NO: 158679 - DNA, 25 bp, Saccharomyces pastorianus
tgaatcgattacatcctgtctctgg

SEQ ID NO: 158680 - DNA, 25 bp, Saccharomyces pastorianus
ggtcttgtaagatctccttgtggcg

SEQ ID NO: 158681 - DNA, 25 bp, Saccharomyces pastorianus
gctcttccagtggtcttgtaagatc

SEQ ID NO: 158682 - DNA, 25 bp, Saccharomyces pastorianus
tccttgtggcgctgcagttgggaaa

SEQ ID NO: 158683 - DNA, 25 bp, Saccharomyces pastorianus
ggcgcgtccgttgtggaattagcaa

SEQ ID NO: 158684 - DNA, 25 bp, Saccharomyces pastorianus
tacatcctgtctctggcctaagatt

SEQ ID NO: 158685 - DNA, 25 bp, Saccharomyces pastorianus
gattgccgggttagaatcgcagatt

SEQ ID NO: 158686 - DNA, 25 bp, Saccharomyces pastorianus
agcaatatcgttcttcacgctgaat

SEQ ID NO: 158687 - DNA, 25 bp, Saccharomyces pastorianus
tgcgttgcattcctggtccaaaaat

SEQ ID NO: 158688 - DNA, 25 bp, Saccharomyces pastorianus
gatacttggcctagtttcgtttact

SEQ ID NO: 158689 - DNA, 25 bp, Saccharomyces pastorianus
ttaggcttactagtctccacttttg

SEQ ID NO: 158690 - DNA, 25 bp, Saccharomyces pastorianus
tctccacttttgcatacgtcggtat

SEQ ID NO: 158691 - DNA, 25 bp, Saccharomyces pastorianus
tcgccttgctgatatctcttggata

SEQ ID NO: 158692 - DNA, 25 bp, Saccharomyces pastorianus
aaaactggaccgtacattgctaaga

SEQ ID NO: 158693 - DNA, 25 bp, Saccharomyces pastorianus
gattactgctatccccttagtatta

SEQ ID NO: 158694 - DNA, 25 bp, Saccharomyces pastorianus
gtattatgtctattcgctttctatt

SEQ ID NO: 158695 - DNA, 25 bp, Saccharomyces pastorianus
aacgtcgctcttcatgtctatatgg

SEQ ID NO: 158696 - DNA, 25 bp, Saccharomyces pastorianus
tcatatcgatctttagcgccggtaa

SEQ ID NO: 158697 - DNA, 25 bp, Saccharomyces pastorianus
ttcgtttacttcttggtcttcgtca

SEQ ID NO: 158698 - DNA, 25 bp, Saccharomyces pastorianus
aagggtcccaactatcgcaatcatc

SEQ ID NO: 158699 - DNA, 25 bp, Saccharomyces pastorianus
tggatcccgggtactttgacgaatt

SEQ ID NO: 158700 - DNA, 25 bp, Saccharomyces pastorianus
actgactccgaaccttctttggtga

SEQ ID NO: 158701 - DNA, 25 bp, Saccharomyces pastorianus
ggtcttccacacaatcctacatata

SEQ ID NO: 158702 - DNA, 25 bp, Saccharomyces pastorianus
aagcctgacttgctggtcgtattaa

SEQ ID NO: 158703 - DNA, 25 bp, Saccharomyces pastorianus
gactctaatgacaatcccaccgaaa

SEQ ID NO: 158704 - DNA, 25 bp, Saccharomyces pastorianus
tatgtgtctaccagatggatcccgg

SEQ ID NO: 158705 - DNA, 25 bp, Saccharomyces pastorianus
ttgtcctatttgaagagagccgcca

SEQ ID NO: 158706 - DNA, 25 bp, Saccharomyces pastorianus
ttaatgtctgctggtgttcacttgg

SEQ ID NO: 158707 - DNA, 25 bp, Saccharomyces pastorianus
ttcggaatccggtggcattatccta

SEQ ID NO: 158708 - DNA, 25 bp, Saccharomyces pastorianus
ggcattatcctatttctgggtacaa

SEQ ID NO: 158709 - DNA, 25 bp, Saccharomyces pastorianus
tctattgttaaagcctccaactgga

SEQ ID NO: 158710 - DNA, 25 bp, Saccharomyces pastorianus
ttctattgttaaagcctccaactgg

SEQ ID NO: 158711 - DNA, 25 bp, Saccharomyces pastorianus
gggtcaatccgcaggtaaattggct

SEQ ID NO: 158712 - DNA, 25 bp, Saccharomyces pastorianus
ttgttaaagcctccaactggagatt

SEQ ID NO: 158713 - DNA, 25 bp, Saccharomyces pastorianus
gtcggccgtgtcgttttgatcaaaa

SEQ ID NO: 158714 - DNA, 25 bp, Saccharomyces pastorianus
actgattctattgttaaagcctcca

SEQ ID NO: 158715 - DNA, 25 bp, Saccharomyces pastorianus
gatcaaaaagggtcaatccgcaggt

SEQ ID NO: 158716 - DNA, 25 bp, Saccharomyces pastorianus
gtccactgattctattgttaaagcc

SEQ ID NO: 158717 - DNA, 25 bp, Saccharomyces pastorianus
gattctattgttaaagcctccaact

SEQ ID NO: 158718 - DNA, 25 bp, Saccharomyces pastorianus
tattgttaaagcctccaactggaga

SEQ ID NO: 158719 - DNA, 25 bp, Saccharomyces pastorianus
taaagcctccaactggagattagtc

SEQ ID NO: 158720 - DNA, 25 bp, Saccharomyces pastorianus
gtttcaattggagggctcagctgca

SEQ ID NO: 158721 - DNA, 25 bp, Saccharomyces pastorianus
gacacgttattgaactctaagtggt

SEQ ID NO: 158722 - DNA, 25 bp, Saccharomyces pastorianus
ggctcagctgcatactactttgata

SEQ ID NO: 158723 - DNA, 25 bp, Saccharomyces pastorianus
gatatttttgagcttggacctgcag

SEQ ID NO: 158724 - DNA, 25 bp, Saccharomyces pastorianus
ttaccagggacgtgtcggcgatgca

SEQ ID NO: 158725 - DNA, 25 bp, Saccharomyces pastorianus
agtgctttgcacgttctaatgagtt

SEQ ID NO: 158726 - DNA, 25 bp, Saccharomyces pastorianus
aaattcaaggttctcgacgctggtg

SEQ ID NO: 158727 - DNA, 25 bp, Saccharomyces pastorianus
gaagacattttgaagggccgtataa

SEQ ID NO: 158728 - DNA, 25 bp, Saccharomyces pastorianus
cgaatttaacatcggctcgtccaaa

SEQ ID NO: 158729 - DNA, 25 bp, Saccharomyces pastorianus
agaaagtactttcctgattaccagg

SEQ ID NO: 158730 - DNA, 25 bp, Saccharomyces pastorianus
atacgaccagatgttgtttgaggat

SEQ ID NO: 158731 - DNA, 25 bp, Saccharomyces pastorianus
tttttccttgttctctctcgcttcc

SEQ ID NO: 158732 - DNA, 25 bp, Saccharomyces pastorianus
tctttttccttgttctctctcgctt

SEQ ID NO: 158733 - DNA, 25 bp, Saccharomyces pastorianus
ttttctttttccttgttctctctcg

SEQ ID NO: 158734 - DNA, 25 bp, Saccharomyces pastorianus
ttttccttgttctctctcgcttcct

SEQ ID NO: 158735 - DNA, 25 bp, Saccharomyces pastorianus
agacaatacaaccaaccttcctcca

SEQ ID NO: 158736 - DNA, 25 bp, Saccharomyces pastorianus
caatacaaccaaccttcctccactt

SEQ ID NO: 158737 - DNA, 25 bp, Saccharomyces pastorianus
gacaatacaaccaaccttcctccac

SEQ ID NO: 158738 - DNA, 25 bp, Saccharomyces pastorianus
ctttttccttgttctctctcgcttc

SEQ ID NO: 158739 - DNA, 25 bp, Saccharomyces pastorianus
acaatacaaccaaccttcctccact

SEQ ID NO: 158740 - DNA, 25 bp, Saccharomyces pastorianus
tttctttttccttgttctctctcgc

SEQ ID NO: 158741 - DNA, 25 bp, Saccharomyces pastorianus
ttctttttccttgttctctctcgct

SEQ ID NO: 158742 - DNA, 25 bp, Saccharomyces pastorianus
gcggcgaaggcgacactttggtcaa

SEQ ID NO: 158743 - DNA, 25 bp, Saccharomyces pastorianus
aagacagtttcaccttacgctattc

SEQ ID NO: 158744 - DNA, 25 bp, Saccharomyces pastorianus
aaagggccatctcttgcggaaacaa

SEQ ID NO: 158745 - DNA, 25 bp, Saccharomyces pastorianus
taagctgggtacaatcttcaacgat

SEQ ID NO: 158746 - DNA, 25 bp, Saccharomyces pastorianus
gtaccttccatctgtcgtcaagaat

SEQ ID NO: 158747 - DNA, 25 bp, Saccharomyces pastorianus
agtatgggaccctggacttccaaga

SEQ ID NO: 158748 - DNA, 25 bp, Saccharomyces pastorianus
acgtatccaaattatcgccaactct

SEQ ID NO: 158749 - DNA, 25 bp, Saccharomyces pastorianus
gtgttcattctcttaagtaccttcc

SEQ ID NO: 158750 - DNA, 25 bp, Saccharomyces pastorianus
atttctggattgagagcccactctg

SEQ ID NO: 158751 - DNA, 25 bp, Saccharomyces pastorianus
gaaacaagcctgttttttgccagtt

SEQ ID NO: 158752 - DNA, 25 bp, Saccharomyces pastorianus
ttcctacaagttctggtcccttaat

SEQ ID NO: 158753 - DNA, 25 bp, Saccharomyces pastorianus
gacgcctattcaacaggttcttctt

SEQ ID NO: 158754 - DNA, 25 bp, Saccharomyces pastorianus
actccatgctgattgccacaggtgt

SEQ ID NO: 158755 - DNA, 25 bp, Saccharomyces pastorianus
ctccttggttgctgtttctgataga

SEQ ID NO: 158756 - DNA, 25 bp, Saccharomyces pastorianus
cttaacaactgtagagcactccatg

SEQ ID NO: 158757 - DNA, 25 bp, Saccharomyces pastorianus
cgatggatatgctagctaccgactt

SEQ ID NO: 158758 - DNA, 25 bp, Saccharomyces pastorianus
agctaccgacttggcagattacttg

SEQ ID NO: 158759 - DNA, 25 bp, Saccharomyces pastorianus
gtaattggtaactccttggttgctg

SEQ ID NO: 158760 - DNA, 25 bp, Saccharomyces pastorianus
gctggtcatccttacggcattgata

SEQ ID NO: 158761 - DNA, 25 bp, Saccharomyces pastorianus
ttcatacagttgagcgacgcctatt

SEQ ID NO: 158762 - DNA, 25 bp, Saccharomyces pastorianus
atggaagctgctctcacgatggata

SEQ ID NO: 158763 - DNA, 25 bp, Saccharomyces pastorianus
gattgaatcaatcaccactgggtgc

SEQ ID NO: 158764 - DNA, 25 bp, Saccharomyces pastorianus
tcctatcgttgtggtggctttgcaa

SEQ ID NO: 158765 - DNA, 25 bp, Saccharomyces pastorianus
gtggctttgcaatctactactactc

SEQ ID NO: 158766 - DNA, 25 bp, Saccharomyces pastorianus
cctgctgaatctgccgttgcggtga

SEQ ID NO: 158767 - DNA, 25 bp, Saccharomyces pastorianus
tgattgccaacgctacgtccagtaa

SEQ ID NO: 158768 - DNA, 25 bp, Saccharomyces pastorianus
ccgttgcggtgaagtctttggtctt

SEQ ID NO: 158769 - DNA, 25 bp, Saccharomyces pastorianus
aagcgtttgccaagttgtgtgtgaa

SEQ ID NO: 158770 - DNA, 25 bp, Saccharomyces pastorianus
atgcctgtttcggaagcgtttgcca

SEQ ID NO: 158771 - DNA, 25 bp, Saccharomyces pastorianus
actactactccttctgcgttgattg

SEQ ID NO: 158772 - DNA, 25 bp, Saccharomyces pastorianus
gaatgagaagcctcctgctgaatct

SEQ ID NO: 158773 - DNA, 25 bp, Saccharomyces pastorianus
gaatccgctagagctttcatcttgg

SEQ ID NO: 158774 - DNA, 25 bp, Saccharomyces pastorianus
taaggatccaagattggctcgcgat

SEQ ID NO: 158775 - DNA, 25 bp, Saccharomyces pastorianus
atgacagctcttttgccagcttaga

SEQ ID NO: 158776 - DNA, 25 bp, Saccharomyces pastorianus
gtttcgattctactaatgacagctc

SEQ ID NO: 158777 - DNA, 25 bp, Saccharomyces pastorianus
gcaatttcctagaagagcgcctgat

SEQ ID NO: 158778 - DNA, 25 bp, Saccharomyces pastorianus
aacttctctagttcgcaattggcta

SEQ ID NO: 158779 - DNA, 25 bp, Saccharomyces pastorianus
taaaatactatcgtacctttggcgt

SEQ ID NO: 158780 - DNA, 25 bp, Saccharomyces pastorianus
gtacctttcggagctaactactctt

SEQ ID NO: 158781 - DNA, 25 bp, Saccharomyces pastorianus
gagcgcctgatcaatgccaataaat

SEQ ID NO: 158782 - DNA, 25 bp, Saccharomyces pastorianus
gtattattcaccacgtacgtttgga

SEQ ID NO: 158783 - DNA, 25 bp, Saccharomyces pastorianus
tagggtttcggacctctaccacaag

SEQ ID NO: 158784 - DNA, 25 bp, Saccharomyces pastorianus
aatcgactgctcaaagacgcaccag

SEQ ID NO: 158785 - DNA, 25 bp, Saccharomyces pastorianus
agacgcaccagtattgatgttcaag

SEQ ID NO: 158786 - DNA, 25 bp, Saccharomyces pastorianus
attgcaaagacttcaaacgtggtaa

SEQ ID NO: 158787 - DNA, 25 bp, Saccharomyces pastorianus
gaacgaaagttctaacggaggatgg

SEQ ID NO: 158788 - DNA, 25 bp, Saccharomyces pastorianus
aatcctcatgcagagctatgggttt

SEQ ID NO: 158789 - DNA, 25 bp, Saccharomyces pastorianus
gcagagctatgggtttacagtatga

SEQ ID NO: 158790 - DNA, 25 bp, Saccharomyces pastorianus
ggaaaatcgtctttacttcatttct

SEQ ID NO: 158791 - DNA, 25 bp, Saccharomyces pastorianus
ggaacatcgttccatccaagaataa

SEQ ID NO: 158792 - DNA, 25 bp, Saccharomyces pastorianus
tcataatactctgtttattccggca

SEQ ID NO: 158793 - DNA, 25 bp, Saccharomyces pastorianus
ggttatgttgatattcttccgattg

SEQ ID NO: 158794 - DNA, 25 bp, Saccharomyces pastorianus
gtttattccggcaaatgaaacattt

SEQ ID NO: 158795 - DNA, 25 bp, Saccharomyces pastorianus
atttgataggcctcataatggttat

SEQ ID NO: 158796 - DNA, 25 bp, Saccharomyces pastorianus
tggtgaatggcccacttgcctttga

SEQ ID NO: 158797 - DNA, 25 bp, Saccharomyces pastorianus
tatatatatttattctgccatttcc

SEQ ID NO: 158798 - DNA, 25 bp, Saccharomyces pastorianus
tattctgccatttccaaaaagacca

SEQ ID NO: 158799 - DNA, 25 bp, Saccharomyces pastorianus
tgtgaccaacgacggaagctccttt

SEQ ID NO: 158800 - DNA, 25 bp, Saccharomyces pastorianus
aatgatattgcatacgtccaagata

SEQ ID NO: 158801 - DNA, 25 bp, Saccharomyces pastorianus
atacgggctgtgaccaacgacggaa

SEQ ID NO: 158802 - DNA, 25 bp, Saccharomyces pastorianus
attctaatgatattgcatacgtcca

SEQ ID NO: 158803 - DNA, 25 bp, Saccharomyces pastorianus
gaccatacgggctgtgaccaacgac

SEQ ID NO: 158804 - DNA, 25 bp, Saccharomyces pastorianus
tttccaaaaagaccatacgggctgt

SEQ ID NO: 158805 - DNA, 25 bp, Saccharomyces pastorianus
cgggctgtgaccaacgacggaagct

SEQ ID NO: 158806 - DNA, 25 bp, Saccharomyces pastorianus
tgccatttccaaaaagaccatacgg

SEQ ID NO: 158807 - DNA, 25 bp, Saccharomyces pastorianus
gaccaacgacggaagctcctttctt

SEQ ID NO: 158808 - DNA, 25 bp, Saccharomyces pastorianus
gggcactgttttgttgctaaaaagt

SEQ ID NO: 158809 - DNA, 25 bp, Saccharomyces pastorianus
aagagtagctcgtcctttgaggaga

SEQ ID NO: 158810 - DNA, 25 bp, Saccharomyces pastorianus
ggaataatccttgtactcctgatat

SEQ ID NO: 158811 - DNA, 25 bp, Saccharomyces pastorianus
taaaggtgtcgttttctgttgtaag

SEQ ID NO: 158812 - DNA, 25 bp, Saccharomyces pastorianus
gctaaaaagtatacctcaccattca

SEQ ID NO: 158813 - DNA, 25 bp, Saccharomyces pastorianus
tggctctagcaatatggtcccctaa

SEQ ID NO: 158814 - DNA, 25 bp, Saccharomyces pastorianus
gttaaatctgtctacgatgactcat

SEQ ID NO: 158815 - DNA, 25 bp, Saccharomyces pastorianus
tttcaacccaaatatcacgagctgc

SEQ ID NO: 158816 - DNA, 25 bp, Saccharomyces pastorianus
ctcactgtggagtcaataactgcgt

SEQ ID NO: 158817 - DNA, 25 bp, Saccharomyces pastorianus
gcaacgatctaggtctttatgttac

SEQ ID NO: 158818 - DNA, 25 bp, Saccharomyces pastorianus
gaacccaactctaattacaccaatg

SEQ ID NO: 158819 - DNA, 25 bp, Saccharomyces pastorianus
atctaacaaatgcttcttttttgta

SEQ ID NO: 158820 - DNA, 25 bp, Saccharomyces pastorianus
gagcttatctaacaaatgcttcttt

SEQ ID NO: 158821 - DNA, 25 bp, Saccharomyces pastorianus
gcttatctaacaaatgcttcttttt

SEQ ID NO: 158822 - DNA, 25 bp, Saccharomyces pastorianus
tcgaaaagttcatcaggaatgcgct

SEQ ID NO: 158823 - DNA, 25 bp, Saccharomyces pastorianus
cgaaaagttcatcaggaatgcgctc

SEQ ID NO: 158824 - DNA, 25 bp, Saccharomyces pastorianus
tttttgtatcgaaaagttcatcagg

SEQ ID NO: 158825 - DNA, 25 bp, Saccharomyces pastorianus
ttgtatcgaaaagttcatcaggaat

SEQ ID NO: 158826 - DNA, 25 bp, Saccharomyces pastorianus
gaaaagttcatcaggaatgcgctca

SEQ ID NO: 158827 - DNA, 25 bp, Saccharomyces pastorianus
aaaagttcatcaggaatgcgctcaa

SEQ ID NO: 158828 - DNA, 25 bp, Saccharomyces pastorianus
atgagcttatctaacaaatgcttct

SEQ ID NO: 158829 - DNA, 25 bp, Saccharomyces pastorianus
cttatctaacaaatgcttctttttt

SEQ ID NO: 158830 - DNA, 25 bp, Saccharomyces pastorianus
ttggcttattggtatgttgcaaaaa

SEQ ID NO: 158831 - DNA, 25 bp, Saccharomyces pastorianus
gctttcttgataaggaattccccgt

SEQ ID NO: 158832 - DNA, 25 bp, Saccharomyces pastorianus
ttcggcacttcttatgtacactttg

SEQ ID NO: 158833 - DNA, 25 bp, Saccharomyces pastorianus
gaatacttcgaatttcggcacttct

SEQ ID NO: 158834 - DNA, 25 bp, Saccharomyces pastorianus
gaattccccgtctatttcctacata

SEQ ID NO: 158835 - DNA, 25 bp, Saccharomyces pastorianus
tgataaggaattccccgtctatttc

SEQ ID NO: 158836 - DNA, 25 bp, Saccharomyces pastorianus
gaatttcggcacttcttatgtacac

SEQ ID NO: 158837 - DNA, 25 bp, Saccharomyces pastorianus
aatactctctgaaagaatacttcga

SEQ ID NO: 158838 - DNA, 25 bp, Saccharomyces pastorianus
gcacttcttatgtacactttgatgg

SEQ ID NO: 158839 - DNA, 25 bp, Saccharomyces pastorianus
gtaatttggcttattggtatgttgc

SEQ ID NO: 158840 - DNA, 25 bp, Saccharomyces pastorianus
acactttgatggaagctttcttgat

SEQ ID NO: 158841 - DNA, 25 bp, Saccharomyces pastorianus
aagtttacagatattgctaccacat

SEQ ID NO: 158842 - DNA, 25 bp, Saccharomyces pastorianus
gaccagttaccgttcctcgtctatt

SEQ ID NO: 158843 - DNA, 25 bp, Saccharomyces pastorianus
aatgcacttttaataacagttttcg

SEQ ID NO: 158844 - DNA, 25 bp, Saccharomyces pastorianus
gctgaaaaaggcagaaactcaattc

SEQ ID NO: 158845 - DNA, 25 bp, Saccharomyces pastorianus
aacagttttcgaccccaaagatgtg

SEQ ID NO: 158846 - DNA, 25 bp, Saccharomyces pastorianus
aatcgttcttttagtcaatctttca

SEQ ID NO: 158847 - DNA, 25 bp, Saccharomyces pastorianus
attgtagaccagttaccgttcctcg

SEQ ID NO: 158848 - DNA, 25 bp, Saccharomyces pastorianus
cccctactgagaaagtcgaagaaga

SEQ ID NO: 158849 - DNA, 25 bp, Saccharomyces pastorianus
gaaattgacgtgaatgaactgctga

SEQ ID NO: 158850 - DNA, 25 bp, Saccharomyces pastorianus
cagatattgctaccacatccttgaa

SEQ ID NO: 158851 - DNA, 25 bp, Saccharomyces pastorianus
taaccacagctagattaaattgtag

SEQ ID NO: 158852 - DNA, 25 bp, Saccharomyces pastorianus
ggctccaggagcgttgatattgtaa

SEQ ID NO: 158853 - DNA, 25 bp, Saccharomyces pastorianus
aatcatcaaatccaagtccggcact

SEQ ID NO: 158854 - DNA, 25 bp, Saccharomyces pastorianus
tccaagtccggcactcaaaaggatt

SEQ ID NO: 158855 - DNA, 25 bp, Saccharomyces pastorianus
aattcctctgtgaactggctactga

SEQ ID NO: 158856 - DNA, 25 bp, Saccharomyces pastorianus
gtaactgctatcgataaacaggtcg

SEQ ID NO: 158857 - DNA, 25 bp, Saccharomyces pastorianus
ctatcgagaaattcctctgtgaact

SEQ ID NO: 158858 - DNA, 25 bp, Saccharomyces pastorianus
tatgacttgaagactggctccagga

SEQ ID NO: 158859 - DNA, 25 bp, Saccharomyces pastorianus
ggagcgttgatattgtaactgctat

SEQ ID NO: 158860 - DNA, 25 bp, Saccharomyces pastorianus
cctctgtgaactggctactgaaaaa

SEQ ID NO: 158861 - DNA, 25 bp, Saccharomyces pastorianus
ccggcactcaaaaggattatgactt

SEQ ID NO: 158862 - DNA, 25 bp, Saccharomyces pastorianus
gaccattgatctagcttctatcgag

SEQ ID NO: 158863 - DNA, 25 bp, Saccharomyces pastorianus
tttttctgccgtttctcttctgcat

SEQ ID NO: 158864 - DNA, 25 bp, Saccharomyces pastorianus
ttctgccgtttctcttctgcattat

SEQ ID NO: 158865 - DNA, 25 bp, Saccharomyces pastorianus
tttctgccgtttctcttctgcatta

SEQ ID NO: 158866 - DNA, 25 bp, Saccharomyces pastorianus
ctgccgtttctcttctgcattattt

SEQ ID NO: 158867 - DNA, 25 bp, Saccharomyces pastorianus
ttctcttctgcattattttcttcct

SEQ ID NO: 158868 - DNA, 25 bp, Saccharomyces pastorianus
gaagcaaaaggagactgattctgaa

SEQ ID NO: 158869 - DNA, 25 bp, Saccharomyces pastorianus
ggagactgattctgaaatttaatat

SEQ ID NO: 158870 - DNA, 25 bp, Saccharomyces pastorianus
gactagaagcaaaaggagactgatt

SEQ ID NO: 158871 - DNA, 25 bp, Saccharomyces pastorianus
ttttttctgccgtttctcttctgca

SEQ ID NO: 158872 - DNA, 25 bp, Saccharomyces pastorianus
gcaaaaggagactgattctgaaatt

SEQ ID NO: 158873 - DNA, 25 bp, Saccharomyces pastorianus
gtttctcttctgcattattttcttc

SEQ ID NO: 158874 - DNA, 25 bp, Saccharomyces pastorianus
catcttaccaggtccatctggataa

SEQ ID NO: 158875 - DNA, 25 bp, Saccharomyces pastorianus
tttacaccatttccctgactaaaat

SEQ ID NO: 158876 - DNA, 25 bp, Saccharomyces pastorianus
attacgtttttctgatttacaccat

SEQ ID NO: 158877 - DNA, 25 bp, Saccharomyces pastorianus
gagaagttggatgcctctatcgacg

SEQ ID NO: 158878 - DNA, 25 bp, Saccharomyces pastorianus
taatcggatactgcgtttgaatcat

SEQ ID NO: 158879 - DNA, 25 bp, Saccharomyces pastorianus
agtccggcttgttatacttgacgca

SEQ ID NO: 158880 - DNA, 25 bp, Saccharomyces pastorianus
attgccgtgcgtggacatcccggac

SEQ ID NO: 158881 - DNA, 25 bp, Saccharomyces pastorianus
atggttggaaccttggccattgccg

SEQ ID NO: 158882 - DNA, 25 bp, Saccharomyces pastorianus
agagggcacagcgaccatcttacca

SEQ ID NO: 158883 - DNA, 25 bp, Saccharomyces pastorianus
tgcctctatcgacgtttgcataatc

SEQ ID NO: 158884 - DNA, 25 bp, Saccharomyces pastorianus
actgcatcgcggtatccacagaggg

SEQ ID NO: 158885 - DNA, 25 bp, Saccharomyces pastorianus
aagagcagtgtacgacctaccggcg

SEQ ID NO: 158886 - DNA, 25 bp, Saccharomyces pastorianus
gagtttgcctatgtggatccggcaa

SEQ ID NO: 158887 - DNA, 25 bp, Saccharomyces pastorianus
agagagcctgacttctgggttatca

SEQ ID NO: 158888 - DNA, 25 bp, Saccharomyces pastorianus
gatgtccacgagctaccatctaaat

SEQ ID NO: 158889 - DNA, 25 bp, Saccharomyces pastorianus
aagtacctacggacactagcacgac

SEQ ID NO: 158890 - DNA, 25 bp, Saccharomyces pastorianus
aacaattctggtgtgggaagcgcta

SEQ ID NO: 158891 - DNA, 25 bp, Saccharomyces pastorianus
gccaatatggcgactgttccctcaa

SEQ ID NO: 158892 - DNA, 25 bp, Saccharomyces pastorianus
gaccagagattattccattgcaaga

SEQ ID NO: 158893 - DNA, 25 bp, Saccharomyces pastorianus
tagacaacggtaccggtcgtactgg

SEQ ID NO: 158894 - DNA, 25 bp, Saccharomyces pastorianus
gattgagtttcaaccttcccaagga

SEQ ID NO: 158895 - DNA, 25 bp, Saccharomyces pastorianus
gtgcaaacgtttaccaatcgccaac

SEQ ID NO: 158896 - DNA, 25 bp, Saccharomyces pastorianus
gatattatcatgcaaggacccttct

SEQ ID NO: 158897 - DNA, 25 bp, Saccharomyces pastorianus
gaaatgcatccaaccttttctcgaa

SEQ ID NO: 158898 - DNA, 25 bp, Saccharomyces pastorianus
ttaccagtcaccttagaccaggagt

SEQ ID NO: 158899 - DNA, 25 bp, Saccharomyces pastorianus
tattaatgtacaccaatgcacccgc

SEQ ID NO: 158900 - DNA, 25 bp, Saccharomyces pastorianus
aagactgcagtcaagatgcccgtcg

SEQ ID NO: 158901 - DNA, 25 bp, Saccharomyces pastorianus
gatgtctttgaatccgcaccgaatt

SEQ ID NO: 158902 - DNA, 25 bp, Saccharomyces pastorianus
tatgtcagtctttaagctcttcgag

SEQ ID NO: 158903 - DNA, 25 bp, Saccharomyces pastorianus
gaccaggagtatacatgccacgaat

SEQ ID NO: 158904 - DNA, 25 bp, Saccharomyces pastorianus
gtacagtcgctatgttgaaggctac

SEQ ID NO: 158905 - DNA, 25 bp, Saccharomyces pastorianus
gaaaccctgatttacgctaccgtag

SEQ ID NO: 158906 - DNA, 25 bp, Saccharomyces pastorianus
gatgcccgtcggagaggagaactat

SEQ ID NO: 158907 - DNA, 25 bp, Saccharomyces pastorianus
gattcgtgtagcagcacacctttcg

SEQ ID NO: 158908 - DNA, 25 bp, Saccharomyces pastorianus
gtatgggaacactcctgacatcttg

SEQ ID NO: 158909 - DNA, 25 bp, Saccharomyces pastorianus
tagcagcacacctttcgtgactggg

SEQ ID NO: 158910 - DNA, 25 bp, Saccharomyces pastorianus
ccatctgcagtctttagtttcttgt

SEQ ID NO: 158911 - DNA, 25 bp, Saccharomyces pastorianus
tgtacacttgtcagttcgtcctttg

SEQ ID NO: 158912 - DNA, 25 bp, Saccharomyces pastorianus
ctcgcatttggcgattcacgggtgg

SEQ ID NO: 158913 - DNA, 25 bp, Saccharomyces pastorianus
ggtattattaccatctgcagtcttt

SEQ ID NO: 158914 - DNA, 25 bp, Saccharomyces pastorianus
agttcgtcctttggcttggatgagt

SEQ ID NO: 158915 - DNA, 25 bp, Saccharomyces pastorianus
tgagtttaacttaacaacgtgcggg

SEQ ID NO: 158916 - DNA, 25 bp, Saccharomyces pastorianus
acacactgatatttttgggttcggg

SEQ ID NO: 158917 - DNA, 25 bp, Saccharomyces pastorianus
agtttcttgttctgtacacttgtca

SEQ ID NO: 158918 - DNA, 25 bp, Saccharomyces pastorianus
aggtgtgctgctacacgaatccatc

SEQ ID NO: 158919 - DNA, 25 bp, Saccharomyces pastorianus
gaactcccgattgcacacagagcat

SEQ ID NO: 158920 - DNA, 25 bp, Saccharomyces pastorianus
aaaattgcctgaggacgccttggcg

SEQ ID NO: 158921 - DNA, 25 bp, Saccharomyces pastorianus
tgcgcaccgagttcaaaccattcga

SEQ ID NO: 158922 - DNA, 25 bp, Saccharomyces pastorianus
aggaatccaactgcactttcaaatt

SEQ ID NO: 158923 - DNA, 25 bp, Saccharomyces pastorianus
tgaggagattcttcgagccgtgctg

SEQ ID NO: 158924 - DNA, 25 bp, Saccharomyces pastorianus
agcctggccaagtagtctgcgatgt

SEQ ID NO: 158925 - DNA, 25 bp, Saccharomyces pastorianus
gggttttacaatcacaggccacatt

SEQ ID NO: 158926 - DNA, 25 bp, Saccharomyces pastorianus
attgccacacagttcaggacttttc

SEQ ID NO: 158927 - DNA, 25 bp, Saccharomyces pastorianus
atacgtgctcgattatgatttctgg

SEQ ID NO: 158928 - DNA, 25 bp, Saccharomyces pastorianus
gaaggatgtcatcgttttggctaac

SEQ ID NO: 158929 - DNA, 25 bp, Saccharomyces pastorianus
aaccatgaaatgctcgttctgtccc

SEQ ID NO: 158930 - DNA, 25 bp, Saccharomyces pastorianus
caaatacttttctgtgcctctgatg

SEQ ID NO: 158931 - DNA, 25 bp, Saccharomyces pastorianus
atacgttgctggataccgtgctgta

SEQ ID NO: 158932 - DNA, 25 bp, Saccharomyces pastorianus
gaggccctacctattctagttgagg

SEQ ID NO: 158933 - DNA, 25 bp, Saccharomyces pastorianus
aagaatggtctagtcttacccacgc

SEQ ID NO: 158934 - DNA, 25 bp, Saccharomyces pastorianus
gcaacccacttacttacatctgaaa

SEQ ID NO: 158935 - DNA, 25 bp, Saccharomyces pastorianus
agttccgccatcgagaaatcgtcaa

SEQ ID NO: 158936 - DNA, 25 bp, Saccharomyces pastorianus
gattcgatagtcactccattggacg

SEQ ID NO: 158937 - DNA, 25 bp, Saccharomyces pastorianus
gcctctgatgcgcaattcatggaat

SEQ ID NO: 158938 - DNA, 25 bp, Saccharomyces pastorianus
ggaattgtactcttgccagaagtta

SEQ ID NO: 158939 - DNA, 25 bp, Saccharomyces pastorianus
atccaccgtggcaatcagcgaaatt

SEQ ID NO: 158940 - DNA, 25 bp, Saccharomyces pastorianus
aatatcttcttctccacagaaagag

SEQ ID NO: 158941 - DNA, 25 bp, Saccharomyces pastorianus
gggaaatatcttcttctccacagaa

SEQ ID NO: 158942 - DNA, 25 bp, Saccharomyces pastorianus
gacgcaggccaggaaaaatgtggaa

SEQ ID NO: 158943 - DNA, 25 bp, Saccharomyces pastorianus
atcttcttctccacagaaagagacg

SEQ ID NO: 158944 - DNA, 25 bp, Saccharomyces pastorianus
gaaagagacgcaggccaggaaaaat

SEQ ID NO: 158945 - DNA, 25 bp, Saccharomyces pastorianus
aaactgctcggggaaatatcttctt

SEQ ID NO: 158946 - DNA, 25 bp, Saccharomyces pastorianus
gaaatatcttcttctccacagaaag

SEQ ID NO: 158947 - DNA, 25 bp, Saccharomyces pastorianus
ggaaatatcttcttctccacagaaa

SEQ ID NO: 158948 - DNA, 25 bp, Saccharomyces pastorianus
tccacagaaagagacgcaggccagg

SEQ ID NO: 158949 - DNA, 25 bp, Saccharomyces pastorianus
ttcttctccacagaaagagacgcag

SEQ ID NO: 158950 - DNA, 25 bp, Saccharomyces pastorianus
gcaggccaggaaaaatgtggaatat

SEQ ID NO: 158951 - DNA, 25 bp, Saccharomyces pastorianus
agtgtcataatcctttgcgctgtct

SEQ ID NO: 158952 - DNA, 25 bp, Saccharomyces pastorianus
gcatatttgtcagtccttcacggaa

SEQ ID NO: 158953 - DNA, 25 bp, Saccharomyces pastorianus
aatgccctgcagcatttcttcctag

SEQ ID NO: 158954 - DNA, 25 bp, Saccharomyces pastorianus
cctttgcgctgtctctttgaagaaa

SEQ ID NO: 158955 - DNA, 25 bp, Saccharomyces pastorianus
agagcactgggtcacttcggaaaaa

SEQ ID NO: 158956 - DNA, 25 bp, Saccharomyces pastorianus
ggttagtcttagtttaactctcttg

SEQ ID NO: 158957 - DNA, 25 bp, Saccharomyces pastorianus
ttttccgaatttccattacgtattg

SEQ ID NO: 158958 - DNA, 25 bp, Saccharomyces pastorianus
agatatcgattaattccttggaagt

SEQ ID NO: 158959 - DNA, 25 bp, Saccharomyces pastorianus
ttacgtattggatcttgtgcgcata

SEQ ID NO: 158960 - DNA, 25 bp, Saccharomyces pastorianus
ggttttttcagttggccaacactct

SEQ ID NO: 158961 - DNA, 25 bp, Saccharomyces pastorianus
aaaagatcggcacggcaatgccctg

SEQ ID NO: 158962 - DNA, 25 bp, Saccharomyces pastorianus
gcttttacaagactgcccttctgaa

SEQ ID NO: 158963 - DNA, 25 bp, Saccharomyces pastorianus
tacaagcagttgactagcacctcgc

SEQ ID NO: 158964 - DNA, 25 bp, Saccharomyces pastorianus
aaggccacgtctttcttggcttacg

SEQ ID NO: 158965 - DNA, 25 bp, Saccharomyces pastorianus
acatttcacttctatatcgacggag

SEQ ID NO: 158966 - DNA, 25 bp, Saccharomyces pastorianus
atcatccacggagccaaggtttgaa

SEQ ID NO: 158967 - DNA, 25 bp, Saccharomyces pastorianus
atcctttctgaatgccctattacaa

SEQ ID NO: 158968 - DNA, 25 bp, Saccharomyces pastorianus
gcccttctgaactatcatctgctag

SEQ ID NO: 158969 - DNA, 25 bp, Saccharomyces pastorianus
gaaggaacttttgcatgccactaga

SEQ ID NO: 158970 - DNA, 25 bp, Saccharomyces pastorianus
gagattatcaacagaccggcttact

SEQ ID NO: 158971 - DNA, 25 bp, Saccharomyces pastorianus
tgaaaactctacctcatcaaacggg

SEQ ID NO: 158972 - DNA, 25 bp, Saccharomyces pastorianus
ccggaattcactcctcttattatga

SEQ ID NO: 158973 - DNA, 25 bp, Saccharomyces pastorianus
ttgtgcttcggaggaattgcaaaac

SEQ ID NO: 158974 - DNA, 25 bp, Saccharomyces pastorianus
actgtgttgaaatatttgttgctta

SEQ ID NO: 158975 - DNA, 25 bp, Saccharomyces pastorianus
ggaggaattgcaaaaccagaccaat

SEQ ID NO: 158976 - DNA, 25 bp, Saccharomyces pastorianus
ggaagcttttgtgcttcggaggaat

SEQ ID NO: 158977 - DNA, 25 bp, Saccharomyces pastorianus
tgtgtggaagcttttgtgcttcgga

SEQ ID NO: 158978 - DNA, 25 bp, Saccharomyces pastorianus
agcttttgtgcttcggaggaattgc

SEQ ID NO: 158979 - DNA, 25 bp, Saccharomyces pastorianus
gcttttgtgcttcggaggaattgca

SEQ ID NO: 158980 - DNA, 25 bp, Saccharomyces pastorianus
ttttgtgcttcggaggaattgcaaa

SEQ ID NO: 158981 - DNA, 25 bp, Saccharomyces pastorianus
tattatgtgtggaagcttttgtgct

SEQ ID NO: 158982 - DNA, 25 bp, Saccharomyces pastorianus
tatttgttgcttattatgtgtggaa

SEQ ID NO: 158983 - DNA, 25 bp, Saccharomyces pastorianus
ttcggaggaattgcaaaaccagacc

SEQ ID NO: 158984 - DNA, 25 bp, Saccharomyces pastorianus
gaactacgctggctcacgagtcgat

SEQ ID NO: 158985 - DNA, 25 bp, Saccharomyces pastorianus
gatttccagccctttattgatagcg

SEQ ID NO: 158986 - DNA, 25 bp, Saccharomyces pastorianus
atgactatactccacgattttcaga

SEQ ID NO: 158987 - DNA, 25 bp, Saccharomyces pastorianus
attttcagagccaccttcggagtat

SEQ ID NO: 158988 - DNA, 25 bp, Saccharomyces pastorianus
tgtcatttacacctcgttaaaccca

SEQ ID NO: 158989 - DNA, 25 bp, Saccharomyces pastorianus
agtcgatcatccctatccaaatatt

SEQ ID NO: 158990 - DNA, 25 bp, Saccharomyces pastorianus
atgtgcctcgtctgtcgtttaatga

SEQ ID NO: 158991 - DNA, 25 bp, Saccharomyces pastorianus
gaagcattccgccattatgacaagt

SEQ ID NO: 158992 - DNA, 25 bp, Saccharomyces pastorianus
gagttcaaccgcgattaagttcgaa

SEQ ID NO: 158993 - DNA, 25 bp, Saccharomyces pastorianus
cgcagattccgtcgccagaacaaaa

SEQ ID NO: 158994 - DNA, 25 bp, Saccharomyces pastorianus
ggtagacctattgcctcaagattta

SEQ ID NO: 158995 - DNA, 25 bp, Saccharomyces pastorianus
caactattcccagagctactattat

SEQ ID NO: 158996 - DNA, 25 bp, Saccharomyces pastorianus
gtcaactattcccagagctactatt

SEQ ID NO: 158997 - DNA, 25 bp, Saccharomyces pastorianus
tagtagtcaactattcccagagcta

SEQ ID NO: 158998 - DNA, 25 bp, Saccharomyces pastorianus
gagctactattatagccccatctac

SEQ ID NO: 158999 - DNA, 25 bp, Saccharomyces pastorianus
gtagtcaactattcccagagctact

SEQ ID NO: 159000 - DNA, 25 bp, Saccharomyces pastorianus
tcatggatatgatagtagtcaacta

SEQ ID NO: 159001 - DNA, 25 bp, Saccharomyces pastorianus
gatagtagtcaactattcccagagc

SEQ ID NO: 159002 - DNA, 25 bp, Saccharomyces pastorianus
aactattcccagagctactattata

SEQ ID NO: 159003 - DNA, 25 bp, Saccharomyces pastorianus
attcccagagctactattatagccc

SEQ ID NO: 159004 - DNA, 25 bp, Saccharomyces pastorianus
tagtcaactattcccagagctacta

SEQ ID NO: 159005 - DNA, 25 bp, Saccharomyces pastorianus
cccagagctactattatagccccat

SEQ ID NO: 159006 - DNA, 25 bp, Saccharomyces pastorianus
aactccttttccatcatttcttggt

SEQ ID NO: 159007 - DNA, 25 bp, Saccharomyces pastorianus
gtgagtgaatcatttcagaacctgg

SEQ ID NO: 159008 - DNA, 25 bp, Saccharomyces pastorianus
acagagcaagactaggtttattacc

SEQ ID NO: 159009 - DNA, 25 bp, Saccharomyces pastorianus
tatctcatcacagggtatagtcacc

SEQ ID NO: 159010 - DNA, 25 bp, Saccharomyces pastorianus
ggagtgtataaactctacacctggt

SEQ ID NO: 159011 - DNA, 25 bp, Saccharomyces pastorianus
gaaactcctcgttacaaagcctaag

SEQ ID NO: 159012 - DNA, 25 bp, Saccharomyces pastorianus
gtcgtagccggttatttatcgcaaa

SEQ ID NO: 159013 - DNA, 25 bp, Saccharomyces pastorianus
ttgggacactccatttagtgacgaa

SEQ ID NO: 159014 - DNA, 25 bp, Saccharomyces pastorianus
tagtcaccggtgatgaactcctttt

SEQ ID NO: 159015 - DNA, 25 bp, Saccharomyces pastorianus
aactaggtcaacaatttacagcgaa

SEQ ID NO: 159016 - DNA, 25 bp, Saccharomyces pastorianus
attcaaccatttcatgagctacagg

SEQ ID NO: 159017 - DNA, 25 bp, Saccharomyces pastorianus
agaaggaataaaaagcccatcggca

SEQ ID NO: 159018 - DNA, 25 bp, Saccharomyces pastorianus
atatggcgggctcccagagaatccc

SEQ ID NO: 159019 - DNA, 25 bp, Saccharomyces pastorianus
gaacccgcacattcaaaaagtggct

SEQ ID NO: 159020 - DNA, 25 bp, Saccharomyces pastorianus
aagcccatcggcaaaataccatgat

SEQ ID NO: 159021 - DNA, 25 bp, Saccharomyces pastorianus
ataccatgatatggcgggctcccag

SEQ ID NO: 159022 - DNA, 25 bp, Saccharomyces pastorianus
ggaagatgcgctaaatttactaaag

SEQ ID NO: 159023 - DNA, 25 bp, Saccharomyces pastorianus
gctgttttgcaaagtaagcccaata

SEQ ID NO: 159024 - DNA, 25 bp, Saccharomyces pastorianus
aatcgcacataaagtttcctatcta

SEQ ID NO: 159025 - DNA, 25 bp, Saccharomyces pastorianus
agagaatccctcacaagaacccgca

SEQ ID NO: 159026 - DNA, 25 bp, Saccharomyces pastorianus
cgcacattcaaaaagtggctgtttt

SEQ ID NO: 159027 - DNA, 25 bp, Saccharomyces pastorianus
gtaagcccaataaggaagatgcgct

SEQ ID NO: 159028 - DNA, 25 bp, Saccharomyces pastorianus
attctgaatggcactcccaatatcc

SEQ ID NO: 159029 - DNA, 25 bp, Saccharomyces pastorianus
tacgcgtactacttcggccaagaag

SEQ ID NO: 159030 - DNA, 25 bp, Saccharomyces pastorianus
cggcactgccagatatatgtccatt

SEQ ID NO: 159031 - DNA, 25 bp, Saccharomyces pastorianus
ttggtcattgatcttttgggtccct

SEQ ID NO: 159032 - DNA, 25 bp, Saccharomyces pastorianus
gtacccgtcgcgatcaaattcgagc

SEQ ID NO: 159033 - DNA, 25 bp, Saccharomyces pastorianus
gacttgcacgcacatgacttgatat

SEQ ID NO: 159034 - DNA, 25 bp, Saccharomyces pastorianus
aacggttgtgcaagttgctgtccaa

SEQ ID NO: 159035 - DNA, 25 bp, Saccharomyces pastorianus
agaaaaaatcactcagcggcactgc

SEQ ID NO: 159036 - DNA, 25 bp, Saccharomyces pastorianus
gatgactctactattgtcggcctac

SEQ ID NO: 159037 - DNA, 25 bp, Saccharomyces pastorianus
aatatgatcaatggcgtacccgtcg

SEQ ID NO: 159038 - DNA, 25 bp, Saccharomyces pastorianus
atttcttgattggaaggcccggcca

SEQ ID NO: 159039 - DNA, 25 bp, Saccharomyces pastorianus
ggcactttacccctcgtgaagaccg

SEQ ID NO: 159040 - DNA, 25 bp, Saccharomyces pastorianus
tactatgcccgtgaagctagccaac

SEQ ID NO: 159041 - DNA, 25 bp, Saccharomyces pastorianus
attactatgcccgtgaagctagcca

SEQ ID NO: 159042 - DNA, 25 bp, Saccharomyces pastorianus
gagtagtgaactcatgttcaactat

SEQ ID NO: 159043 - DNA, 25 bp, Saccharomyces pastorianus
cctgctggtccaaaagatgttattt

SEQ ID NO: 159044 - DNA, 25 bp, Saccharomyces pastorianus
ctggcctgctggtccaaaagatgtt

SEQ ID NO: 159045 - DNA, 25 bp, Saccharomyces pastorianus
aacaggaacgtttgatgactggagg

SEQ ID NO: 159046 - DNA, 25 bp, Saccharomyces pastorianus
tagctggcctgctggtccaaaagat

SEQ ID NO: 159047 - DNA, 25 bp, Saccharomyces pastorianus
cgaaattactatgcccgtgaagcta

SEQ ID NO: 159048 - DNA, 25 bp, Saccharomyces pastorianus
tgaagaccgccaagggaaatttcga

SEQ ID NO: 159049 - DNA, 25 bp, Saccharomyces pastorianus
gttcaactatacttttagctggcct

SEQ ID NO: 159050 - DNA, 25 bp, Saccharomyces pastorianus
attagatgaatatcacggcctgtac

SEQ ID NO: 159051 - DNA, 25 bp, Saccharomyces pastorianus
aattcgagacattatatggtccacg

SEQ ID NO: 159052 - DNA, 25 bp, Saccharomyces pastorianus
atcacggcctgtacacgaactatga

SEQ ID NO: 159053 - DNA, 25 bp, Saccharomyces pastorianus
aaccgcttagaagttcaggatgcta

SEQ ID NO: 159054 - DNA, 25 bp, Saccharomyces pastorianus
acagtactggaatccttgggcaggt

SEQ ID NO: 159055 - DNA, 25 bp, Saccharomyces pastorianus
attcacggaatcgagctattatctg

SEQ ID NO: 159056 - DNA, 25 bp, Saccharomyces pastorianus
atggtccacgaagcattaaatcttt

SEQ ID NO: 159057 - DNA, 25 bp, Saccharomyces pastorianus
gactcctccagaatagttaaccata

SEQ ID NO: 159058 - DNA, 25 bp, Saccharomyces pastorianus
gaactatgaaatgtcttattggcaa

SEQ ID NO: 159059 - DNA, 25 bp, Saccharomyces pastorianus
gaatttttcgatgactcctccagaa

SEQ ID NO: 159060 - DNA, 25 bp, Saccharomyces pastorianus
aacaagctgcgaaaaattgccattt

SEQ ID NO: 159061 - DNA, 25 bp, Saccharomyces pastorianus
aagcttagcgatgagttacataatc

SEQ ID NO: 159062 - DNA, 25 bp, Saccharomyces pastorianus
tctagcgttgaagattctacagata

SEQ ID NO: 159063 - DNA, 25 bp, Saccharomyces pastorianus
gctaagcagggcagaatatgattct

SEQ ID NO: 159064 - DNA, 25 bp, Saccharomyces pastorianus
tacccgaacagctcaaaactgaaaa

SEQ ID NO: 159065 - DNA, 25 bp, Saccharomyces pastorianus
tctgattctgattctagcgttgaag

SEQ ID NO: 159066 - DNA, 25 bp, Saccharomyces pastorianus
gaagatcacgttgaagaccatagaa

SEQ ID NO: 159067 - DNA, 25 bp, Saccharomyces pastorianus
taaaattcagcttttggatattgca

SEQ ID NO: 159068 - DNA, 25 bp, Saccharomyces pastorianus
tgaacacgacgaaaagcttagcgat

SEQ ID NO: 159069 - DNA, 25 bp, Saccharomyces pastorianus
atcagatcggtaattcagagagcaa

SEQ ID NO: 159070 - DNA, 25 bp, Saccharomyces pastorianus
aatagtgatcgacgtgaacacgacg

SEQ ID NO: 159071 - DNA, 25 bp, Saccharomyces pastorianus
aacttagccgacttagattatcaga

SEQ ID NO: 159072 - DNA, 25 bp, Saccharomyces pastorianus
ggttctacgttgtttgatgctaaag

SEQ ID NO: 159073 - DNA, 25 bp, Saccharomyces pastorianus
cttgcagaagctattgatgttgatc

SEQ ID NO: 159074 - DNA, 25 bp, Saccharomyces pastorianus
gttgatcaaacacactctttagccg

SEQ ID NO: 159075 - DNA, 25 bp, Saccharomyces pastorianus
aacgggtttggcctatcagagactg

SEQ ID NO: 159076 - DNA, 25 bp, Saccharomyces pastorianus
gatgtcactaatccataccttaagt

SEQ ID NO: 159077 - DNA, 25 bp, Saccharomyces pastorianus
gactgagtatgacctgtacctcctt

SEQ ID NO: 159078 - DNA, 25 bp, Saccharomyces pastorianus
ttcagctacgaaaggctgccacaga

SEQ ID NO: 159079 - DNA, 25 bp, Saccharomyces pastorianus
agcagaggcgctagcaggtcttgca

SEQ ID NO: 159080 - DNA, 25 bp, Saccharomyces pastorianus
tacctccttggttctacgttgtttg

SEQ ID NO: 159081 - DNA, 25 bp, Saccharomyces pastorianus
ttatcacgatggaagctatacggct

SEQ ID NO: 159082 - DNA, 25 bp, Saccharomyces pastorianus
ctctttagccgatgaatcgccacta

SEQ ID NO: 159083 - DNA, 25 bp, Saccharomyces pastorianus
gacgaaagttcctgataatgcacca

SEQ ID NO: 159084 - DNA, 25 bp, Saccharomyces pastorianus
gagaattacggcttgaaagattttt

SEQ ID NO: 159085 - DNA, 25 bp, Saccharomyces pastorianus
aagtccgaccatgatgtcagttaca

SEQ ID NO: 159086 - DNA, 25 bp, Saccharomyces pastorianus
taccaagagtatattcgacgaaagt

SEQ ID NO: 159087 - DNA, 25 bp, Saccharomyces pastorianus
aagttcctgataatgcaccaagagc

SEQ ID NO: 159088 - DNA, 25 bp, Saccharomyces pastorianus
aagacctataactcacccagaacag

SEQ ID NO: 159089 - DNA, 25 bp, Saccharomyces pastorianus
ccgaccatgatgtcagttacacaag

SEQ ID NO: 159090 - DNA, 25 bp, Saccharomyces pastorianus
aatggctagaaaccctaagacctat

SEQ ID NO: 159091 - DNA, 25 bp, Saccharomyces pastorianus
atgtcgatagcttggtctagcgttt

SEQ ID NO: 159092 - DNA, 25 bp, Saccharomyces pastorianus
gcggctgacaatgaacaatggctag

SEQ ID NO: 159093 - DNA, 25 bp, Saccharomyces pastorianus
atagcttggtctagcgttttcaaaa

SEQ ID NO: 159094 - DNA, 25 bp, Saccharomyces pastorianus
gagaaatccgaatcttttgccaagt

SEQ ID NO: 159095 - DNA, 25 bp, Saccharomyces pastorianus
agtatgtctgctgaaaggtggccaa

SEQ ID NO: 159096 - DNA, 25 bp, Saccharomyces pastorianus
tgagccctacgattggcacagtttc

SEQ ID NO: 159097 - DNA, 25 bp, Saccharomyces pastorianus
atagggcactggcaattcaccacac

SEQ ID NO: 159098 - DNA, 25 bp, Saccharomyces pastorianus
gccaaggtggactcggtaacatgca

SEQ ID NO: 159099 - DNA, 25 bp, Saccharomyces pastorianus
tcttttgccaagtacctacaggttg

SEQ ID NO: 159100 - DNA, 25 bp, Saccharomyces pastorianus
gcacagtttccttgggttttgggca

SEQ ID NO: 159101 - DNA, 25 bp, Saccharomyces pastorianus
tggactcattggtttgcctaacgct

SEQ ID NO: 159102 - DNA, 25 bp, Saccharomyces pastorianus
aaagcattgctgatcttggactcat

SEQ ID NO: 159103 - DNA, 25 bp, Saccharomyces pastorianus
gtatttgtccttgacctctctaata

SEQ ID NO: 159104 - DNA, 25 bp, Saccharomyces pastorianus
agacgtcttcactgtggccgatata

SEQ ID NO: 159105 - DNA, 25 bp, Saccharomyces pastorianus
tagagccctccgttagactggaagt

SEQ ID NO: 159106 - DNA, 25 bp, Saccharomyces pastorianus
gtgttactggcgacaagcactcgtc

SEQ ID NO: 159107 - DNA, 25 bp, Saccharomyces pastorianus
actcgtctgtcaatctgcacaattt

SEQ ID NO: 159108 - DNA, 25 bp, Saccharomyces pastorianus
agctttccatttatagagccctccg

SEQ ID NO: 159109 - DNA, 25 bp, Saccharomyces pastorianus
actacattattttcgccacaggcta

SEQ ID NO: 159110 - DNA, 25 bp, Saccharomyces pastorianus
atagcattccacgtagggtcggtca

SEQ ID NO: 159111 - DNA, 25 bp, Saccharomyces pastorianus
aactttcgactctaatgcctgcgga

SEQ ID NO: 159112 - DNA, 25 bp, Saccharomyces pastorianus
tagggtcggtcatttcgaaccagtt

SEQ ID NO: 159113 - DNA, 25 bp, Saccharomyces pastorianus
ggcggctattatggtcgaagtattc

SEQ ID NO: 159114 - DNA, 25 bp, Saccharomyces pastorianus
gttgtcggaactacaggcggctatt

SEQ ID NO: 159115 - DNA, 25 bp, Saccharomyces pastorianus
gtaaaagatcctacgctgtccttta

SEQ ID NO: 159116 - DNA, 25 bp, Saccharomyces pastorianus
atgtaaacataaccacctccacaac

SEQ ID NO: 159117 - DNA, 25 bp, Saccharomyces pastorianus
tattttgccagctcctcgtatgaat

SEQ ID NO: 159118 - DNA, 25 bp, Saccharomyces pastorianus
gatccatactcttcgaggtcgggtc

SEQ ID NO: 159119 - DNA, 25 bp, Saccharomyces pastorianus
tggcgtgtcgccttcagtgatatat

SEQ ID NO: 159120 - DNA, 25 bp, Saccharomyces pastorianus
taatacatacaatactctcccgcaa

SEQ ID NO: 159121 - DNA, 25 bp, Saccharomyces pastorianus
gcatgattaccgacaaccaaaacca

SEQ ID NO: 159122 - DNA, 25 bp, Saccharomyces pastorianus
aatgcaatcactctaaggcgcctat

SEQ ID NO: 159123 - DNA, 25 bp, Saccharomyces pastorianus
tactgcagcaccttatgaacggcgt

SEQ ID NO: 159124 - DNA, 25 bp, Saccharomyces pastorianus
gtacaccatatacttgtgcatgatt

SEQ ID NO: 159125 - DNA, 25 bp, Saccharomyces pastorianus
aggtcgggtcctgaatgcaatcact

SEQ ID NO: 159126 - DNA, 25 bp, Saccharomyces pastorianus
gatatattcctccaatacattgagc

SEQ ID NO: 159127 - DNA, 25 bp, Saccharomyces pastorianus
aacgtgcaggtctttatcatcttct

SEQ ID NO: 159128 - DNA, 25 bp, Saccharomyces pastorianus
cttccataaatttcgaccttcacag

SEQ ID NO: 159129 - DNA, 25 bp, Saccharomyces pastorianus
attcaatatggatcccaccgacagc

SEQ ID NO: 159130 - DNA, 25 bp, Saccharomyces pastorianus
ataataggctgggttccacgcacga

SEQ ID NO: 159131 - DNA, 25 bp, Saccharomyces pastorianus
taaattacctctcccgtatatgcag

SEQ ID NO: 159132 - DNA, 25 bp, Saccharomyces pastorianus
ttccagttaggaccgcagttcagtt

SEQ ID NO: 159133 - DNA, 25 bp, Saccharomyces pastorianus
gatctaccgctgcataatgtacctg

SEQ ID NO: 159134 - DNA, 25 bp, Saccharomyces pastorianus
taacgctcctcgagaaatgcaccaa

SEQ ID NO: 159135 - DNA, 25 bp, Saccharomyces pastorianus
tcagttacctttaaccaccttcaat

SEQ ID NO: 159136 - DNA, 25 bp, Saccharomyces pastorianus
ggaaatggcagatctaacccgtcta

SEQ ID NO: 159137 - DNA, 25 bp, Saccharomyces pastorianus
atcttctccgagctattgtgatctc

SEQ ID NO: 159138 - DNA, 25 bp, Saccharomyces pastorianus
gaatctttgtccactttacaaacta

SEQ ID NO: 159139 - DNA, 25 bp, Saccharomyces pastorianus
gaggttctctctgattataattcaa

SEQ ID NO: 159140 - DNA, 25 bp, Saccharomyces pastorianus
gccggagcacactgatgtgcctgaa

SEQ ID NO: 159141 - DNA, 25 bp, Saccharomyces pastorianus
ggcaaaaaatatcagctcctcaact

SEQ ID NO: 159142 - DNA, 25 bp, Saccharomyces pastorianus
ttagttgaacttctcgctcaggaaa

SEQ ID NO: 159143 - DNA, 25 bp, Saccharomyces pastorianus
aatgaatcacttgtacgggaaacta

SEQ ID NO: 159144 - DNA, 25 bp, Saccharomyces pastorianus
tttgggcaaaagctaatcctgatcc

SEQ ID NO: 159145 - DNA, 25 bp, Saccharomyces pastorianus
gcgaaagaacttgagcccgatcaat

SEQ ID NO: 159146 - DNA, 25 bp, Saccharomyces pastorianus
attacaaaactcacagccggagcac

SEQ ID NO: 159147 - DNA, 25 bp, Saccharomyces pastorianus
gacacattgagtttttcggaagaat

SEQ ID NO: 159148 - DNA, 25 bp, Saccharomyces pastorianus
tatgaatttggcgtttgagtactac

SEQ ID NO: 159149 - DNA, 25 bp, Saccharomyces pastorianus
tgacagtatgtcaccacagctttct

SEQ ID NO: 159150 - DNA, 25 bp, Saccharomyces pastorianus
aaattccgacatatttcagtccacg

SEQ ID NO: 159151 - DNA, 25 bp, Saccharomyces pastorianus
gaagctctccgattgctgagataat

SEQ ID NO: 159152 - DNA, 25 bp, Saccharomyces pastorianus
aataagataccaccagattgcggga

SEQ ID NO: 159153 - DNA, 25 bp, Saccharomyces pastorianus
ttgccaaatttgtatccccacggta

SEQ ID NO: 159154 - DNA, 25 bp, Saccharomyces pastorianus
gaacaactttcgaagctctccgatt

SEQ ID NO: 159155 - DNA, 25 bp, Saccharomyces pastorianus
aacacaaaacatgccttgttccgaa

SEQ ID NO: 159156 - DNA, 25 bp, Saccharomyces pastorianus
atttcctgagttcaatccagcgtta

SEQ ID NO: 159157 - DNA, 25 bp, Saccharomyces pastorianus
tacgctaccattaccaaacccttat

SEQ ID NO: 159158 - DNA, 25 bp, Saccharomyces pastorianus
gacaacacgaacagtggcctgcata

SEQ ID NO: 159159 - DNA, 25 bp, Saccharomyces pastorianus
ggcctgcatacgaaaaaccaataag

SEQ ID NO: 159160 - DNA, 25 bp, Saccharomyces pastorianus
tgatataggagctccccttttcaat

SEQ ID NO: 159161 - DNA, 25 bp, Saccharomyces pastorianus
tgccacgcgtcagtttcatttaaga

SEQ ID NO: 159162 - DNA, 25 bp, Saccharomyces pastorianus
acactggcctatttcatgctgggca

SEQ ID NO: 159163 - DNA, 25 bp, Saccharomyces pastorianus
gacacggtgtcgcagattggtataa

SEQ ID NO: 159164 - DNA, 25 bp, Saccharomyces pastorianus
tgatctgctactctcatttgcattc

SEQ ID NO: 159165 - DNA, 25 bp, Saccharomyces pastorianus
gagcggattgttttgttcttcttta

SEQ ID NO: 159166 - DNA, 25 bp, Saccharomyces pastorianus
aattgtggtcgcaagtgcaggccat

SEQ ID NO: 159167 - DNA, 25 bp, Saccharomyces pastorianus
ccggcggtcatatgcttctgatata

SEQ ID NO: 159168 - DNA, 25 bp, Saccharomyces pastorianus
cattgttggaatctactgccacgcg

SEQ ID NO: 159169 - DNA, 25 bp, Saccharomyces pastorianus
atccgtacgacgaagcactggtgtt

SEQ ID NO: 159170 - DNA, 25 bp, Saccharomyces pastorianus
gggacagttgccacatgctggaaaa

SEQ ID NO: 159171 - DNA, 25 bp, Saccharomyces pastorianus
aatttgtgacgcatctttcttcttt

SEQ ID NO: 159172 - DNA, 25 bp, Saccharomyces pastorianus
tgacccgaacgactactttattatg

SEQ ID NO: 159173 - DNA, 25 bp, Saccharomyces pastorianus
taaggcctattgtcgggtacatcaa

SEQ ID NO: 159174 - DNA, 25 bp, Saccharomyces pastorianus
tactcctgtcactttctgtacatat

SEQ ID NO: 159175 - DNA, 25 bp, Saccharomyces pastorianus
ctttcttctttctacactgcggaaa

SEQ ID NO: 159176 - DNA, 25 bp, Saccharomyces pastorianus
gatgagtctcggtgctatcgcgtga

SEQ ID NO: 159177 - DNA, 25 bp, Saccharomyces pastorianus
agcatcgttctttctatcagtttat

SEQ ID NO: 159178 - DNA, 25 bp, Saccharomyces pastorianus
tgggcttatggtcacctgcaactta

SEQ ID NO: 159179 - DNA, 25 bp, Saccharomyces pastorianus
atgtcaaagccgaagtgcctctgtt

SEQ ID NO: 159180 - DNA, 25 bp, Saccharomyces pastorianus
gagggctcctggaccatatatgatt

SEQ ID NO: 159181 - DNA, 25 bp, Saccharomyces pastorianus
tctccccggccgttgatgaaattga

SEQ ID NO: 159182 - DNA, 25 bp, Saccharomyces pastorianus
ggaaagcagctattcaataccctta

SEQ ID NO: 159183 - DNA, 25 bp, Saccharomyces pastorianus
aatacccttatttcttctgtagcga

SEQ ID NO: 159184 - DNA, 25 bp, Saccharomyces pastorianus
tcgagagaagcactggttcccaaat

SEQ ID NO: 159185 - DNA, 25 bp, Saccharomyces pastorianus
gaacttgttctaccagtactacaga

SEQ ID NO: 159186 - DNA, 25 bp, Saccharomyces pastorianus
ttcggttatttcttcatcacatgga

SEQ ID NO: 159187 - DNA, 25 bp, Saccharomyces pastorianus
atcagactatgcttctttaggcact

SEQ ID NO: 159188 - DNA, 25 bp, Saccharomyces pastorianus
gtctcaatacgagcccgaacttgtt

SEQ ID NO: 159189 - DNA, 25 bp, Saccharomyces pastorianus
aggtcaattgcttgctgccatttat

SEQ ID NO: 159190 - DNA, 25 bp, Saccharomyces pastorianus
cctctgttgtgatttgcgcctataa

SEQ ID NO: 159191 - DNA, 25 bp, Saccharomyces pastorianus
ataatccactggtcttatcgactca

SEQ ID NO: 159192 - DNA, 25 bp, Saccharomyces pastorianus
ggaaaggatgtcacacctctgttgt

SEQ ID NO: 159193 - DNA, 25 bp, Saccharomyces pastorianus
aattgccaagggtaatgagtttcat

SEQ ID NO: 159194 - DNA, 25 bp, Saccharomyces pastorianus
atgagtttcataccattttggcgac

SEQ ID NO: 159195 - DNA, 25 bp, Saccharomyces pastorianus
gctagaaacctggaaattgccaagg

SEQ ID NO: 159196 - DNA, 25 bp, Saccharomyces pastorianus
gtttcataccattttggcgactttg

SEQ ID NO: 159197 - DNA, 25 bp, Saccharomyces pastorianus
tttatcgcagtttctactttggcta

SEQ ID NO: 159198 - DNA, 25 bp, Saccharomyces pastorianus
accattttggcgactttgagatcac

SEQ ID NO: 159199 - DNA, 25 bp, Saccharomyces pastorianus
ctactttggctagaaacctggaaat

SEQ ID NO: 159200 - DNA, 25 bp, Saccharomyces pastorianus
atcgcagtttctactttggctagaa

SEQ ID NO: 159201 - DNA, 25 bp, Saccharomyces pastorianus
ctttggctagaaacctggaaattgc

SEQ ID NO: 159202 - DNA, 25 bp, Saccharomyces pastorianus
ggcgactttgagatcaccagtttat

SEQ ID NO: 159203 - DNA, 25 bp, Saccharomyces pastorianus
ttggcgactttgagatcaccagttt

SEQ ID NO: 159204 - DNA, 25 bp, Saccharomyces pastorianus
aaatagtcattgtacgttgctttct

SEQ ID NO: 159205 - DNA, 25 bp, Saccharomyces pastorianus
tagtcattgtacgttgctttctttt

SEQ ID NO: 159206 - DNA, 25 bp, Saccharomyces pastorianus
gattgtggcctctttccaccacttg

SEQ ID NO: 159207 - DNA, 25 bp, Saccharomyces pastorianus
gaagaaatagtcattgtacgttgct

SEQ ID NO: 159208 - DNA, 25 bp, Saccharomyces pastorianus
agaaatagtcattgtacgttgcttt

SEQ ID NO: 159209 - DNA, 25 bp, Saccharomyces pastorianus
ctggatgtgcagaagaaatagtcat

SEQ ID NO: 159210 - DNA, 25 bp, Saccharomyces pastorianus
aatagtcattgtacgttgctttctt

SEQ ID NO: 159211 - DNA, 25 bp, Saccharomyces pastorianus
atagtcattgtacgttgctttcttt

SEQ ID NO: 159212 - DNA, 25 bp, Saccharomyces pastorianus
attgtggcctctttccaccacttgg

SEQ ID NO: 159213 - DNA, 25 bp, Saccharomyces pastorianus
tgtggcctctttccaccacttgggt

SEQ ID NO: 159214 - DNA, 25 bp, Saccharomyces pastorianus
agattgtggcctctttccaccactt

SEQ ID NO: 159215 - DNA, 25 bp, Saccharomyces pastorianus
caatggttgtaacgtcaagataatc

SEQ ID NO: 159216 - DNA, 25 bp, Saccharomyces pastorianus
gttgtaacgtcaagataatcacctc

SEQ ID NO: 159217 - DNA, 25 bp, Saccharomyces pastorianus
atggttgtaacgtcaagataatcac

SEQ ID NO: 159218 - DNA, 25 bp, Saccharomyces pastorianus
acaatggttgtaacgtcaagataat

SEQ ID NO: 159219 - DNA, 25 bp, Saccharomyces pastorianus
tggttgtaacgtcaagataatcacc

SEQ ID NO: 159220 - DNA, 25 bp, Saccharomyces pastorianus
ttgtaacgtcaagataatcacctct

SEQ ID NO: 159221 - DNA, 25 bp, Saccharomyces pastorianus
ggttgtaacgtcaagataatcacct

SEQ ID NO: 159222 - DNA, 25 bp, Saccharomyces pastorianus
aatggttgtaacgtcaagataatca

SEQ ID NO: 159223 - DNA, 25 bp, Saccharomyces pastorianus
ctcaatgtgatgacaatggttgtaa

SEQ ID NO: 159224 - DNA, 25 bp, Saccharomyces pastorianus
agtgctgcccctaagacatacacta

SEQ ID NO: 159225 - DNA, 25 bp, Saccharomyces pastorianus
gttactcaatgtgatgacaatggtt

SEQ ID NO: 159226 - DNA, 25 bp, Saccharomyces pastorianus
atacactactgccactgttactcaa

SEQ ID NO: 159227 - DNA, 25 bp, Saccharomyces pastorianus
gccactgttactcaatgtgatgaca

SEQ ID NO: 159228 - DNA, 25 bp, Saccharomyces pastorianus
taagacatacactactgccactgtt

SEQ ID NO: 159229 - DNA, 25 bp, Saccharomyces pastorianus
cactactgccactgttactcaatgt

SEQ ID NO: 159230 - DNA, 25 bp, Saccharomyces pastorianus
ctactgccactgttactcaatgtga

SEQ ID NO: 159231 - DNA, 25 bp, Saccharomyces pastorianus
ctaagacatacactactgccactgt

SEQ ID NO: 159232 - DNA, 25 bp, Saccharomyces pastorianus
actgccactgttactcaatgtgatg

SEQ ID NO: 159233 - DNA, 25 bp, Saccharomyces pastorianus
gctgcccctaagacatacactactg

SEQ ID NO: 159234 - DNA, 25 bp, Saccharomyces pastorianus
catgagtggatttgcgtcgctgttt

SEQ ID NO: 159235 - DNA, 25 bp, Saccharomyces pastorianus
agcggccgttctttgcatgagtgga

SEQ ID NO: 159236 - DNA, 25 bp, Saccharomyces pastorianus
ttgtgcgtacggatggtgcattact

SEQ ID NO: 159237 - DNA, 25 bp, Saccharomyces pastorianus
aagcagtagcggattttgtgcgtac

SEQ ID NO: 159238 - DNA, 25 bp, Saccharomyces pastorianus
tttcccacgaagacatctacggcta

SEQ ID NO: 159239 - DNA, 25 bp, Saccharomyces pastorianus
gtgcattactgtcaaagccccttta

SEQ ID NO: 159240 - DNA, 25 bp, Saccharomyces pastorianus
gtcgctgttttccaattgcattttg

SEQ ID NO: 159241 - DNA, 25 bp, Saccharomyces pastorianus
gttgcaacccgcatttgttaccttg

SEQ ID NO: 159242 - DNA, 25 bp, Saccharomyces pastorianus
agatgcattctgtctgctgtgttta

SEQ ID NO: 159243 - DNA, 25 bp, Saccharomyces pastorianus
tatcttcaaggcgaggttgcaaccc

SEQ ID NO: 159244 - DNA, 25 bp, Saccharomyces pastorianus
taatagttgatctttttcccacgaa

SEQ ID NO: 159245 - DNA, 25 bp, Saccharomyces pastorianus
agcatatttccatggacttttgtat

SEQ ID NO: 159246 - DNA, 25 bp, Saccharomyces pastorianus
ccaagcatatttccatggacttttg

SEQ ID NO: 159247 - DNA, 25 bp, Saccharomyces pastorianus
caagcatatttccatggacttttgt

SEQ ID NO: 159248 - DNA, 25 bp, Saccharomyces pastorianus
gaaaccgtgatgagaaatccgggat

SEQ ID NO: 159249 - DNA, 25 bp, Saccharomyces pastorianus
aagcatatttccatggacttttgta

SEQ ID NO: 159250 - DNA, 25 bp, Saccharomyces pastorianus
tgtatggaaaccgtgatgagaaatc

SEQ ID NO: 159251 - DNA, 25 bp, Saccharomyces pastorianus
accgtgatgagaaatccgggatttc

SEQ ID NO: 159252 - DNA, 25 bp, Saccharomyces pastorianus
tatggaaaccgtgatgagaaatccg

SEQ ID NO: 159253 - DNA, 25 bp, Saccharomyces pastorianus
atggacttttgtatggaaaccgtga

SEQ ID NO: 159254 - DNA, 25 bp, Saccharomyces pastorianus
gccaagcatatttccatggactttt

SEQ ID NO: 159255 - DNA, 25 bp, Saccharomyces pastorianus
tgccaagcatatttccatggacttt

SEQ ID NO: 159256 - DNA, 25 bp, Saccharomyces pastorianus
gccagatatctacgaactagcggtg

SEQ ID NO: 159257 - DNA, 25 bp, Saccharomyces pastorianus
taaaagagtctaccaacttcgccag

SEQ ID NO: 159258 - DNA, 25 bp, Saccharomyces pastorianus
aaaagagtctaccaacttcgccaga

SEQ ID NO: 159259 - DNA, 25 bp, Saccharomyces pastorianus
gtctaccaacttcgccagatatcta

SEQ ID NO: 159260 - DNA, 25 bp, Saccharomyces pastorianus
taccaacttcgccagatatctacga

SEQ ID NO: 159261 - DNA, 25 bp, Saccharomyces pastorianus
aaagagtctaccaacttcgccagat

SEQ ID NO: 159262 - DNA, 25 bp, Saccharomyces pastorianus
aacttcgccagatatctacgaacta

SEQ ID NO: 159263 - DNA, 25 bp, Saccharomyces pastorianus
atatctacgaactagcggtgtactc

SEQ ID NO: 159264 - DNA, 25 bp, Saccharomyces pastorianus
agatatctacgaactagcggtgtac

SEQ ID NO: 159265 - DNA, 25 bp, Saccharomyces pastorianus
gagtctaccaacttcgccagatatc

SEQ ID NO: 159266 - DNA, 25 bp, Saccharomyces pastorianus
agagtctaccaacttcgccagatat

SEQ ID NO: 159267 - DNA, 25 bp, Saccharomyces pastorianus
gggctgatcaaatccactgacgtga

SEQ ID NO: 159268 - DNA, 25 bp, Saccharomyces pastorianus
gagattctgcgccagcaagtcgtct

SEQ ID NO: 159269 - DNA, 25 bp, Saccharomyces pastorianus
gaccataggttgctacaaactcggt

SEQ ID NO: 159270 - DNA, 25 bp, Saccharomyces pastorianus
gaatgcctatattatctgaccatag

SEQ ID NO: 159271 - DNA, 25 bp, Saccharomyces pastorianus
caaactcggtgaatactctatggcg

SEQ ID NO: 159272 - DNA, 25 bp, Saccharomyces pastorianus
tttggccaactcttaaggacgcata

SEQ ID NO: 159273 - DNA, 25 bp, Saccharomyces pastorianus
catttacaaagaggccgagtcccgt

SEQ ID NO: 159274 - DNA, 25 bp, Saccharomyces pastorianus
caccgctaccatacagtcaaggttt

SEQ ID NO: 159275 - DNA, 25 bp, Saccharomyces pastorianus
gagtcccgtagacgagaatgcctat

SEQ ID NO: 159276 - DNA, 25 bp, Saccharomyces pastorianus
actctatccgcagcagctggagatt

SEQ ID NO: 159277 - DNA, 25 bp, Saccharomyces pastorianus
gacactttatttgagcatgagcgta

SEQ ID NO: 159278 - DNA, 25 bp, Saccharomyces pastorianus
gagaaatcgttccataccaagcaaa

SEQ ID NO: 159279 - DNA, 25 bp, Saccharomyces pastorianus
gattttgtattgcttgtgtcgtcta

SEQ ID NO: 159280 - DNA, 25 bp, Saccharomyces pastorianus
gtttttgccctgtcaattcttttag

SEQ ID NO: 159281 - DNA, 25 bp, Saccharomyces pastorianus
tggaaactacgtgttgcctgtccct

SEQ ID NO: 159282 - DNA, 25 bp, Saccharomyces pastorianus
gtgtcgtctacactggcagagatac

SEQ ID NO: 159283 - DNA, 25 bp, Saccharomyces pastorianus
tgtcccttgacccaaaatctatcgg

SEQ ID NO: 159284 - DNA, 25 bp, Saccharomyces pastorianus
ttcccgctgatttggttcttttaca

SEQ ID NO: 159285 - DNA, 25 bp, Saccharomyces pastorianus
ttagttgcatttgccggtttccaca

SEQ ID NO: 159286 - DNA, 25 bp, Saccharomyces pastorianus
ctttgtgcatgtgtttttgccctgt

SEQ ID NO: 159287 - DNA, 25 bp, Saccharomyces pastorianus
tataacagcctctgctcctgagaaa

SEQ ID NO: 159288 - DNA, 25 bp, Saccharomyces pastorianus
tgggcgaatactgttctagcttcca

SEQ ID NO: 159289 - DNA, 25 bp, Saccharomyces pastorianus
tgttgccaatgttcacctattcagg

SEQ ID NO: 159290 - DNA, 25 bp, Saccharomyces pastorianus
taccgtggatgataggttctcccga

SEQ ID NO: 159291 - DNA, 25 bp, Saccharomyces pastorianus
tattcagggttaccggtgacgctcc

SEQ ID NO: 159292 - DNA, 25 bp, Saccharomyces pastorianus
cgcttaccgtgggactttcagaaga

SEQ ID NO: 159293 - DNA, 25 bp, Saccharomyces pastorianus
aataatcctcacagttttgccgaac

SEQ ID NO: 159294 - DNA, 25 bp, Saccharomyces pastorianus
ttgcgcaggtcggtgatgattctat

SEQ ID NO: 159295 - DNA, 25 bp, Saccharomyces pastorianus
gaaggtcctccgtgtttgagaacat

SEQ ID NO: 159296 - DNA, 25 bp, Saccharomyces pastorianus
gggcacatgcaactgatttccaaag

SEQ ID NO: 159297 - DNA, 25 bp, Saccharomyces pastorianus
aaagccttttcatcacttaacgaca

SEQ ID NO: 159298 - DNA, 25 bp, Saccharomyces pastorianus
gaacatttcgagatccattccttgg

SEQ ID NO: 159299 - DNA, 25 bp, Saccharomyces pastorianus
aagaccaactgtcaataccgtggat

SEQ ID NO: 159300 - DNA, 25 bp, Saccharomyces pastorianus
cgttgctcacaatactacttcttac

SEQ ID NO: 159301 - DNA, 25 bp, Saccharomyces pastorianus
agacgacttgtatttagctggtaaa

SEQ ID NO: 159302 - DNA, 25 bp, Saccharomyces pastorianus
ccgcctgggatttagttatggattg

SEQ ID NO: 159303 - DNA, 25 bp, Saccharomyces pastorianus
gtatacgcaattgctcctcaaacaa

SEQ ID NO: 159304 - DNA, 25 bp, Saccharomyces pastorianus
gacgtcgtttatattggcccttttg

SEQ ID NO: 159305 - DNA, 25 bp, Saccharomyces pastorianus
ggattgtatacgcaattgctcctca

SEQ ID NO: 159306 - DNA, 25 bp, Saccharomyces pastorianus
aacggcagttattcattcagtagga

SEQ ID NO: 159307 - DNA, 25 bp, Saccharomyces pastorianus
gctcctcaaacaattcagcagagtg

SEQ ID NO: 159308 - DNA, 25 bp, Saccharomyces pastorianus
agagtgctgtgacgtcgtttatatt

SEQ ID NO: 159309 - DNA, 25 bp, Saccharomyces pastorianus
ggaagttagtttattactttgctat

SEQ ID NO: 159310 - DNA, 25 bp, Saccharomyces pastorianus
actttgctatgatttgggatatcct

SEQ ID NO: 159311 - DNA, 25 bp, Saccharomyces pastorianus
gaaagcactcgcacgcatagtttta

SEQ ID NO: 159312 - DNA, 25 bp, Saccharomyces pastorianus
cttgaaagcactcgcacgcatagtt

SEQ ID NO: 159313 - DNA, 25 bp, Saccharomyces pastorianus
tgaagacccttgaaagcactcgcac

SEQ ID NO: 159314 - DNA, 25 bp, Saccharomyces pastorianus
tcgcacgcatagttttatatttttt

SEQ ID NO: 159315 - DNA, 25 bp, Saccharomyces pastorianus
gaagacccttgaaagcactcgcacg

SEQ ID NO: 159316 - DNA, 25 bp, Saccharomyces pastorianus
aaagcactcgcacgcatagttttat

SEQ ID NO: 159317 - DNA, 25 bp, Saccharomyces pastorianus
gcactcgcacgcatagttttatatt

SEQ ID NO: 159318 - DNA, 25 bp, Saccharomyces pastorianus
tgaaagcactcgcacgcatagtttt

SEQ ID NO: 159319 - DNA, 25 bp, Saccharomyces pastorianus
gatgaagacccttgaaagcactcgc

SEQ ID NO: 159320 - DNA, 25 bp, Saccharomyces pastorianus
agcactcgcacgcatagttttatat

SEQ ID NO: 159321 - DNA, 25 bp, Saccharomyces pastorianus
gacccttgaaagcactcgcacgcat

SEQ ID NO: 159322 - DNA, 25 bp, Saccharomyces pastorianus
caagattctgtttgggatgagggca

SEQ ID NO: 159323 - DNA, 25 bp, Saccharomyces pastorianus
tgagggcagagataatcctatactc

SEQ ID NO: 159324 - DNA, 25 bp, Saccharomyces pastorianus
cagcgcgacaagcaagggatcaaat

SEQ ID NO: 159325 - DNA, 25 bp, Saccharomyces pastorianus
atgcacaacttctctctaattatgg

SEQ ID NO: 159326 - DNA, 25 bp, Saccharomyces pastorianus
atgtggcatttagtagtccaactag

SEQ ID NO: 159327 - DNA, 25 bp, Saccharomyces pastorianus
gagataatcctatactcttggaaga

SEQ ID NO: 159328 - DNA, 25 bp, Saccharomyces pastorianus
tgaaaataaccagtctcaagattct

SEQ ID NO: 159329 - DNA, 25 bp, Saccharomyces pastorianus
agaaccagcgcgacaagcaagggat

SEQ ID NO: 159330 - DNA, 25 bp, Saccharomyces pastorianus
actcttggaagatgaagacccttga

SEQ ID NO: 159331 - DNA, 25 bp, Saccharomyces pastorianus
gggatcaaatgcacaacttctctct

SEQ ID NO: 159332 - DNA, 25 bp, Saccharomyces pastorianus
gggtattccaagaaccagcgcgaca

SEQ ID NO: 159333 - DNA, 25 bp, Saccharomyces pastorianus
gattctgacgttaatgtctccaggt

SEQ ID NO: 159334 - DNA, 25 bp, Saccharomyces pastorianus
atggatgttgattctgacgttaatg

SEQ ID NO: 159335 - DNA, 25 bp, Saccharomyces pastorianus
tctgacgttaatgtctccaggttaa

SEQ ID NO: 159336 - DNA, 25 bp, Saccharomyces pastorianus
agatgaactgcataaggtggcaaac

SEQ ID NO: 159337 - DNA, 25 bp, Saccharomyces pastorianus
aatgtctccaggttaagagatgaac

SEQ ID NO: 159338 - DNA, 25 bp, Saccharomyces pastorianus
gacgttaatgtctccaggttaagag

SEQ ID NO: 159339 - DNA, 25 bp, Saccharomyces pastorianus
gttgattctgacgttaatgtctcca

SEQ ID NO: 159340 - DNA, 25 bp, Saccharomyces pastorianus
ctgacgttaatgtctccaggttaag

SEQ ID NO: 159341 - DNA, 25 bp, Saccharomyces pastorianus
ctccaggttaagagatgaactgcat

SEQ ID NO: 159342 - DNA, 25 bp, Saccharomyces pastorianus
aaacgaggaaacagataccgccact

SEQ ID NO: 159343 - DNA, 25 bp, Saccharomyces pastorianus
ggatgttgattctgacgttaatgtc

SEQ ID NO: 159344 - DNA, 25 bp, Saccharomyces pastorianus
atatattatcggtgttcctttggta

SEQ ID NO: 159345 - DNA, 25 bp, Saccharomyces pastorianus
cacgagagcaattttttaccaactt

SEQ ID NO: 159346 - DNA, 25 bp, Saccharomyces pastorianus
aagagcatcttgacatttttcgaaa

SEQ ID NO: 159347 - DNA, 25 bp, Saccharomyces pastorianus
gatgctagatggatcatccccttat

SEQ ID NO: 159348 - DNA, 25 bp, Saccharomyces pastorianus
atgcatgaatcctgtctgttggaat

SEQ ID NO: 159349 - DNA, 25 bp, Saccharomyces pastorianus
atccccttatcctggtgatttccta

SEQ ID NO: 159350 - DNA, 25 bp, Saccharomyces pastorianus
gaaaacatgcccgaaaagatacctt

SEQ ID NO: 159351 - DNA, 25 bp, Saccharomyces pastorianus
catttcaaaaccaggcgcggatgtt

SEQ ID NO: 159352 - DNA, 25 bp, Saccharomyces pastorianus
gttatgatcagtcagcaactccaga

SEQ ID NO: 159353 - DNA, 25 bp, Saccharomyces pastorianus
tttggccgctgtactatatattatc

SEQ ID NO: 159354 - DNA, 25 bp, Saccharomyces pastorianus
gctttaacgattggtttggccgctg

SEQ ID NO: 159355 - DNA, 25 bp, Saccharomyces pastorianus
ttgtgtctaatctcatgggccgtaa

SEQ ID NO: 159356 - DNA, 25 bp, Saccharomyces pastorianus
gatagcagagattcccactttagcc

SEQ ID NO: 159357 - DNA, 25 bp, Saccharomyces pastorianus
ctctccgtagagtcatgatagcaga

SEQ ID NO: 159358 - DNA, 25 bp, Saccharomyces pastorianus
gccattgattcagtcgaagtcgaaa

SEQ ID NO: 159359 - DNA, 25 bp, Saccharomyces pastorianus
caaatactacggttttggccgatga

SEQ ID NO: 159360 - DNA, 25 bp, Saccharomyces pastorianus
agtactacaaacgtctacagcaagg

SEQ ID NO: 159361 - DNA, 25 bp, Saccharomyces pastorianus
attcccactttagccattgattcag

SEQ ID NO: 159362 - DNA, 25 bp, Saccharomyces pastorianus
atctaatgtggatttggctatggcc

SEQ ID NO: 159363 - DNA, 25 bp, Saccharomyces pastorianus
gctatggccaattctctccgtagag

SEQ ID NO: 159364 - DNA, 25 bp, Saccharomyces pastorianus
gttaacattgcaagcgttcggcgaa

SEQ ID NO: 159365 - DNA, 25 bp, Saccharomyces pastorianus
aacgtcgactttatactatctaatg

SEQ ID NO: 159366 - DNA, 25 bp, Saccharomyces pastorianus
acgcttgcaaatgggttaacaacca

SEQ ID NO: 159367 - DNA, 25 bp, Saccharomyces pastorianus
ttcacaagtgggtccctcaacaaaa

SEQ ID NO: 159368 - DNA, 25 bp, Saccharomyces pastorianus
actttattcacaagtgggtccctca

SEQ ID NO: 159369 - DNA, 25 bp, Saccharomyces pastorianus
atcttgtataataggatgcccaata

SEQ ID NO: 159370 - DNA, 25 bp, Saccharomyces pastorianus
ctgtagacgttgtagtatttcactt

SEQ ID NO: 159371 - DNA, 25 bp, Saccharomyces pastorianus
caaccaacttggaacactttattca

SEQ ID NO: 159372 - DNA, 25 bp, Saccharomyces pastorianus
caccgttaccttctttatcttgtat

SEQ ID NO: 159373 - DNA, 25 bp, Saccharomyces pastorianus
tagtatttcactttcgcgctttcag

SEQ ID NO: 159374 - DNA, 25 bp, Saccharomyces pastorianus
cagccgaacgcttgcaaatgggtta

SEQ ID NO: 159375 - DNA, 25 bp, Saccharomyces pastorianus
gcgctttcagccgaacgcttgcaaa

SEQ ID NO: 159376 - DNA, 25 bp, Saccharomyces pastorianus
gaacaccgttaccttctttatcttg

SEQ ID NO: 159377 - DNA, 25 bp, Saccharomyces pastorianus
gagagtctcacttattgagcgcttt

SEQ ID NO: 159378 - DNA, 25 bp, Saccharomyces pastorianus
gagcgctttcaataacggtggaagt

SEQ ID NO: 159379 - DNA, 25 bp, Saccharomyces pastorianus
gatggcatagtataccaggatgatc

SEQ ID NO: 159380 - DNA, 25 bp, Saccharomyces pastorianus
gacgtttatgttcctccaagtaaga

SEQ ID NO: 159381 - DNA, 25 bp, Saccharomyces pastorianus
aacagtggtgtatcgttgactctac

SEQ ID NO: 159382 - DNA, 25 bp, Saccharomyces pastorianus
ggtcattagattcaacgggcctagt

SEQ ID NO: 159383 - DNA, 25 bp, Saccharomyces pastorianus
gggcctagtgacgtttatgttcctc

SEQ ID NO: 159384 - DNA, 25 bp, Saccharomyces pastorianus
actctcaagggtgaatggtcatcag

SEQ ID NO: 159385 - DNA, 25 bp, Saccharomyces pastorianus
cggtggaagtggttctacaaacagt

SEQ ID NO: 159386 - DNA, 25 bp, Saccharomyces pastorianus
ggaatgatcgacaagcacgtcaaga

SEQ ID NO: 159387 - DNA, 25 bp, Saccharomyces pastorianus
ttgggaaggccagatcgcgtacact

SEQ ID NO: 159388 - DNA, 25 bp, Saccharomyces pastorianus
ttgcaccacttccatgattgggctt

SEQ ID NO: 159389 - DNA, 25 bp, Saccharomyces pastorianus
gtattgcaccacttccatgattggg

SEQ ID NO: 159390 - DNA, 25 bp, Saccharomyces pastorianus
atgtgtattgcaccacttccatgat

SEQ ID NO: 159391 - DNA, 25 bp, Saccharomyces pastorianus
gggcgtcacagtggaaaataacgac

SEQ ID NO: 159392 - DNA, 25 bp, Saccharomyces pastorianus
aaataacgacaggagaatctcggtg

SEQ ID NO: 159393 - DNA, 25 bp, Saccharomyces pastorianus
caccacttccatgattgggcttttt

SEQ ID NO: 159394 - DNA, 25 bp, Saccharomyces pastorianus
aatctcggtgtgtaagttggaatgt

SEQ ID NO: 159395 - DNA, 25 bp, Saccharomyces pastorianus
gaatgtgtattgcaccacttccatg

SEQ ID NO: 159396 - DNA, 25 bp, Saccharomyces pastorianus
gttggaatgtgtattgcaccacttc

SEQ ID NO: 159397 - DNA, 25 bp, Saccharomyces pastorianus
tttttcctggcgcaaaatgttgctt

SEQ ID NO: 159398 - DNA, 25 bp, Saccharomyces pastorianus
gagaatctcggtgtgtaagttggaa

SEQ ID NO: 159399 - DNA, 25 bp, Saccharomyces pastorianus
gaatcgtcagataggtggtaaaact

SEQ ID NO: 159400 - DNA, 25 bp, Saccharomyces pastorianus
gagcctaattagctcattatttcat

SEQ ID NO: 159401 - DNA, 25 bp, Saccharomyces pastorianus
cacccatacgagacattggccttat

SEQ ID NO: 159402 - DNA, 25 bp, Saccharomyces pastorianus
ttgaacgagacattggcttctgccc

SEQ ID NO: 159403 - DNA, 25 bp, Saccharomyces pastorianus
agacattggcttctgccctacatca

SEQ ID NO: 159404 - DNA, 25 bp, Saccharomyces pastorianus
ttatacgcagagagagaatcgtcag

SEQ ID NO: 159405 - DNA, 25 bp, Saccharomyces pastorianus
atacgagacattggccttatacgag

SEQ ID NO: 159406 - DNA, 25 bp, Saccharomyces pastorianus
tcaacatttttcttatacgcagaga

SEQ ID NO: 159407 - DNA, 25 bp, Saccharomyces pastorianus
cctacatcacccatacgagacattg

SEQ ID NO: 159408 - DNA, 25 bp, Saccharomyces pastorianus
aaaacttggagcctaattagctcat

SEQ ID NO: 159409 - DNA, 25 bp, Saccharomyces pastorianus
agctcattatttcatttgaacgaga

SEQ ID NO: 159410 - DNA, 25 bp, Saccharomyces pastorianus
gtttatcgcaatactcaaaggtcca

SEQ ID NO: 159411 - DNA, 25 bp, Saccharomyces pastorianus
attccataatgtcctcagtttccta

SEQ ID NO: 159412 - DNA, 25 bp, Saccharomyces pastorianus
aacgctgtcggtatcctaggaaata

SEQ ID NO: 159413 - DNA, 25 bp, Saccharomyces pastorianus
tgacttctaacaaccctcaattgct

SEQ ID NO: 159414 - DNA, 25 bp, Saccharomyces pastorianus
gctctatacagctctaagttgaagg

SEQ ID NO: 159415 - DNA, 25 bp, Saccharomyces pastorianus
gagagaagcattcgtgtccttaaat

SEQ ID NO: 159416 - DNA, 25 bp, Saccharomyces pastorianus
aattttggcaactccttgacttcta

SEQ ID NO: 159417 - DNA, 25 bp, Saccharomyces pastorianus
atgcgtgaagagattccccatatgg

SEQ ID NO: 159418 - DNA, 25 bp, Saccharomyces pastorianus
cagtttcctagacataatccacggg

SEQ ID NO: 159419 - DNA, 25 bp, Saccharomyces pastorianus
aactatcctttatttcacgtatcaa

SEQ ID NO: 159420 - DNA, 25 bp, Saccharomyces pastorianus
ggcatgcccggttacttaattgtta

SEQ ID NO: 159421 - DNA, 25 bp, Saccharomyces pastorianus
gacactaaaaagacgccattgagaa

SEQ ID NO: 159422 - DNA, 25 bp, Saccharomyces pastorianus
aaaagctcgtttgcttgcagctgtc

SEQ ID NO: 159423 - DNA, 25 bp, Saccharomyces pastorianus
gtgttttcctgacaaacgactcatt

SEQ ID NO: 159424 - DNA, 25 bp, Saccharomyces pastorianus
gtcaacttgtttagtgttttcctga

SEQ ID NO: 159425 - DNA, 25 bp, Saccharomyces pastorianus
aacactagcttggtcgattggcaaa

SEQ ID NO: 159426 - DNA, 25 bp, Saccharomyces pastorianus
cttctggtgcgaattgactcccata

SEQ ID NO: 159427 - DNA, 25 bp, Saccharomyces pastorianus
atcgattcttggtgtatctcctaat

SEQ ID NO: 159428 - DNA, 25 bp, Saccharomyces pastorianus
gggtcgtctcgttgaagatggcaaa

SEQ ID NO: 159429 - DNA, 25 bp, Saccharomyces pastorianus
gatgtggcattttcgagcagttgag

SEQ ID NO: 159430 - DNA, 25 bp, Saccharomyces pastorianus
ctttttggtctctcgatgtggcatt

SEQ ID NO: 159431 - DNA, 25 bp, Saccharomyces pastorianus
aaataccctttgacagtacatttgc

SEQ ID NO: 159432 - DNA, 25 bp, Saccharomyces pastorianus
ttctccgatcgtggtggtgctttca

SEQ ID NO: 159433 - DNA, 25 bp, Saccharomyces pastorianus
aatagcgcttctccgatcgtggtgg

SEQ ID NO: 159434 - DNA, 25 bp, Saccharomyces pastorianus
cttacatgttctggcaaggcttagc

SEQ ID NO: 159435 - DNA, 25 bp, Saccharomyces pastorianus
atctgcttacatgttctggcaaggc

SEQ ID NO: 159436 - DNA, 25 bp, Saccharomyces pastorianus
gtttgcatctgcttacatgttctgg

SEQ ID NO: 159437 - DNA, 25 bp, Saccharomyces pastorianus
cgatcgtggtggtgctttcaggctc

SEQ ID NO: 159438 - DNA, 25 bp, Saccharomyces pastorianus
ggaatagaaatactttcaaccaagt

SEQ ID NO: 159439 - DNA, 25 bp, Saccharomyces pastorianus
accaagtaggtgatgtcgtggtgta

SEQ ID NO: 159440 - DNA, 25 bp, Saccharomyces pastorianus
ctttcaaccaagtaggtgatgtcgt

SEQ ID NO: 159441 - DNA, 25 bp, Saccharomyces pastorianus
cgtttgctttttgtttgcatctgct

SEQ ID NO: 159442 - DNA, 25 bp, Saccharomyces pastorianus
actaatagcgcttctccgatcgtgg

SEQ ID NO: 159443 - DNA, 25 bp, Saccharomyces pastorianus
actgcccactaaacaataccgatgg

SEQ ID NO: 159444 - DNA, 25 bp, Saccharomyces pastorianus
gcactgcccactaaacaataccgat

SEQ ID NO: 159445 - DNA, 25 bp, Saccharomyces pastorianus
atgcactgcccactaaacaataccg

SEQ ID NO: 159446 - DNA, 25 bp, Saccharomyces pastorianus
cactgcccactaaacaataccgatg

SEQ ID NO: 159447 - DNA, 25 bp, Saccharomyces pastorianus
agaccgatgcactgcccactaaaca

SEQ ID NO: 159448 - DNA, 25 bp, Saccharomyces pastorianus
tgcactgcccactaaacaataccga

SEQ ID NO: 159449 - DNA, 25 bp, Saccharomyces pastorianus
taagaccgatgcactgcccactaaa

SEQ ID NO: 159450 - DNA, 25 bp, Saccharomyces pastorianus
cactaaacaataccgatgggaccat

SEQ ID NO: 159451 - DNA, 25 bp, Saccharomyces pastorianus
gatgcactgcccactaaacaatacc

SEQ ID NO: 159452 - DNA, 25 bp, Saccharomyces pastorianus
gggttcctaagaccgatgcactgcc

SEQ ID NO: 159453 - DNA, 25 bp, Saccharomyces pastorianus
cgatgcactgcccactaaacaatac

SEQ ID NO: 159454 - DNA, 25 bp, Saccharomyces pastorianus
tatagagaactcactgcgcctttac

SEQ ID NO: 159455 - DNA, 25 bp, Saccharomyces pastorianus
agactattcgaatcgcttacccagt

SEQ ID NO: 159456 - DNA, 25 bp, Saccharomyces pastorianus
gattttgacacgacccttcatagta

SEQ ID NO: 159457 - DNA, 25 bp, Saccharomyces pastorianus
gaaaatctggtacatccgcacggtc

SEQ ID NO: 159458 - DNA, 25 bp, Saccharomyces pastorianus
tcatccttttcttccaattttacac

SEQ ID NO: 159459 - DNA, 25 bp, Saccharomyces pastorianus
tattgggattttcatcctgcacttt

SEQ ID NO: 159460 - DNA, 25 bp, Saccharomyces pastorianus
gcttacccagtagcatgctctatag

SEQ ID NO: 159461 - DNA, 25 bp, Saccharomyces pastorianus
taagaaaggtgtctcctaccgcaca

SEQ ID NO: 159462 - DNA, 25 bp, Saccharomyces pastorianus
cgcacggtcaccttttagtagagat

SEQ ID NO: 159463 - DNA, 25 bp, Saccharomyces pastorianus
tttactcgcatccatttactcactg

SEQ ID NO: 159464 - DNA, 25 bp, Saccharomyces pastorianus
aataacatgccaacctcttcaaact

SEQ ID NO: 159465 - DNA, 25 bp, Saccharomyces pastorianus
tggccaacctacggtacgaacgagg

SEQ ID NO: 159466 - DNA, 25 bp, Saccharomyces pastorianus
tctggccaacctacggtacgaacga

SEQ ID NO: 159467 - DNA, 25 bp, Saccharomyces pastorianus
gtctggccaacctacggtacgaacg

SEQ ID NO: 159468 - DNA, 25 bp, Saccharomyces pastorianus
acggtacgaacgaggactgctttgc

SEQ ID NO: 159469 - DNA, 25 bp, Saccharomyces pastorianus
cctacggtacgaacgaggactgctt

SEQ ID NO: 159470 - DNA, 25 bp, Saccharomyces pastorianus
caacctacggtacgaacgaggactg

SEQ ID NO: 159471 - DNA, 25 bp, Saccharomyces pastorianus
acctacggtacgaacgaggactgct

SEQ ID NO: 159472 - DNA, 25 bp, Saccharomyces pastorianus
ctggccaacctacggtacgaacgag

SEQ ID NO: 159473 - DNA, 25 bp, Saccharomyces pastorianus
ctacggtacgaacgaggactgcttt

SEQ ID NO: 159474 - DNA, 25 bp, Saccharomyces pastorianus
atgagcttcttctatcatttggaaa

SEQ ID NO: 159475 - DNA, 25 bp, Saccharomyces pastorianus
tggaaacaatcctcattggtaccgt

SEQ ID NO: 159476 - DNA, 25 bp, Saccharomyces pastorianus
atcatttggaaacaatcctcattgg

SEQ ID NO: 159477 - DNA, 25 bp, Saccharomyces pastorianus
tcattggtaccgtaacgtggccaaa

SEQ ID NO: 159478 - DNA, 25 bp, Saccharomyces pastorianus
atcgtaacccatatcttcttgagga

SEQ ID NO: 159479 - DNA, 25 bp, Saccharomyces pastorianus
acaatcctcattggtaccgtaacgt

SEQ ID NO: 159480 - DNA, 25 bp, Saccharomyces pastorianus
aatcctcattggtaccgtaacgtgg

SEQ ID NO: 159481 - DNA, 25 bp, Saccharomyces pastorianus
tcctcattggtaccgtaacgtggcc

SEQ ID NO: 159482 - DNA, 25 bp, Saccharomyces pastorianus
acccatatcttcttgaggagagtca

SEQ ID NO: 159483 - DNA, 25 bp, Saccharomyces pastorianus
gaaacaatcctcattggtaccgtaa

SEQ ID NO: 159484 - DNA, 25 bp, Saccharomyces pastorianus
gtaacccatatcttcttgaggagag

SEQ ID NO: 159485 - DNA, 25 bp, Saccharomyces pastorianus
gatgatattccgtcgtccaaaagat

SEQ ID NO: 159486 - DNA, 25 bp, Saccharomyces pastorianus
aagagttcatgcctttcatgcgaag

SEQ ID NO: 159487 - DNA, 25 bp, Saccharomyces pastorianus
taattccagccgcttggcaggtagg

SEQ ID NO: 159488 - DNA, 25 bp, Saccharomyces pastorianus
aaatttctccggctttttctgtgag

SEQ ID NO: 159489 - DNA, 25 bp, Saccharomyces pastorianus
gaccatgccagttcatattatttta

SEQ ID NO: 159490 - DNA, 25 bp, Saccharomyces pastorianus
ggcaggtaggctaaattacacattt

SEQ ID NO: 159491 - DNA, 25 bp, Saccharomyces pastorianus
ggcccggtcacggaattattctcgg

SEQ ID NO: 159492 - DNA, 25 bp, Saccharomyces pastorianus
ttattctcgggataattccagccgc

SEQ ID NO: 159493 - DNA, 25 bp, Saccharomyces pastorianus
agagttcaggaacaggcccggtcac

SEQ ID NO: 159494 - DNA, 25 bp, Saccharomyces pastorianus
catgcctttcatgcgaagaagcgtt

SEQ ID NO: 159495 - DNA, 25 bp, Saccharomyces pastorianus
gtccaaaagattacgaccatgccag

SEQ ID NO: 159496 - DNA, 25 bp, Saccharomyces pastorianus
aaccaacccagctaaatctgcgtca

SEQ ID NO: 159497 - DNA, 25 bp, Saccharomyces pastorianus
ctgcgtcagctcgtggttcttattt

SEQ ID NO: 159498 - DNA, 25 bp, Saccharomyces pastorianus
agctcgtggttcttatttgcgtgtt

SEQ ID NO: 159499 - DNA, 25 bp, Saccharomyces pastorianus
taaatctgcgtcagctcgtggttct

SEQ ID NO: 159500 - DNA, 25 bp, Saccharomyces pastorianus
atctgcgtcagctcgtggttcttat

SEQ ID NO: 159501 - DNA, 25 bp, Saccharomyces pastorianus
gcgtcagctcgtggttcttatttgc

SEQ ID NO: 159502 - DNA, 25 bp, Saccharomyces pastorianus
aatctgcgtcagctcgtggttctta

SEQ ID NO: 159503 - DNA, 25 bp, Saccharomyces pastorianus
cagctcgtggttcttatttgcgtgt

SEQ ID NO: 159504 - DNA, 25 bp, Saccharomyces pastorianus
gtcagctcgtggttcttatttgcgt

SEQ ID NO: 159505 - DNA, 25 bp, Saccharomyces pastorianus
aacccagctaaatctgcgtcagctc

SEQ ID NO: 159506 - DNA, 25 bp, Saccharomyces pastorianus
gctaaatctgcgtcagctcgtggtt

SEQ ID NO: 159507 - DNA, 25 bp, Saccharomyces pastorianus
tcagctcgtggttcttatttgcgtg

SEQ ID NO: 159508 - DNA, 25 bp, Saccharomyces pastorianus
aaccaacccagctaaatctgcgtca

SEQ ID NO: 159509 - DNA, 25 bp, Saccharomyces pastorianus
ctgcgtcagctcgtggttcttattt

SEQ ID NO: 159510 - DNA, 25 bp, Saccharomyces pastorianus
agatacggtgctacttcaaccaacc

SEQ ID NO: 159511 - DNA, 25 bp, Saccharomyces pastorianus
agctcgtggttcttatttgcgtgtt

SEQ ID NO: 159512 - DNA, 25 bp, Saccharomyces pastorianus
taaatctgcgtcagctcgtggttct

SEQ ID NO: 159513 - DNA, 25 bp, Saccharomyces pastorianus
gcgtcagctcgtggttcttatttgc

SEQ ID NO: 159514 - DNA, 25 bp, Saccharomyces pastorianus
aatctgcgtcagctcgtggttctta

SEQ ID NO: 159515 - DNA, 25 bp, Saccharomyces pastorianus
actcctctattggtagaactgccca

SEQ ID NO: 159516 - DNA, 25 bp, Saccharomyces pastorianus
aacccagctaaatctgcgtcagctc

SEQ ID NO: 159517 - DNA, 25 bp, Saccharomyces pastorianus
gctaaatctgcgtcagctcgtggtt

SEQ ID NO: 159518 - DNA, 25 bp, Saccharomyces pastorianus
aaggatgaagcaactgttccgaaca

SEQ ID NO: 159519 - DNA, 25 bp, Saccharomyces pastorianus
ggttgccaatacagatactgctggt

SEQ ID NO: 159520 - DNA, 25 bp, Saccharomyces pastorianus
agcaacgctaatgcagctgtggcag

SEQ ID NO: 159521 - DNA, 25 bp, Saccharomyces pastorianus
gatgagtctctgaaggatgaagcaa

SEQ ID NO: 159522 - DNA, 25 bp, Saccharomyces pastorianus
acagatactgctggtgaagaatcgc

SEQ ID NO: 159523 - DNA, 25 bp, Saccharomyces pastorianus
taaacgcttccgtggacgtggacca

SEQ ID NO: 159524 - DNA, 25 bp, Saccharomyces pastorianus
ggtgaagaatcgcagcaacaagatg

SEQ ID NO: 159525 - DNA, 25 bp, Saccharomyces pastorianus
tgttccgaacacacgcgatgcagaa

SEQ ID NO: 159526 - DNA, 25 bp, Saccharomyces pastorianus
ggacgtggaccaacatggcaatgac

SEQ ID NO: 159527 - DNA, 25 bp, Saccharomyces pastorianus
tgacaacaatagtgatagcaacgct

SEQ ID NO: 159528 - DNA, 25 bp, Saccharomyces pastorianus
agcgaggcgataacggtaacggcaa

SEQ ID NO: 159529 - DNA, 25 bp, Saccharomyces pastorianus
gagcagatacgcagttcagtgatat

SEQ ID NO: 159530 - DNA, 25 bp, Saccharomyces pastorianus
gaagcttaacgtgcagctgtttaat

SEQ ID NO: 159531 - DNA, 25 bp, Saccharomyces pastorianus
attccggaatttgatgcagtggctg

SEQ ID NO: 159532 - DNA, 25 bp, Saccharomyces pastorianus
tcaagtatcattacagcgcctgaga

SEQ ID NO: 159533 - DNA, 25 bp, Saccharomyces pastorianus
aaggtggaacttttgcccaagcaga

SEQ ID NO: 159534 - DNA, 25 bp, Saccharomyces pastorianus
aatcacagcgactcaatcgacatag

SEQ ID NO: 159535 - DNA, 25 bp, Saccharomyces pastorianus
gaattgttccaatctttaccaagag

SEQ ID NO: 159536 - DNA, 25 bp, Saccharomyces pastorianus
taaaaagccgaagaccactcagagt

SEQ ID NO: 159537 - DNA, 25 bp, Saccharomyces pastorianus
cagtggctgaccttgaaacattgaa

SEQ ID NO: 159538 - DNA, 25 bp, Saccharomyces pastorianus
gacttgctgtttcgtcgggatgaaa

SEQ ID NO: 159539 - DNA, 25 bp, Saccharomyces pastorianus
ggaattacacccgagatcttagatt

SEQ ID NO: 159540 - DNA, 25 bp, Saccharomyces pastorianus
ggtggtgttaccgactacgcttcca

SEQ ID NO: 159541 - DNA, 25 bp, Saccharomyces pastorianus
atccaagctactactaagactaccg

SEQ ID NO: 159542 - DNA, 25 bp, Saccharomyces pastorianus
caacagccacttacagcggtggtgt

SEQ ID NO: 159543 - DNA, 25 bp, Saccharomyces pastorianus
ttctgtctctaccaagagtaccgct

SEQ ID NO: 159544 - DNA, 25 bp, Saccharomyces pastorianus
agctgcttcccaaattggtgatggt

SEQ ID NO: 159545 - DNA, 25 bp, Saccharomyces pastorianus
gtctctaccaagagtaccgctgccg

SEQ ID NO: 159546 - DNA, 25 bp, Saccharomyces pastorianus
aagtccaagctgctaccactactgc

SEQ ID NO: 159547 - DNA, 25 bp, Saccharomyces pastorianus
tactgcttctgtctctaccaagagt

SEQ ID NO: 159548 - DNA, 25 bp, Saccharomyces pastorianus
gcctatgctccatctgagccttggt

SEQ ID NO: 159549 - DNA, 25 bp, Saccharomyces pastorianus
gtgttaccgactacgcttccacctt

SEQ ID NO: 159550 - DNA, 25 bp, Saccharomyces pastorianus
acagcggtggtgttaccgactacgc

SEQ ID NO: 159551 - DNA, 25 bp, Saccharomyces pastorianus
aagaccaggatttcacccggtgaat

SEQ ID NO: 159552 - DNA, 25 bp, Saccharomyces pastorianus
tctccattgcatcctataaccattt

SEQ ID NO: 159553 - DNA, 25 bp, Saccharomyces pastorianus
gggtacattcattgcgggagacgat

SEQ ID NO: 159554 - DNA, 25 bp, Saccharomyces pastorianus
taggtggccataaccggatttccat

SEQ ID NO: 159555 - DNA, 25 bp, Saccharomyces pastorianus
ggtattaaaccggtctccattgcat

SEQ ID NO: 159556 - DNA, 25 bp, Saccharomyces pastorianus
agttgaccactgcattgtcatcaaa

SEQ ID NO: 159557 - DNA, 25 bp, Saccharomyces pastorianus
ggatttccattcacaatgtttgcga

SEQ ID NO: 159558 - DNA, 25 bp, Saccharomyces pastorianus
caagttgaagtctgttctggcccag

SEQ ID NO: 159559 - DNA, 25 bp, Saccharomyces pastorianus
ttctggcccagttcttagtggatgc

SEQ ID NO: 159560 - DNA, 25 bp, Saccharomyces pastorianus
ggagacgatctcaagtcgggacaaa

SEQ ID NO: 159561 - DNA, 25 bp, Saccharomyces pastorianus
gaagattctttactggctacgccct

SEQ ID NO: 159562 - DNA, 25 bp, Saccharomyces pastorianus
gagagctgttgtttgttgtccatca

SEQ ID NO: 159563 - DNA, 25 bp, Saccharomyces pastorianus
tgagattcctctgcagggtgagctt

SEQ ID NO: 159564 - DNA, 25 bp, Saccharomyces pastorianus
tggcctccgcatatttcacattcaa

SEQ ID NO: 159565 - DNA, 25 bp, Saccharomyces pastorianus
aaagagctcgttccgatcactaagt

SEQ ID NO: 159566 - DNA, 25 bp, Saccharomyces pastorianus
taagtacggccggaagagagctgtt

SEQ ID NO: 159567 - DNA, 25 bp, Saccharomyces pastorianus
atcgtcttcatcatatgctggaggc

SEQ ID NO: 159568 - DNA, 25 bp, Saccharomyces pastorianus
acattcaacactttcgattccgcat

SEQ ID NO: 159569 - DNA, 25 bp, Saccharomyces pastorianus
atttagccgccgaaacgcatacttg

SEQ ID NO: 159570 - DNA, 25 bp, Saccharomyces pastorianus
gttgtccatcaagggcacatcggca

SEQ ID NO: 159571 - DNA, 25 bp, Saccharomyces pastorianus
cggaacaccggcacgtatttcataa

SEQ ID NO: 159572 - DNA, 25 bp, Saccharomyces pastorianus
gctggaggctgtgcttgagattcct

SEQ ID NO: 159573 - DNA, 25 bp, Saccharomyces pastorianus
aaggagaatatatctggcgacatct

SEQ ID NO: 159574 - DNA, 25 bp, Saccharomyces pastorianus
ggcgacatctccaataattttgctg

SEQ ID NO: 159575 - DNA, 25 bp, Saccharomyces pastorianus
gaagggccaacaagcgcgttcaata

SEQ ID NO: 159576 - DNA, 25 bp, Saccharomyces pastorianus
ctggtggtgctgatagcgtcgacat

SEQ ID NO: 159577 - DNA, 25 bp, Saccharomyces pastorianus
gaagtgcgaaggactctagtaacaa

SEQ ID NO: 159578 - DNA, 25 bp, Saccharomyces pastorianus
gcgtcgacattggtgctatcagtaa

SEQ ID NO: 159579 - DNA, 25 bp, Saccharomyces pastorianus
ctatgtctataatcctagctctgcc

SEQ ID NO: 159580 - DNA, 25 bp, Saccharomyces pastorianus
aatcctagctctgccactggtggtg

SEQ ID NO: 159581 - DNA, 25 bp, Saccharomyces pastorianus
aattttgctgttactcattctgttc

SEQ ID NO: 159582 - DNA, 25 bp, Saccharomyces pastorianus
aatacaggccacaactatgtctata

SEQ ID NO: 159583 - DNA, 25 bp, Saccharomyces pastorianus
actcattctgttcaagaagggccaa

SEQ ID NO: 159584 - DNA, 25 bp, Saccharomyces pastorianus
gagtgagtctcttgtttctctacaa

SEQ ID NO: 159585 - DNA, 25 bp, Saccharomyces pastorianus
gaacctaactgtggctggcggttaa

SEQ ID NO: 159586 - DNA, 25 bp, Saccharomyces pastorianus
gagcattggtggtttcctttgttta

SEQ ID NO: 159587 - DNA, 25 bp, Saccharomyces pastorianus
aggaatatggtgctccaagctccca

SEQ ID NO: 159588 - DNA, 25 bp, Saccharomyces pastorianus
tagacgaatgtccttgcttccaaga

SEQ ID NO: 159589 - DNA, 25 bp, Saccharomyces pastorianus
caggtttccgggtttacgcattgag

SEQ ID NO: 159590 - DNA, 25 bp, Saccharomyces pastorianus
caagaatcttctgtcatggtccaac

SEQ ID NO: 159591 - DNA, 25 bp, Saccharomyces pastorianus
agagcacctccattacatcgaatta

SEQ ID NO: 159592 - DNA, 25 bp, Saccharomyces pastorianus
gtcaccctggtgtacaatttggaac

SEQ ID NO: 159593 - DNA, 25 bp, Saccharomyces pastorianus
gcctaccgtgcgttgttatctggaa

SEQ ID NO: 159594 - DNA, 25 bp, Saccharomyces pastorianus
gttcatgggcgttgtgtcaggtatt

SEQ ID NO: 159595 - DNA, 25 bp, Saccharomyces pastorianus
tgatgttcccgatagatgcccttaa

SEQ ID NO: 159596 - DNA, 25 bp, Saccharomyces pastorianus
gcgaaatcgctgtctgccaagaata

SEQ ID NO: 159597 - DNA, 25 bp, Saccharomyces pastorianus
gaaggaactctagccctatggaagg

SEQ ID NO: 159598 - DNA, 25 bp, Saccharomyces pastorianus
tgtcatactaggtgcgggacctgca

SEQ ID NO: 159599 - DNA, 25 bp, Saccharomyces pastorianus
cgcgccattgtaccatcaacttata

SEQ ID NO: 159600 - DNA, 25 bp, Saccharomyces pastorianus
ggatctacccgattatgaggcgctc

SEQ ID NO: 159601 - DNA, 25 bp, Saccharomyces pastorianus
tctcacatctctacttccgaaggaa

SEQ ID NO: 159602 - DNA, 25 bp, Saccharomyces pastorianus
gatgcccttaagacgcgaatacaat

SEQ ID NO: 159603 - DNA, 25 bp, Saccharomyces pastorianus
gaagggtgttcagtctgtcatacta

SEQ ID NO: 159604 - DNA, 25 bp, Saccharomyces pastorianus
attcaacaaggccaattccagcaat

SEQ ID NO: 159605 - DNA, 25 bp, Saccharomyces pastorianus
cagcaatacctatggatctacccga

SEQ ID NO: 159606 - DNA, 25 bp, Saccharomyces pastorianus
tacaaaatgcttcatcttctccggc

SEQ ID NO: 159607 - DNA, 25 bp, Saccharomyces pastorianus
gaagccagctagatccagcgtaaat

SEQ ID NO: 159608 - DNA, 25 bp, Saccharomyces pastorianus
gaaagtcagaattccactgctgtga

SEQ ID NO: 159609 - DNA, 25 bp, Saccharomyces pastorianus
gaattccactgctgtgacattacaa

SEQ ID NO: 159610 - DNA, 25 bp, Saccharomyces pastorianus
aaaactccatcaacagacctaagct

SEQ ID NO: 159611 - DNA, 25 bp, Saccharomyces pastorianus
gtagcgttggacctatacttccaaa

SEQ ID NO: 159612 - DNA, 25 bp, Saccharomyces pastorianus
gaaagagctggtctcttgaagccag

SEQ ID NO: 159613 - DNA, 25 bp, Saccharomyces pastorianus
atcaccacgaggacactttccaaaa

SEQ ID NO: 159614 - DNA, 25 bp, Saccharomyces pastorianus
aattattggttgacgcaagcgctaa

SEQ ID NO: 159615 - DNA, 25 bp, Saccharomyces pastorianus
agctgacttcaaatttgcaccacaa

SEQ ID NO: 159616 - DNA, 25 bp, Saccharomyces pastorianus
caccacaaggtgcactctttaaata

SEQ ID NO: 159617 - DNA, 25 bp, Saccharomyces pastorianus
ggtgcgagaagcaacgaatctgtat

SEQ ID NO: 159618 - DNA, 25 bp, Saccharomyces pastorianus
ggtcttagccgcacgtaaaacctgt

SEQ ID NO: 159619 - DNA, 25 bp, Saccharomyces pastorianus
gacaacggtcttagccgcacgtaaa

SEQ ID NO: 159620 - DNA, 25 bp, Saccharomyces pastorianus
acagttgatacagaacgtcggatca

SEQ ID NO: 159621 - DNA, 25 bp, Saccharomyces pastorianus
tgatacagaacgtcggatcaacaaa

SEQ ID NO: 159622 - DNA, 25 bp, Saccharomyces pastorianus
tagccgcacgtaaaacctgtgtggt

SEQ ID NO: 159623 - DNA, 25 bp, Saccharomyces pastorianus
aaccacttgacaacggtcttagccg

SEQ ID NO: 159624 - DNA, 25 bp, Saccharomyces pastorianus
ttgacaacggtcttagccgcacgta

SEQ ID NO: 159625 - DNA, 25 bp, Saccharomyces pastorianus
aaacctgtgtggtgcgagaagcaac

SEQ ID NO: 159626 - DNA, 25 bp, Saccharomyces pastorianus
gcaacgaatctgtatacagttgata

SEQ ID NO: 159627 - DNA, 25 bp, Saccharomyces pastorianus
atgaaccacttgacaacggtcttag

SEQ ID NO: 159628 - DNA, 25 bp, Saccharomyces pastorianus
tcaacgactgctactcgtgccaata

SEQ ID NO: 159629 - DNA, 25 bp, Saccharomyces pastorianus
gactgctactcgtgccaataatgaa

SEQ ID NO: 159630 - DNA, 25 bp, Saccharomyces pastorianus
gaaaagcatgaagccatcactgttt

SEQ ID NO: 159631 - DNA, 25 bp, Saccharomyces pastorianus
gaaactgaaaagcatgaagccatca

SEQ ID NO: 159632 - DNA, 25 bp, Saccharomyces pastorianus
aacgactgctactcgtgccaataat

SEQ ID NO: 159633 - DNA, 25 bp, Saccharomyces pastorianus
tgctactcgtgccaataatgaaact

SEQ ID NO: 159634 - DNA, 25 bp, Saccharomyces pastorianus
ctgaaaagcatgaagccatcactgt

SEQ ID NO: 159635 - DNA, 25 bp, Saccharomyces pastorianus
actgctactcgtgccaataatgaaa

SEQ ID NO: 159636 - DNA, 25 bp, Saccharomyces pastorianus
actcgtgccaataatgaaactgaaa

SEQ ID NO: 159637 - DNA, 25 bp, Saccharomyces pastorianus
gctactcgtgccaataatgaaactg

SEQ ID NO: 159638 - DNA, 25 bp, Saccharomyces pastorianus
acgactgctactcgtgccaataatg

SEQ ID NO: 159639 - DNA, 25 bp, Saccharomyces pastorianus
acccggcaaagttcactgatccata

SEQ ID NO: 159640 - DNA, 25 bp, Saccharomyces pastorianus
aaacaacccggcaaagttcactgat

SEQ ID NO: 159641 - DNA, 25 bp, Saccharomyces pastorianus
taaacaacccggcaaagttcactga

SEQ ID NO: 159642 - DNA, 25 bp, Saccharomyces pastorianus
aacccggcaaagttcactgatccat

SEQ ID NO: 159643 - DNA, 25 bp, Saccharomyces pastorianus
ccggcaaagttcactgatccatatg

SEQ ID NO: 159644 - DNA, 25 bp, Saccharomyces pastorianus
cccggcaaagttcactgatccatat

SEQ ID NO: 159645 - DNA, 25 bp, Saccharomyces pastorianus
cggcaaagttcactgatccatatga

SEQ ID NO: 159646 - DNA, 25 bp, Saccharomyces pastorianus
ggcaaagttcactgatccatatgag

SEQ ID NO: 159647 - DNA, 25 bp, Saccharomyces pastorianus
caacccggcaaagttcactgatcca

SEQ ID NO: 159648 - DNA, 25 bp, Saccharomyces pastorianus
aacaacccggcaaagttcactgatc

SEQ ID NO: 159649 - DNA, 25 bp, Saccharomyces pastorianus
acaacccggcaaagttcactgatcc

SEQ ID NO: 159650 - DNA, 25 bp, Saccharomyces pastorianus
acttttgggtttgatcatgctgcgt

SEQ ID NO: 159651 - DNA, 25 bp, Saccharomyces pastorianus
ggtcatataccgatggaatcccgaa

SEQ ID NO: 159652 - DNA, 25 bp, Saccharomyces pastorianus
tggcttattaaacatccgaacagaa

SEQ ID NO: 159653 - DNA, 25 bp, Saccharomyces pastorianus
gaagatgccgtagcttgtctaagaa

SEQ ID NO: 159654 - DNA, 25 bp, Saccharomyces pastorianus
ggaaactgaattctatcaagcttct

SEQ ID NO: 159655 - DNA, 25 bp, Saccharomyces pastorianus
gtggtccacaatctgtgaatctgat

SEQ ID NO: 159656 - DNA, 25 bp, Saccharomyces pastorianus
attcgaccccgtaagttgccagcag

SEQ ID NO: 159657 - DNA, 25 bp, Saccharomyces pastorianus
ttgggtccgatttgtggtccacaat

SEQ ID NO: 159658 - DNA, 25 bp, Saccharomyces pastorianus
ctgattaattatgtctcccctcaag

SEQ ID NO: 159659 - DNA, 25 bp, Saccharomyces pastorianus
catgctgcgtacctggcattgggaa

SEQ ID NO: 159660 - DNA, 25 bp, Saccharomyces pastorianus
tattgcgataaagttgggtccgatt

SEQ ID NO: 159661 - DNA, 25 bp, Saccharomyces pastorianus
gaagaaaagtcgtcgctctaagata

SEQ ID NO: 159662 - DNA, 25 bp, Saccharomyces pastorianus
aatttaccgcaagacggcctgatgc

SEQ ID NO: 159663 - DNA, 25 bp, Saccharomyces pastorianus
agatactcgtatttgcgcttgctgc

SEQ ID NO: 159664 - DNA, 25 bp, Saccharomyces pastorianus
ggcctgatgcttaacttagtcgtaa

SEQ ID NO: 159665 - DNA, 25 bp, Saccharomyces pastorianus
tgtaccatcagactcagacacagat

SEQ ID NO: 159666 - DNA, 25 bp, Saccharomyces pastorianus
agttgggagtagtacctctgtcctt

SEQ ID NO: 159667 - DNA, 25 bp, Saccharomyces pastorianus
ggtggccctctctcgcgaatgaaga

SEQ ID NO: 159668 - DNA, 25 bp, Saccharomyces pastorianus
ttacacacgcaccatcatacaagtt

SEQ ID NO: 159669 - DNA, 25 bp, Saccharomyces pastorianus
ataacccgaattctcatcacttaca

SEQ ID NO: 159670 - DNA, 25 bp, Saccharomyces pastorianus
gatgaaacttttccctacgacagaa

SEQ ID NO: 159671 - DNA, 25 bp, Saccharomyces pastorianus
gtctcacttacagcccttaaattta

SEQ ID NO: 159672 - DNA, 25 bp, Saccharomyces pastorianus
ctttacattctttgaaaggcagtgt

SEQ ID NO: 159673 - DNA, 25 bp, Saccharomyces pastorianus
atgtcggtgcctaataatgggccca

SEQ ID NO: 159674 - DNA, 25 bp, Saccharomyces pastorianus
ggcagtgttgttccagtgaaagact

SEQ ID NO: 159675 - DNA, 25 bp, Saccharomyces pastorianus
gccgtgagtgaatcttcagtaacaa

SEQ ID NO: 159676 - DNA, 25 bp, Saccharomyces pastorianus
atgggcccaaagacatttctttaca

SEQ ID NO: 159677 - DNA, 25 bp, Saccharomyces pastorianus
gttgttccagtgaaagactcaaata

SEQ ID NO: 159678 - DNA, 25 bp, Saccharomyces pastorianus
gtcggtgcctaataatgggcccaaa

SEQ ID NO: 159679 - DNA, 25 bp, Saccharomyces pastorianus
gtcagccgtgagtgaatcttcagta

SEQ ID NO: 159680 - DNA, 25 bp, Saccharomyces pastorianus
gaaaggcagtgttgttccagtgaaa

SEQ ID NO: 159681 - DNA, 25 bp, Saccharomyces pastorianus
aaaagtcagccgtgagtgaatcttc

SEQ ID NO: 159682 - DNA, 25 bp, Saccharomyces pastorianus
gtgaatcttcagtaacaaatagcaa

SEQ ID NO: 159683 - DNA, 25 bp, Saccharomyces pastorianus
gggctccttctgttgctaatgtagc

SEQ ID NO: 159684 - DNA, 25 bp, Saccharomyces pastorianus
caaaggccaagtatgagtctgcgca

SEQ ID NO: 159685 - DNA, 25 bp, Saccharomyces pastorianus
gctccttctgttgctaatgtagcaa

SEQ ID NO: 159686 - DNA, 25 bp, Saccharomyces pastorianus
ctctgtcaatgaagaaggaaatcgt

SEQ ID NO: 159687 - DNA, 25 bp, Saccharomyces pastorianus
ggccaagtatgagtctgcgcagatt

SEQ ID NO: 159688 - DNA, 25 bp, Saccharomyces pastorianus
agcatcgtcttttcctgttgttggt

SEQ ID NO: 159689 - DNA, 25 bp, Saccharomyces pastorianus
caagcatcgtcttttcctgttgttg

SEQ ID NO: 159690 - DNA, 25 bp, Saccharomyces pastorianus
atgagtctgcgcagattgataggca

SEQ ID NO: 159691 - DNA, 25 bp, Saccharomyces pastorianus
gtctgcgcagattgataggcagcag

SEQ ID NO: 159692 - DNA, 25 bp, Saccharomyces pastorianus
atcgtcttttcctgttgttggtggg

SEQ ID NO: 159693 - DNA, 25 bp, Saccharomyces pastorianus
atgtagcaactacctctgtcaatga

SEQ ID NO: 159694 - DNA, 25 bp, Saccharomyces pastorianus
gtatgtgccattgctttgattctgg

SEQ ID NO: 159695 - DNA, 25 bp, Saccharomyces pastorianus
gtcagaagactgtatgtgccattgc

SEQ ID NO: 159696 - DNA, 25 bp, Saccharomyces pastorianus
aaatggttgaccctgcttccttcta

SEQ ID NO: 159697 - DNA, 25 bp, Saccharomyces pastorianus
aactgcatgttgaacagctctcagg

SEQ ID NO: 159698 - DNA, 25 bp, Saccharomyces pastorianus
gcaatccaaatggttgaccctgctt

SEQ ID NO: 159699 - DNA, 25 bp, Saccharomyces pastorianus
tttctgtttccttcaattctaaaca

SEQ ID NO: 159700 - DNA, 25 bp, Saccharomyces pastorianus
aacagctctcaggtggtcagaagac

SEQ ID NO: 159701 - DNA, 25 bp, Saccharomyces pastorianus
ttgctttgattctggcaatccaaat

SEQ ID NO: 159702 - DNA, 25 bp, Saccharomyces pastorianus
tacaggtgtttcaatttctgtttcc

SEQ ID NO: 159703 - DNA, 25 bp, Saccharomyces pastorianus
ctgcttccttctatctgtttgatga

SEQ ID NO: 159704 - DNA, 25 bp, Saccharomyces pastorianus
aaattgatgctgcactcgacaagca

SEQ ID NO: 159705 - DNA, 25 bp, Saccharomyces pastorianus
ccacgaccacgaagcggtactgata

SEQ ID NO: 159706 - DNA, 25 bp, Saccharomyces pastorianus
tactgatagttattgtatgctcgac

SEQ ID NO: 159707 - DNA, 25 bp, Saccharomyces pastorianus
attgctatgcaagttccacgaccac

SEQ ID NO: 159708 - DNA, 25 bp, Saccharomyces pastorianus
gtgccataattctgttaggagcgga

SEQ ID NO: 159709 - DNA, 25 bp, Saccharomyces pastorianus
ctgtttttgcgcctagcaagtttca

SEQ ID NO: 159710 - DNA, 25 bp, Saccharomyces pastorianus
acagagactgtttttgcgcctagca

SEQ ID NO: 159711 - DNA, 25 bp, Saccharomyces pastorianus
gtatgctcgacattgttatatggaa

SEQ ID NO: 159712 - DNA, 25 bp, Saccharomyces pastorianus
gatatcgtttatcacagagactgtt

SEQ ID NO: 159713 - DNA, 25 bp, Saccharomyces pastorianus
aggtgccattgctatcgcattgcta

SEQ ID NO: 159714 - DNA, 25 bp, Saccharomyces pastorianus
ggaataccgtcactgatatcgttta

SEQ ID NO: 159715 - DNA, 25 bp, Saccharomyces pastorianus
attttgcattgccactgatcaccat

SEQ ID NO: 159716 - DNA, 25 bp, Saccharomyces pastorianus
tcacaagccgtaatccaactggacg

SEQ ID NO: 159717 - DNA, 25 bp, Saccharomyces pastorianus
gcatatgtgctgttattcccataac

SEQ ID NO: 159718 - DNA, 25 bp, Saccharomyces pastorianus
aactggacgatcttcgtcgccgtaa

SEQ ID NO: 159719 - DNA, 25 bp, Saccharomyces pastorianus
ttgcgccgtttaggattttgtactc

SEQ ID NO: 159720 - DNA, 25 bp, Saccharomyces pastorianus
attcccgtgctggatcctgttaaaa

SEQ ID NO: 159721 - DNA, 25 bp, Saccharomyces pastorianus
atcatgctttgcattccaagaacgc

SEQ ID NO: 159722 - DNA, 25 bp, Saccharomyces pastorianus
aacacaaagttatcctccaatccct

SEQ ID NO: 159723 - DNA, 25 bp, Saccharomyces pastorianus
ccaaagatattagagccagcggtca

SEQ ID NO: 159724 - DNA, 25 bp, Saccharomyces pastorianus
tcgccgtaaaagagttttgcgccgt

SEQ ID NO: 159725 - DNA, 25 bp, Saccharomyces pastorianus
caatcccttaaccaattccatgaga

SEQ ID NO: 159726 - DNA, 25 bp, Saccharomyces pastorianus
gaggttcccggatggtattcccgtg

SEQ ID NO: 159727 - DNA, 25 bp, Saccharomyces pastorianus
gaactcaaatagacaccagtgctac

SEQ ID NO: 159728 - DNA, 25 bp, Saccharomyces pastorianus
ccagtgctactaatgcggttttaat

SEQ ID NO: 159729 - DNA, 25 bp, Saccharomyces pastorianus
taatggatatattggttctaccgaa

SEQ ID NO: 159730 - DNA, 25 bp, Saccharomyces pastorianus
aagtttcaaaataacctcgctcaag

SEQ ID NO: 159731 - DNA, 25 bp, Saccharomyces pastorianus
aaacaggcgagattactatctgaaa

SEQ ID NO: 159732 - DNA, 25 bp, Saccharomyces pastorianus
gaaagcagtagcgaggatctattaa

SEQ ID NO: 159733 - DNA, 25 bp, Saccharomyces pastorianus
ataacctcgctcaagtaagaactca

SEQ ID NO: 159734 - DNA, 25 bp, Saccharomyces pastorianus
aagaaccaggatttgcacgagccaa

SEQ ID NO: 159735 - DNA, 25 bp, Saccharomyces pastorianus
gaccagagtttaatgagctgccgaa

SEQ ID NO: 159736 - DNA, 25 bp, Saccharomyces pastorianus
agggtcatgaccgtaccgaagaggt

SEQ ID NO: 159737 - DNA, 25 bp, Saccharomyces pastorianus
gaaggacctgtgcaagataatgaaa

SEQ ID NO: 159738 - DNA, 25 bp, Saccharomyces pastorianus
aagcacgccagaaagtgcggtgtac

SEQ ID NO: 159739 - DNA, 25 bp, Saccharomyces pastorianus
cttgcaggtctactacttttctact

SEQ ID NO: 159740 - DNA, 25 bp, Saccharomyces pastorianus
attgccttgcaggtctactactttt

SEQ ID NO: 159741 - DNA, 25 bp, Saccharomyces pastorianus
tgcggtgtactggtgcaacctttta

SEQ ID NO: 159742 - DNA, 25 bp, Saccharomyces pastorianus
cttgcattgccttgcaggtctacta

SEQ ID NO: 159743 - DNA, 25 bp, Saccharomyces pastorianus
aagtgcggtgtactggtgcaacctt

SEQ ID NO: 159744 - DNA, 25 bp, Saccharomyces pastorianus
gcaagccagatccaagcacgccaga

SEQ ID NO: 159745 - DNA, 25 bp, Saccharomyces pastorianus
acgaggccgcgcaagccagatccaa

SEQ ID NO: 159746 - DNA, 25 bp, Saccharomyces pastorianus
aaccttttatcgatttctcatcata

SEQ ID NO: 159747 - DNA, 25 bp, Saccharomyces pastorianus
ggtgtactggtgcaaccttttatcg

SEQ ID NO: 159748 - DNA, 25 bp, Saccharomyces pastorianus
gccagatccaagcacgccagaaagt

SEQ ID NO: 159749 - DNA, 25 bp, Saccharomyces pastorianus
ttttctacttacttggcacgaggcc

SEQ ID NO: 159750 - DNA, 25 bp, Saccharomyces pastorianus
ttgcattgccttgcaggtctactac

SEQ ID NO: 159751 - DNA, 25 bp, Saccharomyces pastorianus
aagcacgccagaaagtgcggtgtac

SEQ ID NO: 159752 - DNA, 25 bp, Saccharomyces pastorianus
cttgcaggtctactacttttctact

SEQ ID NO: 159753 - DNA, 25 bp, Saccharomyces pastorianus
attgccttgcaggtctactactttt

SEQ ID NO: 159754 - DNA, 25 bp, Saccharomyces pastorianus
tgccaagcttgcattgccttgcagg

SEQ ID NO: 159755 - DNA, 25 bp, Saccharomyces pastorianus
aagtgcggtgtactggtgcaacctt

SEQ ID NO: 159756 - DNA, 25 bp, Saccharomyces pastorianus
acgaggccgcgcaagccagatccaa

SEQ ID NO: 159757 - DNA, 25 bp, Saccharomyces pastorianus
aaccttttatcgatttctcatcata

SEQ ID NO: 159758 - DNA, 25 bp, Saccharomyces pastorianus
ggtgtactggtgcaaccttttatcg

SEQ ID NO: 159759 - DNA, 25 bp, Saccharomyces pastorianus
gccagatccaagcacgccagaaagt

SEQ ID NO: 159760 - DNA, 25 bp, Saccharomyces pastorianus
gaactcgccgttcaattttaaggat

SEQ ID NO: 159761 - DNA, 25 bp, Saccharomyces pastorianus
agttcctgcaattcaataatggcca

SEQ ID NO: 159762 - DNA, 25 bp, Saccharomyces pastorianus
tcaagcgttggagagttcctgcaat

SEQ ID NO: 159763 - DNA, 25 bp, Saccharomyces pastorianus
gctcgttggtaatgtacgcttttgc

SEQ ID NO: 159764 - DNA, 25 bp, Saccharomyces pastorianus
ggcacagtgatttcctcttatgggc

SEQ ID NO: 159765 - DNA, 25 bp, Saccharomyces pastorianus
gcatatcattttgaactcgccgttc

SEQ ID NO: 159766 - DNA, 25 bp, Saccharomyces pastorianus
tcaatgcggcagaaccttctaaaaa

SEQ ID NO: 159767 - DNA, 25 bp, Saccharomyces pastorianus
tttattcctgacaatgagtacgttc

SEQ ID NO: 159768 - DNA, 25 bp, Saccharomyces pastorianus
ggccagctatctatcacatgtaacg

SEQ ID NO: 159769 - DNA, 25 bp, Saccharomyces pastorianus
tcatagattccccttccaacataaa

SEQ ID NO: 159770 - DNA, 25 bp, Saccharomyces pastorianus
acgcttttgcagtgatacggacttt

SEQ ID NO: 159771 - DNA, 25 bp, Saccharomyces pastorianus
acttgattgcaatttatgacattat

SEQ ID NO: 159772 - DNA, 25 bp, Saccharomyces pastorianus
tggccttgggccttgaggtgctctt

SEQ ID NO: 159773 - DNA, 25 bp, Saccharomyces pastorianus
ttggtcccagttacctggccttggg

SEQ ID NO: 159774 - DNA, 25 bp, Saccharomyces pastorianus
gatgcaaacaaatcagtcttcttgg

SEQ ID NO: 159775 - DNA, 25 bp, Saccharomyces pastorianus
atgacattatattctgctgtttgca

SEQ ID NO: 159776 - DNA, 25 bp, Saccharomyces pastorianus
acccgccttctttgccatgataatt

SEQ ID NO: 159777 - DNA, 25 bp, Saccharomyces pastorianus
aaatcagtcttcttggtcccagtta

SEQ ID NO: 159778 - DNA, 25 bp, Saccharomyces pastorianus
gataatttggtcaatggaaagcaca

SEQ ID NO: 159779 - DNA, 25 bp, Saccharomyces pastorianus
ttgaggtgctcttggaccacccgcc

SEQ ID NO: 159780 - DNA, 25 bp, Saccharomyces pastorianus
gctgtttgcaggtatatctactttg

SEQ ID NO: 159781 - DNA, 25 bp, Saccharomyces pastorianus
gatacagcctagcaagtttgaaaac

SEQ ID NO: 159782 - DNA, 25 bp, Saccharomyces pastorianus
gcttttaatggccacgctttgggta

SEQ ID NO: 159783 - DNA, 25 bp, Saccharomyces pastorianus
gcagacgttcgcatttgtgacatat

SEQ ID NO: 159784 - DNA, 25 bp, Saccharomyces pastorianus
gggtactctaacaactttgcttgga

SEQ ID NO: 159785 - DNA, 25 bp, Saccharomyces pastorianus
tcaaggtacgcatttgtgcctcaat

SEQ ID NO: 159786 - DNA, 25 bp, Saccharomyces pastorianus
tgatctttctaccattttacctctc

SEQ ID NO: 159787 - DNA, 25 bp, Saccharomyces pastorianus
tttacctctcaagaacgcacattgg

SEQ ID NO: 159788 - DNA, 25 bp, Saccharomyces pastorianus
actcaatatcggtttgggtactcta

SEQ ID NO: 159789 - DNA, 25 bp, Saccharomyces pastorianus
ggatcaggcatacttgtaccactta

SEQ ID NO: 159790 - DNA, 25 bp, Saccharomyces pastorianus
gaaaccagggtccacgaacacaact

SEQ ID NO: 159791 - DNA, 25 bp, Saccharomyces pastorianus
gtgcctcaattgctgcttgttttag

SEQ ID NO: 159792 - DNA, 25 bp, Saccharomyces pastorianus
cacaacttacatcgctactcaatat

SEQ ID NO: 159793 - DNA, 25 bp, Saccharomyces pastorianus
gggctctttacgacaccagtaagta

SEQ ID NO: 159794 - DNA, 25 bp, Saccharomyces pastorianus
ataacagttccatggtagtgccctc

SEQ ID NO: 159795 - DNA, 25 bp, Saccharomyces pastorianus
ttataacagttctaccttccaggcc

SEQ ID NO: 159796 - DNA, 25 bp, Saccharomyces pastorianus
ataagaaagcgtttcctccttcgag

SEQ ID NO: 159797 - DNA, 25 bp, Saccharomyces pastorianus
atatcgtatgccttgcctactttta

SEQ ID NO: 159798 - DNA, 25 bp, Saccharomyces pastorianus
ttccaggccaagttcgacgtaaata

SEQ ID NO: 159799 - DNA, 25 bp, Saccharomyces pastorianus
gatgctgtctcacaaggtgtgccag

SEQ ID NO: 159800 - DNA, 25 bp, Saccharomyces pastorianus
aacggattcttcgaaggaccctgag

SEQ ID NO: 159801 - DNA, 25 bp, Saccharomyces pastorianus
gcttactggccataatttgctttac

SEQ ID NO: 159802 - DNA, 25 bp, Saccharomyces pastorianus
ggaccctgagccaaattccgaggat

SEQ ID NO: 159803 - DNA, 25 bp, Saccharomyces pastorianus
cgatatacatgacctttccagcgtg

SEQ ID NO: 159804 - DNA, 25 bp, Saccharomyces pastorianus
aatccaactcccgaatggttctatc

SEQ ID NO: 159805 - DNA, 25 bp, Saccharomyces pastorianus
aatcaatccaactcccgaatggttc

SEQ ID NO: 159806 - DNA, 25 bp, Saccharomyces pastorianus
atgattgtcggtgggcctaatgaaa

SEQ ID NO: 159807 - DNA, 25 bp, Saccharomyces pastorianus
ggattcactgtgatgattgtcggtg

SEQ ID NO: 159808 - DNA, 25 bp, Saccharomyces pastorianus
acaatcaatccaactcccgaatggt

SEQ ID NO: 159809 - DNA, 25 bp, Saccharomyces pastorianus
tgatgattgtcggtgggcctaatga

SEQ ID NO: 159810 - DNA, 25 bp, Saccharomyces pastorianus
tccaactcccgaatggttctatcaa

SEQ ID NO: 159811 - DNA, 25 bp, Saccharomyces pastorianus
ctgtgatgattgtcggtgggcctaa

SEQ ID NO: 159812 - DNA, 25 bp, Saccharomyces pastorianus
actgtgatgattgtcggtgggccta

SEQ ID NO: 159813 - DNA, 25 bp, Saccharomyces pastorianus
tgtcggtgggcctaatgaaagaacc

SEQ ID NO: 159814 - DNA, 25 bp, Saccharomyces pastorianus
caactcccgaatggttctatcaaaa

SEQ ID NO: 159815 - DNA, 25 bp, Saccharomyces pastorianus
tacgctgtgcgcaagctgctaagtt

SEQ ID NO: 159816 - DNA, 25 bp, Saccharomyces pastorianus
agatgttcaacttcggattccttcc

SEQ ID NO: 159817 - DNA, 25 bp, Saccharomyces pastorianus
gatctcacgctgtctatacgctgtg

SEQ ID NO: 159818 - DNA, 25 bp, Saccharomyces pastorianus
ataactcccgtctccatgatataaa

SEQ ID NO: 159819 - DNA, 25 bp, Saccharomyces pastorianus
aaagtagccaggcatcatccctttc

SEQ ID NO: 159820 - DNA, 25 bp, Saccharomyces pastorianus
atcaacggtatcttcgtcttcatgc

SEQ ID NO: 159821 - DNA, 25 bp, Saccharomyces pastorianus
agttcttcacttctgttatcttctg

SEQ ID NO: 159822 - DNA, 25 bp, Saccharomyces pastorianus
gaaggaaccttgtacccgagagagt

SEQ ID NO: 159823 - DNA, 25 bp, Saccharomyces pastorianus
gctataccgacatattttcccagga

SEQ ID NO: 159824 - DNA, 25 bp, Saccharomyces pastorianus
ttcgtcttcatgcttcagtcgtaat

SEQ ID NO: 159825 - DNA, 25 bp, Saccharomyces pastorianus
tgatgtttggaagccgtctcgagta

SEQ ID NO: 159826 - DNA, 25 bp, Saccharomyces pastorianus
tattagacgacttcttgcaaccacc

SEQ ID NO: 159827 - DNA, 25 bp, Saccharomyces pastorianus
ctctccttcatattctcagcataaa

SEQ ID NO: 159828 - DNA, 25 bp, Saccharomyces pastorianus
atttctactgctaggatgaggccca

SEQ ID NO: 159829 - DNA, 25 bp, Saccharomyces pastorianus
agcatattctgctattggcgccatg

SEQ ID NO: 159830 - DNA, 25 bp, Saccharomyces pastorianus
atactggatgagttcgtctctcctt

SEQ ID NO: 159831 - DNA, 25 bp, Saccharomyces pastorianus
aattccctcgctcaaagttcttctt

SEQ ID NO: 159832 - DNA, 25 bp, Saccharomyces pastorianus
aatagcacttcttcaaattccctcg

SEQ ID NO: 159833 - DNA, 25 bp, Saccharomyces pastorianus
gagtcacctaatccaaagttaccga

SEQ ID NO: 159834 - DNA, 25 bp, Saccharomyces pastorianus
aagcgccaaacgactctgtgggtga

SEQ ID NO: 159835 - DNA, 25 bp, Saccharomyces pastorianus
tggctcgccaagtgcttcagatata

SEQ ID NO: 159836 - DNA, 25 bp, Saccharomyces pastorianus
ggcgtctgaaccaatttctactgct

SEQ ID NO: 159837 - DNA, 25 bp, Saccharomyces pastorianus
tcttgggcattgcactcagacaata

SEQ ID NO: 159838 - DNA, 25 bp, Saccharomyces pastorianus
acataacctcatggaatcgcgctcg

SEQ ID NO: 159839 - DNA, 25 bp, Saccharomyces pastorianus
tatcttctattgaccgccacataac

SEQ ID NO: 159840 - DNA, 25 bp, Saccharomyces pastorianus
tattatcttctattgaccgccacat

SEQ ID NO: 159841 - DNA, 25 bp, Saccharomyces pastorianus
acctcatggaatcgcgctcgagaat

SEQ ID NO: 159842 - DNA, 25 bp, Saccharomyces pastorianus
ctattgaccgccacataacctcatg

SEQ ID NO: 159843 - DNA, 25 bp, Saccharomyces pastorianus
ggaatcgcgctcgagaatatagaat

SEQ ID NO: 159844 - DNA, 25 bp, Saccharomyces pastorianus
gtgtcttgggcattgcactcagaca

SEQ ID NO: 159845 - DNA, 25 bp, Saccharomyces pastorianus
ataacctcatggaatcgcgctcgag

SEQ ID NO: 159846 - DNA, 25 bp, Saccharomyces pastorianus
tattattatcttctattgaccgcca

SEQ ID NO: 159847 - DNA, 25 bp, Saccharomyces pastorianus
gggcattgcactcagacaataaaga

SEQ ID NO: 159848 - DNA, 25 bp, Saccharomyces pastorianus
atccatacccctgtttcaataagac

SEQ ID NO: 159849 - DNA, 25 bp, Saccharomyces pastorianus
taacgaaaacaactttgccttatct

SEQ ID NO: 159850 - DNA, 25 bp, Saccharomyces pastorianus
tgatccatacccctgtttcaataag

SEQ ID NO: 159851 - DNA, 25 bp, Saccharomyces pastorianus
gtctctagcacttactgagcaacta

SEQ ID NO: 159852 - DNA, 25 bp, Saccharomyces pastorianus
gcacttactgagcaactaacgaaaa

SEQ ID NO: 159853 - DNA, 25 bp, Saccharomyces pastorianus
tatccggtcgaatctttccctgatc

SEQ ID NO: 159854 - DNA, 25 bp, Saccharomyces pastorianus
gtgtctctagcacttactgagcaac

SEQ ID NO: 159855 - DNA, 25 bp, Saccharomyces pastorianus
gagactatccggtcgaatctttccc

SEQ ID NO: 159856 - DNA, 25 bp, Saccharomyces pastorianus
gatagagactatccggtcgaatctt

SEQ ID NO: 159857 - DNA, 25 bp, Saccharomyces pastorianus
ctgtttcaataagacagtgtctcta

SEQ ID NO: 159858 - DNA, 25 bp, Saccharomyces pastorianus
ggtcgaatctttccctgatccatac

SEQ ID NO: 159859 - DNA, 25 bp, Saccharomyces pastorianus
gccaaagcattgtctctatcggatt

SEQ ID NO: 159860 - DNA, 25 bp, Saccharomyces pastorianus
gaccctgtacatcaaacttttgtga

SEQ ID NO: 159861 - DNA, 25 bp, Saccharomyces pastorianus
gctcataatataggcgactccgtat

SEQ ID NO: 159862 - DNA, 25 bp, Saccharomyces pastorianus
gtaatgtcactatgggacctgaaca

SEQ ID NO: 159863 - DNA, 25 bp, Saccharomyces pastorianus
atgattacacgaacaacacacctag

SEQ ID NO: 159864 - DNA, 25 bp, Saccharomyces pastorianus
ggatacgctttactttatactcaat

SEQ ID NO: 159865 - DNA, 25 bp, Saccharomyces pastorianus
aagatctccattattgaccctgtac

SEQ ID NO: 159866 - DNA, 25 bp, Saccharomyces pastorianus
gaagtctctttaacacgtggtattt

SEQ ID NO: 159867 - DNA, 25 bp, Saccharomyces pastorianus
acacacctagttacctacctattga

SEQ ID NO: 159868 - DNA, 25 bp, Saccharomyces pastorianus
gtaacaggcctttgatttctttgat

SEQ ID NO: 159869 - DNA, 25 bp, Saccharomyces pastorianus
gcacgtttgttgttgcttccggaaa

SEQ ID NO: 159870 - DNA, 25 bp, Saccharomyces pastorianus
gaagacctgcggttcagaggccaac

SEQ ID NO: 159871 - DNA, 25 bp, Saccharomyces pastorianus
agaatggcgaagacctcatccgaat

SEQ ID NO: 159872 - DNA, 25 bp, Saccharomyces pastorianus
gctggtttcagcttggacactgcaa

SEQ ID NO: 159873 - DNA, 25 bp, Saccharomyces pastorianus
gttcttgcggtagtcaaaggtcatc

SEQ ID NO: 159874 - DNA, 25 bp, Saccharomyces pastorianus
gatcactgcatttggacacaaggct

SEQ ID NO: 159875 - DNA, 25 bp, Saccharomyces pastorianus
atacccggtgaaatatactcgctgt

SEQ ID NO: 159876 - DNA, 25 bp, Saccharomyces pastorianus
tcatccgaatattcccgacgcaaaa

SEQ ID NO: 159877 - DNA, 25 bp, Saccharomyces pastorianus
aatagccagttcaaaatacccggtg

SEQ ID NO: 159878 - DNA, 25 bp, Saccharomyces pastorianus
atgggtgaaacaacgttcttgcggt

SEQ ID NO: 159879 - DNA, 25 bp, Saccharomyces pastorianus
aaaggtcatcggacttgccagaatg

SEQ ID NO: 159880 - DNA, 25 bp, Saccharomyces pastorianus
gaggatgacaatctcagcgatcaag

SEQ ID NO: 159881 - DNA, 25 bp, Saccharomyces pastorianus
aagtatgtaggtggcttctccgatg

SEQ ID NO: 159882 - DNA, 25 bp, Saccharomyces pastorianus
aagttgggactatccattgcagaag

SEQ ID NO: 159883 - DNA, 25 bp, Saccharomyces pastorianus
aattcgtaacggcatctgatcgtat

SEQ ID NO: 159884 - DNA, 25 bp, Saccharomyces pastorianus
gaaatgtgccaataacccaaagtaa

SEQ ID NO: 159885 - DNA, 25 bp, Saccharomyces pastorianus
tgccattggctcatacatgttttaa

SEQ ID NO: 159886 - DNA, 25 bp, Saccharomyces pastorianus
agacgtcttttctttaacatttgag

SEQ ID NO: 159887 - DNA, 25 bp, Saccharomyces pastorianus
tcgtatacctgcaacgggtatctct

SEQ ID NO: 159888 - DNA, 25 bp, Saccharomyces pastorianus
aattagcttgctagggtcgcatgat

SEQ ID NO: 159889 - DNA, 25 bp, Saccharomyces pastorianus
gggtatctctactatcccattcaaa

SEQ ID NO: 159890 - DNA, 25 bp, Saccharomyces pastorianus
gatagtgatgatttgccattggctc

SEQ ID NO: 159891 - DNA, 25 bp, Saccharomyces pastorianus
ttctccgatgattccagagcggttt

SEQ ID NO: 159892 - DNA, 25 bp, Saccharomyces pastorianus
atgctgtgttgctgtaacgatctac

SEQ ID NO: 159893 - DNA, 25 bp, Saccharomyces pastorianus
gaacgcctacggataatttttcata

SEQ ID NO: 159894 - DNA, 25 bp, Saccharomyces pastorianus
tatacctacaatacgaacctgcctt

SEQ ID NO: 159895 - DNA, 25 bp, Saccharomyces pastorianus
ggccatgaattcctgagtactagac

SEQ ID NO: 159896 - DNA, 25 bp, Saccharomyces pastorianus
agatgcgatctcgtcttcgtcggca

SEQ ID NO: 159897 - DNA, 25 bp, Saccharomyces pastorianus
gaacctgccttattagagatcggaa

SEQ ID NO: 159898 - DNA, 25 bp, Saccharomyces pastorianus
gcggtgtcttatgagttggccaaac

SEQ ID NO: 159899 - DNA, 25 bp, Saccharomyces pastorianus
ggtttcacgcatcccgtcaataata

SEQ ID NO: 159900 - DNA, 25 bp, Saccharomyces pastorianus
ggcatcacactactggccatgaatt

SEQ ID NO: 159901 - DNA, 25 bp, Saccharomyces pastorianus
tattggctacttgtctaacctatca

SEQ ID NO: 159902 - DNA, 25 bp, Saccharomyces pastorianus
gattcaatcattacggcgaacgcct

SEQ ID NO: 159903 - DNA, 25 bp, Saccharomyces pastorianus
ttccgtcctttacactagcggctaa

SEQ ID NO: 159904 - DNA, 25 bp, Saccharomyces pastorianus
acgtgcgccttcctgatttgggtaa

SEQ ID NO: 159905 - DNA, 25 bp, Saccharomyces pastorianus
tagcggctaaggaccgttccgacgt

SEQ ID NO: 159906 - DNA, 25 bp, Saccharomyces pastorianus
gatgccgaagagttccgcttattgc

SEQ ID NO: 159907 - DNA, 25 bp, Saccharomyces pastorianus
gtgggacaccacaacataggcaatt

SEQ ID NO: 159908 - DNA, 25 bp, Saccharomyces pastorianus
atttgggtaacctgttcttagtatg

SEQ ID NO: 159909 - DNA, 25 bp, Saccharomyces pastorianus
gttccgcttattgcttttgctattt

SEQ ID NO: 159910 - DNA, 25 bp, Saccharomyces pastorianus
acagatccatctctaccgtcttttt

SEQ ID NO: 159911 - DNA, 25 bp, Saccharomyces pastorianus
tagcaactccttcgacacagatcca

SEQ ID NO: 159912 - DNA, 25 bp, Saccharomyces pastorianus
gacaggatttatcttcttcccctga

SEQ ID NO: 159913 - DNA, 25 bp, Saccharomyces pastorianus
tgctatttgagcaacttccgtcctt

SEQ ID NO: 159914 - DNA, 25 bp, Saccharomyces pastorianus
tgcctccacggcgtatggtgtaaga

SEQ ID NO: 159915 - DNA, 25 bp, Saccharomyces pastorianus
gatgattgttacgaaactcaacgat

SEQ ID NO: 159916 - DNA, 25 bp, Saccharomyces pastorianus
aatgcaaacagtggcggtggtacga

SEQ ID NO: 159917 - DNA, 25 bp, Saccharomyces pastorianus
gaaggccatgatgaacaatgagcaa

SEQ ID NO: 159918 - DNA, 25 bp, Saccharomyces pastorianus
gaaactcaacgatgtctcactgtat

SEQ ID NO: 159919 - DNA, 25 bp, Saccharomyces pastorianus
gatgtctcactgtatttcttaacaa

SEQ ID NO: 159920 - DNA, 25 bp, Saccharomyces pastorianus
aaagattcatctctcgtgaacggca

SEQ ID NO: 159921 - DNA, 25 bp, Saccharomyces pastorianus
atctctcgtgaacggcaatgcaaac

SEQ ID NO: 159922 - DNA, 25 bp, Saccharomyces pastorianus
ggtggtacgagcattaacggaacaa

SEQ ID NO: 159923 - DNA, 25 bp, Saccharomyces pastorianus
gaagctccctgttgaataaagattc

SEQ ID NO: 159924 - DNA, 25 bp, Saccharomyces pastorianus
gaactcaggatatcgacaacgccaa

SEQ ID NO: 159925 - DNA, 25 bp, Saccharomyces pastorianus
gctacctcacctgtttggatgacat

SEQ ID NO: 159926 - DNA, 25 bp, Saccharomyces pastorianus
aatgatatcctttcaaactcgcagg

SEQ ID NO: 159927 - DNA, 25 bp, Saccharomyces pastorianus
aactctttaaccaaacatcagggct

SEQ ID NO: 159928 - DNA, 25 bp, Saccharomyces pastorianus
gagcaacctcctacaaagcaagcga

SEQ ID NO: 159929 - DNA, 25 bp, Saccharomyces pastorianus
gtgacaagactttaccgggtggcta

SEQ ID NO: 159930 - DNA, 25 bp, Saccharomyces pastorianus
tttagactttctatgccgcctttaa

SEQ ID NO: 159931 - DNA, 25 bp, Saccharomyces pastorianus
gtgactgctgacgagttaagggctt

SEQ ID NO: 159932 - DNA, 25 bp, Saccharomyces pastorianus
agttcagtgaaaaccaacaccgcga

SEQ ID NO: 159933 - DNA, 25 bp, Saccharomyces pastorianus
taagtgtcgaacatcctcctaggaa

SEQ ID NO: 159934 - DNA, 25 bp, Saccharomyces pastorianus
ggaatcaagtttacctccagagcaa

SEQ ID NO: 159935 - DNA, 25 bp, Saccharomyces pastorianus
ttaagggcttggtgctataaacgaa

SEQ ID NO: 159936 - DNA, 25 bp, Saccharomyces pastorianus
aattcttcagcaacagtctttaagt

SEQ ID NO: 159937 - DNA, 25 bp, Saccharomyces pastorianus
agctctaaatctgttggccaaaact

SEQ ID NO: 159938 - DNA, 25 bp, Saccharomyces pastorianus
gtctttaagttgaacagagctctaa

SEQ ID NO: 159939 - DNA, 25 bp, Saccharomyces pastorianus
agatgtcccttagttgctctagagt

SEQ ID NO: 159940 - DNA, 25 bp, Saccharomyces pastorianus
gcttcctctggcttagtggcaaatt

SEQ ID NO: 159941 - DNA, 25 bp, Saccharomyces pastorianus
ctgttttgccagacttgttgactaa

SEQ ID NO: 159942 - DNA, 25 bp, Saccharomyces pastorianus
atctgttggccaaaactgttttgcc

SEQ ID NO: 159943 - DNA, 25 bp, Saccharomyces pastorianus
gtggcaaattcttcagcaacagtct

SEQ ID NO: 159944 - DNA, 25 bp, Saccharomyces pastorianus
gacttgttgactaagatgtccctta

SEQ ID NO: 159945 - DNA, 25 bp, Saccharomyces pastorianus
gctctagagtgcattcatcgacgtt

SEQ ID NO: 159946 - DNA, 25 bp, Saccharomyces pastorianus
ttcttggcttcctctggcttagtgg

SEQ ID NO: 159947 - DNA, 25 bp, Saccharomyces pastorianus
gaccaaacttcccatgattgtcgtt

SEQ ID NO: 159948 - DNA, 25 bp, Saccharomyces pastorianus
tgcgtcgggtgccattatcacggaa

SEQ ID NO: 159949 - DNA, 25 bp, Saccharomyces pastorianus
gttccaaaactgcatcatcgacact

SEQ ID NO: 159950 - DNA, 25 bp, Saccharomyces pastorianus
gtacgcctgttccattctgtataag

SEQ ID NO: 159951 - DNA, 25 bp, Saccharomyces pastorianus
taccggagacggattcgacgaattt

SEQ ID NO: 159952 - DNA, 25 bp, Saccharomyces pastorianus
ttatcacggaatcttttgcctccag

SEQ ID NO: 159953 - DNA, 25 bp, Saccharomyces pastorianus
gacactccaggccaaatcgaatgtt

SEQ ID NO: 159954 - DNA, 25 bp, Saccharomyces pastorianus
ctccgggtacatgagctcattggtc

SEQ ID NO: 159955 - DNA, 25 bp, Saccharomyces pastorianus
gaattctattcccagctagacgtcg

SEQ ID NO: 159956 - DNA, 25 bp, Saccharomyces pastorianus
ggtcaattctatgtcactgatgctt

SEQ ID NO: 159957 - DNA, 25 bp, Saccharomyces pastorianus
cagctttcccacagtgattgcatat

SEQ ID NO: 159958 - DNA, 25 bp, Saccharomyces pastorianus
gagcctccagtttcaggaggttgat

SEQ ID NO: 159959 - DNA, 25 bp, Saccharomyces pastorianus
gatatctatttcacaattctaatgc

SEQ ID NO: 159960 - DNA, 25 bp, Saccharomyces pastorianus
ttcacaattctaatgctactgattt

SEQ ID NO: 159961 - DNA, 25 bp, Saccharomyces pastorianus
attctaatgctactgatttacaaaa

SEQ ID NO: 159962 - DNA, 25 bp, Saccharomyces pastorianus
cattagcatttggagttagatatct

SEQ ID NO: 159963 - DNA, 25 bp, Saccharomyces pastorianus
aatagccctcatctcattagcattt

SEQ ID NO: 159964 - DNA, 25 bp, Saccharomyces pastorianus
gatattcgcgataatagccctcatc

SEQ ID NO: 159965 - DNA, 25 bp, Saccharomyces pastorianus
agccctcatctcattagcatttgga

SEQ ID NO: 159966 - DNA, 25 bp, Saccharomyces pastorianus
caggaggttgatgatattcgcgata

SEQ ID NO: 159967 - DNA, 25 bp, Saccharomyces pastorianus
acaaaaagagcctccagtttcagga

SEQ ID NO: 159968 - DNA, 25 bp, Saccharomyces pastorianus
gcgataatagccctcatctcattag

SEQ ID NO: 159969 - DNA, 25 bp, Saccharomyces pastorianus
gacggcagagttcattgttgtcttt

SEQ ID NO: 159970 - DNA, 25 bp, Saccharomyces pastorianus
gactacattcgccaccaatatgatg

SEQ ID NO: 159971 - DNA, 25 bp, Saccharomyces pastorianus
gcaggttgtagacacttcgacgaca

SEQ ID NO: 159972 - DNA, 25 bp, Saccharomyces pastorianus
gggattcggtgattctctcgacaat

SEQ ID NO: 159973 - DNA, 25 bp, Saccharomyces pastorianus
gtgttgataatttccctttcgatga

SEQ ID NO: 159974 - DNA, 25 bp, Saccharomyces pastorianus
ttacccacagatacgtccacagaaa

SEQ ID NO: 159975 - DNA, 25 bp, Saccharomyces pastorianus
tataaatactttgtgcggtcagcag

SEQ ID NO: 159976 - DNA, 25 bp, Saccharomyces pastorianus
tcgacgacaatcttgttacccacag

SEQ ID NO: 159977 - DNA, 25 bp, Saccharomyces pastorianus
atttaatcaacccaactggccacgg

SEQ ID NO: 159978 - DNA, 25 bp, Saccharomyces pastorianus
gaggtataaccttcactgtgatgat

SEQ ID NO: 159979 - DNA, 25 bp, Saccharomyces pastorianus
atatcatcgatactccgggattcgg

SEQ ID NO: 159980 - DNA, 25 bp, Saccharomyces pastorianus
acgcttctaaccgtgcattgcaaga

SEQ ID NO: 159981 - DNA, 25 bp, Saccharomyces pastorianus
aagaggcctatggacgttgcatttc

SEQ ID NO: 159982 - DNA, 25 bp, Saccharomyces pastorianus
gaacgtactaagtccaatcgagccc

SEQ ID NO: 159983 - DNA, 25 bp, Saccharomyces pastorianus
agtatcggatcttttctggcgggtc

SEQ ID NO: 159984 - DNA, 25 bp, Saccharomyces pastorianus
atgctgcgcattcttcccaaggaga

SEQ ID NO: 159985 - DNA, 25 bp, Saccharomyces pastorianus
gggtccaatgcgcaaagctcgttga

SEQ ID NO: 159986 - DNA, 25 bp, Saccharomyces pastorianus
agttgcctcatctaagactatcgga

SEQ ID NO: 159987 - DNA, 25 bp, Saccharomyces pastorianus
gaatacgtttctcgtaacgcttcta

SEQ ID NO: 159988 - DNA, 25 bp, Saccharomyces pastorianus
gtacattattttgccctccaattca

SEQ ID NO: 159989 - DNA, 25 bp, Saccharomyces pastorianus
aagctcgttgatacagacactggac

SEQ ID NO: 159990 - DNA, 25 bp, Saccharomyces pastorianus
actggacatccttttgggcgtgaaa

SEQ ID NO: 159991 - DNA, 25 bp, Saccharomyces pastorianus
gcagaagcctcgcaacttaaagctt

SEQ ID NO: 159992 - DNA, 25 bp, Saccharomyces pastorianus
gcctcgcaacttaaagcttttcagt

SEQ ID NO: 159993 - DNA, 25 bp, Saccharomyces pastorianus
agcttttcagttgtttcttctcggt

SEQ ID NO: 159994 - DNA, 25 bp, Saccharomyces pastorianus
ttttcagttgtttcttctcggtcat

SEQ ID NO: 159995 - DNA, 25 bp, Saccharomyces pastorianus
cttttcagttgtttcttctcggtca

SEQ ID NO: 159996 - DNA, 25 bp, Saccharomyces pastorianus
gaagcctcgcaacttaaagcttttc

SEQ ID NO: 159997 - DNA, 25 bp, Saccharomyces pastorianus
tgatgcagaagcctcgcaacttaaa

SEQ ID NO: 159998 - DNA, 25 bp, Saccharomyces pastorianus
aaagcttttcagttgtttcttctcg

SEQ ID NO: 159999 - DNA, 25 bp, Saccharomyces pastorianus
aagcttttcagttgtttcttctcgg

SEQ ID NO: 160000 - DNA, 25 bp, Saccharomyces pastorianus
gttgatgcagaagcctcgcaactta

SEQ ID NO: 160001 - DNA, 25 bp, Saccharomyces pastorianus
atgcagaagcctcgcaacttaaagc

SEQ ID NO: 160002 - DNA, 25 bp, Saccharomyces pastorianus
ttttggatctacaatttcccctaga

SEQ ID NO: 160003 - DNA, 25 bp, Saccharomyces pastorianus
tcaagaagaccgtccttgtttttct

SEQ ID NO: 160004 - DNA, 25 bp, Saccharomyces pastorianus
atggaaaacttcacgctgccttaga

SEQ ID NO: 160005 - DNA, 25 bp, Saccharomyces pastorianus
atgatgaatccgcatctacgttcca

SEQ ID NO: 160006 - DNA, 25 bp, Saccharomyces pastorianus
tgcacaatggcaactggtcctgaaa

SEQ ID NO: 160007 - DNA, 25 bp, Saccharomyces pastorianus
tgattctcagcctatttccaaggaa

SEQ ID NO: 160008 - DNA, 25 bp, Saccharomyces pastorianus
agtaccagatcctcttcattatcat

SEQ ID NO: 160009 - DNA, 25 bp, Saccharomyces pastorianus
tattgattctcagcctgattctcag

SEQ ID NO: 160010 - DNA, 25 bp, Saccharomyces pastorianus
ctacgttccactcatcattcaataa

SEQ ID NO: 160011 - DNA, 25 bp, Saccharomyces pastorianus
agaagatggtttcttcctctttcct

SEQ ID NO: 160012 - DNA, 25 bp, Saccharomyces pastorianus
tgacaaaattgcctcatctcagctg

SEQ ID NO: 160013 - DNA, 25 bp, Saccharomyces pastorianus
gaataagctcagttccgccgacgga

SEQ ID NO: 160014 - DNA, 25 bp, Saccharomyces pastorianus
gtgggcactcaataccatccagagt

SEQ ID NO: 160015 - DNA, 25 bp, Saccharomyces pastorianus
ggacgagacactactagctcctgaa

SEQ ID NO: 160016 - DNA, 25 bp, Saccharomyces pastorianus
aaaggccatccatactacgtgggca

SEQ ID NO: 160017 - DNA, 25 bp, Saccharomyces pastorianus
gtgttggaaccatcaagaccgtttt

SEQ ID NO: 160018 - DNA, 25 bp, Saccharomyces pastorianus
atggagtctcgtggctttatttttg

SEQ ID NO: 160019 - DNA, 25 bp, Saccharomyces pastorianus
tttcttggtgtctgtcttggattac

SEQ ID NO: 160020 - DNA, 25 bp, Saccharomyces pastorianus
tacaagttgccgctatcgagttcgc

SEQ ID NO: 160021 - DNA, 25 bp, Saccharomyces pastorianus
gagttcgcccgcaatgtgataggcc

SEQ ID NO: 160022 - DNA, 25 bp, Saccharomyces pastorianus
tgggtttgaggcctaccattttcca

SEQ ID NO: 160023 - DNA, 25 bp, Saccharomyces pastorianus
gaaggtatgattcttgctgccaaat

SEQ ID NO: 160024 - DNA, 25 bp, Saccharomyces pastorianus
aagtgggacatgtgttgctcgcttc

SEQ ID NO: 160025 - DNA, 25 bp, Saccharomyces pastorianus
atgctgcattgtgcgaggaggtata

SEQ ID NO: 160026 - DNA, 25 bp, Saccharomyces pastorianus
gctcgcttccagtcgtcagtacgaa

SEQ ID NO: 160027 - DNA, 25 bp, Saccharomyces pastorianus
gtcagtacgaacaccagctagcgaa

SEQ ID NO: 160028 - DNA, 25 bp, Saccharomyces pastorianus
agctagcgaaccatcggcagagaaa

SEQ ID NO: 160029 - DNA, 25 bp, Saccharomyces pastorianus
cacgtctcctgtggcaaagtgggac

SEQ ID NO: 160030 - DNA, 25 bp, Saccharomyces pastorianus
cgagctaagggaagagttctctgca

SEQ ID NO: 160031 - DNA, 25 bp, Saccharomyces pastorianus
caccgggccagtccaaagtagacct

SEQ ID NO: 160032 - DNA, 25 bp, Saccharomyces pastorianus
gtatatgttagtcaggccacgtctc

SEQ ID NO: 160033 - DNA, 25 bp, Saccharomyces pastorianus
gtggcttgaagcgatcaacgagcta

SEQ ID NO: 160034 - DNA, 25 bp, Saccharomyces pastorianus
aagaatacctgccagagacctcgct

SEQ ID NO: 160035 - DNA, 25 bp, Saccharomyces pastorianus
ctattattcgtctcttgaaggcctc

SEQ ID NO: 160036 - DNA, 25 bp, Saccharomyces pastorianus
cttgaaggcctctcgtttaaatttg

SEQ ID NO: 160037 - DNA, 25 bp, Saccharomyces pastorianus
gctgttttcattcagtcgatttaaa

SEQ ID NO: 160038 - DNA, 25 bp, Saccharomyces pastorianus
gtattggcgcagtcacgtatcagga

SEQ ID NO: 160039 - DNA, 25 bp, Saccharomyces pastorianus
gagagcaatacaacgcgccgaatca

SEQ ID NO: 160040 - DNA, 25 bp, Saccharomyces pastorianus
aacttattttcttcactggtaggtg

SEQ ID NO: 160041 - DNA, 25 bp, Saccharomyces pastorianus
atgccagccgcctattgagagtgat

SEQ ID NO: 160042 - DNA, 25 bp, Saccharomyces pastorianus
gtatcaggacttgccatgcggtatt

SEQ ID NO: 160043 - DNA, 25 bp, Saccharomyces pastorianus
ggtaggtgctgattgctgttttcat

SEQ ID NO: 160044 - DNA, 25 bp, Saccharomyces pastorianus
ttaaatttgcccctagagtccctat

SEQ ID NO: 160045 - DNA, 25 bp, Saccharomyces pastorianus
ggatgcatggtcagttgacgactat

SEQ ID NO: 160046 - DNA, 25 bp, Saccharomyces pastorianus
ttcatcttccttctatcatacctaa

SEQ ID NO: 160047 - DNA, 25 bp, Saccharomyces pastorianus
gtatgggtttcattcgacgcatgca

SEQ ID NO: 160048 - DNA, 25 bp, Saccharomyces pastorianus
gttattatctatctccatggtcgga

SEQ ID NO: 160049 - DNA, 25 bp, Saccharomyces pastorianus
tattctgaccctatttcccatagtt

SEQ ID NO: 160050 - DNA, 25 bp, Saccharomyces pastorianus
agaggcgtcgtgatagcgtcatgat

SEQ ID NO: 160051 - DNA, 25 bp, Saccharomyces pastorianus
acgacgatgttctcactttgtcttt

SEQ ID NO: 160052 - DNA, 25 bp, Saccharomyces pastorianus
atccaattttttcagctcaaggcaa

SEQ ID NO: 160053 - DNA, 25 bp, Saccharomyces pastorianus
taatatcgattcaggagccttcccc

SEQ ID NO: 160054 - DNA, 25 bp, Saccharomyces pastorianus
gatttgttatctccgttttctgtcc

SEQ ID NO: 160055 - DNA, 25 bp, Saccharomyces pastorianus
tttccccggcgaaactgattctaat

SEQ ID NO: 160056 - DNA, 25 bp, Saccharomyces pastorianus
gtcccttcagtatctcaagtgcttt

SEQ ID NO: 160057 - DNA, 25 bp, Saccharomyces pastorianus
aaaccattctgctacctcattaaat

SEQ ID NO: 160058 - DNA, 25 bp, Saccharomyces pastorianus
gcttcccgaatactataccgtctaa

SEQ ID NO: 160059 - DNA, 25 bp, Saccharomyces pastorianus
atagtaatatcgatcctgctgccat

SEQ ID NO: 160060 - DNA, 25 bp, Saccharomyces pastorianus
gatttgggctgcttcagtcatgata

SEQ ID NO: 160061 - DNA, 25 bp, Saccharomyces pastorianus
ggagggtacatgtctagccaccatt

SEQ ID NO: 160062 - DNA, 25 bp, Saccharomyces pastorianus
gtctaattctactacggcttctaat

SEQ ID NO: 160063 - DNA, 25 bp, Saccharomyces pastorianus
ttcctcttccacgatcaatttcaat

SEQ ID NO: 160064 - DNA, 25 bp, Saccharomyces pastorianus
ggtccatctttaaccgatcttttga

SEQ ID NO: 160065 - DNA, 25 bp, Saccharomyces pastorianus
tttatttattctccaccttcatcaa

SEQ ID NO: 160066 - DNA, 25 bp, Saccharomyces pastorianus
gtatctcttaagtagcggtccatct

SEQ ID NO: 160067 - DNA, 25 bp, Saccharomyces pastorianus
atgagcagccgcttatgtcactatc

SEQ ID NO: 160068 - DNA, 25 bp, Saccharomyces pastorianus
gccatttcccaaaggttatttctct

SEQ ID NO: 160069 - DNA, 25 bp, Saccharomyces pastorianus
aatgcgaacggttccatccgaaaca

SEQ ID NO: 160070 - DNA, 25 bp, Saccharomyces pastorianus
ggccgcggttcgtatgcataatgca

SEQ ID NO: 160071 - DNA, 25 bp, Saccharomyces pastorianus
aattgtccagatttattcgagcggc

SEQ ID NO: 160072 - DNA, 25 bp, Saccharomyces pastorianus
gacagacggaaaagtgcccagcaac

SEQ ID NO: 160073 - DNA, 25 bp, Saccharomyces pastorianus
gtgcccagcaacacggaacaaaatt

SEQ ID NO: 160074 - DNA, 25 bp, Saccharomyces pastorianus
tccgaaacaggccatttcccaaagg

SEQ ID NO: 160075 - DNA, 25 bp, Saccharomyces pastorianus
gcccctcgtccaaatgcgaacggtt

SEQ ID NO: 160076 - DNA, 25 bp, Saccharomyces pastorianus
cagatttattcgagcggccgcggtt

SEQ ID NO: 160077 - DNA, 25 bp, Saccharomyces pastorianus
tatgcataatgcaggcgcccctcgt

SEQ ID NO: 160078 - DNA, 25 bp, Saccharomyces pastorianus
gaacggttccatccgaaacaggcca

SEQ ID NO: 160079 - DNA, 25 bp, Saccharomyces pastorianus
tgtttccgtgtgtttgcccacatgg

SEQ ID NO: 160080 - DNA, 25 bp, Saccharomyces pastorianus
accattggtgaatctattccgccca

SEQ ID NO: 160081 - DNA, 25 bp, Saccharomyces pastorianus
ttccgcccaacacaaaacatgctgt

SEQ ID NO: 160082 - DNA, 25 bp, Saccharomyces pastorianus
atgctgtttccgtgtgtttgcccac

SEQ ID NO: 160083 - DNA, 25 bp, Saccharomyces pastorianus
attggtgaatctattccgcccaaca

SEQ ID NO: 160084 - DNA, 25 bp, Saccharomyces pastorianus
aacatgctgtttccgtgtgtttgcc

SEQ ID NO: 160085 - DNA, 25 bp, Saccharomyces pastorianus
acaaaacatgctgtttccgtgtgtt

SEQ ID NO: 160086 - DNA, 25 bp, Saccharomyces pastorianus
ggtgaatctattccgcccaacacaa

SEQ ID NO: 160087 - DNA, 25 bp, Saccharomyces pastorianus
ggaccattggtgaatctattccgcc

SEQ ID NO: 160088 - DNA, 25 bp, Saccharomyces pastorianus
atatctaggaccattggtgaatcta

SEQ ID NO: 160089 - DNA, 25 bp, Saccharomyces pastorianus
atctattccgcccaacacaaaacat

SEQ ID NO: 160090 - DNA, 25 bp, Saccharomyces pastorianus
aagtgatttcatgctagccttaaat

SEQ ID NO: 160091 - DNA, 25 bp, Saccharomyces pastorianus
ggatgacagtttacctcaacaatac

SEQ ID NO: 160092 - DNA, 25 bp, Saccharomyces pastorianus
ctactggcggatgttgtcggctcta

SEQ ID NO: 160093 - DNA, 25 bp, Saccharomyces pastorianus
gagagatatcacacccatcagctgg

SEQ ID NO: 160094 - DNA, 25 bp, Saccharomyces pastorianus
gacatcgaagatttctatcgcgaat

SEQ ID NO: 160095 - DNA, 25 bp, Saccharomyces pastorianus
agggttggttcttgcattggatgac

SEQ ID NO: 160096 - DNA, 25 bp, Saccharomyces pastorianus
gtcgactacgatatctattctgttg

SEQ ID NO: 160097 - DNA, 25 bp, Saccharomyces pastorianus
tgtcggctctattctaacgcaaaag

SEQ ID NO: 160098 - DNA, 25 bp, Saccharomyces pastorianus
gagaactctacattcctactgagag

SEQ ID NO: 160099 - DNA, 25 bp, Saccharomyces pastorianus
gcggcgctaggtattttgtcgacta

SEQ ID NO: 160100 - DNA, 25 bp, Saccharomyces pastorianus
atccagctgcagagtttattttgaa

SEQ ID NO: 160101 - DNA, 25 bp, Saccharomyces pastorianus
taatcttggtctcaaacccacgctt

SEQ ID NO: 160102 - DNA, 25 bp, Saccharomyces pastorianus
aaggcattccgttattctacgtaat

SEQ ID NO: 160103 - DNA, 25 bp, Saccharomyces pastorianus
acccacgcttggaatgtctttgaaa

SEQ ID NO: 160104 - DNA, 25 bp, Saccharomyces pastorianus
aattatgtgcgtccttatttctaag

SEQ ID NO: 160105 - DNA, 25 bp, Saccharomyces pastorianus
tatggcgggtcgttttcccaacgat

SEQ ID NO: 160106 - DNA, 25 bp, Saccharomyces pastorianus
ccctccctcatacaatgctgatgaa

SEQ ID NO: 160107 - DNA, 25 bp, Saccharomyces pastorianus
attaaacttcgtggtgttctgctcc

SEQ ID NO: 160108 - DNA, 25 bp, Saccharomyces pastorianus
ttacagccactacttttaaaacgca

SEQ ID NO: 160109 - DNA, 25 bp, Saccharomyces pastorianus
gtcagggtggcttgaaaggcattcc

SEQ ID NO: 160110 - DNA, 25 bp, Saccharomyces pastorianus
gttctgctcctacagacgctattaa

SEQ ID NO: 160111 - DNA, 25 bp, Saccharomyces pastorianus
gacatatctacgaatctttcttgga

SEQ ID NO: 160112 - DNA, 25 bp, Saccharomyces pastorianus
ggtcttatttctttgacgttcatcc

SEQ ID NO: 160113 - DNA, 25 bp, Saccharomyces pastorianus
atatatcgcgtaccgttctttcaac

SEQ ID NO: 160114 - DNA, 25 bp, Saccharomyces pastorianus
ttgttaccttattagcgtttgctgc

SEQ ID NO: 160115 - DNA, 25 bp, Saccharomyces pastorianus
aggacgtagacgatccttcgttgaa

SEQ ID NO: 160116 - DNA, 25 bp, Saccharomyces pastorianus
atgaaactcatccagctccatatat

SEQ ID NO: 160117 - DNA, 25 bp, Saccharomyces pastorianus
ggccgcgcctaaatgtgaacaagtt

SEQ ID NO: 160118 - DNA, 25 bp, Saccharomyces pastorianus
tgggaagttaccaccttccactaag

SEQ ID NO: 160119 - DNA, 25 bp, Saccharomyces pastorianus
gttgaagtacacgaaggccgcgcct

SEQ ID NO: 160120 - DNA, 25 bp, Saccharomyces pastorianus
ggaaccggaatcacgttatagcttt

SEQ ID NO: 160121 - DNA, 25 bp, Saccharomyces pastorianus
agttgctgaacattggctcttgcag

SEQ ID NO: 160122 - DNA, 25 bp, Saccharomyces pastorianus
tctttcaacgcgatattgggcacat

SEQ ID NO: 160123 - DNA, 25 bp, Saccharomyces pastorianus
cagaatgtgggaatgccaattatag

SEQ ID NO: 160124 - DNA, 25 bp, Saccharomyces pastorianus
atgcgcagaatgtgggaatgccaat

SEQ ID NO: 160125 - DNA, 25 bp, Saccharomyces pastorianus
gcagaatgtgggaatgccaattata

SEQ ID NO: 160126 - DNA, 25 bp, Saccharomyces pastorianus
agaatgtgggaatgccaattatagg

SEQ ID NO: 160127 - DNA, 25 bp, Saccharomyces pastorianus
ccttttccgtgcctgtgatttccgt

SEQ ID NO: 160128 - DNA, 25 bp, Saccharomyces pastorianus
tatgcgcagaatgtgggaatgccaa

SEQ ID NO: 160129 - DNA, 25 bp, Saccharomyces pastorianus
gtgccggggtgccttatgaaaccct

SEQ ID NO: 160130 - DNA, 25 bp, Saccharomyces pastorianus
tgccggggtgccttatgaaaccctt

SEQ ID NO: 160131 - DNA, 25 bp, Saccharomyces pastorianus
tgcgcagaatgtgggaatgccaatt

SEQ ID NO: 160132 - DNA, 25 bp, Saccharomyces pastorianus
atgccaattataggggtgccggggt

SEQ ID NO: 160133 - DNA, 25 bp, Saccharomyces pastorianus
cgcagaatgtgggaatgccaattat

SEQ ID NO: 160134 - DNA, 25 bp, Saccharomyces pastorianus
ttcgtttcgtttttacatccactgt

SEQ ID NO: 160135 - DNA, 25 bp, Saccharomyces pastorianus
cgtccttggtgcaatgttcttttat

SEQ ID NO: 160136 - DNA, 25 bp, Saccharomyces pastorianus
tttacatccactgtacttctggcag

SEQ ID NO: 160137 - DNA, 25 bp, Saccharomyces pastorianus
gtggatatacactgctattgcgatt

SEQ ID NO: 160138 - DNA, 25 bp, Saccharomyces pastorianus
ttggatcgttgaccggattattaga

SEQ ID NO: 160139 - DNA, 25 bp, Saccharomyces pastorianus
ccatggagggccaaacctgggcaat

SEQ ID NO: 160140 - DNA, 25 bp, Saccharomyces pastorianus
tttcttcatatcgtccttggtgcaa

SEQ ID NO: 160141 - DNA, 25 bp, Saccharomyces pastorianus
atggtgaactggttattatcctgaa

SEQ ID NO: 160142 - DNA, 25 bp, Saccharomyces pastorianus
cctgggcaatatgttttcgtttcgt

SEQ ID NO: 160143 - DNA, 25 bp, Saccharomyces pastorianus
ggatgatctcattcgtttaacagtt

SEQ ID NO: 160144 - DNA, 25 bp, Saccharomyces pastorianus
caaagcttccttacaactaatcggg

SEQ ID NO: 160145 - DNA, 25 bp, Saccharomyces pastorianus
taatatggccagtttcatccctcaa

SEQ ID NO: 160146 - DNA, 25 bp, Saccharomyces pastorianus
ttattcttatgcaactacctttccc

SEQ ID NO: 160147 - DNA, 25 bp, Saccharomyces pastorianus
gaccggtattatctgtcaggacctg

SEQ ID NO: 160148 - DNA, 25 bp, Saccharomyces pastorianus
gctcgggctaaatccagtctacaac

SEQ ID NO: 160149 - DNA, 25 bp, Saccharomyces pastorianus
aagctggagaggttcctaatccctt

SEQ ID NO: 160150 - DNA, 25 bp, Saccharomyces pastorianus
gtattttatttctgtgctcgggcta

SEQ ID NO: 160151 - DNA, 25 bp, Saccharomyces pastorianus
gcatgcgatggctaacgatttgact

SEQ ID NO: 160152 - DNA, 25 bp, Saccharomyces pastorianus
gatgggttagctccatttcatggta

SEQ ID NO: 160153 - DNA, 25 bp, Saccharomyces pastorianus
ttcaggctgggataggtggccctca

SEQ ID NO: 160154 - DNA, 25 bp, Saccharomyces pastorianus
ctaatcccttcaacgatccaagtat

SEQ ID NO: 160155 - DNA, 25 bp, Saccharomyces pastorianus
tgtcttccgatgcatttgctgcgaa

SEQ ID NO: 160156 - DNA, 25 bp, Saccharomyces pastorianus
actggtttccgcgattactgtgacg

SEQ ID NO: 160157 - DNA, 25 bp, Saccharomyces pastorianus
accactacgtacgagaatccgcggg

SEQ ID NO: 160158 - DNA, 25 bp, Saccharomyces pastorianus
agcggcgaggccctatttacactta

SEQ ID NO: 160159 - DNA, 25 bp, Saccharomyces pastorianus
gaacccattccttaagagccgagtc

SEQ ID NO: 160160 - DNA, 25 bp, Saccharomyces pastorianus
gggtttccatatcgctacagatgtt

SEQ ID NO: 160161 - DNA, 25 bp, Saccharomyces pastorianus
ccgggaatggagtatcgcttggcta

SEQ ID NO: 160162 - DNA, 25 bp, Saccharomyces pastorianus
agaatggacatgcatctcgcgtggc

SEQ ID NO: 160163 - DNA, 25 bp, Saccharomyces pastorianus
aaaactttatccgtcttcacgatcg

SEQ ID NO: 160164 - DNA, 25 bp, Saccharomyces pastorianus
aatggtagatatagccgcccatcct

SEQ ID NO: 160165 - DNA, 25 bp, Saccharomyces pastorianus
gaatcctgcagctttgacactggtt

SEQ ID NO: 160166 - DNA, 25 bp, Saccharomyces pastorianus
gcgcattccgcaatcgtggcaatta

SEQ ID NO: 160167 - DNA, 25 bp, Saccharomyces pastorianus
agaagatttaactcttccatcggta

SEQ ID NO: 160168 - DNA, 25 bp, Saccharomyces pastorianus
aatccgcttctgctcgtggttccta

SEQ ID NO: 160169 - DNA, 25 bp, Saccharomyces pastorianus
aagatttaactcttccatcggtaga

SEQ ID NO: 160170 - DNA, 25 bp, Saccharomyces pastorianus
gatttaactcttccatcggtagaac

SEQ ID NO: 160171 - DNA, 25 bp, Saccharomyces pastorianus
taaatccgcttctgctcgtggttcc

SEQ ID NO: 160172 - DNA, 25 bp, Saccharomyces pastorianus
cgcttctgctcgtggttcctacttg

SEQ ID NO: 160173 - DNA, 25 bp, Saccharomyces pastorianus
gctaaatccgcttctgctcgtggtt

SEQ ID NO: 160174 - DNA, 25 bp, Saccharomyces pastorianus
ctaaatccgcttctgctcgtggttc

SEQ ID NO: 160175 - DNA, 25 bp, Saccharomyces pastorianus
ttctgctcgtggttcctacttgcgt

SEQ ID NO: 160176 - DNA, 25 bp, Saccharomyces pastorianus
tgctaaatccgcttctgctcgtggt

SEQ ID NO: 160177 - DNA, 25 bp, Saccharomyces pastorianus
agatttaactcttccatcggtagaa

SEQ ID NO: 160178 - DNA, 25 bp, Saccharomyces pastorianus
taaaatctgtcatcaaggtaatcga

SEQ ID NO: 160179 - DNA, 25 bp, Saccharomyces pastorianus
ggctccaccgttgcattcggagata

SEQ ID NO: 160180 - DNA, 25 bp, Saccharomyces pastorianus
aagagtcctgcaatggttggagaca

SEQ ID NO: 160181 - DNA, 25 bp, Saccharomyces pastorianus
ggtctaaacagcgtaacatgtgcag

SEQ ID NO: 160182 - DNA, 25 bp, Saccharomyces pastorianus
ggtaatcgacaattcaggtgcacaa

SEQ ID NO: 160183 - DNA, 25 bp, Saccharomyces pastorianus
cattcggagatactgcttgcgtttt

SEQ ID NO: 160184 - DNA, 25 bp, Saccharomyces pastorianus
atactgcttgcgttttgattaataa

SEQ ID NO: 160185 - DNA, 25 bp, Saccharomyces pastorianus
gtgcagaaaggatggctccaccgtt

SEQ ID NO: 160186 - DNA, 25 bp, Saccharomyces pastorianus
ttgtcacgcaattgtcgtaaggtct

SEQ ID NO: 160187 - DNA, 25 bp, Saccharomyces pastorianus
acattacgggaacagccaacaccaa

SEQ ID NO: 160188 - DNA, 25 bp, Saccharomyces pastorianus
caattcaggtgcacaattagcagaa

SEQ ID NO: 160189 - DNA, 25 bp, Saccharomyces pastorianus
taaagggccgattacatccgttaga

SEQ ID NO: 160190 - DNA, 25 bp, Saccharomyces pastorianus
gccctgctggtgacctttatggtat

SEQ ID NO: 160191 - DNA, 25 bp, Saccharomyces pastorianus
acatccgttagaagccgattgtttc

SEQ ID NO: 160192 - DNA, 25 bp, Saccharomyces pastorianus
aagtaatggaattttgccctgctgg

SEQ ID NO: 160193 - DNA, 25 bp, Saccharomyces pastorianus
taattggatcagagccttacgtagc

SEQ ID NO: 160194 - DNA, 25 bp, Saccharomyces pastorianus
gggagtattacgatccaagactgat

SEQ ID NO: 160195 - DNA, 25 bp, Saccharomyces pastorianus
tattctcttttatccgcatggtcta

SEQ ID NO: 160196 - DNA, 25 bp, Saccharomyces pastorianus
aagcaactgcttcatggtgttaagt

SEQ ID NO: 160197 - DNA, 25 bp, Saccharomyces pastorianus
tatggtatgctggtcggtaagtcga

SEQ ID NO: 160198 - DNA, 25 bp, Saccharomyces pastorianus
gccttacgtagctccagaagagttt

SEQ ID NO: 160199 - DNA, 25 bp, Saccharomyces pastorianus
atgtgacttcggtacaagttctgta

SEQ ID NO: 160200 - DNA, 25 bp, Saccharomyces pastorianus
gttttacccagttatagtcctgaat

SEQ ID NO: 160201 - DNA, 25 bp, Saccharomyces pastorianus
ggatgccattcctcaagaagttgta

SEQ ID NO: 160202 - DNA, 25 bp, Saccharomyces pastorianus
gtaagccaacttccatcactaacta

SEQ ID NO: 160203 - DNA, 25 bp, Saccharomyces pastorianus
aatacttggaacaccacctgaggaa

SEQ ID NO: 160204 - DNA, 25 bp, Saccharomyces pastorianus
aacatcctattagcggtgattcccc

SEQ ID NO: 160205 - DNA, 25 bp, Saccharomyces pastorianus
gtcctgaattttcctatgtaagcca

SEQ ID NO: 160206 - DNA, 25 bp, Saccharomyces pastorianus
gtgctaatccagaagcgcttgaatt

SEQ ID NO: 160207 - DNA, 25 bp, Saccharomyces pastorianus
gatcgtttgaaagcatactacctgg

SEQ ID NO: 160208 - DNA, 25 bp, Saccharomyces pastorianus
aagacctttagattcgaattcgagc

SEQ ID NO: 160209 - DNA, 25 bp, Saccharomyces pastorianus
tgtacaggtccatccttctaggaaa

SEQ ID NO: 160210 - DNA, 25 bp, Saccharomyces pastorianus
taactacaacccagccatatcaaaa

SEQ ID NO: 160211 - DNA, 25 bp, Saccharomyces pastorianus
gtttggctcaatcactggacactat

SEQ ID NO: 160212 - DNA, 25 bp, Saccharomyces pastorianus
tggtctttcaatgctaggctccgtc

SEQ ID NO: 160213 - DNA, 25 bp, Saccharomyces pastorianus
accatgtttggtgctgcttgtgccg

SEQ ID NO: 160214 - DNA, 25 bp, Saccharomyces pastorianus
gtaaagagactacctcctggtcttt

SEQ ID NO: 160215 - DNA, 25 bp, Saccharomyces pastorianus
gatatttgtttgatggcactgtctt

SEQ ID NO: 160216 - DNA, 25 bp, Saccharomyces pastorianus
aggaagccatcccagcattgattaa

SEQ ID NO: 160217 - DNA, 25 bp, Saccharomyces pastorianus
taggctccgtcgtcacattaggtac

SEQ ID NO: 160218 - DNA, 25 bp, Saccharomyces pastorianus
aggtacctctggctttacatcaatg

SEQ ID NO: 160219 - DNA, 25 bp, Saccharomyces pastorianus
tgcttgtgccgcaagggacgcagac

SEQ ID NO: 160220 - DNA, 25 bp, Saccharomyces pastorianus
gaaattctttgccactaaatccacg

SEQ ID NO: 160221 - DNA, 25 bp, Saccharomyces pastorianus
gacactattacttcgaaagcgcagt

SEQ ID NO: 160222 - DNA, 25 bp, Saccharomyces pastorianus
gattgttctacatgaattagctcac

SEQ ID NO: 160223 - DNA, 25 bp, Saccharomyces pastorianus
gtgcttgatctactactagtcaaag

SEQ ID NO: 160224 - DNA, 25 bp, Saccharomyces pastorianus
cagtagatcgtattcaaagagtgac

SEQ ID NO: 160225 - DNA, 25 bp, Saccharomyces pastorianus
catgaattagctcaccaatggtttg

SEQ ID NO: 160226 - DNA, 25 bp, Saccharomyces pastorianus
gttctacatgaattagctcaccaat

SEQ ID NO: 160227 - DNA, 25 bp, Saccharomyces pastorianus
aagagtgactgagattgttctacat

SEQ ID NO: 160228 - DNA, 25 bp, Saccharomyces pastorianus
agagtgcttgatctactactagtca

SEQ ID NO: 160229 - DNA, 25 bp, Saccharomyces pastorianus
gtgactgagattgttctacatgaat

SEQ ID NO: 160230 - DNA, 25 bp, Saccharomyces pastorianus
gctcaccaatggtttggtaacttag

SEQ ID NO: 160231 - DNA, 25 bp, Saccharomyces pastorianus
actactagtcaaagagaactctaca

SEQ ID NO: 160232 - DNA, 25 bp, Saccharomyces pastorianus
aactctacagtagatcgtattcaaa

SEQ ID NO: 160233 - DNA, 25 bp, Saccharomyces pastorianus
gtgatgtcacatcttccgagattat

SEQ ID NO: 160234 - DNA, 25 bp, Saccharomyces pastorianus
aaacatggtcagtttgccgctgatt

SEQ ID NO: 160235 - DNA, 25 bp, Saccharomyces pastorianus
gccgctgatttgactgccaagactt

SEQ ID NO: 160236 - DNA, 25 bp, Saccharomyces pastorianus
gaaagcctcttttgctattacttta

SEQ ID NO: 160237 - DNA, 25 bp, Saccharomyces pastorianus
tcactttgttcaatacgacccctaa

SEQ ID NO: 160238 - DNA, 25 bp, Saccharomyces pastorianus
aaaaactttcgtattcctgtcagag

SEQ ID NO: 160239 - DNA, 25 bp, Saccharomyces pastorianus
agtttcagacccatctttgacacac

SEQ ID NO: 160240 - DNA, 25 bp, Saccharomyces pastorianus
gtcgatatcgacatccattctgcaa

SEQ ID NO: 160241 - DNA, 25 bp, Saccharomyces pastorianus
aagggccttcccatgttttgatgag

SEQ ID NO: 160242 - DNA, 25 bp, Saccharomyces pastorianus
aagtcaccacatttgcgtttcctaa

SEQ ID NO: 160243 - DNA, 25 bp, Saccharomyces pastorianus
gggaccatgtcttctttcaagggta

SEQ ID NO: 160244 - DNA, 25 bp, Saccharomyces pastorianus
catgcaccgcttcattgttcacaag

SEQ ID NO: 160245 - DNA, 25 bp, Saccharomyces pastorianus
tgtactgcctccgttgttatttttt

SEQ ID NO: 160246 - DNA, 25 bp, Saccharomyces pastorianus
tcacttcaagcgtgccattgttaca

SEQ ID NO: 160247 - DNA, 25 bp, Saccharomyces pastorianus
attgtaggctgttactcgggtttct

SEQ ID NO: 160248 - DNA, 25 bp, Saccharomyces pastorianus
tattaccgttgctattgccaccgtt

SEQ ID NO: 160249 - DNA, 25 bp, Saccharomyces pastorianus
agacgcatgcgagattcctgtactg

SEQ ID NO: 160250 - DNA, 25 bp, Saccharomyces pastorianus
tgcttctacttctactattaccgtt

SEQ ID NO: 160251 - DNA, 25 bp, Saccharomyces pastorianus
ggtttcttatcaagtggcgtgccac

SEQ ID NO: 160252 - DNA, 25 bp, Saccharomyces pastorianus
tttagcaaaccacctgtagttccac

SEQ ID NO: 160253 - DNA, 25 bp, Saccharomyces pastorianus
agcagcggcggcttttttagcaaac

SEQ ID NO: 160254 - DNA, 25 bp, Saccharomyces pastorianus
ggctcagggttatttatgctcactt

SEQ ID NO: 160255 - DNA, 25 bp, Saccharomyces pastorianus
gaattcgccagctgattacactaac

SEQ ID NO: 160256 - DNA, 25 bp, Saccharomyces pastorianus
ggctgcctcctggtggaattattca

SEQ ID NO: 160257 - DNA, 25 bp, Saccharomyces pastorianus
gtaagttgccacgaatatgaagtca

SEQ ID NO: 160258 - DNA, 25 bp, Saccharomyces pastorianus
ttagtgcaaccgaagctttacaaag

SEQ ID NO: 160259 - DNA, 25 bp, Saccharomyces pastorianus
ggtacagaccaccagaactattgtt

SEQ ID NO: 160260 - DNA, 25 bp, Saccharomyces pastorianus
gttttaccatcttcaaaatgtctgc

SEQ ID NO: 160261 - DNA, 25 bp, Saccharomyces pastorianus
actgcaattttccagggctctaatg

SEQ ID NO: 160262 - DNA, 25 bp, Saccharomyces pastorianus
atagctggccaacgctttacgatat

SEQ ID NO: 160263 - DNA, 25 bp, Saccharomyces pastorianus
aaccgtgtcattacgttgtggtaca

SEQ ID NO: 160264 - DNA, 25 bp, Saccharomyces pastorianus
tacaccgtgatgttaaaggctcaaa

SEQ ID NO: 160265 - DNA, 25 bp, Saccharomyces pastorianus
tacgatatgccgtggttttttatga

SEQ ID NO: 160266 - DNA, 25 bp, Saccharomyces pastorianus
tctaggctacctatatgggtgctaa

SEQ ID NO: 160267 - DNA, 25 bp, Saccharomyces pastorianus
atgggtgctaagtcctcgcgaagaa

SEQ ID NO: 160268 - DNA, 25 bp, Saccharomyces pastorianus
aagaacttgaagacggaaacataca

SEQ ID NO: 160269 - DNA, 25 bp, Saccharomyces pastorianus
agtttttcccacttgtgataagcaa

SEQ ID NO: 160270 - DNA, 25 bp, Saccharomyces pastorianus
gaacaacaggctcgcaagaacttga

SEQ ID NO: 160271 - DNA, 25 bp, Saccharomyces pastorianus
caatggcagattgtgctaaggcaaa

SEQ ID NO: 160272 - DNA, 25 bp, Saccharomyces pastorianus
gtcctcgcgaagaacaacaggctcg

SEQ ID NO: 160273 - DNA, 25 bp, Saccharomyces pastorianus
attttgttcaagcaatggcagattg

SEQ ID NO: 160274 - DNA, 25 bp, Saccharomyces pastorianus
gatccgcagatgatctcgaaacata

SEQ ID NO: 160275 - DNA, 25 bp, Saccharomyces pastorianus
tcgaaacatagttctaggctaccta

SEQ ID NO: 160276 - DNA, 25 bp, Saccharomyces pastorianus
ggaatgaaagtttttcccacttgtg

SEQ ID NO: 160277 - DNA, 25 bp, Saccharomyces pastorianus
ggcgtaggagtcttcaacactctaa

SEQ ID NO: 160278 - DNA, 25 bp, Saccharomyces pastorianus
ttgccgtcaacgaagccgcggagaa

SEQ ID NO: 160279 - DNA, 25 bp, Saccharomyces pastorianus
taaaacgcatgttctacccacgtac

SEQ ID NO: 160280 - DNA, 25 bp, Saccharomyces pastorianus
ttaaggtctggagcagccgacggta

SEQ ID NO: 160281 - DNA, 25 bp, Saccharomyces pastorianus
gtcgtacattgcgagggccaagaaa

SEQ ID NO: 160282 - DNA, 25 bp, Saccharomyces pastorianus
tacccacgtactataccaggtcgat

SEQ ID NO: 160283 - DNA, 25 bp, Saccharomyces pastorianus
gatagatatttcatttgccgtcaac

SEQ ID NO: 160284 - DNA, 25 bp, Saccharomyces pastorianus
aattggactctatcttaactttggt

SEQ ID NO: 160285 - DNA, 25 bp, Saccharomyces pastorianus
gggccaagaaactatccagaactca

SEQ ID NO: 160286 - DNA, 25 bp, Saccharomyces pastorianus
taactttggtaagcacgcatgtgga

SEQ ID NO: 160287 - DNA, 25 bp, Saccharomyces pastorianus
ttgcaagctatttaacgtcctggtt

SEQ ID NO: 160288 - DNA, 25 bp, Saccharomyces pastorianus
atgaacgaattcaccccagagaagt

SEQ ID NO: 160289 - DNA, 25 bp, Saccharomyces pastorianus
gtcaagcagcacttacagagggaaa

SEQ ID NO: 160290 - DNA, 25 bp, Saccharomyces pastorianus
gaccaattagcccaagatatttcaa

SEQ ID NO: 160291 - DNA, 25 bp, Saccharomyces pastorianus
ggaacgcttcatcaataatgccaaa

SEQ ID NO: 160292 - DNA, 25 bp, Saccharomyces pastorianus
aattatgtgaggacgctgaggcaaa

SEQ ID NO: 160293 - DNA, 25 bp, Saccharomyces pastorianus
gaaacgtgctcaagacttccacagg

SEQ ID NO: 160294 - DNA, 25 bp, Saccharomyces pastorianus
ggaagcagtccactttgaaagtcct

SEQ ID NO: 160295 - DNA, 25 bp, Saccharomyces pastorianus
acaatattcgtcgattcccgagaga

SEQ ID NO: 160296 - DNA, 25 bp, Saccharomyces pastorianus
agacgaatcgctttccatggatcaa

SEQ ID NO: 160297 - DNA, 25 bp, Saccharomyces pastorianus
gaagtttttcaataccacctccgag

SEQ ID NO: 160298 - DNA, 25 bp, Saccharomyces pastorianus
aaggactgctgatcagctcacgtca

SEQ ID NO: 160299 - DNA, 25 bp, Saccharomyces pastorianus
tattcgatgatggtgcaagggccac

SEQ ID NO: 160300 - DNA, 25 bp, Saccharomyces pastorianus
gtggaagacacgatatctgaaagac

SEQ ID NO: 160301 - DNA, 25 bp, Saccharomyces pastorianus
tagaacgaagggtccggctaagaat

SEQ ID NO: 160302 - DNA, 25 bp, Saccharomyces pastorianus
gaaaaactacttcgcaaagctataa

SEQ ID NO: 160303 - DNA, 25 bp, Saccharomyces pastorianus
aagtatgtcggtagtgccgtaccaa

SEQ ID NO: 160304 - DNA, 25 bp, Saccharomyces pastorianus
acgcagatggtgtaatgtttcaaaa

SEQ ID NO: 160305 - DNA, 25 bp, Saccharomyces pastorianus
ggtgcaagggccacttcagatttac

SEQ ID NO: 160306 - DNA, 25 bp, Saccharomyces pastorianus
aaattgcgtctgattccgatatgga

SEQ ID NO: 160307 - DNA, 25 bp, Saccharomyces pastorianus
gggccacttcagatttacaaaggtt

SEQ ID NO: 160308 - DNA, 25 bp, Saccharomyces pastorianus
gaaggactcagaaattaacgcagat

SEQ ID NO: 160309 - DNA, 25 bp, Saccharomyces pastorianus
aagtctgcgattgaatggagcgaac

SEQ ID NO: 160310 - DNA, 25 bp, Saccharomyces pastorianus
agatacttctcttcaccaatatgct

SEQ ID NO: 160311 - DNA, 25 bp, Saccharomyces pastorianus
gattatagctgtcccaccaaagaat

SEQ ID NO: 160312 - DNA, 25 bp, Saccharomyces pastorianus
ggttgccacctcactttaacatcaa

SEQ ID NO: 160313 - DNA, 25 bp, Saccharomyces pastorianus
attcctcgtgaatttaactactcgg

SEQ ID NO: 160314 - DNA, 25 bp, Saccharomyces pastorianus
gaatctctctaaatgcaagtctgaa

SEQ ID NO: 160315 - DNA, 25 bp, Saccharomyces pastorianus
aaagagcatgactctgctgccagtt

SEQ ID NO: 160316 - DNA, 25 bp, Saccharomyces pastorianus
aatatgcttctcttgtcgacacaga

SEQ ID NO: 160317 - DNA, 25 bp, Saccharomyces pastorianus
tagaacaatctttgcgcgtccagtt

SEQ ID NO: 160318 - DNA, 25 bp, Saccharomyces pastorianus
ggccaagacagcttatgtcgatgtt

SEQ ID NO: 160319 - DNA, 25 bp, Saccharomyces pastorianus
tggatttcttggtggcaatgccttc

SEQ ID NO: 160320 - DNA, 25 bp, Saccharomyces pastorianus
atctgttttgcgttacgggttgcca

SEQ ID NO: 160321 - DNA, 25 bp, Saccharomyces pastorianus
aggcgttgaaaaacactgtgcggtc

SEQ ID NO: 160322 - DNA, 25 bp, Saccharomyces pastorianus
aaggatgataattatgttgcccaaa

SEQ ID NO: 160323 - DNA, 25 bp, Saccharomyces pastorianus
gtagttctaccagtgaagatcctaa

SEQ ID NO: 160324 - DNA, 25 bp, Saccharomyces pastorianus
cactgtgcggtccttgtcaatgaaa

SEQ ID NO: 160325 - DNA, 25 bp, Saccharomyces pastorianus
catagttctgcttaccgtgaatcgc

SEQ ID NO: 160326 - DNA, 25 bp, Saccharomyces pastorianus
gcgtgattcagcctacagcgcaata

SEQ ID NO: 160327 - DNA, 25 bp, Saccharomyces pastorianus
cagcgcaataggatcacatagttct

SEQ ID NO: 160328 - DNA, 25 bp, Saccharomyces pastorianus
gcttaccgtgaatcgcaattaactg

SEQ ID NO: 160329 - DNA, 25 bp, Saccharomyces pastorianus
agtcttcacaataaatctcttcccg

SEQ ID NO: 160330 - DNA, 25 bp, Saccharomyces pastorianus
aatctcttcccgaagacgacgagaa

SEQ ID NO: 160331 - DNA, 25 bp, Saccharomyces pastorianus
ccaactaccctatcaacactagaat

SEQ ID NO: 160332 - DNA, 25 bp, Saccharomyces pastorianus
ggcatcgctttatcaacatgttcat

SEQ ID NO: 160333 - DNA, 25 bp, Saccharomyces pastorianus
tgccggtgtcactttttctgaaaaa

SEQ ID NO: 160334 - DNA, 25 bp, Saccharomyces pastorianus
ctttagagcatgatggtaggccaaa

SEQ ID NO: 160335 - DNA, 25 bp, Saccharomyces pastorianus
agaaacaccaaatccattgaaacct

SEQ ID NO: 160336 - DNA, 25 bp, Saccharomyces pastorianus
actcctacggtcattgccggtgtca

SEQ ID NO: 160337 - DNA, 25 bp, Saccharomyces pastorianus
cacgatagtatacttatcttctttt

SEQ ID NO: 160338 - DNA, 25 bp, Saccharomyces pastorianus
agaattagtcactcctacggtcatt

SEQ ID NO: 160339 - DNA, 25 bp, Saccharomyces pastorianus
gttcatggtgcaagacaagtcgttc

SEQ ID NO: 160340 - DNA, 25 bp, Saccharomyces pastorianus
gacaagtcgttcgtccaaaggagaa

SEQ ID NO: 160341 - DNA, 25 bp, Saccharomyces pastorianus
accttgggtatctttagagcatgat

SEQ ID NO: 160342 - DNA, 25 bp, Saccharomyces pastorianus
tatcttcttttctttggcatcgctt

SEQ ID NO: 160343 - DNA, 25 bp, Saccharomyces pastorianus
caatcactggtgttagcggcgtgtt

SEQ ID NO: 160344 - DNA, 25 bp, Saccharomyces pastorianus
gcctgtggtggatcaaatggactca

SEQ ID NO: 160345 - DNA, 25 bp, Saccharomyces pastorianus
gggcacgattttacccattgtaacg

SEQ ID NO: 160346 - DNA, 25 bp, Saccharomyces pastorianus
tagttctgccagtgctaggtcaatc

SEQ ID NO: 160347 - DNA, 25 bp, Saccharomyces pastorianus
ggcaccggtgaagattccattgcaa

SEQ ID NO: 160348 - DNA, 25 bp, Saccharomyces pastorianus
gatgatgggcctaaaacaccaacct

SEQ ID NO: 160349 - DNA, 25 bp, Saccharomyces pastorianus
gagttcgcgattccaacgattccaa

SEQ ID NO: 160350 - DNA, 25 bp, Saccharomyces pastorianus
cattgtaacgacaacggccgccggt

SEQ ID NO: 160351 - DNA, 25 bp, Saccharomyces pastorianus
taaatcttcaagaccagcggcgaac

SEQ ID NO: 160352 - DNA, 25 bp, Saccharomyces pastorianus
tagtggcttttctcaaggttcgata

SEQ ID NO: 160353 - DNA, 25 bp, Saccharomyces pastorianus
agcggcgaacagtggaggctccata

SEQ ID NO: 160354 - DNA, 25 bp, Saccharomyces pastorianus
tgatcaccttgattcctatggcgct

SEQ ID NO: 160355 - DNA, 25 bp, Saccharomyces pastorianus
ttcctatggcgcttgcattaatcat

SEQ ID NO: 160356 - DNA, 25 bp, Saccharomyces pastorianus
ggcgatttgcaatcgtttgacgatc

SEQ ID NO: 160357 - DNA, 25 bp, Saccharomyces pastorianus
tatttgaccgacatggaggcaccat

SEQ ID NO: 160358 - DNA, 25 bp, Saccharomyces pastorianus
tgacgcaagtatcatcactggtgag

SEQ ID NO: 160359 - DNA, 25 bp, Saccharomyces pastorianus
atgcgtcctttttgagtgtactagc

SEQ ID NO: 160360 - DNA, 25 bp, Saccharomyces pastorianus
catcgcgttcttatggagaccaaca

SEQ ID NO: 160361 - DNA, 25 bp, Saccharomyces pastorianus
tcattgttttcgttaccatcgcgtt

SEQ ID NO: 160362 - DNA, 25 bp, Saccharomyces pastorianus
gctggtagtatagtttcgtcattta

SEQ ID NO: 160363 - DNA, 25 bp, Saccharomyces pastorianus
atctccactaatcttgatcaccttg

SEQ ID NO: 160364 - DNA, 25 bp, Saccharomyces pastorianus
ggaggtcaaggttcttcgttactga

SEQ ID NO: 160365 - DNA, 25 bp, Saccharomyces pastorianus
gatggtcttctcatcaacacagagg

SEQ ID NO: 160366 - DNA, 25 bp, Saccharomyces pastorianus
atgacacatcctgtagcagtgaagg

SEQ ID NO: 160367 - DNA, 25 bp, Saccharomyces pastorianus
gacatggatggtcttctcatcaaca

SEQ ID NO: 160368 - DNA, 25 bp, Saccharomyces pastorianus
gtctatttgacatggatggtcttct

SEQ ID NO: 160369 - DNA, 25 bp, Saccharomyces pastorianus
tcctgtagcagtgaaggcatgtcta

SEQ ID NO: 160370 - DNA, 25 bp, Saccharomyces pastorianus
ggtcttctcatcaacacagaggata

SEQ ID NO: 160371 - DNA, 25 bp, Saccharomyces pastorianus
catggatggtcttctcatcaacaca

SEQ ID NO: 160372 - DNA, 25 bp, Saccharomyces pastorianus
cttctcatcaacacagaggatattt

SEQ ID NO: 160373 - DNA, 25 bp, Saccharomyces pastorianus
agcagtgaaggcatgtctatttgac

SEQ ID NO: 160374 - DNA, 25 bp, Saccharomyces pastorianus
cagaggatatttatactgaaacttt

SEQ ID NO: 160375 - DNA, 25 bp, Saccharomyces pastorianus
acacatcctgtagcagtgaaggcat

SEQ ID NO: 160376 - DNA, 25 bp, Saccharomyces pastorianus
tattgctttggaggcctttataccc

SEQ ID NO: 160377 - DNA, 25 bp, Saccharomyces pastorianus
gttacgcacagatgggaagacgcat

SEQ ID NO: 160378 - DNA, 25 bp, Saccharomyces pastorianus
atcatttgcaatcactattctagag

SEQ ID NO: 160379 - DNA, 25 bp, Saccharomyces pastorianus
gaggcattagcgacatttgtatcaa

SEQ ID NO: 160380 - DNA, 25 bp, Saccharomyces pastorianus
gcgtgatccgatgtccaaattacca

SEQ ID NO: 160381 - DNA, 25 bp, Saccharomyces pastorianus
agacctgcacaagctaagtgacatt

SEQ ID NO: 160382 - DNA, 25 bp, Saccharomyces pastorianus
ttcgcacgctagaggttctggcaaa

SEQ ID NO: 160383 - DNA, 25 bp, Saccharomyces pastorianus
ataaggtgtgtgttcgcacgctaga

SEQ ID NO: 160384 - DNA, 25 bp, Saccharomyces pastorianus
ggacctattgttttgttacgcacag

SEQ ID NO: 160385 - DNA, 25 bp, Saccharomyces pastorianus
ggttgacggcaacttctgggcaaat

SEQ ID NO: 160386 - DNA, 25 bp, Saccharomyces pastorianus
gtgttggtatccactttagtacatt

SEQ ID NO: 160387 - DNA, 25 bp, Saccharomyces pastorianus
tgcgctgtggttaagcaccaatgtt

SEQ ID NO: 160388 - DNA, 25 bp, Saccharomyces pastorianus
ggttaagcaccaatgttataaaggc

SEQ ID NO: 160389 - DNA, 25 bp, Saccharomyces pastorianus
ggaggaagaagtctatctactattt

SEQ ID NO: 160390 - DNA, 25 bp, Saccharomyces pastorianus
atagttgcgctgtggttaagcacca

SEQ ID NO: 160391 - DNA, 25 bp, Saccharomyces pastorianus
aaaggctatggtaaagcaaccgaag

SEQ ID NO: 160392 - DNA, 25 bp, Saccharomyces pastorianus
gcaaccgaaggaggaagaagtctat

SEQ ID NO: 160393 - DNA, 25 bp, Saccharomyces pastorianus
caagttgattctccaagtacgcaga

SEQ ID NO: 160394 - DNA, 25 bp, Saccharomyces pastorianus
gcagaagatagttgcgctgtggtta

SEQ ID NO: 160395 - DNA, 25 bp, Saccharomyces pastorianus
gtcagaacaagttgattctccaagt

SEQ ID NO: 160396 - DNA, 25 bp, Saccharomyces pastorianus
gattctccaagtacgcagaagatag

SEQ ID NO: 160397 - DNA, 25 bp, Saccharomyces pastorianus
atctactatttgaatctgattccaa

SEQ ID NO: 160398 - DNA, 25 bp, Saccharomyces pastorianus
tatactgaccagtggacgtcaccta

SEQ ID NO: 160399 - DNA, 25 bp, Saccharomyces pastorianus
agtgcgtcctatgctctgattattc

SEQ ID NO: 160400 - DNA, 25 bp, Saccharomyces pastorianus
gtaagcatgtcaaattcccaccagt

SEQ ID NO: 160401 - DNA, 25 bp, Saccharomyces pastorianus
agagagccagatagcgacgacgatg

SEQ ID NO: 160402 - DNA, 25 bp, Saccharomyces pastorianus
tgattattcgatcgttcagcccgca

SEQ ID NO: 160403 - DNA, 25 bp, Saccharomyces pastorianus
aggcttatatttcccttgctatcaa

SEQ ID NO: 160404 - DNA, 25 bp, Saccharomyces pastorianus
ggattgatccaacggtgcacaacca

SEQ ID NO: 160405 - DNA, 25 bp, Saccharomyces pastorianus
tattctggtgattttgtcgccaaga

SEQ ID NO: 160406 - DNA, 25 bp, Saccharomyces pastorianus
acgtcacctataccatcagattcat

SEQ ID NO: 160407 - DNA, 25 bp, Saccharomyces pastorianus
atgggactccatcatacagtgcgtc

SEQ ID NO: 160408 - DNA, 25 bp, Saccharomyces pastorianus
gaacgacgtcgattttttgaaggat

SEQ ID NO: 160409 - DNA, 25 bp, Saccharomyces pastorianus
gggccgtgtctatacttggctccac

SEQ ID NO: 160410 - DNA, 25 bp, Saccharomyces pastorianus
atgcgccgggccgtgtctatacttg

SEQ ID NO: 160411 - DNA, 25 bp, Saccharomyces pastorianus
gaggataacgaagtaaaccacattt

SEQ ID NO: 160412 - DNA, 25 bp, Saccharomyces pastorianus
acgattacggtacagaggataacga

SEQ ID NO: 160413 - DNA, 25 bp, Saccharomyces pastorianus
tggctccaccagctgatgtgtgcat

SEQ ID NO: 160414 - DNA, 25 bp, Saccharomyces pastorianus
ccaccagctgatgtgtgcatttttt

SEQ ID NO: 160415 - DNA, 25 bp, Saccharomyces pastorianus
gtgtgcatttttttttggttcccat

SEQ ID NO: 160416 - DNA, 25 bp, Saccharomyces pastorianus
tatacttggctccaccagctgatgt

SEQ ID NO: 160417 - DNA, 25 bp, Saccharomyces pastorianus
tttacagcgagaacgagagacagaa

SEQ ID NO: 160418 - DNA, 25 bp, Saccharomyces pastorianus
aaaccacatttacagcgagaacgag

SEQ ID NO: 160419 - DNA, 25 bp, Saccharomyces pastorianus
atgcagtacgattacggtacagagg

SEQ ID NO: 160420 - DNA, 25 bp, Saccharomyces pastorianus
agtagtagacgtgccggtgctaact

SEQ ID NO: 160421 - DNA, 25 bp, Saccharomyces pastorianus
ataaatcctggtaatgaacctgcac

SEQ ID NO: 160422 - DNA, 25 bp, Saccharomyces pastorianus
ggatacagctggcaccgcaaagaca

SEQ ID NO: 160423 - DNA, 25 bp, Saccharomyces pastorianus
gattactacgctgctttggctaaaa

SEQ ID NO: 160424 - DNA, 25 bp, Saccharomyces pastorianus
gacagaatcaaacgcctccaatggc

SEQ ID NO: 160425 - DNA, 25 bp, Saccharomyces pastorianus
taacagaactctgaccgagcaagaa

SEQ ID NO: 160426 - DNA, 25 bp, Saccharomyces pastorianus
agtaccatcggtaaaactgctcttg

SEQ ID NO: 160427 - DNA, 25 bp, Saccharomyces pastorianus
gatcctgtagttactgcatctgcca

SEQ ID NO: 160428 - DNA, 25 bp, Saccharomyces pastorianus
gtgctaactctcaagccacattaca

SEQ ID NO: 160429 - DNA, 25 bp, Saccharomyces pastorianus
aaactgctcttggtagactggataa

SEQ ID NO: 160430 - DNA, 25 bp, Saccharomyces pastorianus
tacacatcaacattaccacggcaag

SEQ ID NO: 160431 - DNA, 25 bp, Saccharomyces pastorianus
ttgatagtcaatgtagcatctcatt

SEQ ID NO: 160432 - DNA, 25 bp, Saccharomyces pastorianus
agcatctcattgtgcgttcacactc

SEQ ID NO: 160433 - DNA, 25 bp, Saccharomyces pastorianus
actccctgcgtaacacagtggtttt

SEQ ID NO: 160434 - DNA, 25 bp, Saccharomyces pastorianus
aacacagtggttttgatagtcaatg

SEQ ID NO: 160435 - DNA, 25 bp, Saccharomyces pastorianus
gtagcatctcattgtgcgttcacac

SEQ ID NO: 160436 - DNA, 25 bp, Saccharomyces pastorianus
atctcattgtgcgttcacactcaat

SEQ ID NO: 160437 - DNA, 25 bp, Saccharomyces pastorianus
gtgcgttcacactcaatacaggaat

SEQ ID NO: 160438 - DNA, 25 bp, Saccharomyces pastorianus
ccctgcgtaacacagtggttttgat

SEQ ID NO: 160439 - DNA, 25 bp, Saccharomyces pastorianus
ttgtgcgttcacactcaatacagga

SEQ ID NO: 160440 - DNA, 25 bp, Saccharomyces pastorianus
gcgttcacactcaatacaggaatag

SEQ ID NO: 160441 - DNA, 25 bp, Saccharomyces pastorianus
tcaactccctgcgtaacacagtggt

SEQ ID NO: 160442 - DNA, 25 bp, Saccharomyces pastorianus
atcgaaagtcgtccgtgttcgttgc

SEQ ID NO: 160443 - DNA, 25 bp, Saccharomyces pastorianus
aggagactagtatgcccgttatcga

SEQ ID NO: 160444 - DNA, 25 bp, Saccharomyces pastorianus
gttcttaattgacggatttcctagg

SEQ ID NO: 160445 - DNA, 25 bp, Saccharomyces pastorianus
tgttcgttgcgacagatccgtcgaa

SEQ ID NO: 160446 - DNA, 25 bp, Saccharomyces pastorianus
acgtccaagacgctatccgtgatag

SEQ ID NO: 160447 - DNA, 25 bp, Saccharomyces pastorianus
tactttggcgcttttacgcaacgct

SEQ ID NO: 160448 - DNA, 25 bp, Saccharomyces pastorianus
gcagggcagagcaggttcccaatat

SEQ ID NO: 160449 - DNA, 25 bp, Saccharomyces pastorianus
ttacgcaacgctatttccgataacg

SEQ ID NO: 160450 - DNA, 25 bp, Saccharomyces pastorianus
ctgttctttgactgccctgaagata

SEQ ID NO: 160451 - DNA, 25 bp, Saccharomyces pastorianus
gggccagattgtccctcaagagatt

SEQ ID NO: 160452 - DNA, 25 bp, Saccharomyces pastorianus
cggagaccttctacgtgctgagcag

SEQ ID NO: 160453 - DNA, 25 bp, Saccharomyces pastorianus
aatcctcaatactggacccaagctt

SEQ ID NO: 160454 - DNA, 25 bp, Saccharomyces pastorianus
acgtggtttagcgttgcgacctatt

SEQ ID NO: 160455 - DNA, 25 bp, Saccharomyces pastorianus
ggaaactttcccgaagtctgcgata

SEQ ID NO: 160456 - DNA, 25 bp, Saccharomyces pastorianus
tgcacacacgtataccctagaaggt

SEQ ID NO: 160457 - DNA, 25 bp, Saccharomyces pastorianus
taaggtggatatctgctatacgcaa

SEQ ID NO: 160458 - DNA, 25 bp, Saccharomyces pastorianus
aataagcttttccttctgtcgcatc

SEQ ID NO: 160459 - DNA, 25 bp, Saccharomyces pastorianus
catggctgggatttgcacacacgta

SEQ ID NO: 160460 - DNA, 25 bp, Saccharomyces pastorianus
atgcacttaccaaaactgtttctcg

SEQ ID NO: 160461 - DNA, 25 bp, Saccharomyces pastorianus
atactctacagcctccagattcttt

SEQ ID NO: 160462 - DNA, 25 bp, Saccharomyces pastorianus
gaatcgtattttgttctggcatatg

SEQ ID NO: 160463 - DNA, 25 bp, Saccharomyces pastorianus
acatttgtccaaacgatccattagt

SEQ ID NO: 160464 - DNA, 25 bp, Saccharomyces pastorianus
caatgatagcggtccaaacgaaggg

SEQ ID NO: 160465 - DNA, 25 bp, Saccharomyces pastorianus
ccagtatcagttgggcggctggata

SEQ ID NO: 160466 - DNA, 25 bp, Saccharomyces pastorianus
gacgcatcaatgatagcggtccaaa

SEQ ID NO: 160467 - DNA, 25 bp, Saccharomyces pastorianus
gttgggcggctggatacatagatat

SEQ ID NO: 160468 - DNA, 25 bp, Saccharomyces pastorianus
acgttctaaatttttcagaaagcag

SEQ ID NO: 160469 - DNA, 25 bp, Saccharomyces pastorianus
gagagatgtgctacacaaggacgct

SEQ ID NO: 160470 - DNA, 25 bp, Saccharomyces pastorianus
acacaaggacgctgaggatggttaa

SEQ ID NO: 160471 - DNA, 25 bp, Saccharomyces pastorianus
ttacaaccagtatcagttgggcggc

SEQ ID NO: 160472 - DNA, 25 bp, Saccharomyces pastorianus
cgctgaggatggttaaacgttctaa

SEQ ID NO: 160473 - DNA, 25 bp, Saccharomyces pastorianus
ggctggatacatagatatctgtcat

SEQ ID NO: 160474 - DNA, 25 bp, Saccharomyces pastorianus
ggacgggtttggacgcatcaatgat

SEQ ID NO: 160475 - DNA, 25 bp, Saccharomyces pastorianus
gttccacaaactagtccttgctggt

SEQ ID NO: 160476 - DNA, 25 bp, Saccharomyces pastorianus
gatgaagtctcacaggccatggaac

SEQ ID NO: 160477 - DNA, 25 bp, Saccharomyces pastorianus
taacgcctcttgtgccgaataattt

SEQ ID NO: 160478 - DNA, 25 bp, Saccharomyces pastorianus
ctggatcccactaattgcacatcaa

SEQ ID NO: 160479 - DNA, 25 bp, Saccharomyces pastorianus
gagagaactatgctccctttataga

SEQ ID NO: 160480 - DNA, 25 bp, Saccharomyces pastorianus
atagtcgtcaccactttacacggtt

SEQ ID NO: 160481 - DNA, 25 bp, Saccharomyces pastorianus
aatttccagcttttcgatactttga

SEQ ID NO: 160482 - DNA, 25 bp, Saccharomyces pastorianus
gaatcttaatttgtgggccttccaa

SEQ ID NO: 160483 - DNA, 25 bp, Saccharomyces pastorianus
tacgattctggagaggctaacgcct

SEQ ID NO: 160484 - DNA, 25 bp, Saccharomyces pastorianus
taagaatcggtcatcctgctaggct

SEQ ID NO: 160485 - DNA, 25 bp, Saccharomyces pastorianus
gagacactctcttgatatacttagt

SEQ ID NO: 160486 - DNA, 25 bp, Saccharomyces pastorianus
aaattcgacgccaatagttcaagag

SEQ ID NO: 160487 - DNA, 25 bp, Saccharomyces pastorianus
cattggagacacgaggctgattacc

SEQ ID NO: 160488 - DNA, 25 bp, Saccharomyces pastorianus
tattctctttattcagcatcgaccc

SEQ ID NO: 160489 - DNA, 25 bp, Saccharomyces pastorianus
catcgacccggtcgtaaattcgacg

SEQ ID NO: 160490 - DNA, 25 bp, Saccharomyces pastorianus
gaaaggcctcaagtccctgaattat

SEQ ID NO: 160491 - DNA, 25 bp, Saccharomyces pastorianus
ggtgttgatatgtacgatccattat

SEQ ID NO: 160492 - DNA, 25 bp, Saccharomyces pastorianus
tgatgctactacaaggtgtgaccta

SEQ ID NO: 160493 - DNA, 25 bp, Saccharomyces pastorianus
tcacaccgctacttcatggacaaac

SEQ ID NO: 160494 - DNA, 25 bp, Saccharomyces pastorianus
tactccggtactatttccagtaacg

SEQ ID NO: 160495 - DNA, 25 bp, Saccharomyces pastorianus
gataccgaacgatctggtgttgata

SEQ ID NO: 160496 - DNA, 25 bp, Saccharomyces pastorianus
agaaactatcgaatctcacaccgct

SEQ ID NO: 160497 - DNA, 25 bp, Saccharomyces pastorianus
gcaactgcctgtgagctaactggca

SEQ ID NO: 160498 - DNA, 25 bp, Saccharomyces pastorianus
caattggttcgaagcaactgcctgt

SEQ ID NO: 160499 - DNA, 25 bp, Saccharomyces pastorianus
aactgcctgtgagctaactggcaag

SEQ ID NO: 160500 - DNA, 25 bp, Saccharomyces pastorianus
cctgtgagctaactggcaagattgc

SEQ ID NO: 160501 - DNA, 25 bp, Saccharomyces pastorianus
gacaattggttcgaagcaactgcct

SEQ ID NO: 160502 - DNA, 25 bp, Saccharomyces pastorianus
tgtgagctaactggcaagattgcta

SEQ ID NO: 160503 - DNA, 25 bp, Saccharomyces pastorianus
gctaactggcaagattgctagctac

SEQ ID NO: 160504 - DNA, 25 bp, Saccharomyces pastorianus
tgtatatgacaattggttcgaagca

SEQ ID NO: 160505 - DNA, 25 bp, Saccharomyces pastorianus
aagcaactgcctgtgagctaactgg

SEQ ID NO: 160506 - DNA, 25 bp, Saccharomyces pastorianus
ttctgttgtatatgacaattggttc

SEQ ID NO: 160507 - DNA, 25 bp, Saccharomyces pastorianus
ctgcctgtgagctaactggcaagat

SEQ ID NO: 160508 - DNA, 25 bp, Saccharomyces pastorianus
taaaaatgtctttcctgaggtctct

SEQ ID NO: 160509 - DNA, 25 bp, Saccharomyces pastorianus
gaatatccaacttgctcgatgagct

SEQ ID NO: 160510 - DNA, 25 bp, Saccharomyces pastorianus
gaagagctcatcttttttccagtat

SEQ ID NO: 160511 - DNA, 25 bp, Saccharomyces pastorianus
ggctttcccttcaagtttctgaaat

SEQ ID NO: 160512 - DNA, 25 bp, Saccharomyces pastorianus
gacgaaactatatctcgtgtcgtaa

SEQ ID NO: 160513 - DNA, 25 bp, Saccharomyces pastorianus
ctcccttcataatgtgcctttcaga

SEQ ID NO: 160514 - DNA, 25 bp, Saccharomyces pastorianus
tttccagtatatttcggcgcttcca

SEQ ID NO: 160515 - DNA, 25 bp, Saccharomyces pastorianus
tcggcgcttccatctaaaaatctaa

SEQ ID NO: 160516 - DNA, 25 bp, Saccharomyces pastorianus
tcctgaggtctctgatcatgatgtt

SEQ ID NO: 160517 - DNA, 25 bp, Saccharomyces pastorianus
tgaatagtcttcaagggctttccct

SEQ ID NO: 160518 - DNA, 25 bp, Saccharomyces pastorianus
agtataactacatttctcccttcat

SEQ ID NO: 160519 - DNA, 25 bp, Saccharomyces pastorianus
ggcagcagcttttaaatcactatgt

SEQ ID NO: 160520 - DNA, 25 bp, Saccharomyces pastorianus
ggcacttcaaagtcttaacccacga

SEQ ID NO: 160521 - DNA, 25 bp, Saccharomyces pastorianus
accagagaccgtattgctagagata

SEQ ID NO: 160522 - DNA, 25 bp, Saccharomyces pastorianus
tgaaactttcatagcctggcagcag

SEQ ID NO: 160523 - DNA, 25 bp, Saccharomyces pastorianus
gatgccgatagcgacgagatcacca

SEQ ID NO: 160524 - DNA, 25 bp, Saccharomyces pastorianus
gaatggctcgtcctgccttgattta

SEQ ID NO: 160525 - DNA, 25 bp, Saccharomyces pastorianus
aaatgagctccgactgcgcaattat

SEQ ID NO: 160526 - DNA, 25 bp, Saccharomyces pastorianus
ctcatataaagtctgatccgcgctt

SEQ ID NO: 160527 - DNA, 25 bp, Saccharomyces pastorianus
ggtattataacaacatcatcctctg

SEQ ID NO: 160528 - DNA, 25 bp, Saccharomyces pastorianus
gatccgcgctttttacatatgcttg

SEQ ID NO: 160529 - DNA, 25 bp, Saccharomyces pastorianus
gatatatggcgaaccggcacttcaa

SEQ ID NO: 160530 - DNA, 25 bp, Saccharomyces pastorianus
aggacttgggcaacatccggttgga

SEQ ID NO: 160531 - DNA, 25 bp, Saccharomyces pastorianus
gatgaacatgagtcccatagcgaaa

SEQ ID NO: 160532 - DNA, 25 bp, Saccharomyces pastorianus
cccctacatttacctgacattttgg

SEQ ID NO: 160533 - DNA, 25 bp, Saccharomyces pastorianus
aattcgcacaaccttgatgaacatg

SEQ ID NO: 160534 - DNA, 25 bp, Saccharomyces pastorianus
gttggaagaacactacccgagattt

SEQ ID NO: 160535 - DNA, 25 bp, Saccharomyces pastorianus
agatggacttgaacgttctcacgat

SEQ ID NO: 160536 - DNA, 25 bp, Saccharomyces pastorianus
tgacattttggaaacattcgcacaa

SEQ ID NO: 160537 - DNA, 25 bp, Saccharomyces pastorianus
taataatgaatttggcagcaacccc

SEQ ID NO: 160538 - DNA, 25 bp, Saccharomyces pastorianus
ttcggcaaggaatgagcggatttct

SEQ ID NO: 160539 - DNA, 25 bp, Saccharomyces pastorianus
actacccgagattttatcgatgatt

SEQ ID NO: 160540 - DNA, 25 bp, Saccharomyces pastorianus
tagaactcagaatggcagtgacgaa

SEQ ID NO: 160541 - DNA, 25 bp, Saccharomyces pastorianus
caacgtgcggaattgcatccctata

SEQ ID NO: 160542 - DNA, 25 bp, Saccharomyces pastorianus
attgcatccctatagaagtcaacgg

SEQ ID NO: 160543 - DNA, 25 bp, Saccharomyces pastorianus
gaggtcatcaacaagatcatcaatg

SEQ ID NO: 160544 - DNA, 25 bp, Saccharomyces pastorianus
agatcatcaatgacagccctccagg

SEQ ID NO: 160545 - DNA, 25 bp, Saccharomyces pastorianus
atactattttggatgctattgagaa

SEQ ID NO: 160546 - DNA, 25 bp, Saccharomyces pastorianus
gctattgagaattacaacgtgcgga

SEQ ID NO: 160547 - DNA, 25 bp, Saccharomyces pastorianus
gtaaattcgaagaggtcatcaacaa

SEQ ID NO: 160548 - DNA, 25 bp, Saccharomyces pastorianus
gtcaacgggaactctgtaattattt

SEQ ID NO: 160549 - DNA, 25 bp, Saccharomyces pastorianus
gatcacaagtgaaaactccaaaaat

SEQ ID NO: 160550 - DNA, 25 bp, Saccharomyces pastorianus
gaagtatacgacgatctaatcaaga

SEQ ID NO: 160551 - DNA, 25 bp, Saccharomyces pastorianus
tcaatgacagccctccaggagaatt

SEQ ID NO: 160552 - DNA, 25 bp, Saccharomyces pastorianus
caaggcttctaactggagattagtc

SEQ ID NO: 160553 - DNA, 25 bp, Saccharomyces pastorianus
caccgattctattgtcaaggcttct

SEQ ID NO: 160554 - DNA, 25 bp, Saccharomyces pastorianus
tattgtcaaggcttctaactggaga

SEQ ID NO: 160555 - DNA, 25 bp, Saccharomyces pastorianus
accgattctattgtcaaggcttcta

SEQ ID NO: 160556 - DNA, 25 bp, Saccharomyces pastorianus
ttctattgtcaaggcttctaactgg

SEQ ID NO: 160557 - DNA, 25 bp, Saccharomyces pastorianus
tgtcaaggcttctaactggagatta

SEQ ID NO: 160558 - DNA, 25 bp, Saccharomyces pastorianus
ccgattctattgtcaaggcttctaa

SEQ ID NO: 160559 - DNA, 25 bp, Saccharomyces pastorianus
ttgtcaaggcttctaactggagatt

SEQ ID NO: 160560 - DNA, 25 bp, Saccharomyces pastorianus
gattctattgtcaaggcttctaact

SEQ ID NO: 160561 - DNA, 25 bp, Saccharomyces pastorianus
tccaccgattctattgtcaaggctt

SEQ ID NO: 160562 - DNA, 25 bp, Saccharomyces pastorianus
ctattgtcaaggcttctaactggag

SEQ ID NO: 160563 - DNA, 25 bp, Saccharomyces pastorianus
gaacaatgaatctacctcagttgca

SEQ ID NO: 160564 - DNA, 25 bp, Saccharomyces pastorianus
attggcgccggatcagaatttcacg

SEQ ID NO: 160565 - DNA, 25 bp, Saccharomyces pastorianus
aaagcacgcctcaaaatctggtttc

SEQ ID NO: 160566 - DNA, 25 bp, Saccharomyces pastorianus
tgggtcaacgacaggaattcatgga

SEQ ID NO: 160567 - DNA, 25 bp, Saccharomyces pastorianus
aatacaggccgttcgaagtagtgac

SEQ ID NO: 160568 - DNA, 25 bp, Saccharomyces pastorianus
caacttcaggcgatatcattgagaa

SEQ ID NO: 160569 - DNA, 25 bp, Saccharomyces pastorianus
aggccactggtcttttggctggaat

SEQ ID NO: 160570 - DNA, 25 bp, Saccharomyces pastorianus
gacacgttctatgagcgaggccact

SEQ ID NO: 160571 - DNA, 25 bp, Saccharomyces pastorianus
aagcagagtgatttgatgggtcaac

SEQ ID NO: 160572 - DNA, 25 bp, Saccharomyces pastorianus
taatgcgccgatcgcagaaacagcg

SEQ ID NO: 160573 - DNA, 25 bp, Saccharomyces pastorianus
aatctggtttctaatgcgccgatcg

SEQ ID NO: 160574 - DNA, 25 bp, Saccharomyces pastorianus
gtcggttcccagtcgtcaggaaagt

SEQ ID NO: 160575 - DNA, 25 bp, Saccharomyces pastorianus
gaaagtcgtccgttttggagaacat

SEQ ID NO: 160576 - DNA, 25 bp, Saccharomyces pastorianus
acagatcactgttgtcggttcccag

SEQ ID NO: 160577 - DNA, 25 bp, Saccharomyces pastorianus
ccgcatgttcttactttgacgttag

SEQ ID NO: 160578 - DNA, 25 bp, Saccharomyces pastorianus
ggtattgtcaccaggagacctttag

SEQ ID NO: 160579 - DNA, 25 bp, Saccharomyces pastorianus
aggtatttcttctgtgcccattaac

SEQ ID NO: 160580 - DNA, 25 bp, Saccharomyces pastorianus
gtgaatttttgcatttacctggtaa

SEQ ID NO: 160581 - DNA, 25 bp, Saccharomyces pastorianus
ttggcgcccttaggaggaggatctc

SEQ ID NO: 160582 - DNA, 25 bp, Saccharomyces pastorianus
atttattctccgcatgttcttactt

SEQ ID NO: 160583 - DNA, 25 bp, Saccharomyces pastorianus
gacaggtgccaattcaggtatttct

SEQ ID NO: 160584 - DNA, 25 bp, Saccharomyces pastorianus
cgttagtggatttgcctgggttgac

SEQ ID NO: 160585 - DNA, 25 bp, Saccharomyces pastorianus
aaaaattacatcctcgccaagtcgc

SEQ ID NO: 160586 - DNA, 25 bp, Saccharomyces pastorianus
gccaagtcgctgttgacccaaagac

SEQ ID NO: 160587 - DNA, 25 bp, Saccharomyces pastorianus
gttgtcgatatcatcaaagctgaac

SEQ ID NO: 160588 - DNA, 25 bp, Saccharomyces pastorianus
attggcagctttggaatcaccacct

SEQ ID NO: 160589 - DNA, 25 bp, Saccharomyces pastorianus
agtactcaaggtatcctgctctaag

SEQ ID NO: 160590 - DNA, 25 bp, Saccharomyces pastorianus
ccatcgtctagtaaggcgccagtta

SEQ ID NO: 160591 - DNA, 25 bp, Saccharomyces pastorianus
gaaccattgccgatattataccaaa

SEQ ID NO: 160592 - DNA, 25 bp, Saccharomyces pastorianus
tcctgttttaaaagctactggccaa

SEQ ID NO: 160593 - DNA, 25 bp, Saccharomyces pastorianus
atcccgacctcttgaagggttctca

SEQ ID NO: 160594 - DNA, 25 bp, Saccharomyces pastorianus
ggatgctactattcctacgaatgag

SEQ ID NO: 160595 - DNA, 25 bp, Saccharomyces pastorianus
aatcagttcattcagttcttaaagg

SEQ ID NO: 160596 - DNA, 25 bp, Saccharomyces pastorianus
gaaggtctcggcaatggttataatc

SEQ ID NO: 160597 - DNA, 25 bp, Saccharomyces pastorianus
gaaacagcgcaatccgaagtcaaaa

SEQ ID NO: 160598 - DNA, 25 bp, Saccharomyces pastorianus
aaacgctttctccttcatgttacaa

SEQ ID NO: 160599 - DNA, 25 bp, Saccharomyces pastorianus
gcaggcaactaagcctttaccgggt

SEQ ID NO: 160600 - DNA, 25 bp, Saccharomyces pastorianus
tcactctcagagcaacacaccatgg

SEQ ID NO: 160601 - DNA, 25 bp, Saccharomyces pastorianus
taccgggttcaaggccatcatgcaa

SEQ ID NO: 160602 - DNA, 25 bp, Saccharomyces pastorianus
tattgagccagaatctaaccgtgaa

SEQ ID NO: 160603 - DNA, 25 bp, Saccharomyces pastorianus
cagccgcagcaggtgcgttagctat

SEQ ID NO: 160604 - DNA, 25 bp, Saccharomyces pastorianus
ataatcgttctctcctaactgaaga

SEQ ID NO: 160605 - DNA, 25 bp, Saccharomyces pastorianus
gcgttagctatatctgctcttgata

SEQ ID NO: 160606 - DNA, 25 bp, Saccharomyces pastorianus
cacaccatggagtataagccctata

SEQ ID NO: 160607 - DNA, 25 bp, Saccharomyces pastorianus
attatgccgctgcaaaagccgccat

SEQ ID NO: 160608 - DNA, 25 bp, Saccharomyces pastorianus
ctgaaagtccaccttttttccacat

SEQ ID NO: 160609 - DNA, 25 bp, Saccharomyces pastorianus
tatcaatactacttctacctcagga

SEQ ID NO: 160610 - DNA, 25 bp, Saccharomyces pastorianus
ttgttaatgttatcgctcctcatgc

SEQ ID NO: 160611 - DNA, 25 bp, Saccharomyces pastorianus
tcgctcctcatgcagaaacggctat

SEQ ID NO: 160612 - DNA, 25 bp, Saccharomyces pastorianus
agtctccccacttgttgttttgttg

SEQ ID NO: 160613 - DNA, 25 bp, Saccharomyces pastorianus
tggtttgctgtcctgaaagtccacc

SEQ ID NO: 160614 - DNA, 25 bp, Saccharomyces pastorianus
aagccgccattttaggattcagtaa

SEQ ID NO: 160615 - DNA, 25 bp, Saccharomyces pastorianus
ggacaggccaattatgccgctgcaa

SEQ ID NO: 160616 - DNA, 25 bp, Saccharomyces pastorianus
gacaaagactatattctcggagaag

SEQ ID NO: 160617 - DNA, 25 bp, Saccharomyces pastorianus
aaccactttgatgcatctcaagtct

SEQ ID NO: 160618 - DNA, 25 bp, Saccharomyces pastorianus
tttaccaccacatatcttgaaacag

SEQ ID NO: 160619 - DNA, 25 bp, Saccharomyces pastorianus
aacgttttaccaccacatatcttga

SEQ ID NO: 160620 - DNA, 25 bp, Saccharomyces pastorianus
gaaaacgttttaccaccacatatct

SEQ ID NO: 160621 - DNA, 25 bp, Saccharomyces pastorianus
caccacatatcttgaaacagttagg

SEQ ID NO: 160622 - DNA, 25 bp, Saccharomyces pastorianus
tatcttgaaacagttaggaccggtt

SEQ ID NO: 160623 - DNA, 25 bp, Saccharomyces pastorianus
taccaccacatatcttgaaacagtt

SEQ ID NO: 160624 - DNA, 25 bp, Saccharomyces pastorianus
tgaaacagttaggaccggttaatat

SEQ ID NO: 160625 - DNA, 25 bp, Saccharomyces pastorianus
aaacgttttaccaccacatatcttg

SEQ ID NO: 160626 - DNA, 25 bp, Saccharomyces pastorianus
cgttttaccaccacatatcttgaaa

SEQ ID NO: 160627 - DNA, 25 bp, Saccharomyces pastorianus
cagaaaacgttttaccaccacatat

SEQ ID NO: 160628 - DNA, 25 bp, Saccharomyces pastorianus
acgttttaccaccacatatcttgaa

SEQ ID NO: 160629 - DNA, 25 bp, Saccharomyces pastorianus
ataagctatcgcgtgctgcttggcc

SEQ ID NO: 160630 - DNA, 25 bp, Saccharomyces pastorianus
tatatgcgctctcagaaatttggta

SEQ ID NO: 160631 - DNA, 25 bp, Saccharomyces pastorianus
atctgtggtagatgttcatttgaca

SEQ ID NO: 160632 - DNA, 25 bp, Saccharomyces pastorianus
gatgttcatttgacaggtggctata

SEQ ID NO: 160633 - DNA, 25 bp, Saccharomyces pastorianus
ggtagaatcattaacaccgcttccc

SEQ ID NO: 160634 - DNA, 25 bp, Saccharomyces pastorianus
tcccctgccggtctatttggaaatt

SEQ ID NO: 160635 - DNA, 25 bp, Saccharomyces pastorianus
ttggccttatatgcgctctcagaaa

SEQ ID NO: 160636 - DNA, 25 bp, Saccharomyces pastorianus
tatcgcgtgctgcttggccttatat

SEQ ID NO: 160637 - DNA, 25 bp, Saccharomyces pastorianus
agaatcattaacaccgcttcccctg

SEQ ID NO: 160638 - DNA, 25 bp, Saccharomyces pastorianus
aggtggctataagctatcgcgtgct

SEQ ID NO: 160639 - DNA, 25 bp, Saccharomyces pastorianus
gaacgtgagtttgcatctgtggtag

SEQ ID NO: 160640 - DNA, 25 bp, Saccharomyces pastorianus
actagcttacgcaagcagaggtgca

SEQ ID NO: 160641 - DNA, 25 bp, Saccharomyces pastorianus
aaagttgttgtaatcacgggcgctg

SEQ ID NO: 160642 - DNA, 25 bp, Saccharomyces pastorianus
aaagccggaggtatagctgtggcaa

SEQ ID NO: 160643 - DNA, 25 bp, Saccharomyces pastorianus
caaagctgcagacttagtggtggat

SEQ ID NO: 160644 - DNA, 25 bp, Saccharomyces pastorianus
cagaggtgcaaaagtggtcgtcaat

SEQ ID NO: 160645 - DNA, 25 bp, Saccharomyces pastorianus
ggtcgtcaatgatctaggtggcact

SEQ ID NO: 160646 - DNA, 25 bp, Saccharomyces pastorianus
gggtggttcaggacataactccaaa

SEQ ID NO: 160647 - DNA, 25 bp, Saccharomyces pastorianus
gggcttaggtaaggtgtatgcacta

SEQ ID NO: 160648 - DNA, 25 bp, Saccharomyces pastorianus
gctgtggcaaattacgactctgtta

SEQ ID NO: 160649 - DNA, 25 bp, Saccharomyces pastorianus
ggacataactccaaagctgcagact

SEQ ID NO: 160650 - DNA, 25 bp, Saccharomyces pastorianus
gtgtatgcactagcttacgcaagca

SEQ ID NO: 160651 - DNA, 25 bp, Saccharomyces pastorianus
aaaggcttcgcacaaatttcgcaat

SEQ ID NO: 160652 - DNA, 25 bp, Saccharomyces pastorianus
gggtctagccagcataaacacaggg

SEQ ID NO: 160653 - DNA, 25 bp, Saccharomyces pastorianus
tttgccgaggatttactagaaacat

SEQ ID NO: 160654 - DNA, 25 bp, Saccharomyces pastorianus
tgctttgtcagcgacagctttctac

SEQ ID NO: 160655 - DNA, 25 bp, Saccharomyces pastorianus
gcgacagctttctacgctggaggta

SEQ ID NO: 160656 - DNA, 25 bp, Saccharomyces pastorianus
actatcacgataggccaacattgtt

SEQ ID NO: 160657 - DNA, 25 bp, Saccharomyces pastorianus
ggtagttcacaaacgcgcagatcta

SEQ ID NO: 160658 - DNA, 25 bp, Saccharomyces pastorianus
gctggaggtatcatatattcgcaaa

SEQ ID NO: 160659 - DNA, 25 bp, Saccharomyces pastorianus
tggtgactttttctctaataacgtt

SEQ ID NO: 160660 - DNA, 25 bp, Saccharomyces pastorianus
acacagggactaccgttgcatcaaa

SEQ ID NO: 160661 - DNA, 25 bp, Saccharomyces pastorianus
taataacgttccttttgccgaggat

SEQ ID NO: 160662 - DNA, 25 bp, Saccharomyces pastorianus
accaagtggttctcctgaggaggtt

SEQ ID NO: 160663 - DNA, 25 bp, Saccharomyces pastorianus
aggttaccaagtggttctcctgagg

SEQ ID NO: 160664 - DNA, 25 bp, Saccharomyces pastorianus
attaggttaccaagtggttctcctg

SEQ ID NO: 160665 - DNA, 25 bp, Saccharomyces pastorianus
ggttaccaagtggttctcctgagga

SEQ ID NO: 160666 - DNA, 25 bp, Saccharomyces pastorianus
ttaggttaccaagtggttctcctga

SEQ ID NO: 160667 - DNA, 25 bp, Saccharomyces pastorianus
taggttaccaagtggttctcctgag

SEQ ID NO: 160668 - DNA, 25 bp, Saccharomyces pastorianus
ttaccaagtggttctcctgaggagg

SEQ ID NO: 160669 - DNA, 25 bp, Saccharomyces pastorianus
taccaagtggttctcctgaggaggt

SEQ ID NO: 160670 - DNA, 25 bp, Saccharomyces pastorianus
ttctcctgaggaggttggaattgat

SEQ ID NO: 160671 - DNA, 25 bp, Saccharomyces pastorianus
gttaccaagtggttctcctgaggag

SEQ ID NO: 160672 - DNA, 25 bp, Saccharomyces pastorianus
tggttctcctgaggaggttggaatt

SEQ ID NO: 160673 - DNA, 25 bp, Saccharomyces pastorianus
attgcaggttcagatgatgacatca

SEQ ID NO: 160674 - DNA, 25 bp, Saccharomyces pastorianus
gataatgctagcgattttgacatga

SEQ ID NO: 160675 - DNA, 25 bp, Saccharomyces pastorianus
gacaagcgagcgagcatgaccataa

SEQ ID NO: 160676 - DNA, 25 bp, Saccharomyces pastorianus
gaaaacccggagttgttagcagcac

SEQ ID NO: 160677 - DNA, 25 bp, Saccharomyces pastorianus
gaaagagctcttgcgttgaagaagc

SEQ ID NO: 160678 - DNA, 25 bp, Saccharomyces pastorianus
tatatttccaagacacttcggcaga

SEQ ID NO: 160679 - DNA, 25 bp, Saccharomyces pastorianus
ttagcagcacaagaacgattagata

SEQ ID NO: 160680 - DNA, 25 bp, Saccharomyces pastorianus
ggcgcgagaagtacgttgttagcat

SEQ ID NO: 160681 - DNA, 25 bp, Saccharomyces pastorianus
gttactatgacagaagtccctaagg

SEQ ID NO: 160682 - DNA, 25 bp, Saccharomyces pastorianus
tcgtccttatccaatgcgtcaaatg

SEQ ID NO: 160683 - DNA, 25 bp, Saccharomyces pastorianus
gcgtcaaatggagctaatgtcccaa

SEQ ID NO: 160684 - DNA, 25 bp, Saccharomyces pastorianus
atatcatgtttgttccacgcttgtg

SEQ ID NO: 160685 - DNA, 25 bp, Saccharomyces pastorianus
tgttgatcgtacttctggtgcattc

SEQ ID NO: 160686 - DNA, 25 bp, Saccharomyces pastorianus
gcattggttattgctcctacacgag

SEQ ID NO: 160687 - DNA, 25 bp, Saccharomyces pastorianus
ttgtcactacttggtcccatgttta

SEQ ID NO: 160688 - DNA, 25 bp, Saccharomyces pastorianus
gcaatttcataatcggtacaccagg

SEQ ID NO: 160689 - DNA, 25 bp, Saccharomyces pastorianus
ttgttcacgatattcccatcaactc

SEQ ID NO: 160690 - DNA, 25 bp, Saccharomyces pastorianus
ttttttcattcacgcccaaacaggc

SEQ ID NO: 160691 - DNA, 25 bp, Saccharomyces pastorianus
gagcatccagaagcaggccatacct

SEQ ID NO: 160692 - DNA, 25 bp, Saccharomyces pastorianus
gaaaaatttcccaagctaccgcata

SEQ ID NO: 160693 - DNA, 25 bp, Saccharomyces pastorianus
caccaggtcgtgttttggatcattt

SEQ ID NO: 160694 - DNA, 25 bp, Saccharomyces pastorianus
cacgcttgtgtcatgttgtcactac

SEQ ID NO: 160695 - DNA, 25 bp, Saccharomyces pastorianus
gacccagtgatcgaagagtttccat

SEQ ID NO: 160696 - DNA, 25 bp, Saccharomyces pastorianus
gatataaacccaagtcgcacctatg

SEQ ID NO: 160697 - DNA, 25 bp, Saccharomyces pastorianus
agaggagtcactgcacgtgtttcag

SEQ ID NO: 160698 - DNA, 25 bp, Saccharomyces pastorianus
attcctttggatgagcaggccttct

SEQ ID NO: 160699 - DNA, 25 bp, Saccharomyces pastorianus
gaggacgccagaaggaaccctaatc

SEQ ID NO: 160700 - DNA, 25 bp, Saccharomyces pastorianus
acaacgcgctcaagtggttaccatg

SEQ ID NO: 160701 - DNA, 25 bp, Saccharomyces pastorianus
gtaggacgcaaacctgctgagcatc

SEQ ID NO: 160702 - DNA, 25 bp, Saccharomyces pastorianus
tgagcatccgtttatctctgcagca

SEQ ID NO: 160703 - DNA, 25 bp, Saccharomyces pastorianus
gggtagcacaattgaagccattttt

SEQ ID NO: 160704 - DNA, 25 bp, Saccharomyces pastorianus
gaacggaacaaacagcgctatagct

SEQ ID NO: 160705 - DNA, 25 bp, Saccharomyces pastorianus
gtgtttcagtatgctaatagaccaa

SEQ ID NO: 160706 - DNA, 25 bp, Saccharomyces pastorianus
tgtcacattttcaccctttattcat

SEQ ID NO: 160707 - DNA, 25 bp, Saccharomyces pastorianus
gaagctttttgaactaaaacattca

SEQ ID NO: 160708 - DNA, 25 bp, Saccharomyces pastorianus
gctccacttttttcgcatataggtc

SEQ ID NO: 160709 - DNA, 25 bp, Saccharomyces pastorianus
cacattttcaccctttattcatcaa

SEQ ID NO: 160710 - DNA, 25 bp, Saccharomyces pastorianus
attgctccacttttttcgcatatag

SEQ ID NO: 160711 - DNA, 25 bp, Saccharomyces pastorianus
gaactaaaacattcacattgtcaca

SEQ ID NO: 160712 - DNA, 25 bp, Saccharomyces pastorianus
attgtcacattttcaccctttattc

SEQ ID NO: 160713 - DNA, 25 bp, Saccharomyces pastorianus
ttttattgctccacttttttcgcat

SEQ ID NO: 160714 - DNA, 25 bp, Saccharomyces pastorianus
acattgtcacattttcaccctttat

SEQ ID NO: 160715 - DNA, 25 bp, Saccharomyces pastorianus
ttcaccctttattcatcaatttttt

SEQ ID NO: 160716 - DNA, 25 bp, Saccharomyces pastorianus
ttcacattgtcacattttcaccctt

SEQ ID NO: 160717 - DNA, 25 bp, Saccharomyces pastorianus
aacaccaccaagaccgaagactatt

SEQ ID NO: 160718 - DNA, 25 bp, Saccharomyces pastorianus
ttcttttcaattctttatccgcatt

SEQ ID NO: 160719 - DNA, 25 bp, Saccharomyces pastorianus
atttttcaccatcagtttgactttg

SEQ ID NO: 160720 - DNA, 25 bp, Saccharomyces pastorianus
ggtcacaaccttcagatcctaaact

SEQ ID NO: 160721 - DNA, 25 bp, Saccharomyces pastorianus
ggatcctaatgatgatggccagtca

SEQ ID NO: 160722 - DNA, 25 bp, Saccharomyces pastorianus
gccagacctggtaatccattgtata

SEQ ID NO: 160723 - DNA, 25 bp, Saccharomyces pastorianus
aaagtgccgaatcagagtttaccga

SEQ ID NO: 160724 - DNA, 25 bp, Saccharomyces pastorianus
gatggccagtcatatgccagacctg

SEQ ID NO: 160725 - DNA, 25 bp, Saccharomyces pastorianus
atggacatcgggtacttcattgttc

SEQ ID NO: 160726 - DNA, 25 bp, Saccharomyces pastorianus
ttcattgttccctccagaccatttt

SEQ ID NO: 160727 - DNA, 25 bp, Saccharomyces pastorianus
taggcaccagtgttgatgatcgaat

SEQ ID NO: 160728 - DNA, 25 bp, Saccharomyces pastorianus
aaattatctcactgacccacgaaac

SEQ ID NO: 160729 - DNA, 25 bp, Saccharomyces pastorianus
agggtcattttccattcccattggc

SEQ ID NO: 160730 - DNA, 25 bp, Saccharomyces pastorianus
ggccgatatatatagatgcacgctt

SEQ ID NO: 160731 - DNA, 25 bp, Saccharomyces pastorianus
ggcagtgggattcaaaacatcctat

SEQ ID NO: 160732 - DNA, 25 bp, Saccharomyces pastorianus
agagatacgcgcaaagtctttataa

SEQ ID NO: 160733 - DNA, 25 bp, Saccharomyces pastorianus
aattttgagtaacggcgaatgcggc

SEQ ID NO: 160734 - DNA, 25 bp, Saccharomyces pastorianus
tttccattcccattggccgatatat

SEQ ID NO: 160735 - DNA, 25 bp, Saccharomyces pastorianus
agggcatgacaatagactctttaga

SEQ ID NO: 160736 - DNA, 25 bp, Saccharomyces pastorianus
gcacgcttatcaggcaattcaacta

SEQ ID NO: 160737 - DNA, 25 bp, Saccharomyces pastorianus
gacccacgaaaccattacaggatat

SEQ ID NO: 160738 - DNA, 25 bp, Saccharomyces pastorianus
attttaggcgaattggacttctata

SEQ ID NO: 160739 - DNA, 25 bp, Saccharomyces pastorianus
ttttccagaatagaaaccttcggat

SEQ ID NO: 160740 - DNA, 25 bp, Saccharomyces pastorianus
gtctcttctttctcttgaatatttt

SEQ ID NO: 160741 - DNA, 25 bp, Saccharomyces pastorianus
taagcagtctcttctttctcttgaa

SEQ ID NO: 160742 - DNA, 25 bp, Saccharomyces pastorianus
ccttcggattattcgtaggtaatga

SEQ ID NO: 160743 - DNA, 25 bp, Saccharomyces pastorianus
agttgtaagcagtctcttctttctc

SEQ ID NO: 160744 - DNA, 25 bp, Saccharomyces pastorianus
tatttgggtcgttagaatgggtatt

SEQ ID NO: 160745 - DNA, 25 bp, Saccharomyces pastorianus
atggacccgctcaccataaactttt

SEQ ID NO: 160746 - DNA, 25 bp, Saccharomyces pastorianus
atgaaccaccaccagttgtaagcag

SEQ ID NO: 160747 - DNA, 25 bp, Saccharomyces pastorianus
tagaaaccttcggattattcgtagg

SEQ ID NO: 160748 - DNA, 25 bp, Saccharomyces pastorianus
gtaggtaatgaaccaccaccagttg

SEQ ID NO: 160749 - DNA, 25 bp, Saccharomyces pastorianus
gcagtctcttctttctcttgaatat

SEQ ID NO: 160750 - DNA, 25 bp, Saccharomyces pastorianus
tgtcacgtaattctgcagcaggttt

SEQ ID NO: 160751 - DNA, 25 bp, Saccharomyces pastorianus
gcagcaggtttggaaaacactcttt

SEQ ID NO: 160752 - DNA, 25 bp, Saccharomyces pastorianus
ttctgcagcaggtttggaaaacact

SEQ ID NO: 160753 - DNA, 25 bp, Saccharomyces pastorianus
atgtcacgtaattctgcagcaggtt

SEQ ID NO: 160754 - DNA, 25 bp, Saccharomyces pastorianus
gtcacgtaattctgcagcaggtttg

SEQ ID NO: 160755 - DNA, 25 bp, Saccharomyces pastorianus
attctgcagcaggtttggaaaacac

SEQ ID NO: 160756 - DNA, 25 bp, Saccharomyces pastorianus
ctgcagcaggtttggaaaacactct

SEQ ID NO: 160757 - DNA, 25 bp, Saccharomyces pastorianus
aattctgcagcaggtttggaaaaca

SEQ ID NO: 160758 - DNA, 25 bp, Saccharomyces pastorianus
cacgtaattctgcagcaggtttgga

SEQ ID NO: 160759 - DNA, 25 bp, Saccharomyces pastorianus
cagcaggtttggaaaacactctttt

SEQ ID NO: 160760 - DNA, 25 bp, Saccharomyces pastorianus
cgtaattctgcagcaggtttggaaa

SEQ ID NO: 160761 - DNA, 25 bp, Saccharomyces pastorianus
gattgccgtgttatctgtcggtaac

SEQ ID NO: 160762 - DNA, 25 bp, Saccharomyces pastorianus
tgtcacatctgcattcggtcttatt

SEQ ID NO: 160763 - DNA, 25 bp, Saccharomyces pastorianus
actgttgttgggttcatcatcttag

SEQ ID NO: 160764 - DNA, 25 bp, Saccharomyces pastorianus
gtcttgctgccagtgaatccgtaga

SEQ ID NO: 160765 - DNA, 25 bp, Saccharomyces pastorianus
gctgccttttcttttaacggttcag

SEQ ID NO: 160766 - DNA, 25 bp, Saccharomyces pastorianus
cagaaatcttttcctacgttgaccg

SEQ ID NO: 160767 - DNA, 25 bp, Saccharomyces pastorianus
aacgtcgttatcttgattgccgtgt

SEQ ID NO: 160768 - DNA, 25 bp, Saccharomyces pastorianus
gatcctggtgcctttgctggtgaca

SEQ ID NO: 160769 - DNA, 25 bp, Saccharomyces pastorianus
gactcacggtatcaagggtttgcca

SEQ ID NO: 160770 - DNA, 25 bp, Saccharomyces pastorianus
gaaagtccgttcctaaggctgctaa

SEQ ID NO: 160771 - DNA, 25 bp, Saccharomyces pastorianus
aaaggtgtttgttctgtcttcgtca

SEQ ID NO: 160772 - DNA, 25 bp, Saccharomyces pastorianus
actaccacaactaacgcatcggtct

SEQ ID NO: 160773 - DNA, 25 bp, Saccharomyces pastorianus
gaaagtcctagcatgtcaaacagtc

SEQ ID NO: 160774 - DNA, 25 bp, Saccharomyces pastorianus
cagtcatcatacatcccagggaaga

SEQ ID NO: 160775 - DNA, 25 bp, Saccharomyces pastorianus
agggaaagtcctagcatgtcaaaca

SEQ ID NO: 160776 - DNA, 25 bp, Saccharomyces pastorianus
taacgcatcggtctcgagcagtaaa

SEQ ID NO: 160777 - DNA, 25 bp, Saccharomyces pastorianus
ataataaacaccactaccacaacta

SEQ ID NO: 160778 - DNA, 25 bp, Saccharomyces pastorianus
gtcctagcatgtcaaacagtcatca

SEQ ID NO: 160779 - DNA, 25 bp, Saccharomyces pastorianus
ataaacaccactaccacaactaacg

SEQ ID NO: 160780 - DNA, 25 bp, Saccharomyces pastorianus
tggtgccaagggaaagtcctagcat

SEQ ID NO: 160781 - DNA, 25 bp, Saccharomyces pastorianus
acaactaacgcatcggtctcgagca

SEQ ID NO: 160782 - DNA, 25 bp, Saccharomyces pastorianus
catcccagggaagaagaaacaaact

SEQ ID NO: 160783 - DNA, 25 bp, Saccharomyces pastorianus
gcagttactgaagggagacgtctct

SEQ ID NO: 160784 - DNA, 25 bp, Saccharomyces pastorianus
caaaggaggcgctttgggtccgact

SEQ ID NO: 160785 - DNA, 25 bp, Saccharomyces pastorianus
cgtgggaccagctgcaatacatgag

SEQ ID NO: 160786 - DNA, 25 bp, Saccharomyces pastorianus
attcgacgtggaaatcgccaaccgc

SEQ ID NO: 160787 - DNA, 25 bp, Saccharomyces pastorianus
gcaaggcccagtttcgttgcaaagg

SEQ ID NO: 160788 - DNA, 25 bp, Saccharomyces pastorianus
attgcagagacagccacgtaccatc

SEQ ID NO: 160789 - DNA, 25 bp, Saccharomyces pastorianus
agctggattcagtgctcaaatacaa

SEQ ID NO: 160790 - DNA, 25 bp, Saccharomyces pastorianus
atacatgagaacttcgtgcccgcaa

SEQ ID NO: 160791 - DNA, 25 bp, Saccharomyces pastorianus
gcaaaggcagattccaaagctggat

SEQ ID NO: 160792 - DNA, 25 bp, Saccharomyces pastorianus
agacgtctctcatcgattcgacgtg

SEQ ID NO: 160793 - DNA, 25 bp, Saccharomyces pastorianus
acgtaccatctcgttgtttaccaat

SEQ ID NO: 160794 - DNA, 25 bp, Saccharomyces pastorianus
tattcatgggtttttggcctttgtc

SEQ ID NO: 160795 - DNA, 25 bp, Saccharomyces pastorianus
gatgtgccgatggactctcctgaca

SEQ ID NO: 160796 - DNA, 25 bp, Saccharomyces pastorianus
tggacccgctttcattgtgcaggaa

SEQ ID NO: 160797 - DNA, 25 bp, Saccharomyces pastorianus
ttttcgagcgagaccaatggacccg

SEQ ID NO: 160798 - DNA, 25 bp, Saccharomyces pastorianus
gtttccagagaagacccacgacaat

SEQ ID NO: 160799 - DNA, 25 bp, Saccharomyces pastorianus
gagtttcaaggacaacctgttccgt

SEQ ID NO: 160800 - DNA, 25 bp, Saccharomyces pastorianus
attgtcctcaatctcaccgttgaat

SEQ ID NO: 160801 - DNA, 25 bp, Saccharomyces pastorianus
aactccacggattctttttcgagcg

SEQ ID NO: 160802 - DNA, 25 bp, Saccharomyces pastorianus
accgttgaatgtttcctcctctaag

SEQ ID NO: 160803 - DNA, 25 bp, Saccharomyces pastorianus
gacaatccgcttcagatgtgccgat

SEQ ID NO: 160804 - DNA, 25 bp, Saccharomyces pastorianus
aagacggaccatgacgttgcaacaa

SEQ ID NO: 160805 - DNA, 25 bp, Saccharomyces pastorianus
aaagacgtagattcagaactgacaa

SEQ ID NO: 160806 - DNA, 25 bp, Saccharomyces pastorianus
ctcaagctttgatgttggctccaac

SEQ ID NO: 160807 - DNA, 25 bp, Saccharomyces pastorianus
atggctttggctttccacatggaca

SEQ ID NO: 160808 - DNA, 25 bp, Saccharomyces pastorianus
gttgtcatggctttggctttccaca

SEQ ID NO: 160809 - DNA, 25 bp, Saccharomyces pastorianus
tctggtttcaaggaacaaatctacc

SEQ ID NO: 160810 - DNA, 25 bp, Saccharomyces pastorianus
gctcctcaagctttgatgttggctc

SEQ ID NO: 160811 - DNA, 25 bp, Saccharomyces pastorianus
aactgacaagatcaagatgttcatc

SEQ ID NO: 160812 - DNA, 25 bp, Saccharomyces pastorianus
aaggctcctcaagctttgatgttgg

SEQ ID NO: 160813 - DNA, 25 bp, Saccharomyces pastorianus
ggctttccacatggacatcaaggtc

SEQ ID NO: 160814 - DNA, 25 bp, Saccharomyces pastorianus
gatgaaatgttgtcttctggtttca

SEQ ID NO: 160815 - DNA, 25 bp, Saccharomyces pastorianus
gctttggctttccacatggacatca

SEQ ID NO: 160816 - DNA, 25 bp, Saccharomyces pastorianus
tccatggagggattttgctgaacta

SEQ ID NO: 160817 - DNA, 25 bp, Saccharomyces pastorianus
ataccaccacgaatcgttccatgga

SEQ ID NO: 160818 - DNA, 25 bp, Saccharomyces pastorianus
atcaggattctattcctatccggtt

SEQ ID NO: 160819 - DNA, 25 bp, Saccharomyces pastorianus
agataagcgacagcgtgcagtgcaa

SEQ ID NO: 160820 - DNA, 25 bp, Saccharomyces pastorianus
ataacatgtgcggtattgctagacg

SEQ ID NO: 160821 - DNA, 25 bp, Saccharomyces pastorianus
tcacgtggtggactctacagcacaa

SEQ ID NO: 160822 - DNA, 25 bp, Saccharomyces pastorianus
aagagtacagagctaccgactaaag

SEQ ID NO: 160823 - DNA, 25 bp, Saccharomyces pastorianus
ctagaggagctgaaactttggtttt

SEQ ID NO: 160824 - DNA, 25 bp, Saccharomyces pastorianus
cgtgtttaggagtacatcaggattc

SEQ ID NO: 160825 - DNA, 25 bp, Saccharomyces pastorianus
attcctatccggttatcgtatgtaa

SEQ ID NO: 160826 - DNA, 25 bp, Saccharomyces pastorianus
gggttcccaatatttacctcacgtg

SEQ ID NO: 160827 - DNA, 25 bp, Saccharomyces pastorianus
attcaatgcctggaaagaactacaa

SEQ ID NO: 160828 - DNA, 25 bp, Saccharomyces pastorianus
aatttggtgaactatgatgccgaaa

SEQ ID NO: 160829 - DNA, 25 bp, Saccharomyces pastorianus
aaagttcacacgcaagttcatcaga

SEQ ID NO: 160830 - DNA, 25 bp, Saccharomyces pastorianus
gatcagggaaaatttgcgtcaatgg

SEQ ID NO: 160831 - DNA, 25 bp, Saccharomyces pastorianus
gaaaatgcgtcatacttgatattgt

SEQ ID NO: 160832 - DNA, 25 bp, Saccharomyces pastorianus
gtatttttgccaatctatgctggcc

SEQ ID NO: 160833 - DNA, 25 bp, Saccharomyces pastorianus
tatcacaatgtggttcttgagaaat

SEQ ID NO: 160834 - DNA, 25 bp, Saccharomyces pastorianus
aattatgacccacttttactcaaag

SEQ ID NO: 160835 - DNA, 25 bp, Saccharomyces pastorianus
tatgctggccaaactagagactgaa

SEQ ID NO: 160836 - DNA, 25 bp, Saccharomyces pastorianus
gtagctaggaattacagaacccaac

SEQ ID NO: 160837 - DNA, 25 bp, Saccharomyces pastorianus
ggaagcgacttagaaacgagtttct

SEQ ID NO: 160838 - DNA, 25 bp, Saccharomyces pastorianus
gaaacaaattgatagcacagtggat

SEQ ID NO: 160839 - DNA, 25 bp, Saccharomyces pastorianus
gaaaaagattccgttccattgaaga

SEQ ID NO: 160840 - DNA, 25 bp, Saccharomyces pastorianus
tcgaggccaaactgaaagaatacat

SEQ ID NO: 160841 - DNA, 25 bp, Saccharomyces pastorianus
tattcctgcggaaaaagattccgtt

SEQ ID NO: 160842 - DNA, 25 bp, Saccharomyces pastorianus
gctgtatgattttattcctgcggaa

SEQ ID NO: 160843 - DNA, 25 bp, Saccharomyces pastorianus
aaagattccgttccattgaagaagg

SEQ ID NO: 160844 - DNA, 25 bp, Saccharomyces pastorianus
aaagctgtatgattttattcctgcg

SEQ ID NO: 160845 - DNA, 25 bp, Saccharomyces pastorianus
gcacagtggatatcgaggccaaact

SEQ ID NO: 160846 - DNA, 25 bp, Saccharomyces pastorianus
gaatacatagaccatttatcattga

SEQ ID NO: 160847 - DNA, 25 bp, Saccharomyces pastorianus
agaccatttatcattgaggtttaat

SEQ ID NO: 160848 - DNA, 25 bp, Saccharomyces pastorianus
gatagcacagtggatatcgaggcca

SEQ ID NO: 160849 - DNA, 25 bp, Saccharomyces pastorianus
gtacactatttgacgccagaagccc

SEQ ID NO: 160850 - DNA, 25 bp, Saccharomyces pastorianus
gaacactaaggctcaagctgcatca

SEQ ID NO: 160851 - DNA, 25 bp, Saccharomyces pastorianus
aaccaaactgtttctataccactga

SEQ ID NO: 160852 - DNA, 25 bp, Saccharomyces pastorianus
tgaaccaaaagtctaccgagtcgta

SEQ ID NO: 160853 - DNA, 25 bp, Saccharomyces pastorianus
acagacagcttcaaaccacctagtt

SEQ ID NO: 160854 - DNA, 25 bp, Saccharomyces pastorianus
aagctagttcttcaacctctaattt

SEQ ID NO: 160855 - DNA, 25 bp, Saccharomyces pastorianus
aagcagatcacagtaggcaacctat

SEQ ID NO: 160856 - DNA, 25 bp, Saccharomyces pastorianus
tacttttaatacatccggcggtgac

SEQ ID NO: 160857 - DNA, 25 bp, Saccharomyces pastorianus
atttctgtcttagctgactcattga

SEQ ID NO: 160858 - DNA, 25 bp, Saccharomyces pastorianus
cggtgactacaacgccagagctagt

SEQ ID NO: 160859 - DNA, 25 bp, Saccharomyces pastorianus
ggattcctctaaactcaaccaaact

SEQ ID NO: 160860 - DNA, 25 bp, Saccharomyces pastorianus
gttgggtttgtcaaatctcatgttg

SEQ ID NO: 160861 - DNA, 25 bp, Saccharomyces pastorianus
gcaacatctctctgtccgtaaagaa

SEQ ID NO: 160862 - DNA, 25 bp, Saccharomyces pastorianus
ccatagatttcaatttacctccaga

SEQ ID NO: 160863 - DNA, 25 bp, Saccharomyces pastorianus
gagatttttcattccaacggcaagt

SEQ ID NO: 160864 - DNA, 25 bp, Saccharomyces pastorianus
aagcctaagatatttatacctcaga

SEQ ID NO: 160865 - DNA, 25 bp, Saccharomyces pastorianus
actcaaaattggactctagctattc

SEQ ID NO: 160866 - DNA, 25 bp, Saccharomyces pastorianus
agaatgctaacgataccaatgaggt

SEQ ID NO: 160867 - DNA, 25 bp, Saccharomyces pastorianus
taatgttccccaatgctgttgtcat

SEQ ID NO: 160868 - DNA, 25 bp, Saccharomyces pastorianus
gataattggttctggttacgactca

SEQ ID NO: 160869 - DNA, 25 bp, Saccharomyces pastorianus
gtcattactcaggtgaactcaaaat

SEQ ID NO: 160870 - DNA, 25 bp, Saccharomyces pastorianus
gatcaagctgtttatttctccaaaa

SEQ ID NO: 160871 - DNA, 25 bp, Saccharomyces pastorianus
cattgcggtggttgaaaacgaatcc

SEQ ID NO: 160872 - DNA, 25 bp, Saccharomyces pastorianus
ttcgtttgcggaaggaacttagcgt

SEQ ID NO: 160873 - DNA, 25 bp, Saccharomyces pastorianus
aaaagtacatcttcgtttgcggaag

SEQ ID NO: 160874 - DNA, 25 bp, Saccharomyces pastorianus
ggaaggaacttagcgtacccattgc

SEQ ID NO: 160875 - DNA, 25 bp, Saccharomyces pastorianus
tacccattgcggtggttgaaaacga

SEQ ID NO: 160876 - DNA, 25 bp, Saccharomyces pastorianus
agcgtacccattgcggtggttgaaa

SEQ ID NO: 160877 - DNA, 25 bp, Saccharomyces pastorianus
gaacttagcgtacccattgcggtgg

SEQ ID NO: 160878 - DNA, 25 bp, Saccharomyces pastorianus
ttagcgtacccattgcggtggttga

SEQ ID NO: 160879 - DNA, 25 bp, Saccharomyces pastorianus
aggaacttagcgtacccattgcggt

SEQ ID NO: 160880 - DNA, 25 bp, Saccharomyces pastorianus
gtacatcttcgtttgcggaaggaac

SEQ ID NO: 160881 - DNA, 25 bp, Saccharomyces pastorianus
gcggaaggaacttagcgtacccatt

SEQ ID NO: 160882 - DNA, 25 bp, Saccharomyces pastorianus
gagtcaagctctagcgggtcatcgt

SEQ ID NO: 160883 - DNA, 25 bp, Saccharomyces pastorianus
aaagctcttcctcatcggagtcaag

SEQ ID NO: 160884 - DNA, 25 bp, Saccharomyces pastorianus
gattctgactcaagttctagctcaa

SEQ ID NO: 160885 - DNA, 25 bp, Saccharomyces pastorianus
ttctcaatcaagttctagctccagc

SEQ ID NO: 160886 - DNA, 25 bp, Saccharomyces pastorianus
tagttctgacgaatcttcctcggaa

SEQ ID NO: 160887 - DNA, 25 bp, Saccharomyces pastorianus
aagcagttcttctgattccgaatca

SEQ ID NO: 160888 - DNA, 25 bp, Saccharomyces pastorianus
ggtcatcgtcatcttcggaatcaga

SEQ ID NO: 160889 - DNA, 25 bp, Saccharomyces pastorianus
gactcaagctcgtctgattcaagtt

SEQ ID NO: 160890 - DNA, 25 bp, Saccharomyces pastorianus
agttccgacgaatctacatcttctt

SEQ ID NO: 160891 - DNA, 25 bp, Saccharomyces pastorianus
agactctggttctagctctgaattg

SEQ ID NO: 160892 - DNA, 25 bp, Saccharomyces pastorianus
ctcttcctcggattcagattcggat

SEQ ID NO: 160893 - DNA, 25 bp, Saccharomyces pastorianus
aaggcgtaccaaggaacatcttcaa

SEQ ID NO: 160894 - DNA, 25 bp, Saccharomyces pastorianus
ttatcctctataactgacgaagcag

SEQ ID NO: 160895 - DNA, 25 bp, Saccharomyces pastorianus
aataacgctgcattgttactagagc

SEQ ID NO: 160896 - DNA, 25 bp, Saccharomyces pastorianus
gaatgtctacgtttatcctctataa

SEQ ID NO: 160897 - DNA, 25 bp, Saccharomyces pastorianus
ttactagagcatacatcgaacgaga

SEQ ID NO: 160898 - DNA, 25 bp, Saccharomyces pastorianus
gagttagaacataaagtgcccatta

SEQ ID NO: 160899 - DNA, 25 bp, Saccharomyces pastorianus
accaattctgtttctaatgactcga

SEQ ID NO: 160900 - DNA, 25 bp, Saccharomyces pastorianus
gtgcccattataaactctttcaaag

SEQ ID NO: 160901 - DNA, 25 bp, Saccharomyces pastorianus
gtctcgatctatgccgtcaaataca

SEQ ID NO: 160902 - DNA, 25 bp, Saccharomyces pastorianus
ctttaaccaaacaacgtctcgatct

SEQ ID NO: 160903 - DNA, 25 bp, Saccharomyces pastorianus
ttctaatgactcgaagggaccctta

SEQ ID NO: 160904 - DNA, 25 bp, Saccharomyces pastorianus
gcctgtgcaccataacgttttaact

SEQ ID NO: 160905 - DNA, 25 bp, Saccharomyces pastorianus
tcttccgccaaccagggtattcaaa

SEQ ID NO: 160906 - DNA, 25 bp, Saccharomyces pastorianus
tagatgtgcctacccaattgactac

SEQ ID NO: 160907 - DNA, 25 bp, Saccharomyces pastorianus
tggtccgaccatggtgtcttcaata

SEQ ID NO: 160908 - DNA, 25 bp, Saccharomyces pastorianus
ttttcgacgctatcaagtttggttc

SEQ ID NO: 160909 - DNA, 25 bp, Saccharomyces pastorianus
tgacgttactttattctttggccta

SEQ ID NO: 160910 - DNA, 25 bp, Saccharomyces pastorianus
cgactatgacgactcttctattact

SEQ ID NO: 160911 - DNA, 25 bp, Saccharomyces pastorianus
tcctgctaacttgtgatgcttcggg

SEQ ID NO: 160912 - DNA, 25 bp, Saccharomyces pastorianus
tatgttttacttgatgcctgtgcac

SEQ ID NO: 160913 - DNA, 25 bp, Saccharomyces pastorianus
gattccatgtttggcggactctcat

SEQ ID NO: 160914 - DNA, 25 bp, Saccharomyces pastorianus
atgcttcgggtgttttaccaccagt

SEQ ID NO: 160915 - DNA, 25 bp, Saccharomyces pastorianus
tatcatcttcccaacggcatataac

SEQ ID NO: 160916 - DNA, 25 bp, Saccharomyces pastorianus
agctccaatgtttccttatcatctt

SEQ ID NO: 160917 - DNA, 25 bp, Saccharomyces pastorianus
gaaggaccaaagtttttcgcagatc

SEQ ID NO: 160918 - DNA, 25 bp, Saccharomyces pastorianus
ttcgcagatccttccagtgatacta

SEQ ID NO: 160919 - DNA, 25 bp, Saccharomyces pastorianus
gatgaagcagcactagccagctccg

SEQ ID NO: 160920 - DNA, 25 bp, Saccharomyces pastorianus
taatgccaggcagaagtccgttgtg

SEQ ID NO: 160921 - DNA, 25 bp, Saccharomyces pastorianus
gcagtatgtttctggtttaacctac

SEQ ID NO: 160922 - DNA, 25 bp, Saccharomyces pastorianus
gaaagtggtttcgtgtcctttgaca

SEQ ID NO: 160923 - DNA, 25 bp, Saccharomyces pastorianus
ggttcatcggaaggatctgctcatc

SEQ ID NO: 160924 - DNA, 25 bp, Saccharomyces pastorianus
actatgtgccagcataccgtaggaa

SEQ ID NO: 160925 - DNA, 25 bp, Saccharomyces pastorianus
aaaatcctgatcacacttctggttc

SEQ ID NO: 160926 - DNA, 25 bp, Saccharomyces pastorianus
ggttctgtatttgcttctgtcaagt

SEQ ID NO: 160927 - DNA, 25 bp, Saccharomyces pastorianus
ttcggctgtatcttaaatgttctgt

SEQ ID NO: 160928 - DNA, 25 bp, Saccharomyces pastorianus
gtcggcctttagttggcatggctat

SEQ ID NO: 160929 - DNA, 25 bp, Saccharomyces pastorianus
ccccgtttgttattgccttgagcaa

SEQ ID NO: 160930 - DNA, 25 bp, Saccharomyces pastorianus
aattcctgcgtttatgcatcctcta

SEQ ID NO: 160931 - DNA, 25 bp, Saccharomyces pastorianus
atattactgcttccccgtttgttat

SEQ ID NO: 160932 - DNA, 25 bp, Saccharomyces pastorianus
gtattttctgtttgcaattcctgcg

SEQ ID NO: 160933 - DNA, 25 bp, Saccharomyces pastorianus
ggtcatcttgatagccgtattttct

SEQ ID NO: 160934 - DNA, 25 bp, Saccharomyces pastorianus
aggccaacttccaaagatctgcgct

SEQ ID NO: 160935 - DNA, 25 bp, Saccharomyces pastorianus
atgatcctcgtctgattagcggttc

SEQ ID NO: 160936 - DNA, 25 bp, Saccharomyces pastorianus
gcgttgtgttccatttcatttttca

SEQ ID NO: 160937 - DNA, 25 bp, Saccharomyces pastorianus
gagtattcccataatgattgctgta

SEQ ID NO: 160938 - DNA, 25 bp, Saccharomyces pastorianus
ttgctgtatatattggccatagagt

SEQ ID NO: 160939 - DNA, 25 bp, Saccharomyces pastorianus
gtagtcccagattctgctgctaatt

SEQ ID NO: 160940 - DNA, 25 bp, Saccharomyces pastorianus
gtgggtagtcccagattctgctgct

SEQ ID NO: 160941 - DNA, 25 bp, Saccharomyces pastorianus
attcccataatgattgctgtatata

SEQ ID NO: 160942 - DNA, 25 bp, Saccharomyces pastorianus
gattctgctgctaatttcttagact

SEQ ID NO: 160943 - DNA, 25 bp, Saccharomyces pastorianus
cccagattctgctgctaatttctta

SEQ ID NO: 160944 - DNA, 25 bp, Saccharomyces pastorianus
gattgctgtatatattggccataga

SEQ ID NO: 160945 - DNA, 25 bp, Saccharomyces pastorianus
gtcccagattctgctgctaatttct

SEQ ID NO: 160946 - DNA, 25 bp, Saccharomyces pastorianus
gctgctaatttcttagactattgta

SEQ ID NO: 160947 - DNA, 25 bp, Saccharomyces pastorianus
gggtagtcccagattctgctgctaa

SEQ ID NO: 160948 - DNA, 25 bp, Saccharomyces pastorianus
gatagcggacattccttagaggact

SEQ ID NO: 160949 - DNA, 25 bp, Saccharomyces pastorianus
gcggacattccttagaggacttcga

SEQ ID NO: 160950 - DNA, 25 bp, Saccharomyces pastorianus
ccttgatagcggacattccttagag

SEQ ID NO: 160951 - DNA, 25 bp, Saccharomyces pastorianus
ggacattccttagaggacttcgaag

SEQ ID NO: 160952 - DNA, 25 bp, Saccharomyces pastorianus
accttgatagcggacattccttaga

SEQ ID NO: 160953 - DNA, 25 bp, Saccharomyces pastorianus
ggatattgaccttgatagcggacat

SEQ ID NO: 160954 - DNA, 25 bp, Saccharomyces pastorianus
atggatattgaccttgatagcggac

SEQ ID NO: 160955 - DNA, 25 bp, Saccharomyces pastorianus
tggatattgaccttgatagcggaca

SEQ ID NO: 160956 - DNA, 25 bp, Saccharomyces pastorianus
tagcggacattccttagaggacttc

SEQ ID NO: 160957 - DNA, 25 bp, Saccharomyces pastorianus
acattccttagaggacttcgaagcc

SEQ ID NO: 160958 - DNA, 25 bp, Saccharomyces pastorianus
ttgatagcggacattccttagagga

SEQ ID NO: 160959 - DNA, 25 bp, Saccharomyces pastorianus
atactgcatcatccttgcaacacaa

SEQ ID NO: 160960 - DNA, 25 bp, Saccharomyces pastorianus
aatcacctgtaggagtgaacctcga

SEQ ID NO: 160961 - DNA, 25 bp, Saccharomyces pastorianus
cgcttcctgcagaagttttcgaaca

SEQ ID NO: 160962 - DNA, 25 bp, Saccharomyces pastorianus
tttctcgaaggaatcacctgtagga

SEQ ID NO: 160963 - DNA, 25 bp, Saccharomyces pastorianus
tgcaacacaacgcttcctgcagaag

SEQ ID NO: 160964 - DNA, 25 bp, Saccharomyces pastorianus
cacctgtaggagtgaacctcgaaaa

SEQ ID NO: 160965 - DNA, 25 bp, Saccharomyces pastorianus
aaaggcttggcaatcctcacttaca

SEQ ID NO: 160966 - DNA, 25 bp, Saccharomyces pastorianus
gcatcatccttgcaacacaacgctt

SEQ ID NO: 160967 - DNA, 25 bp, Saccharomyces pastorianus
acaacgcttcctgcagaagttttcg

SEQ ID NO: 160968 - DNA, 25 bp, Saccharomyces pastorianus
aaaacacatatttcatactgcatca

SEQ ID NO: 160969 - DNA, 25 bp, Saccharomyces pastorianus
tttcgaacaaaaggcttggcaatcc

SEQ ID NO: 160970 - DNA, 25 bp, Saccharomyces pastorianus
agagatggcccagtttcaagcgaag

SEQ ID NO: 160971 - DNA, 25 bp, Saccharomyces pastorianus
gagcgccatagcatgtaacgttttt

SEQ ID NO: 160972 - DNA, 25 bp, Saccharomyces pastorianus
aagaattgtcagactcccattctcg

SEQ ID NO: 160973 - DNA, 25 bp, Saccharomyces pastorianus
gaaattttgaatgttcccgtggcct

SEQ ID NO: 160974 - DNA, 25 bp, Saccharomyces pastorianus
tttggatacggctcctctgttcaga

SEQ ID NO: 160975 - DNA, 25 bp, Saccharomyces pastorianus
gcgaactatcgctcaaactgacttg

SEQ ID NO: 160976 - DNA, 25 bp, Saccharomyces pastorianus
gggcggctgtacatcgtttggatac

SEQ ID NO: 160977 - DNA, 25 bp, Saccharomyces pastorianus
ggtcttctgaagatatccgtgcgaa

SEQ ID NO: 160978 - DNA, 25 bp, Saccharomyces pastorianus
cttcctcacttgttttgtcactaga

SEQ ID NO: 160979 - DNA, 25 bp, Saccharomyces pastorianus
gatggcagccacaacaaatcggtct

SEQ ID NO: 160980 - DNA, 25 bp, Saccharomyces pastorianus
ctctatccctgttgatgacgcggaa

SEQ ID NO: 160981 - DNA, 25 bp, Saccharomyces pastorianus
ggataggtccttttcgtacacatca

SEQ ID NO: 160982 - DNA, 25 bp, Saccharomyces pastorianus
agttgttcgcttttcgatacatcga

SEQ ID NO: 160983 - DNA, 25 bp, Saccharomyces pastorianus
gctgtctgcgtttatatccgactac

SEQ ID NO: 160984 - DNA, 25 bp, Saccharomyces pastorianus
atggatctcttctgcatttacggga

SEQ ID NO: 160985 - DNA, 25 bp, Saccharomyces pastorianus
agatcctctgcagccatgggaatgt

SEQ ID NO: 160986 - DNA, 25 bp, Saccharomyces pastorianus
gaaccttttgggtttgccactcaga

SEQ ID NO: 160987 - DNA, 25 bp, Saccharomyces pastorianus
agagctatctcggttcgttcatttc

SEQ ID NO: 160988 - DNA, 25 bp, Saccharomyces pastorianus
aggccaccttgctcgtgagattatt

SEQ ID NO: 160989 - DNA, 25 bp, Saccharomyces pastorianus
tcaccgctttacttttaccgctata

SEQ ID NO: 160990 - DNA, 25 bp, Saccharomyces pastorianus
atcgattactcatattccaggccac

SEQ ID NO: 160991 - DNA, 25 bp, Saccharomyces pastorianus
ttatttggtggatactgacgcgctg

SEQ ID NO: 160992 - DNA, 25 bp, Saccharomyces pastorianus
gtctctttacgtttagcaaatgtca

SEQ ID NO: 160993 - DNA, 25 bp, Saccharomyces pastorianus
tcgttcataaactatttggccttgt

SEQ ID NO: 160994 - DNA, 25 bp, Saccharomyces pastorianus
ggtgtgcattgtttatcattgtctc

SEQ ID NO: 160995 - DNA, 25 bp, Saccharomyces pastorianus
taaaactgacagctggattactcca

SEQ ID NO: 160996 - DNA, 25 bp, Saccharomyces pastorianus
attgctggattcatatgctgggctt

SEQ ID NO: 160997 - DNA, 25 bp, Saccharomyces pastorianus
gagttcacccaacaaggtacgatta

SEQ ID NO: 160998 - DNA, 25 bp, Saccharomyces pastorianus
atatcgattaaccttgcccttttct

SEQ ID NO: 160999 - DNA, 25 bp, Saccharomyces pastorianus
ttcttgctactcttttttgcgagga

SEQ ID NO: 161000 - DNA, 25 bp, Saccharomyces pastorianus
ctttcgttccattttcattcaccat

SEQ ID NO: 161001 - DNA, 25 bp, Saccharomyces pastorianus
tttggccttgtttatctctatgatt

SEQ ID NO: 161002 - DNA, 25 bp, Saccharomyces pastorianus
gaaatctatggtcggtatcgttcat

SEQ ID NO: 161003 - DNA, 25 bp, Saccharomyces pastorianus
gattgtttcatttttagcttccttg

SEQ ID NO: 161004 - DNA, 25 bp, Saccharomyces pastorianus
aactcttctgctaacttagccgcaa

SEQ ID NO: 161005 - DNA, 25 bp, Saccharomyces pastorianus
agcttccttgttcttgatagcccaa

SEQ ID NO: 161006 - DNA, 25 bp, Saccharomyces pastorianus
tggcgtcagctgaaaaccaaccttc

SEQ ID NO: 161007 - DNA, 25 bp, Saccharomyces pastorianus
aaccttccagtggacactctacaat

SEQ ID NO: 161008 - DNA, 25 bp, Saccharomyces pastorianus
taatcattggttttgctcaggcttt

SEQ ID NO: 161009 - DNA, 25 bp, Saccharomyces pastorianus
ttattcccagagcacaacgcgttat

SEQ ID NO: 161010 - DNA, 25 bp, Saccharomyces pastorianus
aactcctcccaatttgaagccaaga

SEQ ID NO: 161011 - DNA, 25 bp, Saccharomyces pastorianus
aacgcgttattgcatttatctccaa

SEQ ID NO: 161012 - DNA, 25 bp, Saccharomyces pastorianus
ttaagtaacctacccgctgtcaaag

SEQ ID NO: 161013 - DNA, 25 bp, Saccharomyces pastorianus
ggctcgtcccaaatcagtatggcgt

SEQ ID NO: 161014 - DNA, 25 bp, Saccharomyces pastorianus
gctaatagaagagatagagttttat

SEQ ID NO: 161015 - DNA, 25 bp, Saccharomyces pastorianus
gagatagagttttataacgtcaacg

SEQ ID NO: 161016 - DNA, 25 bp, Saccharomyces pastorianus
aatagaagagatagagttttataac

SEQ ID NO: 161017 - DNA, 25 bp, Saccharomyces pastorianus
aagagatagagttttataacgtcaa

SEQ ID NO: 161018 - DNA, 25 bp, Saccharomyces pastorianus
tagaagagatagagttttataacgt

SEQ ID NO: 161019 - DNA, 25 bp, Saccharomyces pastorianus
atagaagagatagagttttataacg

SEQ ID NO: 161020 - DNA, 25 bp, Saccharomyces pastorianus
tgctaatagaagagatagagtttta

SEQ ID NO: 161021 - DNA, 25 bp, Saccharomyces pastorianus
gatagagttttataacgtcaacgga

SEQ ID NO: 161022 - DNA, 25 bp, Saccharomyces pastorianus
agagatagagttttataacgtcaac

SEQ ID NO: 161023 - DNA, 25 bp, Saccharomyces pastorianus
gaagagatagagttttataacgtca

SEQ ID NO: 161024 - DNA, 25 bp, Saccharomyces pastorianus
agaagagatagagttttataacgtc

SEQ ID NO: 161025 - DNA, 25 bp, Saccharomyces pastorianus
gaaaaacattcccatgaaatcgaca

SEQ ID NO: 161026 - DNA, 25 bp, Saccharomyces pastorianus
tgatctcaagccactatccacaaat

SEQ ID NO: 161027 - DNA, 25 bp, Saccharomyces pastorianus
accggcgaagccttcatcaagtttg

SEQ ID NO: 161028 - DNA, 25 bp, Saccharomyces pastorianus
gccaaaatctttggtgttgacccta

SEQ ID NO: 161029 - DNA, 25 bp, Saccharomyces pastorianus
aaaaaactgctcctgatctcaagcc

SEQ ID NO: 161030 - DNA, 25 bp, Saccharomyces pastorianus
aatcgacaaatgaagaccttgccaa

SEQ ID NO: 161031 - DNA, 25 bp, Saccharomyces pastorianus
ccgttgaaaaggtttgcatttatag

SEQ ID NO: 161032 - DNA, 25 bp, Saccharomyces pastorianus
taaaggtcggaaggcaagtaatggt

SEQ ID NO: 161033 - DNA, 25 bp, Saccharomyces pastorianus
ccactatccacaaatactctctatg

SEQ ID NO: 161034 - DNA, 25 bp, Saccharomyces pastorianus
gccttcatcaagtttgacaacctgg

SEQ ID NO: 161035 - DNA, 25 bp, Saccharomyces pastorianus
gaaaaagccactcaagaaaccgttg

SEQ ID NO: 161036 - DNA, 25 bp, Saccharomyces pastorianus
ttagccaaagcagcttcgtcttcgg

SEQ ID NO: 161037 - DNA, 25 bp, Saccharomyces pastorianus
agccaaagcagcttcgtcttcggct

SEQ ID NO: 161038 - DNA, 25 bp, Saccharomyces pastorianus
aacttagccaaagcagcttcgtctt

SEQ ID NO: 161039 - DNA, 25 bp, Saccharomyces pastorianus
atggtggaaaccaacttagccaaag

SEQ ID NO: 161040 - DNA, 25 bp, Saccharomyces pastorianus
agcagcttcgtcttcggctctgact

SEQ ID NO: 161041 - DNA, 25 bp, Saccharomyces pastorianus
accaacttagccaaagcagcttcgt

SEQ ID NO: 161042 - DNA, 25 bp, Saccharomyces pastorianus
gaaaccaacttagccaaagcagctt

SEQ ID NO: 161043 - DNA, 25 bp, Saccharomyces pastorianus
acttagccaaagcagcttcgtcttc

SEQ ID NO: 161044 - DNA, 25 bp, Saccharomyces pastorianus
aaagcagcttcgtcttcggctctga

SEQ ID NO: 161045 - DNA, 25 bp, Saccharomyces pastorianus
ggtggaaaccaacttagccaaagca

SEQ ID NO: 161046 - DNA, 25 bp, Saccharomyces pastorianus
cagcttcgtcttcggctctgacttc

SEQ ID NO: 161047 - DNA, 25 bp, Saccharomyces pastorianus
ttagccaaagcagcttcgtcttcgg

SEQ ID NO: 161048 - DNA, 25 bp, Saccharomyces pastorianus
atggtggaaaccaacttagccaaag

SEQ ID NO: 161049 - DNA, 25 bp, Saccharomyces pastorianus
ggtcaaagcggcaacagcagaagtc

SEQ ID NO: 161050 - DNA, 25 bp, Saccharomyces pastorianus
caacagcagaagtcttttggttaac

SEQ ID NO: 161051 - DNA, 25 bp, Saccharomyces pastorianus
aaagcggcaacagcagaagtctttt

SEQ ID NO: 161052 - DNA, 25 bp, Saccharomyces pastorianus
ggcaacagcagaagtcttttggtta

SEQ ID NO: 161053 - DNA, 25 bp, Saccharomyces pastorianus
cggtcaaagcggcaacagcagaagt

SEQ ID NO: 161054 - DNA, 25 bp, Saccharomyces pastorianus
tcaaagcggcaacagcagaagtctt

SEQ ID NO: 161055 - DNA, 25 bp, Saccharomyces pastorianus
aagcggcaacagcagaagtcttttg

SEQ ID NO: 161056 - DNA, 25 bp, Saccharomyces pastorianus
gcggcaacagcagaagtcttttggt

SEQ ID NO: 161057 - DNA, 25 bp, Saccharomyces pastorianus
tcttcggctctgacttcggtcaaag

SEQ ID NO: 161058 - DNA, 25 bp, Saccharomyces pastorianus
gtcttgcttagacttaccttcagcg

SEQ ID NO: 161059 - DNA, 25 bp, Saccharomyces pastorianus
ttgcttagacttaccttcagcgata

SEQ ID NO: 161060 - DNA, 25 bp, Saccharomyces pastorianus
tgcttagacttaccttcagcgatag

SEQ ID NO: 161061 - DNA, 25 bp, Saccharomyces pastorianus
tcttgcttagacttaccttcagcga

SEQ ID NO: 161062 - DNA, 25 bp, Saccharomyces pastorianus
cttagacttaccttcagcgatagcg

SEQ ID NO: 161063 - DNA, 25 bp, Saccharomyces pastorianus
cttgcttagacttaccttcagcgat

SEQ ID NO: 161064 - DNA, 25 bp, Saccharomyces pastorianus
agacttaccttcagcgatagcggca

SEQ ID NO: 161065 - DNA, 25 bp, Saccharomyces pastorianus
ttagacttaccttcagcgatagcgg

SEQ ID NO: 161066 - DNA, 25 bp, Saccharomyces pastorianus
tagacttaccttcagcgatagcggc

SEQ ID NO: 161067 - DNA, 25 bp, Saccharomyces pastorianus
gacttaccttcagcgatagcggcag

SEQ ID NO: 161068 - DNA, 25 bp, Saccharomyces pastorianus
cttaccttcagcgatagcggcagct

SEQ ID NO: 161069 - DNA, 25 bp, Saccharomyces pastorianus
ggaggaaccttcaatctgatggaca

SEQ ID NO: 161070 - DNA, 25 bp, Saccharomyces pastorianus
gatcttcttttgtctttgcaatctg

SEQ ID NO: 161071 - DNA, 25 bp, Saccharomyces pastorianus
ataccgaagttctttggagtagagt

SEQ ID NO: 161072 - DNA, 25 bp, Saccharomyces pastorianus
gcttgaccaataccgaagttctttg

SEQ ID NO: 161073 - DNA, 25 bp, Saccharomyces pastorianus
gtattctggccatttgacgtatctg

SEQ ID NO: 161074 - DNA, 25 bp, Saccharomyces pastorianus
gtttctctttggttggacagcttga

SEQ ID NO: 161075 - DNA, 25 bp, Saccharomyces pastorianus
atctgacgtattctggccatttgac

SEQ ID NO: 161076 - DNA, 25 bp, Saccharomyces pastorianus
gacgtatctggacaagtttctcttt

SEQ ID NO: 161077 - DNA, 25 bp, Saccharomyces pastorianus
ttgcaatctgacgtattctggccat

SEQ ID NO: 161078 - DNA, 25 bp, Saccharomyces pastorianus
ggacagcttgaccaataccgaagtt

SEQ ID NO: 161079 - DNA, 25 bp, Saccharomyces pastorianus
caatctgatggacaagatcttcttt

SEQ ID NO: 161080 - DNA, 25 bp, Saccharomyces pastorianus
taccaatggcaatttcagatcgatg

SEQ ID NO: 161081 - DNA, 25 bp, Saccharomyces pastorianus
taataccagccaatcaggagcctca

SEQ ID NO: 161082 - DNA, 25 bp, Saccharomyces pastorianus
ggaggagcccaagccatcaaaggat

SEQ ID NO: 161083 - DNA, 25 bp, Saccharomyces pastorianus
aaaagagcccttggatggaacatct

SEQ ID NO: 161084 - DNA, 25 bp, Saccharomyces pastorianus
ccacaacgccacaaaatgcctgtta

SEQ ID NO: 161085 - DNA, 25 bp, Saccharomyces pastorianus
tagggtctgcctccagcaagagtaa

SEQ ID NO: 161086 - DNA, 25 bp, Saccharomyces pastorianus
aagagccgctaacgaattggtcaat

SEQ ID NO: 161087 - DNA, 25 bp, Saccharomyces pastorianus
gagaaggaccttatcacttttactt

SEQ ID NO: 161088 - DNA, 25 bp, Saccharomyces pastorianus
gaataatgccaaaagtcgtacgacc

SEQ ID NO: 161089 - DNA, 25 bp, Saccharomyces pastorianus
acctaattgttgttccatttttgca

SEQ ID NO: 161090 - DNA, 25 bp, Saccharomyces pastorianus
acgaccatcgataataccagccaat

SEQ ID NO: 161091 - DNA, 25 bp, Saccharomyces pastorianus
ggtcgacgacaagttggcctctaag

SEQ ID NO: 161092 - DNA, 25 bp, Saccharomyces pastorianus
aagaatgaccgctcttgcacagaac

SEQ ID NO: 161093 - DNA, 25 bp, Saccharomyces pastorianus
aagaaaggcgctgatcaccctgagt

SEQ ID NO: 161094 - DNA, 25 bp, Saccharomyces pastorianus
gagtccgaaggcaatcaagcattta

SEQ ID NO: 161095 - DNA, 25 bp, Saccharomyces pastorianus
attcataccgaagacagtgcccgca

SEQ ID NO: 161096 - DNA, 25 bp, Saccharomyces pastorianus
aaggcgttattcagcatcattggta

SEQ ID NO: 161097 - DNA, 25 bp, Saccharomyces pastorianus
atttaagggcactgctagctcagcc

SEQ ID NO: 161098 - DNA, 25 bp, Saccharomyces pastorianus
agactctgtctctccagatagtcaa

SEQ ID NO: 161099 - DNA, 25 bp, Saccharomyces pastorianus
gttggcctctaagtttgtcttcaag

SEQ ID NO: 161100 - DNA, 25 bp, Saccharomyces pastorianus
aagcccgaagtggtcgagctacgca

SEQ ID NO: 161101 - DNA, 25 bp, Saccharomyces pastorianus
tagctcagccggaacctaaattgat

SEQ ID NO: 161102 - DNA, 25 bp, Saccharomyces pastorianus
tgaatactatatgttccaagccggt

SEQ ID NO: 161103 - DNA, 25 bp, Saccharomyces pastorianus
tgcaccagctaccaccactttatct

SEQ ID NO: 161104 - DNA, 25 bp, Saccharomyces pastorianus
tcgccgctattgccgctggtgtcgc

SEQ ID NO: 161105 - DNA, 25 bp, Saccharomyces pastorianus
atactatatgttccaagccggtcat

SEQ ID NO: 161106 - DNA, 25 bp, Saccharomyces pastorianus
ctgaatactatatgttccaagccgg

SEQ ID NO: 161107 - DNA, 25 bp, Saccharomyces pastorianus
gaatactatatgttccaagccggtc

SEQ ID NO: 161108 - DNA, 25 bp, Saccharomyces pastorianus
gctgcaccagctaccaccactttat

SEQ ID NO: 161109 - DNA, 25 bp, Saccharomyces pastorianus
taccaccactttatctccatctgac

SEQ ID NO: 161110 - DNA, 25 bp, Saccharomyces pastorianus
gctgaatactatatgttccaagccg

SEQ ID NO: 161111 - DNA, 25 bp, Saccharomyces pastorianus
tggtgtcgccgctgcaccagctacc

SEQ ID NO: 161112 - DNA, 25 bp, Saccharomyces pastorianus
aatactatatgttccaagccggtca

SEQ ID NO: 161113 - DNA, 25 bp, Saccharomyces pastorianus
aaacttcaatgacccagaggtccaa

SEQ ID NO: 161114 - DNA, 25 bp, Saccharomyces pastorianus
tgacccagaggtccaaggtgatatg

SEQ ID NO: 161115 - DNA, 25 bp, Saccharomyces pastorianus
agaaacttcaatgacccagaggtcc

SEQ ID NO: 161116 - DNA, 25 bp, Saccharomyces pastorianus
ctactcctgtgttgctcacttttct

SEQ ID NO: 161117 - DNA, 25 bp, Saccharomyces pastorianus
ttcaatgacccagaggtccaaggtg

SEQ ID NO: 161118 - DNA, 25 bp, Saccharomyces pastorianus
gaaacttcaatgacccagaggtcca

SEQ ID NO: 161119 - DNA, 25 bp, Saccharomyces pastorianus
atgacccagaggtccaaggtgatat

SEQ ID NO: 161120 - DNA, 25 bp, Saccharomyces pastorianus
caatgacccagaggtccaaggtgat

SEQ ID NO: 161121 - DNA, 25 bp, Saccharomyces pastorianus
aatgacccagaggtccaaggtgata

SEQ ID NO: 161122 - DNA, 25 bp, Saccharomyces pastorianus
acttcaatgacccagaggtccaagg

SEQ ID NO: 161123 - DNA, 25 bp, Saccharomyces pastorianus
tccatctttcgttggtttcactgat

SEQ ID NO: 161124 - DNA, 25 bp, Saccharomyces pastorianus
tgatttaggtactacctactcctgt

SEQ ID NO: 161125 - DNA, 25 bp, Saccharomyces pastorianus
tgacccagaggtccaaggtgatatg

SEQ ID NO: 161126 - DNA, 25 bp, Saccharomyces pastorianus
agctaacactgttttcgacgctaag

SEQ ID NO: 161127 - DNA, 25 bp, Saccharomyces pastorianus
gaacccagctaacactgttttcgac

SEQ ID NO: 161128 - DNA, 25 bp, Saccharomyces pastorianus
agaaacttcaatgacccagaggtcc

SEQ ID NO: 161129 - DNA, 25 bp, Saccharomyces pastorianus
ctactcctgtgttgctcacttttct

SEQ ID NO: 161130 - DNA, 25 bp, Saccharomyces pastorianus
gaacaaatctcctctatggtcttgg

SEQ ID NO: 161131 - DNA, 25 bp, Saccharomyces pastorianus
ctttcgttggtttcactgatactga

SEQ ID NO: 161132 - DNA, 25 bp, Saccharomyces pastorianus
acttttctaatgatcgtgttgacat

SEQ ID NO: 161133 - DNA, 25 bp, Saccharomyces pastorianus
aatctcctctatggtcttgggtaag

SEQ ID NO: 161134 - DNA, 25 bp, Saccharomyces pastorianus
tccatctttcgttggtttcactgat

SEQ ID NO: 161135 - DNA, 25 bp, Saccharomyces pastorianus
gtttattgtcgcacgttaccatatt

SEQ ID NO: 161136 - DNA, 25 bp, Saccharomyces pastorianus
attcccgtccacgagaggaaaggct

SEQ ID NO: 161137 - DNA, 25 bp, Saccharomyces pastorianus
gctgctgtactacaaccaggattta

SEQ ID NO: 161138 - DNA, 25 bp, Saccharomyces pastorianus
gtaaaaagatgcctataacgtcaag

SEQ ID NO: 161139 - DNA, 25 bp, Saccharomyces pastorianus
gatttagatgtttattgtcgcacgt

SEQ ID NO: 161140 - DNA, 25 bp, Saccharomyces pastorianus
cgcacgttaccatatttaccacaaa

SEQ ID NO: 161141 - DNA, 25 bp, Saccharomyces pastorianus
tggcttggtcacctattcccgtcca

SEQ ID NO: 161142 - DNA, 25 bp, Saccharomyces pastorianus
gactattcgtcttttcctgcaatat

SEQ ID NO: 161143 - DNA, 25 bp, Saccharomyces pastorianus
gtcttttcctgcaatatcgaagata

SEQ ID NO: 161144 - DNA, 25 bp, Saccharomyces pastorianus
aaggctgctgtaagctgctgtacta

SEQ ID NO: 161145 - DNA, 25 bp, Saccharomyces pastorianus
gaaaccgtgaacgactattcgtctt

SEQ ID NO: 161146 - DNA, 25 bp, Saccharomyces pastorianus
gaacgagtttatcagttttgccaat

SEQ ID NO: 161147 - DNA, 25 bp, Saccharomyces pastorianus
tttgccacccaattaacgatactag

SEQ ID NO: 161148 - DNA, 25 bp, Saccharomyces pastorianus
ggcactttatactctaccacggaat

SEQ ID NO: 161149 - DNA, 25 bp, Saccharomyces pastorianus
caagcaatattggttcccgggctat

SEQ ID NO: 161150 - DNA, 25 bp, Saccharomyces pastorianus
gaagcgactgcaccaatgaaaacgt

SEQ ID NO: 161151 - DNA, 25 bp, Saccharomyces pastorianus
gccaagctactctctcattttattt

SEQ ID NO: 161152 - DNA, 25 bp, Saccharomyces pastorianus
taacttttcttccatgactgcaatt

SEQ ID NO: 161153 - DNA, 25 bp, Saccharomyces pastorianus
ggaatccattttggccgtcgatcca

SEQ ID NO: 161154 - DNA, 25 bp, Saccharomyces pastorianus
gatcttgcgaccctaaatctggatt

SEQ ID NO: 161155 - DNA, 25 bp, Saccharomyces pastorianus
gatcaacagatctgccaggagcatt

SEQ ID NO: 161156 - DNA, 25 bp, Saccharomyces pastorianus
gccgtcgatccagttttatttgcca

SEQ ID NO: 161157 - DNA, 25 bp, Saccharomyces pastorianus
gtaagcgtctcaaccagcatatgtc

SEQ ID NO: 161158 - DNA, 25 bp, Saccharomyces pastorianus
gaaattccagcttccaaacagggca

SEQ ID NO: 161159 - DNA, 25 bp, Saccharomyces pastorianus
ggcacttcatgctcgtcagaaacgt

SEQ ID NO: 161160 - DNA, 25 bp, Saccharomyces pastorianus
tacatttcctctcaaatcctaacga

SEQ ID NO: 161161 - DNA, 25 bp, Saccharomyces pastorianus
agccgttgctggtgcttcaggaatt

SEQ ID NO: 161162 - DNA, 25 bp, Saccharomyces pastorianus
aaagagaagccatagcctcccagaa

SEQ ID NO: 161163 - DNA, 25 bp, Saccharomyces pastorianus
ttcattttctactgcgtctactaca

SEQ ID NO: 161164 - DNA, 25 bp, Saccharomyces pastorianus
tttggtttcattccacatcgtttga

SEQ ID NO: 161165 - DNA, 25 bp, Saccharomyces pastorianus
tgcctcaattgactcctcgattttt

SEQ ID NO: 161166 - DNA, 25 bp, Saccharomyces pastorianus
ccatcagccccgtttcaaagaagga

SEQ ID NO: 161167 - DNA, 25 bp, Saccharomyces pastorianus
ggaagttccgatgagtctgacacca

SEQ ID NO: 161168 - DNA, 25 bp, Saccharomyces pastorianus
taacgccagcttagacacacagaat

SEQ ID NO: 161169 - DNA, 25 bp, Saccharomyces pastorianus
gaatctcaagatagacccgacgctg

SEQ ID NO: 161170 - DNA, 25 bp, Saccharomyces pastorianus
actaacagtggttcgctttaccgct

SEQ ID NO: 161171 - DNA, 25 bp, Saccharomyces pastorianus
atcatactgcggctaatctcgggaa

SEQ ID NO: 161172 - DNA, 25 bp, Saccharomyces pastorianus
aggtcaaccatcttctgggccagta

SEQ ID NO: 161173 - DNA, 25 bp, Saccharomyces pastorianus
gaacgtagccaacacaccagtattt

SEQ ID NO: 161174 - DNA, 25 bp, Saccharomyces pastorianus
ggtcccgtttactacaatggcaatc

SEQ ID NO: 161175 - DNA, 25 bp, Saccharomyces pastorianus
aaattcaggctcatctgcgtcttta

SEQ ID NO: 161176 - DNA, 25 bp, Saccharomyces pastorianus
tttaccgctccagttcaaattcagg

SEQ ID NO: 161177 - DNA, 25 bp, Saccharomyces pastorianus
tagacctagtaacaatccagccgct

SEQ ID NO: 161178 - DNA, 25 bp, Saccharomyces pastorianus
tgggccagtattcagcttccattgc

SEQ ID NO: 161179 - DNA, 25 bp, Saccharomyces pastorianus
attctattgttctttacgacttgag

SEQ ID NO: 161180 - DNA, 25 bp, Saccharomyces pastorianus
aatgcagcatgttttccaggttaaa

SEQ ID NO: 161181 - DNA, 25 bp, Saccharomyces pastorianus
gacgaatgctatttgctggaatcca

SEQ ID NO: 161182 - DNA, 25 bp, Saccharomyces pastorianus
gtattcaaagatcacgtcagcgcag

SEQ ID NO: 161183 - DNA, 25 bp, Saccharomyces pastorianus
gaatccaatggaggccttcaacttt

SEQ ID NO: 161184 - DNA, 25 bp, Saccharomyces pastorianus
gccttcaactttgtaactgccaatg

SEQ ID NO: 161185 - DNA, 25 bp, Saccharomyces pastorianus
aggtctaatgtcaaaactactcgtg

SEQ ID NO: 161186 - DNA, 25 bp, Saccharomyces pastorianus
ggccaagatccatctttgggacgtt

SEQ ID NO: 161187 - DNA, 25 bp, Saccharomyces pastorianus
atggatgttgacttttctcctacgg

SEQ ID NO: 161188 - DNA, 25 bp, Saccharomyces pastorianus
gattgaagccagtttccgatctatc

SEQ ID NO: 161189 - DNA, 25 bp, Saccharomyces pastorianus
gagattgttactggttcgtacgata

SEQ ID NO: 161190 - DNA, 25 bp, Saccharomyces pastorianus
agagaagctaatgaaaggcgtacta

SEQ ID NO: 161191 - DNA, 25 bp, Saccharomyces pastorianus
acatagacacgtgccacaagtcatc

SEQ ID NO: 161192 - DNA, 25 bp, Saccharomyces pastorianus
acaagtcatcaaaaaggctcaggaa

SEQ ID NO: 161193 - DNA, 25 bp, Saccharomyces pastorianus
gatatgccatacatttccgaaagga

SEQ ID NO: 161194 - DNA, 25 bp, Saccharomyces pastorianus
gaaagatttagacatatgccggaga

SEQ ID NO: 161195 - DNA, 25 bp, Saccharomyces pastorianus
aaggatatgccatacatttccgaaa

SEQ ID NO: 161196 - DNA, 25 bp, Saccharomyces pastorianus
atttagacatatgccggagatcaaa

SEQ ID NO: 161197 - DNA, 25 bp, Saccharomyces pastorianus
tatgccatacatttccgaaaggaag

SEQ ID NO: 161198 - DNA, 25 bp, Saccharomyces pastorianus
aaaaggctcaggaaattaagaacat

SEQ ID NO: 161199 - DNA, 25 bp, Saccharomyces pastorianus
gcgtactagaaaggatatgccatac

SEQ ID NO: 161200 - DNA, 25 bp, Saccharomyces pastorianus
acacgtgccacaagtcatcaaaaag

SEQ ID NO: 161201 - DNA, 25 bp, Saccharomyces pastorianus
cgcagccgtggcattgtacaggaaa

SEQ ID NO: 161202 - DNA, 25 bp, Saccharomyces pastorianus
cgatacggtgatcctttgcttgata

SEQ ID NO: 161203 - DNA, 25 bp, Saccharomyces pastorianus
acggctagtgtctctcgatacggtg

SEQ ID NO: 161204 - DNA, 25 bp, Saccharomyces pastorianus
tgaaaccttggtacactcttctttc

SEQ ID NO: 161205 - DNA, 25 bp, Saccharomyces pastorianus
gtatcatgcgccaggttacaacact

SEQ ID NO: 161206 - DNA, 25 bp, Saccharomyces pastorianus
aagtagcagctctcaagccagtgaa

SEQ ID NO: 161207 - DNA, 25 bp, Saccharomyces pastorianus
attcgaggttgtagtcttcacggct

SEQ ID NO: 161208 - DNA, 25 bp, Saccharomyces pastorianus
agtgaaacttccaacgatgccgacg

SEQ ID NO: 161209 - DNA, 25 bp, Saccharomyces pastorianus
gcggattttgttttgcctgtggaaa

SEQ ID NO: 161210 - DNA, 25 bp, Saccharomyces pastorianus
agcagcgagggcctactgtacaagt

SEQ ID NO: 161211 - DNA, 25 bp, Saccharomyces pastorianus
aacgcttttgcagcagggccagtat

SEQ ID NO: 161212 - DNA, 25 bp, Saccharomyces pastorianus
ataggcgtcgtgcatggattttctg

SEQ ID NO: 161213 - DNA, 25 bp, Saccharomyces pastorianus
tacatcaatggtcgcttcaagattt

SEQ ID NO: 161214 - DNA, 25 bp, Saccharomyces pastorianus
aatacgcacctacccaaatttatga

SEQ ID NO: 161215 - DNA, 25 bp, Saccharomyces pastorianus
tgatcttcaattaccgggcgactta

SEQ ID NO: 161216 - DNA, 25 bp, Saccharomyces pastorianus
gacttagactttttacgaacgcata

SEQ ID NO: 161217 - DNA, 25 bp, Saccharomyces pastorianus
gtacttgcacggtttgaactgctca

SEQ ID NO: 161218 - DNA, 25 bp, Saccharomyces pastorianus
aggaattttcctcattgcgcccgat

SEQ ID NO: 161219 - DNA, 25 bp, Saccharomyces pastorianus
aaaccatcacttctgtaccattttg

SEQ ID NO: 161220 - DNA, 25 bp, Saccharomyces pastorianus
aaatttatgactccgccttttgctc

SEQ ID NO: 161221 - DNA, 25 bp, Saccharomyces pastorianus
tttgtaccacaagcctcttttaatg

SEQ ID NO: 161222 - DNA, 25 bp, Saccharomyces pastorianus
gacttagtgttgtcgttagcaccag

SEQ ID NO: 161223 - DNA, 25 bp, Saccharomyces pastorianus
cgcaggacgctatttctccagataa

SEQ ID NO: 161224 - DNA, 25 bp, Saccharomyces pastorianus
gagctgttatttagtcggtcgtgaa

SEQ ID NO: 161225 - DNA, 25 bp, Saccharomyces pastorianus
cagcactgcgtcatccagttcagga

SEQ ID NO: 161226 - DNA, 25 bp, Saccharomyces pastorianus
gcccttccggtctgttagagctgga

SEQ ID NO: 161227 - DNA, 25 bp, Saccharomyces pastorianus
aacggagatcgttgtcgcagacatt

SEQ ID NO: 161228 - DNA, 25 bp, Saccharomyces pastorianus
gaaacatcctcaaagcagcactgcg

SEQ ID NO: 161229 - DNA, 25 bp, Saccharomyces pastorianus
gatattatgccagacttcagccctt

SEQ ID NO: 161230 - DNA, 25 bp, Saccharomyces pastorianus
gtcgtgaactggtccacagtctgga

SEQ ID NO: 161231 - DNA, 25 bp, Saccharomyces pastorianus
aaaacatgtggagccgcaggacgct

SEQ ID NO: 161232 - DNA, 25 bp, Saccharomyces pastorianus
gtttcacagacgcaaaagaccttat

SEQ ID NO: 161233 - DNA, 25 bp, Saccharomyces pastorianus
agttcaggaacgttcgtggcatttt

SEQ ID NO: 161234 - DNA, 25 bp, Saccharomyces pastorianus
attactgttttacgtgctccacaaa

SEQ ID NO: 161235 - DNA, 25 bp, Saccharomyces pastorianus
agcgtgtacgcgtttatgcttcccc

SEQ ID NO: 161236 - DNA, 25 bp, Saccharomyces pastorianus
taacgatataaactggcgctctctc

SEQ ID NO: 161237 - DNA, 25 bp, Saccharomyces pastorianus
agagattttcttaccgagctcccca

SEQ ID NO: 161238 - DNA, 25 bp, Saccharomyces pastorianus
gagaatgaccaccactctgtgggta

SEQ ID NO: 161239 - DNA, 25 bp, Saccharomyces pastorianus
atgcttcccctctgagacaatttat

SEQ ID NO: 161240 - DNA, 25 bp, Saccharomyces pastorianus
gctctctcgtttcaatactcaattc

SEQ ID NO: 161241 - DNA, 25 bp, Saccharomyces pastorianus
gaggaccctggagttcgagaatgac

SEQ ID NO: 161242 - DNA, 25 bp, Saccharomyces pastorianus
gaagattctgacctgtctataacca

SEQ ID NO: 161243 - DNA, 25 bp, Saccharomyces pastorianus
tttaatgacccaagcgacgcgttca

SEQ ID NO: 161244 - DNA, 25 bp, Saccharomyces pastorianus
tggtgacccctttgcctttaatgac

SEQ ID NO: 161245 - DNA, 25 bp, Saccharomyces pastorianus
tcaaaacagcattactgatgatata

SEQ ID NO: 161246 - DNA, 25 bp, Saccharomyces pastorianus
atcctaatcaaaacagcattactga

SEQ ID NO: 161247 - DNA, 25 bp, Saccharomyces pastorianus
acagcattactgatgatataatgga

SEQ ID NO: 161248 - DNA, 25 bp, Saccharomyces pastorianus
cctaatcaaaacagcattactgatg

SEQ ID NO: 161249 - DNA, 25 bp, Saccharomyces pastorianus
aaaacagcattactgatgatataat

SEQ ID NO: 161250 - DNA, 25 bp, Saccharomyces pastorianus
taatcaaaacagcattactgatgat

SEQ ID NO: 161251 - DNA, 25 bp, Saccharomyces pastorianus
atcaaaacagcattactgatgatat

SEQ ID NO: 161252 - DNA, 25 bp, Saccharomyces pastorianus
gcatcctaatcaaaacagcattact

SEQ ID NO: 161253 - DNA, 25 bp, Saccharomyces pastorianus
tcctaatcaaaacagcattactgat

SEQ ID NO: 161254 - DNA, 25 bp, Saccharomyces pastorianus
catcctaatcaaaacagcattactg

SEQ ID NO: 161255 - DNA, 25 bp, Saccharomyces pastorianus
tgcatcctaatcaaaacagcattac

SEQ ID NO: 161256 - DNA, 25 bp, Saccharomyces pastorianus
gtagccgttgttaatgaatgcattc

SEQ ID NO: 161257 - DNA, 25 bp, Saccharomyces pastorianus
aagcgactttgtctacagtcagaga

SEQ ID NO: 161258 - DNA, 25 bp, Saccharomyces pastorianus
gaactgatggttacttacctctcaa

SEQ ID NO: 161259 - DNA, 25 bp, Saccharomyces pastorianus
gtcgcagagactattaatttccagg

SEQ ID NO: 161260 - DNA, 25 bp, Saccharomyces pastorianus
gacaaactacattaatctcttcgaa

SEQ ID NO: 161261 - DNA, 25 bp, Saccharomyces pastorianus
atcagaatctgctttgtcaacccta

SEQ ID NO: 161262 - DNA, 25 bp, Saccharomyces pastorianus
atgcattctgtcatcgattcaattg

SEQ ID NO: 161263 - DNA, 25 bp, Saccharomyces pastorianus
atatgagccaatgcctgcttctttg

SEQ ID NO: 161264 - DNA, 25 bp, Saccharomyces pastorianus
aaacggaactccaattactcaccag

SEQ ID NO: 161265 - DNA, 25 bp, Saccharomyces pastorianus
gtcaaccctagtcctaatcgggcaa

SEQ ID NO: 161266 - DNA, 25 bp, Saccharomyces pastorianus
atatcacctgataacgcatcaacga

SEQ ID NO: 161267 - DNA, 25 bp, Saccharomyces pastorianus
aaggatgcctatgctgtgcgtctag

SEQ ID NO: 161268 - DNA, 25 bp, Saccharomyces pastorianus
atgcgggatgttctcctttacagga

SEQ ID NO: 161269 - DNA, 25 bp, Saccharomyces pastorianus
gttaccatgtcctccagaattacga

SEQ ID NO: 161270 - DNA, 25 bp, Saccharomyces pastorianus
tttagtcaagttgggcactcctggc

SEQ ID NO: 161271 - DNA, 25 bp, Saccharomyces pastorianus
gcactcctggcaactgggatcatat

SEQ ID NO: 161272 - DNA, 25 bp, Saccharomyces pastorianus
gtggagaagctttcgacggtctctc

SEQ ID NO: 161273 - DNA, 25 bp, Saccharomyces pastorianus
caaatcgttgatgctatcgcctcaa

SEQ ID NO: 161274 - DNA, 25 bp, Saccharomyces pastorianus
aagcctgctgttacatctcaattgg

SEQ ID NO: 161275 - DNA, 25 bp, Saccharomyces pastorianus
gcctaccaagggtttgccactggag

SEQ ID NO: 161276 - DNA, 25 bp, Saccharomyces pastorianus
gaggcacgcattaagagaccattta

SEQ ID NO: 161277 - DNA, 25 bp, Saccharomyces pastorianus
gcagtttacttggttgcctcaggta

SEQ ID NO: 161278 - DNA, 25 bp, Saccharomyces pastorianus
tgttgctggtgtcgctgctattgct

SEQ ID NO: 161279 - DNA, 25 bp, Saccharomyces pastorianus
caattgttgctggtgtcgctgctat

SEQ ID NO: 161280 - DNA, 25 bp, Saccharomyces pastorianus
tcaattgttgctggtgtcgctgcta

SEQ ID NO: 161281 - DNA, 25 bp, Saccharomyces pastorianus
ttcaattgttgctggtgtcgctgct

SEQ ID NO: 161282 - DNA, 25 bp, Saccharomyces pastorianus
ttgctggtgtcgctgctattgctgc

SEQ ID NO: 161283 - DNA, 25 bp, Saccharomyces pastorianus
tactttatctccctctgacgaaaga

SEQ ID NO: 161284 - DNA, 25 bp, Saccharomyces pastorianus
attgttgctggtgtcgctgctattg

SEQ ID NO: 161285 - DNA, 25 bp, Saccharomyces pastorianus
ctgaatactatatgttccaagctgc

SEQ ID NO: 161286 - DNA, 25 bp, Saccharomyces pastorianus
ggtcgaattaggtgtctacgtctca

SEQ ID NO: 161287 - DNA, 25 bp, Saccharomyces pastorianus
ttgttgctggtgtcgctgctattgc

SEQ ID NO: 161288 - DNA, 25 bp, Saccharomyces pastorianus
aattgttgctggtgtcgctgctatt

SEQ ID NO: 161289 - DNA, 25 bp, Saccharomyces pastorianus
acctacggtatctctcaagtcttat

SEQ ID NO: 161290 - DNA, 25 bp, Saccharomyces pastorianus
aaacaacacctacggtatctctcaa

SEQ ID NO: 161291 - DNA, 25 bp, Saccharomyces pastorianus
ccttgtccaagccagaagttaagga

SEQ ID NO: 161292 - DNA, 25 bp, Saccharomyces pastorianus
aaggaagccgttgaatctgctgact

SEQ ID NO: 161293 - DNA, 25 bp, Saccharomyces pastorianus
aagccagaagttaaggaagccgttg

SEQ ID NO: 161294 - DNA, 25 bp, Saccharomyces pastorianus
taagggttacaagccagttgctgtc

SEQ ID NO: 161295 - DNA, 25 bp, Saccharomyces pastorianus
aagccgttgaatctgctgacttgat

SEQ ID NO: 161296 - DNA, 25 bp, Saccharomyces pastorianus
cgccgctaagggttacaagccagtt

SEQ ID NO: 161297 - DNA, 25 bp, Saccharomyces pastorianus
cctacggtatctctcaagtcttatg

SEQ ID NO: 161298 - DNA, 25 bp, Saccharomyces pastorianus
ggaagccgttgaatctgctgacttg

SEQ ID NO: 161299 - DNA, 25 bp, Saccharomyces pastorianus
aacacctacggtatctctcaagtct

SEQ ID NO: 161300 - DNA, 25 bp, Saccharomyces pastorianus
acctacggtatctctcaagtcttat

SEQ ID NO: 161301 - DNA, 25 bp, Saccharomyces pastorianus
aaacaacacctacggtatctctcaa

SEQ ID NO: 161302 - DNA, 25 bp, Saccharomyces pastorianus
ccttgtccaagccagaagttaagga

SEQ ID NO: 161303 - DNA, 25 bp, Saccharomyces pastorianus
aagccagaagttaaggaagccgttg

SEQ ID NO: 161304 - DNA, 25 bp, Saccharomyces pastorianus
taagggttacaagccagttgctgtc

SEQ ID NO: 161305 - DNA, 25 bp, Saccharomyces pastorianus
aagccgttgaatctgctgacttgat

SEQ ID NO: 161306 - DNA, 25 bp, Saccharomyces pastorianus
cgccgctaagggttacaagccagtt

SEQ ID NO: 161307 - DNA, 25 bp, Saccharomyces pastorianus
cctacggtatctctcaagtcttatg

SEQ ID NO: 161308 - DNA, 25 bp, Saccharomyces pastorianus
gttgttgaccactattgctgacgcc

SEQ ID NO: 161309 - DNA, 25 bp, Saccharomyces pastorianus
aggaagccgttgaatctgctgactt

SEQ ID NO: 161310 - DNA, 25 bp, Saccharomyces pastorianus
aacacctacggtatctctcaagtct

SEQ ID NO: 161311 - DNA, 25 bp, Saccharomyces pastorianus
agggatcctacattatttgcacaat

SEQ ID NO: 161312 - DNA, 25 bp, Saccharomyces pastorianus
tgctgcggcagtcaattgtgtttat

SEQ ID NO: 161313 - DNA, 25 bp, Saccharomyces pastorianus
agctgtatactctcactatgtggtc

SEQ ID NO: 161314 - DNA, 25 bp, Saccharomyces pastorianus
acatggacaccattgcttgtggaaa

SEQ ID NO: 161315 - DNA, 25 bp, Saccharomyces pastorianus
ggcttaacgtcctcaagggctacaa

SEQ ID NO: 161316 - DNA, 25 bp, Saccharomyces pastorianus
agacgcagtcgatgagctgtatact

SEQ ID NO: 161317 - DNA, 25 bp, Saccharomyces pastorianus
acatctattacgcaatcggtggaat

SEQ ID NO: 161318 - DNA, 25 bp, Saccharomyces pastorianus
ggtcgctcaagaacaagccattgtt

SEQ ID NO: 161319 - DNA, 25 bp, Saccharomyces pastorianus
gcctttgcgtcatcgtctttgaaaa

SEQ ID NO: 161320 - DNA, 25 bp, Saccharomyces pastorianus
agaaactccgttggcgacatcagta

SEQ ID NO: 161321 - DNA, 25 bp, Saccharomyces pastorianus
tgatggctgcattcgggctcactaa

SEQ ID NO: 161322 - DNA, 25 bp, Saccharomyces pastorianus
acaggctgtagacatcgcgtcacag

SEQ ID NO: 161323 - DNA, 25 bp, Saccharomyces pastorianus
gcgtcacagtcacaaagcttgccaa

SEQ ID NO: 161324 - DNA, 25 bp, Saccharomyces pastorianus
agacatcgcgtcacagtcacaaagc

SEQ ID NO: 161325 - DNA, 25 bp, Saccharomyces pastorianus
tcacaggctgtagacatcgcgtcac

SEQ ID NO: 161326 - DNA, 25 bp, Saccharomyces pastorianus
tgtagacatcgcgtcacagtcacaa

SEQ ID NO: 161327 - DNA, 25 bp, Saccharomyces pastorianus
ggctgtagacatcgcgtcacagtca

SEQ ID NO: 161328 - DNA, 25 bp, Saccharomyces pastorianus
cgtcacagtcacaaagcttgccaaa

SEQ ID NO: 161329 - DNA, 25 bp, Saccharomyces pastorianus
gtagacatcgcgtcacagtcacaaa

SEQ ID NO: 161330 - DNA, 25 bp, Saccharomyces pastorianus
acatcgcgtcacagtcacaaagctt

SEQ ID NO: 161331 - DNA, 25 bp, Saccharomyces pastorianus
aggctgtagacatcgcgtcacagtc

SEQ ID NO: 161332 - DNA, 25 bp, Saccharomyces pastorianus
atcgcgtcacagtcacaaagcttgc

SEQ ID NO: 161333 - DNA, 25 bp, Saccharomyces pastorianus
gttttcgatgcccttggaactccat

SEQ ID NO: 161334 - DNA, 25 bp, Saccharomyces pastorianus
tggtggacaccgaccctgaagtgga

SEQ ID NO: 161335 - DNA, 25 bp, Saccharomyces pastorianus
gttgatcacctctcatttggtggac

SEQ ID NO: 161336 - DNA, 25 bp, Saccharomyces pastorianus
aaggttcttgttgctggtacttcag

SEQ ID NO: 161337 - DNA, 25 bp, Saccharomyces pastorianus
gatgggtctatacctaccagatggt

SEQ ID NO: 161338 - DNA, 25 bp, Saccharomyces pastorianus
gaaagctttccatgttactccagac

SEQ ID NO: 161339 - DNA, 25 bp, Saccharomyces pastorianus
ggaactccattgtccaacaaatatt

SEQ ID NO: 161340 - DNA, 25 bp, Saccharomyces pastorianus
ggtacttcagcatactgtcgtttaa

SEQ ID NO: 161341 - DNA, 25 bp, Saccharomyces pastorianus
gtccaaactttatctggttctcctg

SEQ ID NO: 161342 - DNA, 25 bp, Saccharomyces pastorianus
ggttctcctgctaacttgcaagttt

SEQ ID NO: 161343 - DNA, 25 bp, Saccharomyces pastorianus
tgaaaatttcacctcaacctccgtt

SEQ ID NO: 161344 - DNA, 25 bp, Saccharomyces pastorianus
agagcgtcatccattatggtcccga

SEQ ID NO: 161345 - DNA, 25 bp, Saccharomyces pastorianus
ggacaactacttgaagccaccacag

SEQ ID NO: 161346 - DNA, 25 bp, Saccharomyces pastorianus
aagctgcccacactgcttatagtga

SEQ ID NO: 161347 - DNA, 25 bp, Saccharomyces pastorianus
agatgagctgctcgagtacatccag

SEQ ID NO: 161348 - DNA, 25 bp, Saccharomyces pastorianus
gtgtacatatggaccgcttgttcat

SEQ ID NO: 161349 - DNA, 25 bp, Saccharomyces pastorianus
agaacgttggcgtcttggcaggcaa

SEQ ID NO: 161350 - DNA, 25 bp, Saccharomyces pastorianus
gagtcggtcgagtcaatcggatctg

SEQ ID NO: 161351 - DNA, 25 bp, Saccharomyces pastorianus
ccgcgagtttcccaaggtcattgat

SEQ ID NO: 161352 - DNA, 25 bp, Saccharomyces pastorianus
ggtcattgatcatctcttttacaga

SEQ ID NO: 161353 - DNA, 25 bp, Saccharomyces pastorianus
catcttcatctacctcatctttgaa

SEQ ID NO: 161354 - DNA, 25 bp, Saccharomyces pastorianus
ggccgatggccaaggagactcgcat

SEQ ID NO: 161355 - DNA, 25 bp, Saccharomyces pastorianus
aaggtgtgctcctgccgtattaaga

SEQ ID NO: 161356 - DNA, 25 bp, Saccharomyces pastorianus
aaaggtgtgctcctgccgtattaag

SEQ ID NO: 161357 - DNA, 25 bp, Saccharomyces pastorianus
aggtgtgctcctgccgtattaagaa

SEQ ID NO: 161358 - DNA, 25 bp, Saccharomyces pastorianus
atgaaaaggtgtgctcctgccgtat

SEQ ID NO: 161359 - DNA, 25 bp, Saccharomyces pastorianus
gaaaaggtgtgctcctgccgtatta

SEQ ID NO: 161360 - DNA, 25 bp, Saccharomyces pastorianus
aaaaggtgtgctcctgccgtattaa

SEQ ID NO: 161361 - DNA, 25 bp, Saccharomyces pastorianus
gtgtgctcctgccgtattaagaaat

SEQ ID NO: 161362 - DNA, 25 bp, Saccharomyces pastorianus
tgaaaaggtgtgctcctgccgtatt

SEQ ID NO: 161363 - DNA, 25 bp, Saccharomyces pastorianus
ggtgtgctcctgccgtattaagaaa

SEQ ID NO: 161364 - DNA, 25 bp, Saccharomyces pastorianus
ggatgcctcattacctgaattgaaa

SEQ ID NO: 161365 - DNA, 25 bp, Saccharomyces pastorianus
gaggcaatcaaatgttcgccccgat

SEQ ID NO: 161366 - DNA, 25 bp, Saccharomyces pastorianus
gacctcattaactcgattttctcta

SEQ ID NO: 161367 - DNA, 25 bp, Saccharomyces pastorianus
gacgtcaccattatgctcacaggat

SEQ ID NO: 161368 - DNA, 25 bp, Saccharomyces pastorianus
gaaacctggtctcatattttatggc

SEQ ID NO: 161369 - DNA, 25 bp, Saccharomyces pastorianus
tgttcgccccgattatttatcttat

SEQ ID NO: 161370 - DNA, 25 bp, Saccharomyces pastorianus
tgttcctctaaagtcggttggcagt

SEQ ID NO: 161371 - DNA, 25 bp, Saccharomyces pastorianus
aaagtatctttatcggcaccaggcc

SEQ ID NO: 161372 - DNA, 25 bp, Saccharomyces pastorianus
tatggcgcgcggaaatgttcctcta

SEQ ID NO: 161373 - DNA, 25 bp, Saccharomyces pastorianus
agtaattcagctaccacaacatttg

SEQ ID NO: 161374 - DNA, 25 bp, Saccharomyces pastorianus
gcaccaggcctatgggaacgttata

SEQ ID NO: 161375 - DNA, 25 bp, Saccharomyces pastorianus
gttttagccacttcgaactattcaa

SEQ ID NO: 161376 - DNA, 25 bp, Saccharomyces pastorianus
gggcactttgctttattgatacaaa

SEQ ID NO: 161377 - DNA, 25 bp, Saccharomyces pastorianus
aaagtcggagatttcgcagcctgtt

SEQ ID NO: 161378 - DNA, 25 bp, Saccharomyces pastorianus
gccaacagaggcaatagcattattt

SEQ ID NO: 161379 - DNA, 25 bp, Saccharomyces pastorianus
gtgttgcaaaactacgaaccattta

SEQ ID NO: 161380 - DNA, 25 bp, Saccharomyces pastorianus
gacatacgccgttttacaatcttta

SEQ ID NO: 161381 - DNA, 25 bp, Saccharomyces pastorianus
agatttcgcagcctgttttagccac

SEQ ID NO: 161382 - DNA, 25 bp, Saccharomyces pastorianus
cgaaccatttaatcgctcaagaatt

SEQ ID NO: 161383 - DNA, 25 bp, Saccharomyces pastorianus
taaatgaccttgatggtgcgtttag

SEQ ID NO: 161384 - DNA, 25 bp, Saccharomyces pastorianus
aagtatctctgcattgatggatgta

SEQ ID NO: 161385 - DNA, 25 bp, Saccharomyces pastorianus
aacagcaacgcataccataatgctt

SEQ ID NO: 161386 - DNA, 25 bp, Saccharomyces pastorianus
atccgaggataagacgcagtccagt

SEQ ID NO: 161387 - DNA, 25 bp, Saccharomyces pastorianus
gcatattcagcggattgttccctta

SEQ ID NO: 161388 - DNA, 25 bp, Saccharomyces pastorianus
aggatccaagaaccctttcgtatgg

SEQ ID NO: 161389 - DNA, 25 bp, Saccharomyces pastorianus
atatatcgtggaacagcgctgtaga

SEQ ID NO: 161390 - DNA, 25 bp, Saccharomyces pastorianus
cagtgataaatcttggccaacatta

SEQ ID NO: 161391 - DNA, 25 bp, Saccharomyces pastorianus
cagcgggctttagagttatacaacc

SEQ ID NO: 161392 - DNA, 25 bp, Saccharomyces pastorianus
aacatgatagcccacagcgggcttt

SEQ ID NO: 161393 - DNA, 25 bp, Saccharomyces pastorianus
tgccatcatctacaacgccaaatat

SEQ ID NO: 161394 - DNA, 25 bp, Saccharomyces pastorianus
aatcgatgagctgccattactgtgg

SEQ ID NO: 161395 - DNA, 25 bp, Saccharomyces pastorianus
aacacttttcgctaaatacatggat

SEQ ID NO: 161396 - DNA, 25 bp, Saccharomyces pastorianus
gttgatgacacactaattcatgggt

SEQ ID NO: 161397 - DNA, 25 bp, Saccharomyces pastorianus
agaatctactttactgtccctaatg

SEQ ID NO: 161398 - DNA, 25 bp, Saccharomyces pastorianus
aactttcacgtactaatcgatctgt

SEQ ID NO: 161399 - DNA, 25 bp, Saccharomyces pastorianus
ttgggaggccaaatctacctacaca

SEQ ID NO: 161400 - DNA, 25 bp, Saccharomyces pastorianus
gaaaatacgtttcttacagctgatt

SEQ ID NO: 161401 - DNA, 25 bp, Saccharomyces pastorianus
aagcggtgtcagtaactctatggat

SEQ ID NO: 161402 - DNA, 25 bp, Saccharomyces pastorianus
cgtgcttgtgaaatggacccgtact

SEQ ID NO: 161403 - DNA, 25 bp, Saccharomyces pastorianus
ggcaaatgagcctaactccgcaaag

SEQ ID NO: 161404 - DNA, 25 bp, Saccharomyces pastorianus
atggccaaagttcccattggattga

SEQ ID NO: 161405 - DNA, 25 bp, Saccharomyces pastorianus
acagtcccctctgttttttgtggat

SEQ ID NO: 161406 - DNA, 25 bp, Saccharomyces pastorianus
gaaaactaatgttcacacccaggca

SEQ ID NO: 161407 - DNA, 25 bp, Saccharomyces pastorianus
ttgcccaacgtggatttggtcaccg

SEQ ID NO: 161408 - DNA, 25 bp, Saccharomyces pastorianus
aaggctaccgtcgatgaattcccat

SEQ ID NO: 161409 - DNA, 25 bp, Saccharomyces pastorianus
gatcagaatctacgatttgggtaag

SEQ ID NO: 161410 - DNA, 25 bp, Saccharomyces pastorianus
gctaccgtcgatgaattcccattgt

SEQ ID NO: 161411 - DNA, 25 bp, Saccharomyces pastorianus
aagaaggctaccgtcgatgaattcc

SEQ ID NO: 161412 - DNA, 25 bp, Saccharomyces pastorianus
aggctaccgtcgatgaattcccatt

SEQ ID NO: 161413 - DNA, 25 bp, Saccharomyces pastorianus
ctccaagatcagaatctacgatttg

SEQ ID NO: 161414 - DNA, 25 bp, Saccharomyces pastorianus
ggtcaacaacagattattttgtcta

SEQ ID NO: 161415 - DNA, 25 bp, Saccharomyces pastorianus
gaatctacgatttgggtaagaagaa

SEQ ID NO: 161416 - DNA, 25 bp, Saccharomyces pastorianus
gaaggctaccgtcgatgaattccca

SEQ ID NO: 161417 - DNA, 25 bp, Saccharomyces pastorianus
gggtaagaagaaggctaccgtcgat

SEQ ID NO: 161418 - DNA, 25 bp, Saccharomyces pastorianus
taccgtcgatgaattcccattgtgt

SEQ ID NO: 161419 - DNA, 25 bp, Saccharomyces pastorianus
gtgccggtgcggatagattgcaaca

SEQ ID NO: 161420 - DNA, 25 bp, Saccharomyces pastorianus
gaagaccagctagatgttacagata

SEQ ID NO: 161421 - DNA, 25 bp, Saccharomyces pastorianus
tacagataccaaaagaacaagcctt

SEQ ID NO: 161422 - DNA, 25 bp, Saccharomyces pastorianus
atgttgtcttgtgccggtgcggata

SEQ ID NO: 161423 - DNA, 25 bp, Saccharomyces pastorianus
ttggtcaaattatcttctctgtcag

SEQ ID NO: 161424 - DNA, 25 bp, Saccharomyces pastorianus
tgtcttctgaagctttggaagctgc

SEQ ID NO: 161425 - DNA, 25 bp, Saccharomyces pastorianus
gagccagatacaagttcccaggtca

SEQ ID NO: 161426 - DNA, 25 bp, Saccharomyces pastorianus
ttggaacaattgtcttctgaagctt

SEQ ID NO: 161427 - DNA, 25 bp, Saccharomyces pastorianus
aagtctagatacaacagagctgttc

SEQ ID NO: 161428 - DNA, 25 bp, Saccharomyces pastorianus
atcttctctgtcagaaccaaggaca

SEQ ID NO: 161429 - DNA, 25 bp, Saccharomyces pastorianus
gagctgttccagactccaagatcag

SEQ ID NO: 161430 - DNA, 25 bp, Saccharomyces pastorianus
gaaagcaccgtcgtccttgacttca

SEQ ID NO: 161431 - DNA, 25 bp, Saccharomyces pastorianus
ttaacgaaagcaccgtcgtccttga

SEQ ID NO: 161432 - DNA, 25 bp, Saccharomyces pastorianus
gtattctgggaattctctgatgttg

SEQ ID NO: 161433 - DNA, 25 bp, Saccharomyces pastorianus
accagcttctctcttcttcaagtat

SEQ ID NO: 161434 - DNA, 25 bp, Saccharomyces pastorianus
aagcttgagcagcaaagtattctgg

SEQ ID NO: 161435 - DNA, 25 bp, Saccharomyces pastorianus
tccaaagaacccttcttggacaaga

SEQ ID NO: 161436 - DNA, 25 bp, Saccharomyces pastorianus
tgatgttgttttccaaagaaccctt

SEQ ID NO: 161437 - DNA, 25 bp, Saccharomyces pastorianus
gtcgtccttgacttcaccagcttct

SEQ ID NO: 161438 - DNA, 25 bp, Saccharomyces pastorianus
gcttctctcttcttcaagtattctg

SEQ ID NO: 161439 - DNA, 25 bp, Saccharomyces pastorianus
attctctgatgttgttttccaaaga

SEQ ID NO: 161440 - DNA, 25 bp, Saccharomyces pastorianus
tcttggacaagaacttaacgaaagc

SEQ ID NO: 161441 - DNA, 25 bp, Saccharomyces pastorianus
catgtctgtgttttcgacttggaga

SEQ ID NO: 161442 - DNA, 25 bp, Saccharomyces pastorianus
aacgtaccttcctgatgattggcaa

SEQ ID NO: 161443 - DNA, 25 bp, Saccharomyces pastorianus
atatggcaaattattcacggcagaa

SEQ ID NO: 161444 - DNA, 25 bp, Saccharomyces pastorianus
ttggcaaagcaacatcgacgaagtg

SEQ ID NO: 161445 - DNA, 25 bp, Saccharomyces pastorianus
ggtcatggaccaaacgaagctgatg

SEQ ID NO: 161446 - DNA, 25 bp, Saccharomyces pastorianus
gttgaagtgtaccatgggatcattt

SEQ ID NO: 161447 - DNA, 25 bp, Saccharomyces pastorianus
tccggtgacaagcttaccttcaaat

SEQ ID NO: 161448 - DNA, 25 bp, Saccharomyces pastorianus
agtgaactgcaactggtcatggacc

SEQ ID NO: 161449 - DNA, 25 bp, Saccharomyces pastorianus
aagatcttattccactcattgcagc

SEQ ID NO: 161450 - DNA, 25 bp, Saccharomyces pastorianus
taatggatttgacgcctccggtgac

SEQ ID NO: 161451 - DNA, 25 bp, Saccharomyces pastorianus
gttgttgcggatgccaatctggtaa

SEQ ID NO: 161452 - DNA, 25 bp, Saccharomyces pastorianus
gatcgtcggtggtactatcattgat

SEQ ID NO: 161453 - DNA, 25 bp, Saccharomyces pastorianus
gatctctcagtgaatatctcctctt

SEQ ID NO: 161454 - DNA, 25 bp, Saccharomyces pastorianus
ctatttgcttgctctttttcagaca

SEQ ID NO: 161455 - DNA, 25 bp, Saccharomyces pastorianus
tcaaaggtccagatttcgccaatat

SEQ ID NO: 161456 - DNA, 25 bp, Saccharomyces pastorianus
ggaatctagggcctgtagacttcat

SEQ ID NO: 161457 - DNA, 25 bp, Saccharomyces pastorianus
gcattatgcttccaagatcgtcggt

SEQ ID NO: 161458 - DNA, 25 bp, Saccharomyces pastorianus
gacaaagtctctatacgttccgaaa

SEQ ID NO: 161459 - DNA, 25 bp, Saccharomyces pastorianus
tgcagcgctttctacttccaaagaa

SEQ ID NO: 161460 - DNA, 25 bp, Saccharomyces pastorianus
gttcgtcgatcccaggtagcaaata

SEQ ID NO: 161461 - DNA, 25 bp, Saccharomyces pastorianus
tagatgtttctgcagcgctttctac

SEQ ID NO: 161462 - DNA, 25 bp, Saccharomyces pastorianus
gaatatctcctcttcaaaggtccag

SEQ ID NO: 161463 - DNA, 25 bp, Saccharomyces pastorianus
ggcggatttggcatctactgtagat

SEQ ID NO: 161464 - DNA, 25 bp, Saccharomyces pastorianus
ctacgaaaagctcggtggcggattt

SEQ ID NO: 161465 - DNA, 25 bp, Saccharomyces pastorianus
agtacacgggtgtccttggcgctag

SEQ ID NO: 161466 - DNA, 25 bp, Saccharomyces pastorianus
aactgttatttatcccttcatggtg

SEQ ID NO: 161467 - DNA, 25 bp, Saccharomyces pastorianus
ggagagcatacgactttacaattaa

SEQ ID NO: 161468 - DNA, 25 bp, Saccharomyces pastorianus
ttcttaccttctccattctgagtta

SEQ ID NO: 161469 - DNA, 25 bp, Saccharomyces pastorianus
tttcaattgatgtcacggtaccccg

SEQ ID NO: 161470 - DNA, 25 bp, Saccharomyces pastorianus
cagtacttcactgctatgggtttgt

SEQ ID NO: 161471 - DNA, 25 bp, Saccharomyces pastorianus
ttcggtttgggatggtgctctgata

SEQ ID NO: 161472 - DNA, 25 bp, Saccharomyces pastorianus
gataatgtcgatacgctagtcatag

SEQ ID NO: 161473 - DNA, 25 bp, Saccharomyces pastorianus
atgtcctacgagatctcaactccaa

SEQ ID NO: 161474 - DNA, 25 bp, Saccharomyces pastorianus
agatgaccatctgttgaagacctgc

SEQ ID NO: 161475 - DNA, 25 bp, Saccharomyces pastorianus
gagaccgacggttcgattgcatcta

SEQ ID NO: 161476 - DNA, 25 bp, Saccharomyces pastorianus
gatctcgatttgttcgacgactggg

SEQ ID NO: 161477 - DNA, 25 bp, Saccharomyces pastorianus
tgagccggtcgtgcccaaaatgaaa

SEQ ID NO: 161478 - DNA, 25 bp, Saccharomyces pastorianus
tctagcgagctcttgcccaataaaa

SEQ ID NO: 161479 - DNA, 25 bp, Saccharomyces pastorianus
aggatttagtcgatatcttccctcc

SEQ ID NO: 161480 - DNA, 25 bp, Saccharomyces pastorianus
tttcactggtttctgcatcgtccga

SEQ ID NO: 161481 - DNA, 25 bp, Saccharomyces pastorianus
aagcgactgttcttcattgagctcc

SEQ ID NO: 161482 - DNA, 25 bp, Saccharomyces pastorianus
tagaacaatggccatctgcatcacc

SEQ ID NO: 161483 - DNA, 25 bp, Saccharomyces pastorianus
ctctaaacttcatcccttgacagat

SEQ ID NO: 161484 - DNA, 25 bp, Saccharomyces pastorianus
attgctgacgctgtcgatttgcaga

SEQ ID NO: 161485 - DNA, 25 bp, Saccharomyces pastorianus
ctatgcttgttctatttggccaggc

SEQ ID NO: 161486 - DNA, 25 bp, Saccharomyces pastorianus
gtccgatcctaagtatctttcgttg

SEQ ID NO: 161487 - DNA, 25 bp, Saccharomyces pastorianus
agttgatttactgcacttggccacc

SEQ ID NO: 161488 - DNA, 25 bp, Saccharomyces pastorianus
aatacggttctgctacctctaggga

SEQ ID NO: 161489 - DNA, 25 bp, Saccharomyces pastorianus
gatacaactggtgggcgtcaagtct

SEQ ID NO: 161490 - DNA, 25 bp, Saccharomyces pastorianus
tttcacctatttcggcatgctatgc

SEQ ID NO: 161491 - DNA, 25 bp, Saccharomyces pastorianus
agccattccttctccaaatatttga

SEQ ID NO: 161492 - DNA, 25 bp, Saccharomyces pastorianus
ggttataaagctgccaatgccccag

SEQ ID NO: 161493 - DNA, 25 bp, Saccharomyces pastorianus
aggaggttttcaccaatccattgga

SEQ ID NO: 161494 - DNA, 25 bp, Saccharomyces pastorianus
agggctccaagcgtttagttgattt

SEQ ID NO: 161495 - DNA, 25 bp, Saccharomyces pastorianus
gtaaaattctgcctcaattgaccag

SEQ ID NO: 161496 - DNA, 25 bp, Saccharomyces pastorianus
ccttttttgcttcacgtgtatatat

SEQ ID NO: 161497 - DNA, 25 bp, Saccharomyces pastorianus
atcagttgatatgcgttttctatac

SEQ ID NO: 161498 - DNA, 25 bp, Saccharomyces pastorianus
tttttgcttcacgtgtatatatatc

SEQ ID NO: 161499 - DNA, 25 bp, Saccharomyces pastorianus
gttgatatgcgttttctatacagac

SEQ ID NO: 161500 - DNA, 25 bp, Saccharomyces pastorianus
atgccttttttgcttcacgtgtata

SEQ ID NO: 161501 - DNA, 25 bp, Saccharomyces pastorianus
gccttttttgcttcacgtgtatata

SEQ ID NO: 161502 - DNA, 25 bp, Saccharomyces pastorianus
gcgttttctatacagacatacatgt

SEQ ID NO: 161503 - DNA, 25 bp, Saccharomyces pastorianus
atatacatatgtacgcagagatata

SEQ ID NO: 161504 - DNA, 25 bp, Saccharomyces pastorianus
cagacatacatgtatatacacacat

SEQ ID NO: 161505 - DNA, 25 bp, Saccharomyces pastorianus
tgatatgcgttttctatacagacat

SEQ ID NO: 161506 - DNA, 25 bp, Saccharomyces pastorianus
atgcgttttctatacagacatacat

SEQ ID NO: 161507 - DNA, 25 bp, Saccharomyces pastorianus
tagaactctcggatatcgtgggtcc

SEQ ID NO: 161508 - DNA, 25 bp, Saccharomyces pastorianus
gaggcattcttcattgtacgacagt

SEQ ID NO: 161509 - DNA, 25 bp, Saccharomyces pastorianus
gatgggtttcgaatttttggctcag

SEQ ID NO: 161510 - DNA, 25 bp, Saccharomyces pastorianus
atgtcaatgccaaactatccttatg

SEQ ID NO: 161511 - DNA, 25 bp, Saccharomyces pastorianus
gggtataccattaagtactgcacaa

SEQ ID NO: 161512 - DNA, 25 bp, Saccharomyces pastorianus
tttggctcagttgggatgctctaga

SEQ ID NO: 161513 - DNA, 25 bp, Saccharomyces pastorianus
aaagacccctgatacattgacgtta

SEQ ID NO: 161514 - DNA, 25 bp, Saccharomyces pastorianus
ttgacgttaaacatccaaccggatt

SEQ ID NO: 161515 - DNA, 25 bp, Saccharomyces pastorianus
gtcgaagcactaacagctcttttgg

SEQ ID NO: 161516 - DNA, 25 bp, Saccharomyces pastorianus
cggattactaccttttcttactgag

SEQ ID NO: 161517 - DNA, 25 bp, Saccharomyces pastorianus
taagtgccagtgaatttgtcgaagc

SEQ ID NO: 161518 - DNA, 25 bp, Saccharomyces pastorianus
attgcctcacaattccgtaaagata

SEQ ID NO: 161519 - DNA, 25 bp, Saccharomyces pastorianus
aggctggagggttatctattgtcaa

SEQ ID NO: 161520 - DNA, 25 bp, Saccharomyces pastorianus
aactggtccgccgtgctagagaaaa

SEQ ID NO: 161521 - DNA, 25 bp, Saccharomyces pastorianus
gaagttcactcatttgaccaacaat

SEQ ID NO: 161522 - DNA, 25 bp, Saccharomyces pastorianus
gaaacttgtggctgaatctactaaa

SEQ ID NO: 161523 - DNA, 25 bp, Saccharomyces pastorianus
acgtgctcgcgctatggtacataat

SEQ ID NO: 161524 - DNA, 25 bp, Saccharomyces pastorianus
aatttttgaacgtgctcgcgctatg

SEQ ID NO: 161525 - DNA, 25 bp, Saccharomyces pastorianus
ggtctccaagacgttaactcagcta

SEQ ID NO: 161526 - DNA, 25 bp, Saccharomyces pastorianus
gaatctggcgcaagagcttttcaat

SEQ ID NO: 161527 - DNA, 25 bp, Saccharomyces pastorianus
gattgcgcttgatgattctaagtct

SEQ ID NO: 161528 - DNA, 25 bp, Saccharomyces pastorianus
cggatcattccatatattgcctcac

SEQ ID NO: 161529 - DNA, 25 bp, Saccharomyces pastorianus
gacagtgaaatcttgtaagatgcca

SEQ ID NO: 161530 - DNA, 25 bp, Saccharomyces pastorianus
agaaattcccagctggcgactacaa

SEQ ID NO: 161531 - DNA, 25 bp, Saccharomyces pastorianus
aaattcccagctggcgactacaaat

SEQ ID NO: 161532 - DNA, 25 bp, Saccharomyces pastorianus
atgtctgacttagttaacaagaaat

SEQ ID NO: 161533 - DNA, 25 bp, Saccharomyces pastorianus
acaaacagttgaatggtccaaatta

SEQ ID NO: 161534 - DNA, 25 bp, Saccharomyces pastorianus
cccagctggcgactacaaattccaa

SEQ ID NO: 161535 - DNA, 25 bp, Saccharomyces pastorianus
caaattccaatacatgctatcagcc

SEQ ID NO: 161536 - DNA, 25 bp, Saccharomyces pastorianus
aatacatgctatcagccaaagtgat

SEQ ID NO: 161537 - DNA, 25 bp, Saccharomyces pastorianus
tgatgctgacagtgaaatcttgtaa

SEQ ID NO: 161538 - DNA, 25 bp, Saccharomyces pastorianus
ttccaatacatgctatcagccaaag

SEQ ID NO: 161539 - DNA, 25 bp, Saccharomyces pastorianus
acaagaaattcccagctggcgacta

SEQ ID NO: 161540 - DNA, 25 bp, Saccharomyces pastorianus
aagaatacagacaagccagcagcca

SEQ ID NO: 161541 - DNA, 25 bp, Saccharomyces pastorianus
gtctgtttcccaaatttctgtaaat

SEQ ID NO: 161542 - DNA, 25 bp, Saccharomyces pastorianus
ttattacagcaacgatttttggcca

SEQ ID NO: 161543 - DNA, 25 bp, Saccharomyces pastorianus
ttgtttcctccgaagcatatatata

SEQ ID NO: 161544 - DNA, 25 bp, Saccharomyces pastorianus
gacgatgttactgaatccacggaag

SEQ ID NO: 161545 - DNA, 25 bp, Saccharomyces pastorianus
gaagctctagcaactcttcaagcaa

SEQ ID NO: 161546 - DNA, 25 bp, Saccharomyces pastorianus
gaatactgctaatgacgatgttact

SEQ ID NO: 161547 - DNA, 25 bp, Saccharomyces pastorianus
gccgacactctgtctttattacagc

SEQ ID NO: 161548 - DNA, 25 bp, Saccharomyces pastorianus
atatataacggtgccgacactctgt

SEQ ID NO: 161549 - DNA, 25 bp, Saccharomyces pastorianus
atcgaacgcgatacagaaagctatg

SEQ ID NO: 161550 - DNA, 25 bp, Saccharomyces pastorianus
aagccagcagccaacttatggaatt

SEQ ID NO: 161551 - DNA, 25 bp, Saccharomyces pastorianus
gggatttttagctcagtatttacaa

SEQ ID NO: 161552 - DNA, 25 bp, Saccharomyces pastorianus
tcttggaatgggatcctagtttttc

SEQ ID NO: 161553 - DNA, 25 bp, Saccharomyces pastorianus
ttgtttttcctaatgctccagagct

SEQ ID NO: 161554 - DNA, 25 bp, Saccharomyces pastorianus
agccagcacgccaaactatcatatt

SEQ ID NO: 161555 - DNA, 25 bp, Saccharomyces pastorianus
agcaaaaattcagccagcacgccaa

SEQ ID NO: 161556 - DNA, 25 bp, Saccharomyces pastorianus
cagggtgccgcattagctctcgcaa

SEQ ID NO: 161557 - DNA, 25 bp, Saccharomyces pastorianus
ttatcggaggtttctctcagggtgc

SEQ ID NO: 161558 - DNA, 25 bp, Saccharomyces pastorianus
tttccaaagttgacagtgacggttt

SEQ ID NO: 161559 - DNA, 25 bp, Saccharomyces pastorianus
tgccgctttccagcatactaatttt

SEQ ID NO: 161560 - DNA, 25 bp, Saccharomyces pastorianus
gctctcgcaacatcagttactttac

SEQ ID NO: 161561 - DNA, 25 bp, Saccharomyces pastorianus
tttacaacagagagaccctgccgct

SEQ ID NO: 161562 - DNA, 25 bp, Saccharomyces pastorianus
gaaaaagtgtctatatatagtgtct

SEQ ID NO: 161563 - DNA, 25 bp, Saccharomyces pastorianus
gtgtctatatatagtgtctattgtt

SEQ ID NO: 161564 - DNA, 25 bp, Saccharomyces pastorianus
ggaaaaagtgtctatatatagtgtc

SEQ ID NO: 161565 - DNA, 25 bp, Saccharomyces pastorianus
ggaaaggaaaaagtgtctatatata

SEQ ID NO: 161566 - DNA, 25 bp, Saccharomyces pastorianus
aaaagtgtctatatatagtgtctat

SEQ ID NO: 161567 - DNA, 25 bp, Saccharomyces pastorianus
gtctatatatagtgtctattgtttt

SEQ ID NO: 161568 - DNA, 25 bp, Saccharomyces pastorianus
aagtgtctatatatagtgtctattg

SEQ ID NO: 161569 - DNA, 25 bp, Saccharomyces pastorianus
aaggaaaaagtgtctatatatagtg

SEQ ID NO: 161570 - DNA, 25 bp, Saccharomyces pastorianus
agtgtctatatatagtgtctattgt

SEQ ID NO: 161571 - DNA, 25 bp, Saccharomyces pastorianus
ctatatatagtgtctattgtttttt

SEQ ID NO: 161572 - DNA, 25 bp, Saccharomyces pastorianus
aaaaagtgtctatatatagtgtcta

SEQ ID NO: 161573 - DNA, 25 bp, Saccharomyces pastorianus
tcagtggtctatcgtttgccgtggc

SEQ ID NO: 161574 - DNA, 25 bp, Saccharomyces pastorianus
aactcaacctttggtgtgctcggga

SEQ ID NO: 161575 - DNA, 25 bp, Saccharomyces pastorianus
tggccaacgaatctaactcaacctt

SEQ ID NO: 161576 - DNA, 25 bp, Saccharomyces pastorianus
actgtacactatcccgttggttaat

SEQ ID NO: 161577 - DNA, 25 bp, Saccharomyces pastorianus
cccaggcagtggctttgctagcaaa

SEQ ID NO: 161578 - DNA, 25 bp, Saccharomyces pastorianus
agggcttaggactgcaaaccgacaa

SEQ ID NO: 161579 - DNA, 25 bp, Saccharomyces pastorianus
ggcgttcgatgtcactttacagggc

SEQ ID NO: 161580 - DNA, 25 bp, Saccharomyces pastorianus
acgcttgaagtcacctattctggaa

SEQ ID NO: 161581 - DNA, 25 bp, Saccharomyces pastorianus
cgagtatgataactttcccctgttc

SEQ ID NO: 161582 - DNA, 25 bp, Saccharomyces pastorianus
aaatgacgagtcacagtcctccggc

SEQ ID NO: 161583 - DNA, 25 bp, Saccharomyces pastorianus
gcatactctcttttcctaaatgacg

SEQ ID NO: 161584 - DNA, 25 bp, Saccharomyces pastorianus
aataattccacaagcgggcaacgcc

SEQ ID NO: 161585 - DNA, 25 bp, Saccharomyces pastorianus
gatttccctagctcaagccaagtat

SEQ ID NO: 161586 - DNA, 25 bp, Saccharomyces pastorianus
gggacctgtgtcttggcaataattc

SEQ ID NO: 161587 - DNA, 25 bp, Saccharomyces pastorianus
aagctctaccactactgcaaagtcg

SEQ ID NO: 161588 - DNA, 25 bp, Saccharomyces pastorianus
gtactgccaccactacgaggtcaag

SEQ ID NO: 161589 - DNA, 25 bp, Saccharomyces pastorianus
agagggcactccagagggctgctac

SEQ ID NO: 161590 - DNA, 25 bp, Saccharomyces pastorianus
aacaacacttggtctaactacgcct

SEQ ID NO: 161591 - DNA, 25 bp, Saccharomyces pastorianus
gaaacgcctatgtggtctacgattt

SEQ ID NO: 161592 - DNA, 25 bp, Saccharomyces pastorianus
tatccttggtgattccttcttgaga

SEQ ID NO: 161593 - DNA, 25 bp, Saccharomyces pastorianus
ttaccaccgtgcgaactttcaatgg

SEQ ID NO: 161594 - DNA, 25 bp, Saccharomyces pastorianus
aaatctaccgttcccagtgcaataa

SEQ ID NO: 161595 - DNA, 25 bp, Saccharomyces pastorianus
aagtctattgaagttagcgtggata

SEQ ID NO: 161596 - DNA, 25 bp, Saccharomyces pastorianus
tttgcgtccgtttgtgcgcttcgat

SEQ ID NO: 161597 - DNA, 25 bp, Saccharomyces pastorianus
tacccttcggcccaattacacgtgg

SEQ ID NO: 161598 - DNA, 25 bp, Saccharomyces pastorianus
ctacacagatgtttgcgtccgtttg

SEQ ID NO: 161599 - DNA, 25 bp, Saccharomyces pastorianus
aagattgctctcagaattcctaccc

SEQ ID NO: 161600 - DNA, 25 bp, Saccharomyces pastorianus
ggcgttacatggcacatcagctgaa

SEQ ID NO: 161601 - DNA, 25 bp, Saccharomyces pastorianus
gattttttacataatgctggaagca

SEQ ID NO: 161602 - DNA, 25 bp, Saccharomyces pastorianus
tagcgtggatagaacggcgttacat

SEQ ID NO: 161603 - DNA, 25 bp, Saccharomyces pastorianus
gtgcgcttcgattttttacataatg

SEQ ID NO: 161604 - DNA, 25 bp, Saccharomyces pastorianus
taactgcatgtttctctacgtctac

SEQ ID NO: 161605 - DNA, 25 bp, Saccharomyces pastorianus
gtttctctacgtctacacagatgtt

SEQ ID NO: 161606 - DNA, 25 bp, Saccharomyces pastorianus
gaagtacacgccttggttaatggga

SEQ ID NO: 161607 - DNA, 25 bp, Saccharomyces pastorianus
gaccatcaagatgtctcccagttgg

SEQ ID NO: 161608 - DNA, 25 bp, Saccharomyces pastorianus
gggattagccttcacgttaacgtca

SEQ ID NO: 161609 - DNA, 25 bp, Saccharomyces pastorianus
gtcagacactcttggatacctggct

SEQ ID NO: 161610 - DNA, 25 bp, Saccharomyces pastorianus
tttggcattatctttcactctgtat

SEQ ID NO: 161611 - DNA, 25 bp, Saccharomyces pastorianus
tcccagttggctacacgtatcgagg

SEQ ID NO: 161612 - DNA, 25 bp, Saccharomyces pastorianus
actctgtatttgtgggtctttcgct

SEQ ID NO: 161613 - DNA, 25 bp, Saccharomyces pastorianus
gttaacgtcacctatagcagtcgcg

SEQ ID NO: 161614 - DNA, 25 bp, Saccharomyces pastorianus
gttcgaaggtttgggtctaggcaca

SEQ ID NO: 161615 - DNA, 25 bp, Saccharomyces pastorianus
actgggctagtcgaattaatggctc

SEQ ID NO: 161616 - DNA, 25 bp, Saccharomyces pastorianus
aaatctcgcttctgtacctggaaaa

SEQ ID NO: 161617 - DNA, 25 bp, Saccharomyces pastorianus
gctagagttccaattaccaagtcta

SEQ ID NO: 161618 - DNA, 25 bp, Saccharomyces pastorianus
ccttgtctagaccagaagttaagaa

SEQ ID NO: 161619 - DNA, 25 bp, Saccharomyces pastorianus
tttgccttgcaaaaattgttggatg

SEQ ID NO: 161620 - DNA, 25 bp, Saccharomyces pastorianus
aattaccaagtctactccagctaac

SEQ ID NO: 161621 - DNA, 25 bp, Saccharomyces pastorianus
ggactacaaaccagttgctgtccca

SEQ ID NO: 161622 - DNA, 25 bp, Saccharomyces pastorianus
tgctattccagaagtcgtcaaggac

SEQ ID NO: 161623 - DNA, 25 bp, Saccharomyces pastorianus
gttccaattaccaagtctactccag

SEQ ID NO: 161624 - DNA, 25 bp, Saccharomyces pastorianus
tagacatgatgtcaaggctgaaact

SEQ ID NO: 161625 - DNA, 25 bp, Saccharomyces pastorianus
ttacgttggtaccttgtctagacca

SEQ ID NO: 161626 - DNA, 25 bp, Saccharomyces pastorianus
ctactccagctaacactccaatgaa

SEQ ID NO: 161627 - DNA, 25 bp, Saccharomyces pastorianus
gtcgtcaaggactacaaaccagttg

SEQ ID NO: 161628 - DNA, 25 bp, Saccharomyces pastorianus
agtacagcccactcaagtttaacca

SEQ ID NO: 161629 - DNA, 25 bp, Saccharomyces pastorianus
gaaacctggtactgcttatttagat

SEQ ID NO: 161630 - DNA, 25 bp, Saccharomyces pastorianus
agagctttaacagcagtaggactaa

SEQ ID NO: 161631 - DNA, 25 bp, Saccharomyces pastorianus
gcgtaccgcctccagtagatgaaga

SEQ ID NO: 161632 - DNA, 25 bp, Saccharomyces pastorianus
aagccatcgaaggaccctccaggaa

SEQ ID NO: 161633 - DNA, 25 bp, Saccharomyces pastorianus
aaccgcccaagaaacgatagtgttg

SEQ ID NO: 161634 - DNA, 25 bp, Saccharomyces pastorianus
agacaatctgttaatcatcgagaat

SEQ ID NO: 161635 - DNA, 25 bp, Saccharomyces pastorianus
cacaatgaccaatctatccagtagt

SEQ ID NO: 161636 - DNA, 25 bp, Saccharomyces pastorianus
gagaattttaactcccacatcttta

SEQ ID NO: 161637 - DNA, 25 bp, Saccharomyces pastorianus
agttagtgttgatagtacagcccac

SEQ ID NO: 161638 - DNA, 25 bp, Saccharomyces pastorianus
agagcaaagcgaacagcggcgtacc

SEQ ID NO: 161639 - DNA, 25 bp, Saccharomyces pastorianus
tttaacgattaaggatcttttgcca

SEQ ID NO: 161640 - DNA, 25 bp, Saccharomyces pastorianus
gatttacaggatactagagccaggt

SEQ ID NO: 161641 - DNA, 25 bp, Saccharomyces pastorianus
agttcattgttttcccctgtggcca

SEQ ID NO: 161642 - DNA, 25 bp, Saccharomyces pastorianus
gaatgtggtaaatttctacagatca

SEQ ID NO: 161643 - DNA, 25 bp, Saccharomyces pastorianus
gaacgattttaaatgattccaacga

SEQ ID NO: 161644 - DNA, 25 bp, Saccharomyces pastorianus
tatggctgaaaattgcaaaacactt

SEQ ID NO: 161645 - DNA, 25 bp, Saccharomyces pastorianus
acacgtttaaacttattcgaggatg

SEQ ID NO: 161646 - DNA, 25 bp, Saccharomyces pastorianus
ctgtggccactgttttcactggaac

SEQ ID NO: 161647 - DNA, 25 bp, Saccharomyces pastorianus
agagccaggtaagtcttgtgatgaa

SEQ ID NO: 161648 - DNA, 25 bp, Saccharomyces pastorianus
gccactgttttcactggaactgtat

SEQ ID NO: 161649 - DNA, 25 bp, Saccharomyces pastorianus
ttattcgaggatgccattgacttgg

SEQ ID NO: 161650 - DNA, 25 bp, Saccharomyces pastorianus
ctcagctcgctacattggatcaacg

SEQ ID NO: 161651 - DNA, 25 bp, Saccharomyces pastorianus
gaagacgcccaagttgtaccgagtt

SEQ ID NO: 161652 - DNA, 25 bp, Saccharomyces pastorianus
ataaaaaatctcgacctcagctcgc

SEQ ID NO: 161653 - DNA, 25 bp, Saccharomyces pastorianus
aatggactctttgcttgggtcacat

SEQ ID NO: 161654 - DNA, 25 bp, Saccharomyces pastorianus
ggagggctctctgctattaactata

SEQ ID NO: 161655 - DNA, 25 bp, Saccharomyces pastorianus
aactctctggtggaattgatggcat

SEQ ID NO: 161656 - DNA, 25 bp, Saccharomyces pastorianus
atagttttgactgctttccacatcc

SEQ ID NO: 161657 - DNA, 25 bp, Saccharomyces pastorianus
gctttccacatcctgcttttgagaa

SEQ ID NO: 161658 - DNA, 25 bp, Saccharomyces pastorianus
atcttcgtcgaaggttctactcaat

SEQ ID NO: 161659 - DNA, 25 bp, Saccharomyces pastorianus
atttcgaactgcctgactaccagaa

SEQ ID NO: 161660 - DNA, 25 bp, Saccharomyces pastorianus
gaaaccacctttctgatgggaatca

SEQ ID NO: 161661 - DNA, 25 bp, Saccharomyces pastorianus
aagtcttggcacacctgctgctgat

SEQ ID NO: 161662 - DNA, 25 bp, Saccharomyces pastorianus
caccaaccgccgattattctaataa

SEQ ID NO: 161663 - DNA, 25 bp, Saccharomyces pastorianus
tgccctctatgccaaatgtaaccac

SEQ ID NO: 161664 - DNA, 25 bp, Saccharomyces pastorianus
ggcggattatcggtctttatcaaga

SEQ ID NO: 161665 - DNA, 25 bp, Saccharomyces pastorianus
tgctgctgattctatcgcaacttcg

SEQ ID NO: 161666 - DNA, 25 bp, Saccharomyces pastorianus
ttggagccgcaaattctaccttttc

SEQ ID NO: 161667 - DNA, 25 bp, Saccharomyces pastorianus
gaatcggttctgttttctacgaaag

SEQ ID NO: 161668 - DNA, 25 bp, Saccharomyces pastorianus
aagtgacgtagctcatccatacaag

SEQ ID NO: 161669 - DNA, 25 bp, Saccharomyces pastorianus
aagagacgatgttcattcagggtaa

SEQ ID NO: 161670 - DNA, 25 bp, Saccharomyces pastorianus
agaagaagattttcgctgccctcta

SEQ ID NO: 161671 - DNA, 25 bp, Saccharomyces pastorianus
acatcagggcagagtacacgttgta

SEQ ID NO: 161672 - DNA, 25 bp, Saccharomyces pastorianus
gagtacttggaatttgatgccactt

SEQ ID NO: 161673 - DNA, 25 bp, Saccharomyces pastorianus
ggtaacgagggtgctatcagagaca

SEQ ID NO: 161674 - DNA, 25 bp, Saccharomyces pastorianus
gaagtccaacaccagaagggccact

SEQ ID NO: 161675 - DNA, 25 bp, Saccharomyces pastorianus
gccaaagaccgctcaattgtctttg

SEQ ID NO: 161676 - DNA, 25 bp, Saccharomyces pastorianus
agaccaagaccttctggtaacgagg

SEQ ID NO: 161677 - DNA, 25 bp, Saccharomyces pastorianus
aaccagttcaacaaggtcccagaag

SEQ ID NO: 161678 - DNA, 25 bp, Saccharomyces pastorianus
tgatgccacttttgttgaatctaac

SEQ ID NO: 161679 - DNA, 25 bp, Saccharomyces pastorianus
aaaggaagtcactgactctgccacc

SEQ ID NO: 161680 - DNA, 25 bp, Saccharomyces pastorianus
atcagagacaagaccgctggtagaa

SEQ ID NO: 161681 - DNA, 25 bp, Saccharomyces pastorianus
ttgaaccaacaagctaacaaccagt

SEQ ID NO: 161682 - DNA, 25 bp, Saccharomyces pastorianus
gacgctgcagaagctgaagacgctg

SEQ ID NO: 161683 - DNA, 25 bp, Saccharomyces pastorianus
attggtgctattcactctgttgtct

SEQ ID NO: 161684 - DNA, 25 bp, Saccharomyces pastorianus
tacttgcattgggatgctccataca

SEQ ID NO: 161685 - DNA, 25 bp, Saccharomyces pastorianus
gatcgtgtcgttgatgctaattcta

SEQ ID NO: 161686 - DNA, 25 bp, Saccharomyces pastorianus
tctgttgtctttgcagggttctccg

SEQ ID NO: 161687 - DNA, 25 bp, Saccharomyces pastorianus
ggatgctccatacaccaaagttcaa

SEQ ID NO: 161688 - DNA, 25 bp, Saccharomyces pastorianus
atgattccagaagcggtcattgcta

SEQ ID NO: 161689 - DNA, 25 bp, Saccharomyces pastorianus
gacacagtggctatctatttgccaa

SEQ ID NO: 161690 - DNA, 25 bp, Saccharomyces pastorianus
ctgtggctcgtattggtgctattca

SEQ ID NO: 161691 - DNA, 25 bp, Saccharomyces pastorianus
gaagctgatgacgaatccgacaaca

SEQ ID NO: 161692 - DNA, 25 bp, Saccharomyces pastorianus
gtcattgctatgttggctgtggctc

SEQ ID NO: 161693 - DNA, 25 bp, Saccharomyces pastorianus
aagtttcccaaatcgctggtgtctt

SEQ ID NO: 161694 - DNA, 25 bp, Saccharomyces pastorianus
tttaccattccttttctgccaaaga

SEQ ID NO: 161695 - DNA, 25 bp, Saccharomyces pastorianus
gtaccattggattgtcgagcgcgga

SEQ ID NO: 161696 - DNA, 25 bp, Saccharomyces pastorianus
caaatgattcctcttatatgccgcc

SEQ ID NO: 161697 - DNA, 25 bp, Saccharomyces pastorianus
ttgggctcctttttatcgttcgtcg

SEQ ID NO: 161698 - DNA, 25 bp, Saccharomyces pastorianus
aagcagagctcagggttcgtaccat

SEQ ID NO: 161699 - DNA, 25 bp, Saccharomyces pastorianus
agctggtcttattgcctctttaaaa

SEQ ID NO: 161700 - DNA, 25 bp, Saccharomyces pastorianus
agtttttgaaaccactctgcaggat

SEQ ID NO: 161701 - DNA, 25 bp, Saccharomyces pastorianus
ggtcctgctaggtcattgtcatatc

SEQ ID NO: 161702 - DNA, 25 bp, Saccharomyces pastorianus
taagggcttttcatacttcaattgc

SEQ ID NO: 161703 - DNA, 25 bp, Saccharomyces pastorianus
ttcaattgccagatcctttaccatt

SEQ ID NO: 161704 - DNA, 25 bp, Saccharomyces pastorianus
tttaccgacacatttctttccttgg

SEQ ID NO: 161705 - DNA, 25 bp, Saccharomyces pastorianus
atgagctgttagagaattttaattc

SEQ ID NO: 161706 - DNA, 25 bp, Saccharomyces pastorianus
aaacaataaacacaaagctggttat

SEQ ID NO: 161707 - DNA, 25 bp, Saccharomyces pastorianus
actagagacaagttcagtaccaaaa

SEQ ID NO: 161708 - DNA, 25 bp, Saccharomyces pastorianus
tgaaaagtactctgaaatgatggaa

SEQ ID NO: 161709 - DNA, 25 bp, Saccharomyces pastorianus
agctggttattgaaaagtactctga

SEQ ID NO: 161710 - DNA, 25 bp, Saccharomyces pastorianus
gacaagttcagtaccaaaaacaata

SEQ ID NO: 161711 - DNA, 25 bp, Saccharomyces pastorianus
aagtccgtgaaattaatgaagaatc

SEQ ID NO: 161712 - DNA, 25 bp, Saccharomyces pastorianus
gatattatcatccaaactagagaca

SEQ ID NO: 161713 - DNA, 25 bp, Saccharomyces pastorianus
gaattttaattctgcatatagagag

SEQ ID NO: 161714 - DNA, 25 bp, Saccharomyces pastorianus
gaagaatctattgatattatcatcc

SEQ ID NO: 161715 - DNA, 25 bp, Saccharomyces pastorianus
aaatgatggaaaatgagctgttaga

SEQ ID NO: 161716 - DNA, 25 bp, Saccharomyces pastorianus
caacgtgactggatacggtacatca

SEQ ID NO: 161717 - DNA, 25 bp, Saccharomyces pastorianus
gaacggaaaatgactcggacgccag

SEQ ID NO: 161718 - DNA, 25 bp, Saccharomyces pastorianus
acgtgaccacattcgatggagatct

SEQ ID NO: 161719 - DNA, 25 bp, Saccharomyces pastorianus
gttggcatggaacccatttgtttta

SEQ ID NO: 161720 - DNA, 25 bp, Saccharomyces pastorianus
tatgggctctgacctgaacaatgat

SEQ ID NO: 161721 - DNA, 25 bp, Saccharomyces pastorianus
tcggacgccagaagccaacgtgact

SEQ ID NO: 161722 - DNA, 25 bp, Saccharomyces pastorianus
gttttaatttggctcaccgacagat

SEQ ID NO: 161723 - DNA, 25 bp, Saccharomyces pastorianus
ggcaacgccccttcggatgattcaa

SEQ ID NO: 161724 - DNA, 25 bp, Saccharomyces pastorianus
gttcgattatgacaaatggccagga

SEQ ID NO: 161725 - DNA, 25 bp, Saccharomyces pastorianus
caaactggtggagtttcagcttgat

SEQ ID NO: 161726 - DNA, 25 bp, Saccharomyces pastorianus
caggtaagtatttgcaggtgtctat

SEQ ID NO: 161727 - DNA, 25 bp, Saccharomyces pastorianus
gagtcattatatcatatccattgca

SEQ ID NO: 161728 - DNA, 25 bp, Saccharomyces pastorianus
gtatgatcaaactattgcccgaaca

SEQ ID NO: 161729 - DNA, 25 bp, Saccharomyces pastorianus
aagcgctagtgcaaaggaagttatc

SEQ ID NO: 161730 - DNA, 25 bp, Saccharomyces pastorianus
aatgcattattcttctctaactcta

SEQ ID NO: 161731 - DNA, 25 bp, Saccharomyces pastorianus
tatatcgcccacgatgtttaatcta

SEQ ID NO: 161732 - DNA, 25 bp, Saccharomyces pastorianus
gcaacatttacaagggttctgtcaa

SEQ ID NO: 161733 - DNA, 25 bp, Saccharomyces pastorianus
gagatcagtgactcaatcattcaaa

SEQ ID NO: 161734 - DNA, 25 bp, Saccharomyces pastorianus
tctaactctaactctatatcgccca

SEQ ID NO: 161735 - DNA, 25 bp, Saccharomyces pastorianus
agttcttaaattcctctatgagcgt

SEQ ID NO: 161736 - DNA, 25 bp, Saccharomyces pastorianus
gttctgtcaagttttcgtaacaaag

SEQ ID NO: 161737 - DNA, 25 bp, Saccharomyces pastorianus
gtgacttaatcacctatacagggtt

SEQ ID NO: 161738 - DNA, 25 bp, Saccharomyces pastorianus
aaatccaatattaccgccacttatc

SEQ ID NO: 161739 - DNA, 25 bp, Saccharomyces pastorianus
gaatatcccgcccatagcgagcaaa

SEQ ID NO: 161740 - DNA, 25 bp, Saccharomyces pastorianus
tgccacatactcagtgtatccagcg

SEQ ID NO: 161741 - DNA, 25 bp, Saccharomyces pastorianus
cagctttgcagctggcggaacaaaa

SEQ ID NO: 161742 - DNA, 25 bp, Saccharomyces pastorianus
gaaacgaatctcttccatttcaagg

SEQ ID NO: 161743 - DNA, 25 bp, Saccharomyces pastorianus
agatcgaattcatctgcttacccac

SEQ ID NO: 161744 - DNA, 25 bp, Saccharomyces pastorianus
catcgtcaatatacagcctgctaca

SEQ ID NO: 161745 - DNA, 25 bp, Saccharomyces pastorianus
cttacccactttctttcaagtcaga

SEQ ID NO: 161746 - DNA, 25 bp, Saccharomyces pastorianus
gtatccagcgtctatcagcctgaat

SEQ ID NO: 161747 - DNA, 25 bp, Saccharomyces pastorianus
actgctgccaaacgtactaatacct

SEQ ID NO: 161748 - DNA, 25 bp, Saccharomyces pastorianus
tcccctcaattccaagcagtactaa

SEQ ID NO: 161749 - DNA, 25 bp, Saccharomyces pastorianus
gcgaacgttcaacaaacaccattat

SEQ ID NO: 161750 - DNA, 25 bp, Saccharomyces pastorianus
acaccattattccaattacaacagg

SEQ ID NO: 161751 - DNA, 25 bp, Saccharomyces pastorianus
gacgcgaaatgcgttggtgtcattt

SEQ ID NO: 161752 - DNA, 25 bp, Saccharomyces pastorianus
aaatcacctggcttttgcgaacgtt

SEQ ID NO: 161753 - DNA, 25 bp, Saccharomyces pastorianus
gacgaattgcgtacgatcttgagcg

SEQ ID NO: 161754 - DNA, 25 bp, Saccharomyces pastorianus
aggttaactcgcaaatttctgaatt

SEQ ID NO: 161755 - DNA, 25 bp, Saccharomyces pastorianus
gctggtaaaccattagacgaagaat

SEQ ID NO: 161756 - DNA, 25 bp, Saccharomyces pastorianus
tggtgtcatttatcgtcacggtaaa

SEQ ID NO: 161757 - DNA, 25 bp, Saccharomyces pastorianus
cgtacgatcttgagcgacgcgaaat

SEQ ID NO: 161758 - DNA, 25 bp, Saccharomyces pastorianus
atattttgacaaatcacctggcttt

SEQ ID NO: 161759 - DNA, 25 bp, Saccharomyces pastorianus
gtaaagatgccgctggtaaaccatt

SEQ ID NO: 161760 - DNA, 25 bp, Saccharomyces pastorianus
ggattaatcgttacctatcgtaagc

SEQ ID NO: 161761 - DNA, 25 bp, Saccharomyces pastorianus
caatgtgatgttgcgctctgtaaga

SEQ ID NO: 161762 - DNA, 25 bp, Saccharomyces pastorianus
gcaggttttacttcgcatttcgtta

SEQ ID NO: 161763 - DNA, 25 bp, Saccharomyces pastorianus
aaactttcttctccttcaaggcata

SEQ ID NO: 161764 - DNA, 25 bp, Saccharomyces pastorianus
atataggcttgttcccagattctct

SEQ ID NO: 161765 - DNA, 25 bp, Saccharomyces pastorianus
gagggagacaccgtttatatgacat

SEQ ID NO: 161766 - DNA, 25 bp, Saccharomyces pastorianus
atcagcaccattactgtagggcgca

SEQ ID NO: 161767 - DNA, 25 bp, Saccharomyces pastorianus
tgacacttcgatggacagacccaaa

SEQ ID NO: 161768 - DNA, 25 bp, Saccharomyces pastorianus
gcatccattgatttttactgacact

SEQ ID NO: 161769 - DNA, 25 bp, Saccharomyces pastorianus
gttcatatccagagtacacgctagt

SEQ ID NO: 161770 - DNA, 25 bp, Saccharomyces pastorianus
aaaactctccttcagagccgttaag

SEQ ID NO: 161771 - DNA, 25 bp, Saccharomyces pastorianus
gtccctcatccaattatgagaaagc

SEQ ID NO: 161772 - DNA, 25 bp, Saccharomyces pastorianus
aaacagcagcctaattgtccctcat

SEQ ID NO: 161773 - DNA, 25 bp, Saccharomyces pastorianus
acaaacagcagcctaattgtccctc

SEQ ID NO: 161774 - DNA, 25 bp, Saccharomyces pastorianus
gcctaattgtccctcatccaattat

SEQ ID NO: 161775 - DNA, 25 bp, Saccharomyces pastorianus
attacaaacagcagcctaattgtcc

SEQ ID NO: 161776 - DNA, 25 bp, Saccharomyces pastorianus
atccaattatgagaaagctggtaaa

SEQ ID NO: 161777 - DNA, 25 bp, Saccharomyces pastorianus
ttgtccctcatccaattatgagaaa

SEQ ID NO: 161778 - DNA, 25 bp, Saccharomyces pastorianus
aacagcagcctaattgtccctcatc

SEQ ID NO: 161779 - DNA, 25 bp, Saccharomyces pastorianus
gcagcctaattgtccctcatccaat

SEQ ID NO: 161780 - DNA, 25 bp, Saccharomyces pastorianus
taattgtccctcatccaattatgag

SEQ ID NO: 161781 - DNA, 25 bp, Saccharomyces pastorianus
aattgtccctcatccaattatgaga

SEQ ID NO: 161782 - DNA, 25 bp, Saccharomyces pastorianus
aaacagcagcctaattgtccctcat

SEQ ID NO: 161783 - DNA, 25 bp, Saccharomyces pastorianus
acaaacagcagcctaattgtccctc

SEQ ID NO: 161784 - DNA, 25 bp, Saccharomyces pastorianus
aaactgcgtcagaatcaattggaaa

SEQ ID NO: 161785 - DNA, 25 bp, Saccharomyces pastorianus
ggagattatcaactcatttccttct

SEQ ID NO: 161786 - DNA, 25 bp, Saccharomyces pastorianus
gcctaattgtccctcatccaattat

SEQ ID NO: 161787 - DNA, 25 bp, Saccharomyces pastorianus
atccaattatgagaaagctggtaaa

SEQ ID NO: 161788 - DNA, 25 bp, Saccharomyces pastorianus
tgtccctcatccaattatgagaaag

SEQ ID NO: 161789 - DNA, 25 bp, Saccharomyces pastorianus
aacagcagcctaattgtccctcatc

SEQ ID NO: 161790 - DNA, 25 bp, Saccharomyces pastorianus
tctccaccaaattacaaacagcagc

SEQ ID NO: 161791 - DNA, 25 bp, Saccharomyces pastorianus
gcagcctaattgtccctcatccaat

SEQ ID NO: 161792 - DNA, 25 bp, Saccharomyces pastorianus
aattgtccctcatccaattatgaga

SEQ ID NO: 161793 - DNA, 25 bp, Saccharomyces pastorianus
agagtttccattgatgaattttagt

SEQ ID NO: 161794 - DNA, 25 bp, Saccharomyces pastorianus
tttacgtcgactgccgctgttcatt

SEQ ID NO: 161795 - DNA, 25 bp, Saccharomyces pastorianus
actgccgctgttcattctcatcaaa

SEQ ID NO: 161796 - DNA, 25 bp, Saccharomyces pastorianus
gaattttagtttacgtcgactgccg

SEQ ID NO: 161797 - DNA, 25 bp, Saccharomyces pastorianus
cgctgttcattctcatcaaaacacg

SEQ ID NO: 161798 - DNA, 25 bp, Saccharomyces pastorianus
gagaaagagtttccattgatgaatt

SEQ ID NO: 161799 - DNA, 25 bp, Saccharomyces pastorianus
gcaaaccatagagatgaacttaaga

SEQ ID NO: 161800 - DNA, 25 bp, Saccharomyces pastorianus
attttagtttacgtcgactgccgct

SEQ ID NO: 161801 - DNA, 25 bp, Saccharomyces pastorianus
aaacacgaaagcaaaccatagagat

SEQ ID NO: 161802 - DNA, 25 bp, Saccharomyces pastorianus
ttagtttacgtcgactgccgctgtt

SEQ ID NO: 161803 - DNA, 25 bp, Saccharomyces pastorianus
gccgctgttcattctcatcaaaaca

SEQ ID NO: 161804 - DNA, 25 bp, Saccharomyces pastorianus
aatcagcaggattccaggccaactg

SEQ ID NO: 161805 - DNA, 25 bp, Saccharomyces pastorianus
aggcgctgttactggatttgcacaa

SEQ ID NO: 161806 - DNA, 25 bp, Saccharomyces pastorianus
gtaatgctcagtctttaagtgcgat

SEQ ID NO: 161807 - DNA, 25 bp, Saccharomyces pastorianus
cttcgttagaggagccacagcgtaa

SEQ ID NO: 161808 - DNA, 25 bp, Saccharomyces pastorianus
tagtgcaagtgagtctgctcccgaa

SEQ ID NO: 161809 - DNA, 25 bp, Saccharomyces pastorianus
taaaccttgggagaccagtgcttcg

SEQ ID NO: 161810 - DNA, 25 bp, Saccharomyces pastorianus
ctctggtacctacggcgaatcgaat

SEQ ID NO: 161811 - DNA, 25 bp, Saccharomyces pastorianus
cgaaggccacctttcagttaataga

SEQ ID NO: 161812 - DNA, 25 bp, Saccharomyces pastorianus
tattcaccatgatatccgtcgcaga

SEQ ID NO: 161813 - DNA, 25 bp, Saccharomyces pastorianus
ttatatggccacacacaactcgtta

SEQ ID NO: 161814 - DNA, 25 bp, Saccharomyces pastorianus
ggaggatcgtactatggcaacaatt

SEQ ID NO: 161815 - DNA, 25 bp, Saccharomyces pastorianus
tcctaccgattttgcctctgtttca

SEQ ID NO: 161816 - DNA, 25 bp, Saccharomyces pastorianus
taatagataccccaatccatactcc

SEQ ID NO: 161817 - DNA, 25 bp, Saccharomyces pastorianus
gtactatccatagacacaatatcaa

SEQ ID NO: 161818 - DNA, 25 bp, Saccharomyces pastorianus
ttcctaccgattttgcctctgtttc

SEQ ID NO: 161819 - DNA, 25 bp, Saccharomyces pastorianus
atcaaggaacgttgatcaagaagga

SEQ ID NO: 161820 - DNA, 25 bp, Saccharomyces pastorianus
tttcctaccgattttgcctctgttt

SEQ ID NO: 161821 - DNA, 25 bp, Saccharomyces pastorianus
gtttcacgcgccttttttaatagat

SEQ ID NO: 161822 - DNA, 25 bp, Saccharomyces pastorianus
catagacacaatatcaaggaacgtt

SEQ ID NO: 161823 - DNA, 25 bp, Saccharomyces pastorianus
gacacaatatcaaggaacgttgatc

SEQ ID NO: 161824 - DNA, 25 bp, Saccharomyces pastorianus
ctatccatagacacaatatcaagga

SEQ ID NO: 161825 - DNA, 25 bp, Saccharomyces pastorianus
ccccatgtactatccatagacacaa

SEQ ID NO: 161826 - DNA, 25 bp, Saccharomyces pastorianus
tttcctgtgcgttcacaaacagcta

SEQ ID NO: 161827 - DNA, 25 bp, Saccharomyces pastorianus
cacagggttaccagatgggcacaca

SEQ ID NO: 161828 - DNA, 25 bp, Saccharomyces pastorianus
gacttcttctcattttactcattgc

SEQ ID NO: 161829 - DNA, 25 bp, Saccharomyces pastorianus
tatgtagtcgaacagcccgatggaa

SEQ ID NO: 161830 - DNA, 25 bp, Saccharomyces pastorianus
agcacctgtgagtacgtgtcgttat

SEQ ID NO: 161831 - DNA, 25 bp, Saccharomyces pastorianus
gccaccgatgcagatttccaattca

SEQ ID NO: 161832 - DNA, 25 bp, Saccharomyces pastorianus
gatatcaatccaggttcgaactaat

SEQ ID NO: 161833 - DNA, 25 bp, Saccharomyces pastorianus
cctaggcatcgggtacttgtattat

SEQ ID NO: 161834 - DNA, 25 bp, Saccharomyces pastorianus
ggcaggtattgttttgccagcacct

SEQ ID NO: 161835 - DNA, 25 bp, Saccharomyces pastorianus
ttatactcatcgtcccttgaattgg

SEQ ID NO: 161836 - DNA, 25 bp, Saccharomyces pastorianus
gattgctgagaatgcgttaccggcc

SEQ ID NO: 161837 - DNA, 25 bp, Saccharomyces pastorianus
attacgattgggtctttgctgcaca

SEQ ID NO: 161838 - DNA, 25 bp, Saccharomyces pastorianus
ggctgctctcaggtatactttatat

SEQ ID NO: 161839 - DNA, 25 bp, Saccharomyces pastorianus
gagtttggttttccccaacagcaag

SEQ ID NO: 161840 - DNA, 25 bp, Saccharomyces pastorianus
taggtgcacgtgctgaagctcaatt

SEQ ID NO: 161841 - DNA, 25 bp, Saccharomyces pastorianus
gtacgtcaagtctactacgccggta

SEQ ID NO: 161842 - DNA, 25 bp, Saccharomyces pastorianus
acagagttccaattagccgcagtca

SEQ ID NO: 161843 - DNA, 25 bp, Saccharomyces pastorianus
tccagtttcttttcccagagcagag

SEQ ID NO: 161844 - DNA, 25 bp, Saccharomyces pastorianus
aggtctaaaatctctggctgctctc

SEQ ID NO: 161845 - DNA, 25 bp, Saccharomyces pastorianus
attggacccgaatgcctgtataaaa

SEQ ID NO: 161846 - DNA, 25 bp, Saccharomyces pastorianus
tgcacaaattttccccgtattcatt

SEQ ID NO: 161847 - DNA, 25 bp, Saccharomyces pastorianus
gagaattttcatcctaggtgcacgt

SEQ ID NO: 161848 - DNA, 25 bp, Saccharomyces pastorianus
tcagactgagctggacagggcgttt

SEQ ID NO: 161849 - DNA, 25 bp, Saccharomyces pastorianus
gtagagcttacatggccgttcagac

SEQ ID NO: 161850 - DNA, 25 bp, Saccharomyces pastorianus
aatgatcagcagattcaagccgatg

SEQ ID NO: 161851 - DNA, 25 bp, Saccharomyces pastorianus
gttcccaatccgctggatgatgata

SEQ ID NO: 161852 - DNA, 25 bp, Saccharomyces pastorianus
gaaacgctatacctgacgattaata

SEQ ID NO: 161853 - DNA, 25 bp, Saccharomyces pastorianus
tggcccactttggatgatctagttt

SEQ ID NO: 161854 - DNA, 25 bp, Saccharomyces pastorianus
atcggctttatttattgctgccaag

SEQ ID NO: 161855 - DNA, 25 bp, Saccharomyces pastorianus
gatgaccttattagagcggaacagt

SEQ ID NO: 161856 - DNA, 25 bp, Saccharomyces pastorianus
gcttccgacatattctattacttga

SEQ ID NO: 161857 - DNA, 25 bp, Saccharomyces pastorianus
atggttgtggagtacgcttccgaca

SEQ ID NO: 161858 - DNA, 25 bp, Saccharomyces pastorianus
caattggttggtgtatcggctttat

SEQ ID NO: 161859 - DNA, 25 bp, Saccharomyces pastorianus
ttaaacttccacacccatatgatag

SEQ ID NO: 161860 - DNA, 25 bp, Saccharomyces pastorianus
ggattcggtcaatggctggtatttt

SEQ ID NO: 161861 - DNA, 25 bp, Saccharomyces pastorianus
ttttcccagtagtctatctattcgg

SEQ ID NO: 161862 - DNA, 25 bp, Saccharomyces pastorianus
tgtacactcaattgtcatgaccgcc

SEQ ID NO: 161863 - DNA, 25 bp, Saccharomyces pastorianus
gaaataatcccttcatccctaacag

SEQ ID NO: 161864 - DNA, 25 bp, Saccharomyces pastorianus
aaatggtctgcctacgtttgtttca

SEQ ID NO: 161865 - DNA, 25 bp, Saccharomyces pastorianus
gaggcaagggtctcgtcgtattaat

SEQ ID NO: 161866 - DNA, 25 bp, Saccharomyces pastorianus
agacttgatggccattgcacttttc

SEQ ID NO: 161867 - DNA, 25 bp, Saccharomyces pastorianus
gtatggcctttgtgagtcgtagagc

SEQ ID NO: 161868 - DNA, 25 bp, Saccharomyces pastorianus
ttcatgttggccgttgtacactcaa

SEQ ID NO: 161869 - DNA, 25 bp, Saccharomyces pastorianus
caggctttccttttctacatttaat

SEQ ID NO: 161870 - DNA, 25 bp, Saccharomyces pastorianus
gtttttgagttgtacaatgacatag

SEQ ID NO: 161871 - DNA, 25 bp, Saccharomyces pastorianus
ccaaggccgtatagtttttgagttg

SEQ ID NO: 161872 - DNA, 25 bp, Saccharomyces pastorianus
tgagttgtacaatgacatagtgcct

SEQ ID NO: 161873 - DNA, 25 bp, Saccharomyces pastorianus
tgatatttctattggaggtaaaccc

SEQ ID NO: 161874 - DNA, 25 bp, Saccharomyces pastorianus
ttttttgatatttctattggaggta

SEQ ID NO: 161875 - DNA, 25 bp, Saccharomyces pastorianus
gagttgtacaatgacatagtgccta

SEQ ID NO: 161876 - DNA, 25 bp, Saccharomyces pastorianus
agttgtacaatgacatagtgcctaa

SEQ ID NO: 161877 - DNA, 25 bp, Saccharomyces pastorianus
gttgtacaatgacatagtgcctaaa

SEQ ID NO: 161878 - DNA, 25 bp, Saccharomyces pastorianus
agtttttgagttgtacaatgacata

SEQ ID NO: 161879 - DNA, 25 bp, Saccharomyces pastorianus
caaggccgtatagtttttgagttgt

SEQ ID NO: 161880 - DNA, 25 bp, Saccharomyces pastorianus
ttgatatttctattggaggtaaacc

SEQ ID NO: 161881 - DNA, 25 bp, Saccharomyces pastorianus
tctcaccgccagtaccattaaaatt

SEQ ID NO: 161882 - DNA, 25 bp, Saccharomyces pastorianus
attatcatcctcgaattttacaccg

SEQ ID NO: 161883 - DNA, 25 bp, Saccharomyces pastorianus
ggtaaaatcaccaaattgacacatg

SEQ ID NO: 161884 - DNA, 25 bp, Saccharomyces pastorianus
gacacatgaagtctttgatcactct

SEQ ID NO: 161885 - DNA, 25 bp, Saccharomyces pastorianus
tgtggagaatggaacccttgtacga

SEQ ID NO: 161886 - DNA, 25 bp, Saccharomyces pastorianus
attttacaccgtatatgctctcacc

SEQ ID NO: 161887 - DNA, 25 bp, Saccharomyces pastorianus
tgaagtctttgatcactctgtggag

SEQ ID NO: 161888 - DNA, 25 bp, Saccharomyces pastorianus
accgtatatgctctcaccgccagta

SEQ ID NO: 161889 - DNA, 25 bp, Saccharomyces pastorianus
tcaccgccagtaccattaaaattgg

SEQ ID NO: 161890 - DNA, 25 bp, Saccharomyces pastorianus
atcatcctcgaattttacaccgtat

SEQ ID NO: 161891 - DNA, 25 bp, Saccharomyces pastorianus
tcactctgtggagaatggaaccctt

SEQ ID NO: 161892 - DNA, 25 bp, Saccharomyces pastorianus
aatcaaatcacctttcgtttacaat

SEQ ID NO: 161893 - DNA, 25 bp, Saccharomyces pastorianus
tgactttgccttattctactctgaa

SEQ ID NO: 161894 - DNA, 25 bp, Saccharomyces pastorianus
tttcgtttacaatatcatcatcagt

SEQ ID NO: 161895 - DNA, 25 bp, Saccharomyces pastorianus
gccttattctactctgaattttgct

SEQ ID NO: 161896 - DNA, 25 bp, Saccharomyces pastorianus
aatcacctttcgtttacaatatcat

SEQ ID NO: 161897 - DNA, 25 bp, Saccharomyces pastorianus
gaattttgctttatcgttggttgaa

SEQ ID NO: 161898 - DNA, 25 bp, Saccharomyces pastorianus
gttactacaatcaaatcacctttcg

SEQ ID NO: 161899 - DNA, 25 bp, Saccharomyces pastorianus
actctgaattttgctttatcgttgg

SEQ ID NO: 161900 - DNA, 25 bp, Saccharomyces pastorianus
atgtgactttgccttattctactct

SEQ ID NO: 161901 - DNA, 25 bp, Saccharomyces pastorianus
catcatcagtatgtgactttgcctt

SEQ ID NO: 161902 - DNA, 25 bp, Saccharomyces pastorianus
cagtatgtgactttgccttattcta

SEQ ID NO: 161903 - DNA, 25 bp, Saccharomyces pastorianus
agtgtggttcttggatagcgtatca

SEQ ID NO: 161904 - DNA, 25 bp, Saccharomyces pastorianus
acagatgctttggtggctagtgctc

SEQ ID NO: 161905 - DNA, 25 bp, Saccharomyces pastorianus
aaaggcgccgtaactatactaactg

SEQ ID NO: 161906 - DNA, 25 bp, Saccharomyces pastorianus
gattcaccgtacttgataactttag

SEQ ID NO: 161907 - DNA, 25 bp, Saccharomyces pastorianus
atactaactgctgtatggcccctgt

SEQ ID NO: 161908 - DNA, 25 bp, Saccharomyces pastorianus
atatttggacaaactgcatcgcgaa

SEQ ID NO: 161909 - DNA, 25 bp, Saccharomyces pastorianus
ttctcatttcctgctcttttggata

SEQ ID NO: 161910 - DNA, 25 bp, Saccharomyces pastorianus
gagaggctgtgctcgaaatttcaga

SEQ ID NO: 161911 - DNA, 25 bp, Saccharomyces pastorianus
aagcagctcaccaacggcatggatt

SEQ ID NO: 161912 - DNA, 25 bp, Saccharomyces pastorianus
gatatcggaactcgtatgctttgac

SEQ ID NO: 161913 - DNA, 25 bp, Saccharomyces pastorianus
ggattttccatgttaaaggcgccgt

SEQ ID NO: 161914 - DNA, 25 bp, Saccharomyces pastorianus
atgtgatgaaggcaaaccattttgc

SEQ ID NO: 161915 - DNA, 25 bp, Saccharomyces pastorianus
gcaagacttcgacagggaaacggaa

SEQ ID NO: 161916 - DNA, 25 bp, Saccharomyces pastorianus
agtatcataacaagtccaagaccgg

SEQ ID NO: 161917 - DNA, 25 bp, Saccharomyces pastorianus
gaaggcaaaccattttgcaagaaat

SEQ ID NO: 161918 - DNA, 25 bp, Saccharomyces pastorianus
tcataacaagtccaagaccggttgc

SEQ ID NO: 161919 - DNA, 25 bp, Saccharomyces pastorianus
gaaattggactgtgtttacagccct

SEQ ID NO: 161920 - DNA, 25 bp, Saccharomyces pastorianus
agtgagcaagacttcgacagggaaa

SEQ ID NO: 161921 - DNA, 25 bp, Saccharomyces pastorianus
gtttacagccctattcagccaagaa

SEQ ID NO: 161922 - DNA, 25 bp, Saccharomyces pastorianus
gaagaagaaggattcttcgtcgtca

SEQ ID NO: 161923 - DNA, 25 bp, Saccharomyces pastorianus
gacagggaaacggaagtatcataac

SEQ ID NO: 161924 - DNA, 25 bp, Saccharomyces pastorianus
acagccctattcagccaagaagaag

SEQ ID NO: 161925 - DNA, 25 bp, Saccharomyces pastorianus
agatttgtcgaaagcttcagcccca

SEQ ID NO: 161926 - DNA, 25 bp, Saccharomyces pastorianus
atgcctctgctctcaaggaaatgac

SEQ ID NO: 161927 - DNA, 25 bp, Saccharomyces pastorianus
agcgcaaacgctcagacatctacaa

SEQ ID NO: 161928 - DNA, 25 bp, Saccharomyces pastorianus
taagggcactgcaacaataaatgat

SEQ ID NO: 161929 - DNA, 25 bp, Saccharomyces pastorianus
acaaacttcaatgtctgtaggcgac

SEQ ID NO: 161930 - DNA, 25 bp, Saccharomyces pastorianus
tcctataaaaccatcagcgcaaacg

SEQ ID NO: 161931 - DNA, 25 bp, Saccharomyces pastorianus
gtctgtaggcgacaatgctttagca

SEQ ID NO: 161932 - DNA, 25 bp, Saccharomyces pastorianus
ttcagccccatgtcgaggtgtattc

SEQ ID NO: 161933 - DNA, 25 bp, Saccharomyces pastorianus
aatgctttagcacttatgcctctgc

SEQ ID NO: 161934 - DNA, 25 bp, Saccharomyces pastorianus
gccagtccgtatgcacaaacttcaa

SEQ ID NO: 161935 - DNA, 25 bp, Saccharomyces pastorianus
aggtgtattcgccagtccgtatgca

SEQ ID NO: 161936 - DNA, 25 bp, Saccharomyces pastorianus
gctcaagtcggcagcatcgtatctt

SEQ ID NO: 161937 - DNA, 25 bp, Saccharomyces pastorianus
aagtcggcagcatcgtatcttgata

SEQ ID NO: 161938 - DNA, 25 bp, Saccharomyces pastorianus
tcgtatcttgatacagttccagatg

SEQ ID NO: 161939 - DNA, 25 bp, Saccharomyces pastorianus
tcttgatacagttccagatgagcat

SEQ ID NO: 161940 - DNA, 25 bp, Saccharomyces pastorianus
aaaggctcaagtcggcagcatcgta

SEQ ID NO: 161941 - DNA, 25 bp, Saccharomyces pastorianus
atatcgaaaggctcaagtcggcagc

SEQ ID NO: 161942 - DNA, 25 bp, Saccharomyces pastorianus
gacatcatatatcgaaaggctcaag

SEQ ID NO: 161943 - DNA, 25 bp, Saccharomyces pastorianus
atcgaaaggctcaagtcggcagcat

SEQ ID NO: 161944 - DNA, 25 bp, Saccharomyces pastorianus
ggcagcatcgtatcttgatacagtt

SEQ ID NO: 161945 - DNA, 25 bp, Saccharomyces pastorianus
gaaaggctcaagtcggcagcatcgt

SEQ ID NO: 161946 - DNA, 25 bp, Saccharomyces pastorianus
gtcggcagcatcgtatcttgataca

SEQ ID NO: 161947 - DNA, 25 bp, Saccharomyces pastorianus
aagttaatatcttacctgaggctaa

SEQ ID NO: 161948 - DNA, 25 bp, Saccharomyces pastorianus
ggtgctatcattaagtgtggacatt

SEQ ID NO: 161949 - DNA, 25 bp, Saccharomyces pastorianus
gctgatccgccacaagttattctat

SEQ ID NO: 161950 - DNA, 25 bp, Saccharomyces pastorianus
gctacgagcccatagtaaatgccct

SEQ ID NO: 161951 - DNA, 25 bp, Saccharomyces pastorianus
attgagctgctctatctgtttggga

SEQ ID NO: 161952 - DNA, 25 bp, Saccharomyces pastorianus
gagttgtatccttacgtggctacga

SEQ ID NO: 161953 - DNA, 25 bp, Saccharomyces pastorianus
ggcgccgattcgtctcaagataatt

SEQ ID NO: 161954 - DNA, 25 bp, Saccharomyces pastorianus
tataaataacttcatacgccagcct

SEQ ID NO: 161955 - DNA, 25 bp, Saccharomyces pastorianus
ggcatgtctatctaatacagccaat

SEQ ID NO: 161956 - DNA, 25 bp, Saccharomyces pastorianus
gttgtatcacattgaacacttggca

SEQ ID NO: 161957 - DNA, 25 bp, Saccharomyces pastorianus
aatgccctatatgcaaaggtttctg

SEQ ID NO: 161958 - DNA, 25 bp, Saccharomyces pastorianus
gatccagacgttaaagtcgttcaca

SEQ ID NO: 161959 - DNA, 25 bp, Saccharomyces pastorianus
ctatataaagtaactgccacggcag

SEQ ID NO: 161960 - DNA, 25 bp, Saccharomyces pastorianus
ggtcaccactccgattttgaactag

SEQ ID NO: 161961 - DNA, 25 bp, Saccharomyces pastorianus
agagactttcttcgcgttacatgat

SEQ ID NO: 161962 - DNA, 25 bp, Saccharomyces pastorianus
aagcgtgttgttagccttattatga

SEQ ID NO: 161963 - DNA, 25 bp, Saccharomyces pastorianus
atggtatgggacaacacgatgaatc

SEQ ID NO: 161964 - DNA, 25 bp, Saccharomyces pastorianus
gattacactccagagactttcttcg

SEQ ID NO: 161965 - DNA, 25 bp, Saccharomyces pastorianus
accacctgatggtttatcctgggag

SEQ ID NO: 161966 - DNA, 25 bp, Saccharomyces pastorianus
tgtattttctttggctttcactcta

SEQ ID NO: 161967 - DNA, 25 bp, Saccharomyces pastorianus
ggaaaatgaggcaccacctgatggt

SEQ ID NO: 161968 - DNA, 25 bp, Saccharomyces pastorianus
aaaacgatattctatctctctacgg

SEQ ID NO: 161969 - DNA, 25 bp, Saccharomyces pastorianus
ttcgtcccagaagaggtgtcccgtt

SEQ ID NO: 161970 - DNA, 25 bp, Saccharomyces pastorianus
ggattatccctctgacatggcaaat

SEQ ID NO: 161971 - DNA, 25 bp, Saccharomyces pastorianus
tgccccattgaccattcaagcatga

SEQ ID NO: 161972 - DNA, 25 bp, Saccharomyces pastorianus
ttccccattttccactaaagctatg

SEQ ID NO: 161973 - DNA, 25 bp, Saccharomyces pastorianus
gagatgttgccaccaaagcgcgtta

SEQ ID NO: 161974 - DNA, 25 bp, Saccharomyces pastorianus
gcgcgttatcgcattattcatcgag

SEQ ID NO: 161975 - DNA, 25 bp, Saccharomyces pastorianus
attgtcttcgatgaatcccacagtt

SEQ ID NO: 161976 - DNA, 25 bp, Saccharomyces pastorianus
aaatacagcggccttaccagcttca

SEQ ID NO: 161977 - DNA, 25 bp, Saccharomyces pastorianus
caaattcttcttcgaacccggcaag

SEQ ID NO: 161978 - DNA, 25 bp, Saccharomyces pastorianus
gaatccgcctcagtcaaaatgtcct

SEQ ID NO: 161979 - DNA, 25 bp, Saccharomyces pastorianus
aatgatgccgcccaaggacgagacg

SEQ ID NO: 161980 - DNA, 25 bp, Saccharomyces pastorianus
ggatcctaatatttcgaacaaccta

SEQ ID NO: 161981 - DNA, 25 bp, Saccharomyces pastorianus
gatttgatgtgttgttcgcagcctt

SEQ ID NO: 161982 - DNA, 25 bp, Saccharomyces pastorianus
gatatctcgtgatctggcagattct

SEQ ID NO: 161983 - DNA, 25 bp, Saccharomyces pastorianus
agatgaaggtatccctagtgactgg

SEQ ID NO: 161984 - DNA, 25 bp, Saccharomyces pastorianus
tggcagattctagtgctgatcaaat

SEQ ID NO: 161985 - DNA, 25 bp, Saccharomyces pastorianus
aagactcccacttgatatctcgtga

SEQ ID NO: 161986 - DNA, 25 bp, Saccharomyces pastorianus
gttcgcagccttcttatgcaagaga

SEQ ID NO: 161987 - DNA, 25 bp, Saccharomyces pastorianus
gagagcacccaaagttatcattttt

SEQ ID NO: 161988 - DNA, 25 bp, Saccharomyces pastorianus
agggtcgttagaattccagcatatt

SEQ ID NO: 161989 - DNA, 25 bp, Saccharomyces pastorianus
caacctaagtatcttctatacgggt

SEQ ID NO: 161990 - DNA, 25 bp, Saccharomyces pastorianus
gatgcggatgacgaagactcccact

SEQ ID NO: 161991 - DNA, 25 bp, Saccharomyces pastorianus
atctcaaccgaagagggagagaaaa

SEQ ID NO: 161992 - DNA, 25 bp, Saccharomyces pastorianus
atgaaaggcaaatctcaaccgaaga

SEQ ID NO: 161993 - DNA, 25 bp, Saccharomyces pastorianus
aaatctcaaccgaagagggagagaa

SEQ ID NO: 161994 - DNA, 25 bp, Saccharomyces pastorianus
gttatattgtgcattgttggtaaca

SEQ ID NO: 161995 - DNA, 25 bp, Saccharomyces pastorianus
aaggcaaatctcaaccgaagaggga

SEQ ID NO: 161996 - DNA, 25 bp, Saccharomyces pastorianus
ggcaaatctcaaccgaagagggaga

SEQ ID NO: 161997 - DNA, 25 bp, Saccharomyces pastorianus
aggcaaatctcaaccgaagagggag

SEQ ID NO: 161998 - DNA, 25 bp, Saccharomyces pastorianus
gaaaggcaaatctcaaccgaagagg

SEQ ID NO: 161999 - DNA, 25 bp, Saccharomyces pastorianus
tatattgtgcattgttggtaacaaa

SEQ ID NO: 162000 - DNA, 25 bp, Saccharomyces pastorianus
gatgaaaggcaaatctcaaccgaag

SEQ ID NO: 162001 - DNA, 25 bp, Saccharomyces pastorianus
atgttatattgtgcattgttggtaa

SEQ ID NO: 162002 - DNA, 25 bp, Saccharomyces pastorianus
gccacgattggtatagattttcttt

SEQ ID NO: 162003 - DNA, 25 bp, Saccharomyces pastorianus
catcgctgatcactagatttatgta

SEQ ID NO: 162004 - DNA, 25 bp, Saccharomyces pastorianus
gcagatccgggaaatcattgacaaa

SEQ ID NO: 162005 - DNA, 25 bp, Saccharomyces pastorianus
gctattatcgtttacgacattacga

SEQ ID NO: 162006 - DNA, 25 bp, Saccharomyces pastorianus
ttggtatagattttctttccaagac

SEQ ID NO: 162007 - DNA, 25 bp, Saccharomyces pastorianus
atgatacgttcgatgatcattacca

SEQ ID NO: 162008 - DNA, 25 bp, Saccharomyces pastorianus
gatcattaataccttcatatatcag

SEQ ID NO: 162009 - DNA, 25 bp, Saccharomyces pastorianus
atgatcattaccaagccacgattgg

SEQ ID NO: 162010 - DNA, 25 bp, Saccharomyces pastorianus
tatatcagagattcgagagttgcta

SEQ ID NO: 162011 - DNA, 25 bp, Saccharomyces pastorianus
gagattcgagagttgctattatcgt

SEQ ID NO: 162012 - DNA, 25 bp, Saccharomyces pastorianus
ggaaaaacatcgctgatcactagat

SEQ ID NO: 162013 - DNA, 25 bp, Saccharomyces pastorianus
agcgaccagtagaatcagcctcttg

SEQ ID NO: 162014 - DNA, 25 bp, Saccharomyces pastorianus
agggaaagctcatctccggaaattt

SEQ ID NO: 162015 - DNA, 25 bp, Saccharomyces pastorianus
acaacctcattaccattttttccag

SEQ ID NO: 162016 - DNA, 25 bp, Saccharomyces pastorianus
acgagacgccattacacgatgatga

SEQ ID NO: 162017 - DNA, 25 bp, Saccharomyces pastorianus
tgaaccgcctgattctcaaactaat

SEQ ID NO: 162018 - DNA, 25 bp, Saccharomyces pastorianus
ggaaagcgctggctgactcagatat

SEQ ID NO: 162019 - DNA, 25 bp, Saccharomyces pastorianus
gctctcagttatccattgcaaccat

SEQ ID NO: 162020 - DNA, 25 bp, Saccharomyces pastorianus
atccgaaaccagagccttttagcag

SEQ ID NO: 162021 - DNA, 25 bp, Saccharomyces pastorianus
tgagcatagaacttccttcacctac

SEQ ID NO: 162022 - DNA, 25 bp, Saccharomyces pastorianus
gaggacatgtccgatagctcatatg

SEQ ID NO: 162023 - DNA, 25 bp, Saccharomyces pastorianus
tttagcaggcctcccataatagatg

SEQ ID NO: 162024 - DNA, 25 bp, Saccharomyces pastorianus
tacccgcaggtgaaaattttagcaa

SEQ ID NO: 162025 - DNA, 25 bp, Saccharomyces pastorianus
caatgtattgttgttccagggtttt

SEQ ID NO: 162026 - DNA, 25 bp, Saccharomyces pastorianus
gcaggagcaggaactattcaatgta

SEQ ID NO: 162027 - DNA, 25 bp, Saccharomyces pastorianus
tgcagtgtgcaggagcaggaactat

SEQ ID NO: 162028 - DNA, 25 bp, Saccharomyces pastorianus
tgttgttccagggtttttgttcgca

SEQ ID NO: 162029 - DNA, 25 bp, Saccharomyces pastorianus
tctcaacgtgcagtgtgcaggagca

SEQ ID NO: 162030 - DNA, 25 bp, Saccharomyces pastorianus
tgtgcaggagcaggaactattcaat

SEQ ID NO: 162031 - DNA, 25 bp, Saccharomyces pastorianus
tgaccgacggtacccgcaggtgaaa

SEQ ID NO: 162032 - DNA, 25 bp, Saccharomyces pastorianus
tttttgttcgcaacccacgtcttga

SEQ ID NO: 162033 - DNA, 25 bp, Saccharomyces pastorianus
attcaatgtattgttgttccagggt

SEQ ID NO: 162034 - DNA, 25 bp, Saccharomyces pastorianus
gcaacccacgtcttgaccgacggta

SEQ ID NO: 162035 - DNA, 25 bp, Saccharomyces pastorianus
ggcacagggatttagtccgtgtttg

SEQ ID NO: 162036 - DNA, 25 bp, Saccharomyces pastorianus
agaacgttccaaactggcacaggga

SEQ ID NO: 162037 - DNA, 25 bp, Saccharomyces pastorianus
ttgtgaaaacatcccaattgtcttg

SEQ ID NO: 162038 - DNA, 25 bp, Saccharomyces pastorianus
acagggatttagtccgtgtttgtga

SEQ ID NO: 162039 - DNA, 25 bp, Saccharomyces pastorianus
agtccgtgtttgtgaaaacatccca

SEQ ID NO: 162040 - DNA, 25 bp, Saccharomyces pastorianus
gtttgtgaaaacatcccaattgtct

SEQ ID NO: 162041 - DNA, 25 bp, Saccharomyces pastorianus
cagggatttagtccgtgtttgtgaa

SEQ ID NO: 162042 - DNA, 25 bp, Saccharomyces pastorianus
atcccaattgtcttgtgtggtaaca

SEQ ID NO: 162043 - DNA, 25 bp, Saccharomyces pastorianus
gcacagggatttagtccgtgtttgt

SEQ ID NO: 162044 - DNA, 25 bp, Saccharomyces pastorianus
aagacaggtcaaggccaagactatc

SEQ ID NO: 162045 - DNA, 25 bp, Saccharomyces pastorianus
ccgtgtttgtgaaaacatcccaatt

SEQ ID NO: 162046 - DNA, 25 bp, Saccharomyces pastorianus
ttatccttttacaccaactttggtg

SEQ ID NO: 162047 - DNA, 25 bp, Saccharomyces pastorianus
gacggttactacattaacgcccaat

SEQ ID NO: 162048 - DNA, 25 bp, Saccharomyces pastorianus
tcgatgtacttccagaattacttac

SEQ ID NO: 162049 - DNA, 25 bp, Saccharomyces pastorianus
aatttgatgtctgggatactgccgg

SEQ ID NO: 162050 - DNA, 25 bp, Saccharomyces pastorianus
acattaacgcccaatgtgccatcat

SEQ ID NO: 162051 - DNA, 25 bp, Saccharomyces pastorianus
cgccaccattggtgtcgaagtgcat

SEQ ID NO: 162052 - DNA, 25 bp, Saccharomyces pastorianus
gtacatcgccaccattggtgtcgaa

SEQ ID NO: 162053 - DNA, 25 bp, Saccharomyces pastorianus
gtgccatcatcatgttcgatgtact

SEQ ID NO: 162054 - DNA, 25 bp, Saccharomyces pastorianus
gaagtacatcgccaccattggtgtc

SEQ ID NO: 162055 - DNA, 25 bp, Saccharomyces pastorianus
taacgcccaatgtgccatcatcatg

SEQ ID NO: 162056 - DNA, 25 bp, Saccharomyces pastorianus
atcatgttcgatgtacttccagaat

SEQ ID NO: 162057 - DNA, 25 bp, Saccharomyces pastorianus
tttccccaaaagctcataatcgatc

SEQ ID NO: 162058 - DNA, 25 bp, Saccharomyces pastorianus
aatcagcttaccaatgtcacataaa

SEQ ID NO: 162059 - DNA, 25 bp, Saccharomyces pastorianus
atgggcagttctcgcgttattcgtc

SEQ ID NO: 162060 - DNA, 25 bp, Saccharomyces pastorianus
aaacaacactcttccggtacgacag

SEQ ID NO: 162061 - DNA, 25 bp, Saccharomyces pastorianus
tacgacagccgctgcggcaattact

SEQ ID NO: 162062 - DNA, 25 bp, Saccharomyces pastorianus
ttatgcccaatcagcttaccaatgt

SEQ ID NO: 162063 - DNA, 25 bp, Saccharomyces pastorianus
tgcggcaattacttttccccaaaag

SEQ ID NO: 162064 - DNA, 25 bp, Saccharomyces pastorianus
ccactattatccctttttggtaatg

SEQ ID NO: 162065 - DNA, 25 bp, Saccharomyces pastorianus
taatcgatcaattaacgcgtaaacg

SEQ ID NO: 162066 - DNA, 25 bp, Saccharomyces pastorianus
tcgcgttattcgtcatcaggcaagt

SEQ ID NO: 162067 - DNA, 25 bp, Saccharomyces pastorianus
atgtcacataaaggaaccactatta

SEQ ID NO: 162068 - DNA, 25 bp, Saccharomyces pastorianus
aagggcgccaatttcatccctgata

SEQ ID NO: 162069 - DNA, 25 bp, Saccharomyces pastorianus
aatccatgattgatactgtcgcaaa

SEQ ID NO: 162070 - DNA, 25 bp, Saccharomyces pastorianus
gaaactacctatcatttgcttgaaa

SEQ ID NO: 162071 - DNA, 25 bp, Saccharomyces pastorianus
gctgcactacttgcggcgttaagga

SEQ ID NO: 162072 - DNA, 25 bp, Saccharomyces pastorianus
aacaagtagcggctcaagttccggg

SEQ ID NO: 162073 - DNA, 25 bp, Saccharomyces pastorianus
gggaatgctgtttccttgacaacca

SEQ ID NO: 162074 - DNA, 25 bp, Saccharomyces pastorianus
ataacccgcatggaactgaccactt

SEQ ID NO: 162075 - DNA, 25 bp, Saccharomyces pastorianus
gctggacgctttatgatccggcata

SEQ ID NO: 162076 - DNA, 25 bp, Saccharomyces pastorianus
aaccaccatcaacctgttgttcggt

SEQ ID NO: 162077 - DNA, 25 bp, Saccharomyces pastorianus
atgaccccgatcactggattgcaaa

SEQ ID NO: 162078 - DNA, 25 bp, Saccharomyces pastorianus
tgttgttcggttccttagtccacga

SEQ ID NO: 162079 - DNA, 25 bp, Saccharomyces pastorianus
cacagttttcatgaggatggcgcct

SEQ ID NO: 162080 - DNA, 25 bp, Saccharomyces pastorianus
aacttaattagtcatttgccaacca

SEQ ID NO: 162081 - DNA, 25 bp, Saccharomyces pastorianus
taacagacgctttacttaaccttat

SEQ ID NO: 162082 - DNA, 25 bp, Saccharomyces pastorianus
tttcatcgagcgtgttcaattggac

SEQ ID NO: 162083 - DNA, 25 bp, Saccharomyces pastorianus
gacgaccctgtattacacgaaggaa

SEQ ID NO: 162084 - DNA, 25 bp, Saccharomyces pastorianus
gatggcgccttgactaacttaatta

SEQ ID NO: 162085 - DNA, 25 bp, Saccharomyces pastorianus
gtgccatttgccatttgcgatcatg

SEQ ID NO: 162086 - DNA, 25 bp, Saccharomyces pastorianus
aaggtgccaccttttcgacacttcg

SEQ ID NO: 162087 - DNA, 25 bp, Saccharomyces pastorianus
aatatcgacagcttcacgtgccatt

SEQ ID NO: 162088 - DNA, 25 bp, Saccharomyces pastorianus
gtatctatgtatctgacgaccctgt

SEQ ID NO: 162089 - DNA, 25 bp, Saccharomyces pastorianus
gacacttcggttattatgttacaca

SEQ ID NO: 162090 - DNA, 25 bp, Saccharomyces pastorianus
tactgttcaactacacgccggccaa

SEQ ID NO: 162091 - DNA, 25 bp, Saccharomyces pastorianus
ctacacgccggccaagagaacactg

SEQ ID NO: 162092 - DNA, 25 bp, Saccharomyces pastorianus
cgatactgttcaactacacgccggc

SEQ ID NO: 162093 - DNA, 25 bp, Saccharomyces pastorianus
atgccatctcatttcgatactgttc

SEQ ID NO: 162094 - DNA, 25 bp, Saccharomyces pastorianus
acacgccggccaagagaacactggt

SEQ ID NO: 162095 - DNA, 25 bp, Saccharomyces pastorianus
tgttcaactacacgccggccaagag

SEQ ID NO: 162096 - DNA, 25 bp, Saccharomyces pastorianus
ctgttcaactacacgccggccaaga

SEQ ID NO: 162097 - DNA, 25 bp, Saccharomyces pastorianus
actgttcaactacacgccggccaag

SEQ ID NO: 162098 - DNA, 25 bp, Saccharomyces pastorianus
atactgttcaactacacgccggcca

SEQ ID NO: 162099 - DNA, 25 bp, Saccharomyces pastorianus
gatactgttcaactacacgccggcc

SEQ ID NO: 162100 - DNA, 25 bp, Saccharomyces pastorianus
tacacgccggccaagagaacactgg

SEQ ID NO: 162101 - DNA, 25 bp, Saccharomyces pastorianus
atatttcgattcagcttttcacaga

SEQ ID NO: 162102 - DNA, 25 bp, Saccharomyces pastorianus
gaggacagttctacgagatcgaagc

SEQ ID NO: 162103 - DNA, 25 bp, Saccharomyces pastorianus
ttaggctgcaggctaatgcaacatg

SEQ ID NO: 162104 - DNA, 25 bp, Saccharomyces pastorianus
atcaagggtagttgccccaagtcgc

SEQ ID NO: 162105 - DNA, 25 bp, Saccharomyces pastorianus
aattcaatgaggctggtccttcatc

SEQ ID NO: 162106 - DNA, 25 bp, Saccharomyces pastorianus
aaacggctcacaagatgttccttaa

SEQ ID NO: 162107 - DNA, 25 bp, Saccharomyces pastorianus
actggccaagagtgacatcttttat

SEQ ID NO: 162108 - DNA, 25 bp, Saccharomyces pastorianus
aatagtcttcacacagttaggctgc

SEQ ID NO: 162109 - DNA, 25 bp, Saccharomyces pastorianus
aggtctaatctcttcattgtcaagg

SEQ ID NO: 162110 - DNA, 25 bp, Saccharomyces pastorianus
cattaaattctttatctgctccaga

SEQ ID NO: 162111 - DNA, 25 bp, Saccharomyces pastorianus
aagtcgctcttctatactggccaag

SEQ ID NO: 162112 - DNA, 25 bp, Saccharomyces pastorianus
ggatctgaggactatattgaacgca

SEQ ID NO: 162113 - DNA, 25 bp, Saccharomyces pastorianus
tatgccctgatttacaggtactact

SEQ ID NO: 162114 - DNA, 25 bp, Saccharomyces pastorianus
gaaactagtcttgtctatgactcaa

SEQ ID NO: 162115 - DNA, 25 bp, Saccharomyces pastorianus
gatttctaatcttgcgtgtattatt

SEQ ID NO: 162116 - DNA, 25 bp, Saccharomyces pastorianus
actccgacgattttaaagatgcttg

SEQ ID NO: 162117 - DNA, 25 bp, Saccharomyces pastorianus
gtcatgaacttgttgatgcggcttt

SEQ ID NO: 162118 - DNA, 25 bp, Saccharomyces pastorianus
tgaatttttaaacaactccgacgat

SEQ ID NO: 162119 - DNA, 25 bp, Saccharomyces pastorianus
gcactctccttatttcacgtattgg

SEQ ID NO: 162120 - DNA, 25 bp, Saccharomyces pastorianus
atgaacaattggcactctccttatt

SEQ ID NO: 162121 - DNA, 25 bp, Saccharomyces pastorianus
ggtttgatatttattccgaggacta

SEQ ID NO: 162122 - DNA, 25 bp, Saccharomyces pastorianus
gatgcggctttcaatgttacaatgt

SEQ ID NO: 162123 - DNA, 25 bp, Saccharomyces pastorianus
aggattatcaggcatcacctccgaa

SEQ ID NO: 162124 - DNA, 25 bp, Saccharomyces pastorianus
gagtgagccatctccgcgagaaagt

SEQ ID NO: 162125 - DNA, 25 bp, Saccharomyces pastorianus
agctgcagacgtactttactcgcca

SEQ ID NO: 162126 - DNA, 25 bp, Saccharomyces pastorianus
aaatttgctctcaactctggtcttg

SEQ ID NO: 162127 - DNA, 25 bp, Saccharomyces pastorianus
cagtggttgtagcatcgccatcaat

SEQ ID NO: 162128 - DNA, 25 bp, Saccharomyces pastorianus
agtactgctgttagttttccatcct

SEQ ID NO: 162129 - DNA, 25 bp, Saccharomyces pastorianus
aagccgtatgcaaatattccgccag

SEQ ID NO: 162130 - DNA, 25 bp, Saccharomyces pastorianus
gtttgcctctgaaagttgtctcgaa

SEQ ID NO: 162131 - DNA, 25 bp, Saccharomyces pastorianus
tactcgccaaccgtgaccaaaatga

SEQ ID NO: 162132 - DNA, 25 bp, Saccharomyces pastorianus
aggtaacacattgccgctaattggt

SEQ ID NO: 162133 - DNA, 25 bp, Saccharomyces pastorianus
attctgatgtcaactcaaccacgca

SEQ ID NO: 162134 - DNA, 25 bp, Saccharomyces pastorianus
attatagaggcctctgtaccagaag

SEQ ID NO: 162135 - DNA, 25 bp, Saccharomyces pastorianus
attcgggtgcggatgcatcactaaa

SEQ ID NO: 162136 - DNA, 25 bp, Saccharomyces pastorianus
aattttggcaactgacgactgatgt

SEQ ID NO: 162137 - DNA, 25 bp, Saccharomyces pastorianus
tatgggcgtgaatggtattatatcc

SEQ ID NO: 162138 - DNA, 25 bp, Saccharomyces pastorianus
gacgagggtgatctaaatttctatt

SEQ ID NO: 162139 - DNA, 25 bp, Saccharomyces pastorianus
aaagcacaatctaaactgtctcgat

SEQ ID NO: 162140 - DNA, 25 bp, Saccharomyces pastorianus
gaaggaatcaaaaccgccaaaatag

SEQ ID NO: 162141 - DNA, 25 bp, Saccharomyces pastorianus
aactgtctcgattgaaggacgcgaa

SEQ ID NO: 162142 - DNA, 25 bp, Saccharomyces pastorianus
gacgcgaagttccataaattgattc

SEQ ID NO: 162143 - DNA, 25 bp, Saccharomyces pastorianus
attatatccattgaagtcttccgag

SEQ ID NO: 162144 - DNA, 25 bp, Saccharomyces pastorianus
aagattgacagattcgggtgcggat

SEQ ID NO: 162145 - DNA, 25 bp, Saccharomyces pastorianus
aaatgtggtcacttcaatggcctcg

SEQ ID NO: 162146 - DNA, 25 bp, Saccharomyces pastorianus
aagcttgacattgatctacagacca

SEQ ID NO: 162147 - DNA, 25 bp, Saccharomyces pastorianus
gaaaatcttattcgagttcattcaa

SEQ ID NO: 162148 - DNA, 25 bp, Saccharomyces pastorianus
atgtggtcacttcaatggcctcgat

SEQ ID NO: 162149 - DNA, 25 bp, Saccharomyces pastorianus
acagaccaacagtacttacaaagaa

SEQ ID NO: 162150 - DNA, 25 bp, Saccharomyces pastorianus
caatggcctcgatgaaattctaact

SEQ ID NO: 162151 - DNA, 25 bp, Saccharomyces pastorianus
gacattgatctacagaccaacagta

SEQ ID NO: 162152 - DNA, 25 bp, Saccharomyces pastorianus
ggtcacttcaatggcctcgatgaaa

SEQ ID NO: 162153 - DNA, 25 bp, Saccharomyces pastorianus
ggcctcgatgaaattctaactacgt

SEQ ID NO: 162154 - DNA, 25 bp, Saccharomyces pastorianus
attcgagttcattcaagacaagctt

SEQ ID NO: 162155 - DNA, 25 bp, Saccharomyces pastorianus
gatctacagaccaacagtacttaca

SEQ ID NO: 162156 - DNA, 25 bp, Saccharomyces pastorianus
aaatgggctcaacgatcatcctcat

SEQ ID NO: 162157 - DNA, 25 bp, Saccharomyces pastorianus
gctcaatataaatccctctccttat

SEQ ID NO: 162158 - DNA, 25 bp, Saccharomyces pastorianus
tcttccttatagcaagatcctccct

SEQ ID NO: 162159 - DNA, 25 bp, Saccharomyces pastorianus
agatgtaacgaacctcatctgccgc

SEQ ID NO: 162160 - DNA, 25 bp, Saccharomyces pastorianus
taatgggcagtttttcactcaaatc

SEQ ID NO: 162161 - DNA, 25 bp, Saccharomyces pastorianus
atccgcaactgctgcgcaaatcaaa

SEQ ID NO: 162162 - DNA, 25 bp, Saccharomyces pastorianus
gacacatcaacaatacttacacaag

SEQ ID NO: 162163 - DNA, 25 bp, Saccharomyces pastorianus
ctctccttatcttccttatagcaag

SEQ ID NO: 162164 - DNA, 25 bp, Saccharomyces pastorianus
atgttccacagtttggtcggtacat

SEQ ID NO: 162165 - DNA, 25 bp, Saccharomyces pastorianus
acaacttacagaacccgtgacacat

SEQ ID NO: 162166 - DNA, 25 bp, Saccharomyces pastorianus
ggtcggtacatacgcattcgttgat

SEQ ID NO: 162167 - DNA, 25 bp, Saccharomyces pastorianus
atctttatagtgtgtatcagcattg

SEQ ID NO: 162168 - DNA, 25 bp, Saccharomyces pastorianus
tattccgcatagttgaccactttag

SEQ ID NO: 162169 - DNA, 25 bp, Saccharomyces pastorianus
agttgaccactttagcccttttatg

SEQ ID NO: 162170 - DNA, 25 bp, Saccharomyces pastorianus
gaattcatcaaagagatcgttgtca

SEQ ID NO: 162171 - DNA, 25 bp, Saccharomyces pastorianus
gatcgttgtcatattccgcatagtt

SEQ ID NO: 162172 - DNA, 25 bp, Saccharomyces pastorianus
gaaccgttcatattgaattcatcaa

SEQ ID NO: 162173 - DNA, 25 bp, Saccharomyces pastorianus
atgagacactgcattatctttatag

SEQ ID NO: 162174 - DNA, 25 bp, Saccharomyces pastorianus
agcattgttgaaattagaaccgttc

SEQ ID NO: 162175 - DNA, 25 bp, Saccharomyces pastorianus
ccatcatcttcgtttgtcaatctgt

SEQ ID NO: 162176 - DNA, 25 bp, Saccharomyces pastorianus
ccttgtttgttgagccattgtaaag

SEQ ID NO: 162177 - DNA, 25 bp, Saccharomyces pastorianus
gggataccatcatcttcgtttgtca

SEQ ID NO: 162178 - DNA, 25 bp, Saccharomyces pastorianus
ggtgggcatgttccttttaacgtat

SEQ ID NO: 162179 - DNA, 25 bp, Saccharomyces pastorianus
aaggcgagaacttcggcagatccct

SEQ ID NO: 162180 - DNA, 25 bp, Saccharomyces pastorianus
tggctacttttaccaccgagaagct

SEQ ID NO: 162181 - DNA, 25 bp, Saccharomyces pastorianus
gtgccattcaagtgcccaattcaaa

SEQ ID NO: 162182 - DNA, 25 bp, Saccharomyces pastorianus
tctacgtcacgggtttagaccttgg

SEQ ID NO: 162183 - DNA, 25 bp, Saccharomyces pastorianus
gattccaagcctatccgttttactt

SEQ ID NO: 162184 - DNA, 25 bp, Saccharomyces pastorianus
gtaatggcgtattatccgattccaa

SEQ ID NO: 162185 - DNA, 25 bp, Saccharomyces pastorianus
gtcaggctgcttgttttctacgtca

SEQ ID NO: 162186 - DNA, 25 bp, Saccharomyces pastorianus
gaccagggtatttttgctacagtgc

SEQ ID NO: 162187 - DNA, 25 bp, Saccharomyces pastorianus
taacgtatcactcaccatggtctaa

SEQ ID NO: 162188 - DNA, 25 bp, Saccharomyces pastorianus
atacgtgatgataacctggctactt

SEQ ID NO: 162189 - DNA, 25 bp, Saccharomyces pastorianus
gatacggttcagattcaaccacaga

SEQ ID NO: 162190 - DNA, 25 bp, Saccharomyces pastorianus
aaaagcatcctaagcatcatcatca

SEQ ID NO: 162191 - DNA, 25 bp, Saccharomyces pastorianus
ccaattattccatacgtcttagccg

SEQ ID NO: 162192 - DNA, 25 bp, Saccharomyces pastorianus
attcctctatagatgcaccttttaa

SEQ ID NO: 162193 - DNA, 25 bp, Saccharomyces pastorianus
gtcttagccgatgcaaattcctcta

SEQ ID NO: 162194 - DNA, 25 bp, Saccharomyces pastorianus
gatgatgacgcggattttagatcta

SEQ ID NO: 162195 - DNA, 25 bp, Saccharomyces pastorianus
atcaccatcatcacagtcgtaaaga

SEQ ID NO: 162196 - DNA, 25 bp, Saccharomyces pastorianus
acgaggaattgattcctccacccga

SEQ ID NO: 162197 - DNA, 25 bp, Saccharomyces pastorianus
actttccgcagaagtgtcttccgaa

SEQ ID NO: 162198 - DNA, 25 bp, Saccharomyces pastorianus
gaaccaagacgactttcaaccactt

SEQ ID NO: 162199 - DNA, 25 bp, Saccharomyces pastorianus
aaaccgccatctgcagacgaggaat

SEQ ID NO: 162200 - DNA, 25 bp, Saccharomyces pastorianus
agaaacctctgatggctcttctaac

SEQ ID NO: 162201 - DNA, 25 bp, Saccharomyces pastorianus
ggctcttctaaccatggtgttctta

SEQ ID NO: 162202 - DNA, 25 bp, Saccharomyces pastorianus
tggctggagcagcaactctgttaga

SEQ ID NO: 162203 - DNA, 25 bp, Saccharomyces pastorianus
ggcaacaacttttcgaagtctggca

SEQ ID NO: 162204 - DNA, 25 bp, Saccharomyces pastorianus
aattcctttctgacttcgtgcattt

SEQ ID NO: 162205 - DNA, 25 bp, Saccharomyces pastorianus
ttgacggctctaacccagatgtctt

SEQ ID NO: 162206 - DNA, 25 bp, Saccharomyces pastorianus
ggtgttcttacccatcaagacgaca

SEQ ID NO: 162207 - DNA, 25 bp, Saccharomyces pastorianus
agaagtcttacctggttccatacca

SEQ ID NO: 162208 - DNA, 25 bp, Saccharomyces pastorianus
ggtattccggttatgtatcttatgc

SEQ ID NO: 162209 - DNA, 25 bp, Saccharomyces pastorianus
agatgtcttctggagcaacggcacc

SEQ ID NO: 162210 - DNA, 25 bp, Saccharomyces pastorianus
tccataccagtgttgacggctctaa

SEQ ID NO: 162211 - DNA, 25 bp, Saccharomyces pastorianus
tagctatggtggtcagtatacccct

SEQ ID NO: 162212 - DNA, 25 bp, Saccharomyces pastorianus
actctaggtcctcgagaatgtctcc

SEQ ID NO: 162213 - DNA, 25 bp, Saccharomyces pastorianus
atctcccgtttcgatcgagcaaatc

SEQ ID NO: 162214 - DNA, 25 bp, Saccharomyces pastorianus
ttgaccaacagactcgggttccaaa

SEQ ID NO: 162215 - DNA, 25 bp, Saccharomyces pastorianus
aatgctattgctatggccttgccaa

SEQ ID NO: 162216 - DNA, 25 bp, Saccharomyces pastorianus
tcggattttagcagttacggccctc

SEQ ID NO: 162217 - DNA, 25 bp, Saccharomyces pastorianus
tgccaaatgaaccttatcccgcttg

SEQ ID NO: 162218 - DNA, 25 bp, Saccharomyces pastorianus
cattggtggcgatactgctaactat

SEQ ID NO: 162219 - DNA, 25 bp, Saccharomyces pastorianus
gaatgtctcctgatcaagctttact

SEQ ID NO: 162220 - DNA, 25 bp, Saccharomyces pastorianus
tactatctttacatgccgactacat

SEQ ID NO: 162221 - DNA, 25 bp, Saccharomyces pastorianus
ttatggttctcttggactctaggtc

SEQ ID NO: 162222 - DNA, 25 bp, Saccharomyces pastorianus
cacttcgtacgagaatttgggcttc

SEQ ID NO: 162223 - DNA, 25 bp, Saccharomyces pastorianus
aatctgctgctccagaatatacact

SEQ ID NO: 162224 - DNA, 25 bp, Saccharomyces pastorianus
gaagaaaccgctgcctatgaaggaa

SEQ ID NO: 162225 - DNA, 25 bp, Saccharomyces pastorianus
gaggtcgcagactctatatcgtacc

SEQ ID NO: 162226 - DNA, 25 bp, Saccharomyces pastorianus
tgggcttctttgaggtcgcagactc

SEQ ID NO: 162227 - DNA, 25 bp, Saccharomyces pastorianus
agagctatcaaattactgtatcgtg

SEQ ID NO: 162228 - DNA, 25 bp, Saccharomyces pastorianus
gaggagccaagaatctattccgctt

SEQ ID NO: 162229 - DNA, 25 bp, Saccharomyces pastorianus
gtttaaatttttggtctctatgcag

SEQ ID NO: 162230 - DNA, 25 bp, Saccharomyces pastorianus
gcttacccagacttacaaattgcct

SEQ ID NO: 162231 - DNA, 25 bp, Saccharomyces pastorianus
tgtttggtggtaatgctgaaggctt

SEQ ID NO: 162232 - DNA, 25 bp, Saccharomyces pastorianus
tctattccgctttgattgatggaca

SEQ ID NO: 162233 - DNA, 25 bp, Saccharomyces pastorianus
ggaccgtttcctaacattctattat

SEQ ID NO: 162234 - DNA, 25 bp, Saccharomyces pastorianus
atctgggtacccaattaccagtgga

SEQ ID NO: 162235 - DNA, 25 bp, Saccharomyces pastorianus
ttggtgaatttatcttccttggccc

SEQ ID NO: 162236 - DNA, 25 bp, Saccharomyces pastorianus
ttccttggcccatgaatctattatg

SEQ ID NO: 162237 - DNA, 25 bp, Saccharomyces pastorianus
taccagtggaccgtttcctaacatt

SEQ ID NO: 162238 - DNA, 25 bp, Saccharomyces pastorianus
ttggttccaattgggtgttacaact

SEQ ID NO: 162239 - DNA, 25 bp, Saccharomyces pastorianus
tcggtacaattctaaatttcactac

SEQ ID NO: 162240 - DNA, 25 bp, Saccharomyces pastorianus
gtgttacaacttccaacctgcggtt

SEQ ID NO: 162241 - DNA, 25 bp, Saccharomyces pastorianus
aaatgtttatgttgactttggtgaa

SEQ ID NO: 162242 - DNA, 25 bp, Saccharomyces pastorianus
gaatattattatctgggtacccaat

SEQ ID NO: 162243 - DNA, 25 bp, Saccharomyces pastorianus
gtgtatttacgataggaacaaacca

SEQ ID NO: 162244 - DNA, 25 bp, Saccharomyces pastorianus
cactcgattatgctattctggctaa

SEQ ID NO: 162245 - DNA, 25 bp, Saccharomyces pastorianus
ttttaatctgtcaactgccactcat

SEQ ID NO: 162246 - DNA, 25 bp, Saccharomyces pastorianus
gatcatgccaatacagccttctgga

SEQ ID NO: 162247 - DNA, 25 bp, Saccharomyces pastorianus
atgcattattggtcctgctgtagcc

SEQ ID NO: 162248 - DNA, 25 bp, Saccharomyces pastorianus
ttactctctgaagcaaactcgtttg

SEQ ID NO: 162249 - DNA, 25 bp, Saccharomyces pastorianus
gctaaagccctctcgtcaaattcgt

SEQ ID NO: 162250 - DNA, 25 bp, Saccharomyces pastorianus
aactgccactcattataatcccaaa

SEQ ID NO: 162251 - DNA, 25 bp, Saccharomyces pastorianus
aatcggagtcgttacttgtatccaa

SEQ ID NO: 162252 - DNA, 25 bp, Saccharomyces pastorianus
gattcattggatggcgttgttcaca

SEQ ID NO: 162253 - DNA, 25 bp, Saccharomyces pastorianus
aactcgtttgcgtaagcgtatggtc

SEQ ID NO: 162254 - DNA, 25 bp, Saccharomyces pastorianus
gtagcctctgctaagatccacaaac

SEQ ID NO: 162255 - DNA, 25 bp, Saccharomyces pastorianus
tgaaggccgcaatccgagatgccga

SEQ ID NO: 162256 - DNA, 25 bp, Saccharomyces pastorianus
tctgccgaaggaatgtacgtcctat

SEQ ID NO: 162257 - DNA, 25 bp, Saccharomyces pastorianus
gaaaatccatcttgggatgtacata

SEQ ID NO: 162258 - DNA, 25 bp, Saccharomyces pastorianus
ggaagctctatctgccgaaggaatg

SEQ ID NO: 162259 - DNA, 25 bp, Saccharomyces pastorianus
gtgtttatgcaatagatccgacaaa

SEQ ID NO: 162260 - DNA, 25 bp, Saccharomyces pastorianus
agatctttcagagcctgatatttca

SEQ ID NO: 162261 - DNA, 25 bp, Saccharomyces pastorianus
tttgcatcacccttcgtgaaggccg

SEQ ID NO: 162262 - DNA, 25 bp, Saccharomyces pastorianus
catacaaatacctttgcatcaccct

SEQ ID NO: 162263 - DNA, 25 bp, Saccharomyces pastorianus
gcaatgtcatcctttccaaatttgt

SEQ ID NO: 162264 - DNA, 25 bp, Saccharomyces pastorianus
gagtgaacacactgcgtgtttatgc

SEQ ID NO: 162265 - DNA, 25 bp, Saccharomyces pastorianus
gtacgtcctattagatctttcagag

SEQ ID NO: 162266 - DNA, 25 bp, Saccharomyces pastorianus
tcatcaagggcattgcttaccaatt

SEQ ID NO: 162267 - DNA, 25 bp, Saccharomyces pastorianus
cagtcttcatcaagggcattgctta

SEQ ID NO: 162268 - DNA, 25 bp, Saccharomyces pastorianus
ctgagagtggggaacagtcttcatc

SEQ ID NO: 162269 - DNA, 25 bp, Saccharomyces pastorianus
ggacacaaattctttgactctgaga

SEQ ID NO: 162270 - DNA, 25 bp, Saccharomyces pastorianus
aagaggagcttagcaatgcaaatgg

SEQ ID NO: 162271 - DNA, 25 bp, Saccharomyces pastorianus
tgcttaccaattgcagagaagtgaa

SEQ ID NO: 162272 - DNA, 25 bp, Saccharomyces pastorianus
agtgaagaggagcttagcaatgcaa

SEQ ID NO: 162273 - DNA, 25 bp, Saccharomyces pastorianus
acaaattctttgactctgagagtgg

SEQ ID NO: 162274 - DNA, 25 bp, Saccharomyces pastorianus
gtaggacacaaattctttgactctg

SEQ ID NO: 162275 - DNA, 25 bp, Saccharomyces pastorianus
ggcattgcttaccaattgcagagaa

SEQ ID NO: 162276 - DNA, 25 bp, Saccharomyces pastorianus
aagggcattgcttaccaattgcaga

SEQ ID NO: 162277 - DNA, 25 bp, Saccharomyces pastorianus
aattaaaactaacgcgctgaccgca

SEQ ID NO: 162278 - DNA, 25 bp, Saccharomyces pastorianus
gctgaccgcattggtctccatagaa

SEQ ID NO: 162279 - DNA, 25 bp, Saccharomyces pastorianus
gcagcaatttgcacaacgttggatt

SEQ ID NO: 162280 - DNA, 25 bp, Saccharomyces pastorianus
agaagggcgtattctagcggcgcta

SEQ ID NO: 162281 - DNA, 25 bp, Saccharomyces pastorianus
gaacgagctggtgtccaaggactca

SEQ ID NO: 162282 - DNA, 25 bp, Saccharomyces pastorianus
agaacagtatcttaagtcccgacca

SEQ ID NO: 162283 - DNA, 25 bp, Saccharomyces pastorianus
ggactcagtcaagacgcagcaattt

SEQ ID NO: 162284 - DNA, 25 bp, Saccharomyces pastorianus
gcagcagctcaattgattgcggcta

SEQ ID NO: 162285 - DNA, 25 bp, Saccharomyces pastorianus
gtctttcttcgcaagtgcttatcga

SEQ ID NO: 162286 - DNA, 25 bp, Saccharomyces pastorianus
atgtccaccgctgaatttgctcaac

SEQ ID NO: 162287 - DNA, 25 bp, Saccharomyces pastorianus
cttacaatttgcaggtctttcttcg

SEQ ID NO: 162288 - DNA, 25 bp, Saccharomyces pastorianus
accttgcagcccttttatacaaaca

SEQ ID NO: 162289 - DNA, 25 bp, Saccharomyces pastorianus
agaggatgtgtcaccatggtagcaa

SEQ ID NO: 162290 - DNA, 25 bp, Saccharomyces pastorianus
agcgtaatcgcttgccaaagaccac

SEQ ID NO: 162291 - DNA, 25 bp, Saccharomyces pastorianus
ggatacttgatattcttaccggcag

SEQ ID NO: 162292 - DNA, 25 bp, Saccharomyces pastorianus
atggtagcaaagatacccgctgcac

SEQ ID NO: 162293 - DNA, 25 bp, Saccharomyces pastorianus
tccagctgttgcgttatcttttcaa

SEQ ID NO: 162294 - DNA, 25 bp, Saccharomyces pastorianus
ttgcgttggttgacatgccgtccag

SEQ ID NO: 162295 - DNA, 25 bp, Saccharomyces pastorianus
tgcagtctgaccttggccaagtcaa

SEQ ID NO: 162296 - DNA, 25 bp, Saccharomyces pastorianus
ttgggcataggagccgcctgcagtc

SEQ ID NO: 162297 - DNA, 25 bp, Saccharomyces pastorianus
ttaccggcagactcttttgcgttgg

SEQ ID NO: 162298 - DNA, 25 bp, Saccharomyces pastorianus
ccaacatcctgaagagtgtgggctt

SEQ ID NO: 162299 - DNA, 25 bp, Saccharomyces pastorianus
tatgaaggacacaagacgccctctc

SEQ ID NO: 162300 - DNA, 25 bp, Saccharomyces pastorianus
gaagtgtgtccggacctagcaaatg

SEQ ID NO: 162301 - DNA, 25 bp, Saccharomyces pastorianus
aattcaaaatctatgcgcaagccct

SEQ ID NO: 162302 - DNA, 25 bp, Saccharomyces pastorianus
tggactaccttcaattcccgtatta

SEQ ID NO: 162303 - DNA, 25 bp, Saccharomyces pastorianus
ctcgtgctagctccaattaaatctc

SEQ ID NO: 162304 - DNA, 25 bp, Saccharomyces pastorianus
acaagtgatgattcgcattcgccag

SEQ ID NO: 162305 - DNA, 25 bp, Saccharomyces pastorianus
ccctccacatccctagaagaagaag

SEQ ID NO: 162306 - DNA, 25 bp, Saccharomyces pastorianus
actaagtctgatccattttcacgct

SEQ ID NO: 162307 - DNA, 25 bp, Saccharomyces pastorianus
gacacctttacgcttagaatctgga

SEQ ID NO: 162308 - DNA, 25 bp, Saccharomyces pastorianus
agaacatggacaacccctcgtgcta

SEQ ID NO: 162309 - DNA, 25 bp, Saccharomyces pastorianus
aagccacctcgaagcatacgacgaa

SEQ ID NO: 162310 - DNA, 25 bp, Saccharomyces pastorianus
gttggtactcgtcctgtagacacag

SEQ ID NO: 162311 - DNA, 25 bp, Saccharomyces pastorianus
aaataccgctacagcgaacctgctt

SEQ ID NO: 162312 - DNA, 25 bp, Saccharomyces pastorianus
agcgatattaacattctctttggtg

SEQ ID NO: 162313 - DNA, 25 bp, Saccharomyces pastorianus
gcgaacctgcttatttgacttacaa

SEQ ID NO: 162314 - DNA, 25 bp, Saccharomyces pastorianus
acaaattcgttggtactcgtcctgt

SEQ ID NO: 162315 - DNA, 25 bp, Saccharomyces pastorianus
gccgatagcaaattggactcttcaa

SEQ ID NO: 162316 - DNA, 25 bp, Saccharomyces pastorianus
cattctctttggtgttgattgcatc

SEQ ID NO: 162317 - DNA, 25 bp, Saccharomyces pastorianus
gtgttgattgcatccagccgatagc

SEQ ID NO: 162318 - DNA, 25 bp, Saccharomyces pastorianus
atccatcacattcgagcctattaac

SEQ ID NO: 162319 - DNA, 25 bp, Saccharomyces pastorianus
ggatgtatccatcacattcgagcct

SEQ ID NO: 162320 - DNA, 25 bp, Saccharomyces pastorianus
ctgtagacacaggagctcaacggct

SEQ ID NO: 162321 - DNA, 25 bp, Saccharomyces pastorianus
ggttatcatcaagtttttacaagtt

SEQ ID NO: 162322 - DNA, 25 bp, Saccharomyces pastorianus
aaacgtcaggttctattgagacctt

SEQ ID NO: 162323 - DNA, 25 bp, Saccharomyces pastorianus
agtttttacaagttatgcaaagcat

SEQ ID NO: 162324 - DNA, 25 bp, Saccharomyces pastorianus
ccggtaaacgtcaggttctattgag

SEQ ID NO: 162325 - DNA, 25 bp, Saccharomyces pastorianus
tccaaggttatcatcaagtttttac

SEQ ID NO: 162326 - DNA, 25 bp, Saccharomyces pastorianus
gaccggtaaacgtcaggttctattg

SEQ ID NO: 162327 - DNA, 25 bp, Saccharomyces pastorianus
tcaggttctattgagaccttcttcc

SEQ ID NO: 162328 - DNA, 25 bp, Saccharomyces pastorianus
acgtcaggttctattgagaccttct

SEQ ID NO: 162329 - DNA, 25 bp, Saccharomyces pastorianus
gtaaacgtcaggttctattgagacc

SEQ ID NO: 162330 - DNA, 25 bp, Saccharomyces pastorianus
aaggttatcatcaagtttttacaag

SEQ ID NO: 162331 - DNA, 25 bp, Saccharomyces pastorianus
gtcaggttctattgagaccttcttc

SEQ ID NO: 162332 - DNA, 25 bp, Saccharomyces pastorianus
aaagtactacagcttttgtgcctaa

SEQ ID NO: 162333 - DNA, 25 bp, Saccharomyces pastorianus
tccaagaaatgaagtctaccagaag

SEQ ID NO: 162334 - DNA, 25 bp, Saccharomyces pastorianus
ttttgtgcctaagaggaaaccttca

SEQ ID NO: 162335 - DNA, 25 bp, Saccharomyces pastorianus
aagtactacagcttttgtgcctaag

SEQ ID NO: 162336 - DNA, 25 bp, Saccharomyces pastorianus
ataatgaccaccctttgcctccaat

SEQ ID NO: 162337 - DNA, 25 bp, Saccharomyces pastorianus
gcttttgtgcctaagaggaaacctt

SEQ ID NO: 162338 - DNA, 25 bp, Saccharomyces pastorianus
gaaatgaagtctaccagaagaataa

SEQ ID NO: 162339 - DNA, 25 bp, Saccharomyces pastorianus
actacagcttttgtgcctaagagga

SEQ ID NO: 162340 - DNA, 25 bp, Saccharomyces pastorianus
gtactacagcttttgtgcctaagag

SEQ ID NO: 162341 - DNA, 25 bp, Saccharomyces pastorianus
tacagcttttgtgcctaagaggaaa

SEQ ID NO: 162342 - DNA, 25 bp, Saccharomyces pastorianus
taatgaccaccctttgcctccaatg

SEQ ID NO: 162343 - DNA, 25 bp, Saccharomyces pastorianus
tgggagtggttcgactacccctaca

SEQ ID NO: 162344 - DNA, 25 bp, Saccharomyces pastorianus
gaaagtcgcctttgcaaggctttag

SEQ ID NO: 162345 - DNA, 25 bp, Saccharomyces pastorianus
agcaaactagcttctcaaatgggag

SEQ ID NO: 162346 - DNA, 25 bp, Saccharomyces pastorianus
ctttgcctccaatgtctccaagaaa

SEQ ID NO: 162347 - DNA, 25 bp, Saccharomyces pastorianus
aataactacccacaacattcacatt

SEQ ID NO: 162348 - DNA, 25 bp, Saccharomyces pastorianus
aataacggtacccatcatcaagtgg

SEQ ID NO: 162349 - DNA, 25 bp, Saccharomyces pastorianus
ggccaagttccaaagacctgcacga

SEQ ID NO: 162350 - DNA, 25 bp, Saccharomyces pastorianus
aactagcccttgctggtcttaagaa

SEQ ID NO: 162351 - DNA, 25 bp, Saccharomyces pastorianus
gctttagtttcttttccaggccaag

SEQ ID NO: 162352 - DNA, 25 bp, Saccharomyces pastorianus
aatggtcacagttccatgaagtcct

SEQ ID NO: 162353 - DNA, 25 bp, Saccharomyces pastorianus
gtcattaaactcttctactctcaaa

SEQ ID NO: 162354 - DNA, 25 bp, Saccharomyces pastorianus
aaatacgcccgcatcaagaatagat

SEQ ID NO: 162355 - DNA, 25 bp, Saccharomyces pastorianus
aaaagcatctgttgtccaccttggg

SEQ ID NO: 162356 - DNA, 25 bp, Saccharomyces pastorianus
gatcctactggtggagacaagtctg

SEQ ID NO: 162357 - DNA, 25 bp, Saccharomyces pastorianus
actttacctatgttttgttcgccat

SEQ ID NO: 162358 - DNA, 25 bp, Saccharomyces pastorianus
aaccactcgaattcaaatacgcccg

SEQ ID NO: 162359 - DNA, 25 bp, Saccharomyces pastorianus
tagaagcggcaacaacagcgacaat

SEQ ID NO: 162360 - DNA, 25 bp, Saccharomyces pastorianus
gtcgacaaactttctacatcaattt

SEQ ID NO: 162361 - DNA, 25 bp, Saccharomyces pastorianus
actaccaccaccgaatagctataag

SEQ ID NO: 162362 - DNA, 25 bp, Saccharomyces pastorianus
agtctgtattaacggcactaccacc

SEQ ID NO: 162363 - DNA, 25 bp, Saccharomyces pastorianus
agcaatgttcttgtgtcctgcgatt

SEQ ID NO: 162364 - DNA, 25 bp, Saccharomyces pastorianus
tgggcagcctacaatttcaacggtt

SEQ ID NO: 162365 - DNA, 25 bp, Saccharomyces pastorianus
gagacttccaattgtcaccagacgg

SEQ ID NO: 162366 - DNA, 25 bp, Saccharomyces pastorianus
aaggcaacgcacctgacgccagagg

SEQ ID NO: 162367 - DNA, 25 bp, Saccharomyces pastorianus
aggatcggcctcacaagtgtcccat

SEQ ID NO: 162368 - DNA, 25 bp, Saccharomyces pastorianus
gggagtactttcgaaccataatgat

SEQ ID NO: 162369 - DNA, 25 bp, Saccharomyces pastorianus
tggtccttcatctgttggcggtgcc

SEQ ID NO: 162370 - DNA, 25 bp, Saccharomyces pastorianus
gctttgcattttgaatacccgccag

SEQ ID NO: 162371 - DNA, 25 bp, Saccharomyces pastorianus
gcgggttcgccaggaacaatgactt

SEQ ID NO: 162372 - DNA, 25 bp, Saccharomyces pastorianus
aatttttatgccaatctgaccacgc

SEQ ID NO: 162373 - DNA, 25 bp, Saccharomyces pastorianus
aggatccgtttctcccaatgatgat

SEQ ID NO: 162374 - DNA, 25 bp, Saccharomyces pastorianus
ggatgagatactgtcccaatcggga

SEQ ID NO: 162375 - DNA, 25 bp, Saccharomyces pastorianus
gaagcaatgtccaatttgtcgtaat

SEQ ID NO: 162376 - DNA, 25 bp, Saccharomyces pastorianus
gatcagtagagaaacgcctgtccag

SEQ ID NO: 162377 - DNA, 25 bp, Saccharomyces pastorianus
cacgtagccagtacagagggtcgga

SEQ ID NO: 162378 - DNA, 25 bp, Saccharomyces pastorianus
aaacgcctgtccagataagtttctg

SEQ ID NO: 162379 - DNA, 25 bp, Saccharomyces pastorianus
ggaaccttcctttctggagcaatca

SEQ ID NO: 162380 - DNA, 25 bp, Saccharomyces pastorianus
gaacacggttggaggacattttcaa

SEQ ID NO: 162381 - DNA, 25 bp, Saccharomyces pastorianus
ccggcaggaaagattcatatggctt

SEQ ID NO: 162382 - DNA, 25 bp, Saccharomyces pastorianus
tggagcaatcacttccggcaggaaa

SEQ ID NO: 162383 - DNA, 25 bp, Saccharomyces pastorianus
gtacagcggaatctggcccagaatc

SEQ ID NO: 162384 - DNA, 25 bp, Saccharomyces pastorianus
ggtcggaagtctcactggacacgat

SEQ ID NO: 162385 - DNA, 25 bp, Saccharomyces pastorianus
ggcttaaacaagtctagaacacggt

SEQ ID NO: 162386 - DNA, 25 bp, Saccharomyces pastorianus
gtttctggttgtatggaaccttcct

SEQ ID NO: 162387 - DNA, 25 bp, Saccharomyces pastorianus
tagagactcggtgctaatcgagaaa

SEQ ID NO: 162388 - DNA, 25 bp, Saccharomyces pastorianus
gatatcttcccgtttatcaccagaa

SEQ ID NO: 162389 - DNA, 25 bp, Saccharomyces pastorianus
gaaagctttaagtctcttacagagt

SEQ ID NO: 162390 - DNA, 25 bp, Saccharomyces pastorianus
catgagacagatatcttcccgttta

SEQ ID NO: 162391 - DNA, 25 bp, Saccharomyces pastorianus
attatttacgtcagtttcttcaaga

SEQ ID NO: 162392 - DNA, 25 bp, Saccharomyces pastorianus
tatgagttagcttacacagtgttac

SEQ ID NO: 162393 - DNA, 25 bp, Saccharomyces pastorianus
cgtgtccgtgatatccttatgtttt

SEQ ID NO: 162394 - DNA, 25 bp, Saccharomyces pastorianus
tagagcaaactttatcatgagacag

SEQ ID NO: 162395 - DNA, 25 bp, Saccharomyces pastorianus
tacagagtttatgttctgactcaaa

SEQ ID NO: 162396 - DNA, 25 bp, Saccharomyces pastorianus
gttacaaacttacgcgaactacgag

SEQ ID NO: 162397 - DNA, 25 bp, Saccharomyces pastorianus
aacttcaccggagatgtcgtcgtta

SEQ ID NO: 162398 - DNA, 25 bp, Saccharomyces pastorianus
ttctccaaatgtgtttatccccttc

SEQ ID NO: 162399 - DNA, 25 bp, Saccharomyces pastorianus
aggttatattatccatttctccaaa

SEQ ID NO: 162400 - DNA, 25 bp, Saccharomyces pastorianus
ggtgggttatccaaacctctgagta

SEQ ID NO: 162401 - DNA, 25 bp, Saccharomyces pastorianus
agaacagttacacacacccttatgg

SEQ ID NO: 162402 - DNA, 25 bp, Saccharomyces pastorianus
ttatggactcactactccacgaagt

SEQ ID NO: 162403 - DNA, 25 bp, Saccharomyces pastorianus
aaaggccgatggtgcacttattgct

SEQ ID NO: 162404 - DNA, 25 bp, Saccharomyces pastorianus
aagatatcaacctcaatttcccaga

SEQ ID NO: 162405 - DNA, 25 bp, Saccharomyces pastorianus
tccacgaagtcgaccgcatttcaaa

SEQ ID NO: 162406 - DNA, 25 bp, Saccharomyces pastorianus
acgttcttgggcgattctcataaag

SEQ ID NO: 162407 - DNA, 25 bp, Saccharomyces pastorianus
gattcggatccgcatattactgaaa

SEQ ID NO: 162408 - DNA, 25 bp, Saccharomyces pastorianus
gaggttattaccgttcttgtgaaca

SEQ ID NO: 162409 - DNA, 25 bp, Saccharomyces pastorianus
gcttatcacgctattacacaacaaa

SEQ ID NO: 162410 - DNA, 25 bp, Saccharomyces pastorianus
acctatcagtctcaatttcaccgta

SEQ ID NO: 162411 - DNA, 25 bp, Saccharomyces pastorianus
gcatttgtaactaaaccactcctca

SEQ ID NO: 162412 - DNA, 25 bp, Saccharomyces pastorianus
atttcaccgtaagacgcttcaagcc

SEQ ID NO: 162413 - DNA, 25 bp, Saccharomyces pastorianus
aattggttcacctctcacctatcag

SEQ ID NO: 162414 - DNA, 25 bp, Saccharomyces pastorianus
taagacgcttcaagccattcacgtg

SEQ ID NO: 162415 - DNA, 25 bp, Saccharomyces pastorianus
taaaccactcctcactcaattggtt

SEQ ID NO: 162416 - DNA, 25 bp, Saccharomyces pastorianus
aagccattcacgtgcttatcacgct

SEQ ID NO: 162417 - DNA, 25 bp, Saccharomyces pastorianus
gcttcttcttctgcatttgtaacta

SEQ ID NO: 162418 - DNA, 25 bp, Saccharomyces pastorianus
cgtatctcttttagcttcttcttct

SEQ ID NO: 162419 - DNA, 25 bp, Saccharomyces pastorianus
atgggcgtatctcttttagcttctt

SEQ ID NO: 162420 - DNA, 25 bp, Saccharomyces pastorianus
ggttgagatcctacttacttcctaa

SEQ ID NO: 162421 - DNA, 25 bp, Saccharomyces pastorianus
tctgcaggtttctaacaaccggttg

SEQ ID NO: 162422 - DNA, 25 bp, Saccharomyces pastorianus
attcagtcagaacataccacgccat

SEQ ID NO: 162423 - DNA, 25 bp, Saccharomyces pastorianus
atgtcacccagctagatgtctattc

SEQ ID NO: 162424 - DNA, 25 bp, Saccharomyces pastorianus
gcgcaattgattcacgagccatgtt

SEQ ID NO: 162425 - DNA, 25 bp, Saccharomyces pastorianus
gaacaatcacggcacagcgaacatt

SEQ ID NO: 162426 - DNA, 25 bp, Saccharomyces pastorianus
gaaactgctttgaaagactcccgga

SEQ ID NO: 162427 - DNA, 25 bp, Saccharomyces pastorianus
gactcccggaatgttaactcatgta

SEQ ID NO: 162428 - DNA, 25 bp, Saccharomyces pastorianus
aaaaggctaagctcgttgctaacat

SEQ ID NO: 162429 - DNA, 25 bp, Saccharomyces pastorianus
tgccctcagcggattatttgcgcaa

SEQ ID NO: 162430 - DNA, 25 bp, Saccharomyces pastorianus
tattcagaagacctatctgccctca

SEQ ID NO: 162431 - DNA, 25 bp, Saccharomyces pastorianus
tttgaatcaagtcacctgttactgt

SEQ ID NO: 162432 - DNA, 25 bp, Saccharomyces pastorianus
aaggaagtcttagcaacacctccag

SEQ ID NO: 162433 - DNA, 25 bp, Saccharomyces pastorianus
aagtcggcaaatcctcttccacatg

SEQ ID NO: 162434 - DNA, 25 bp, Saccharomyces pastorianus
cagtcgtttctttggcattgttgtc

SEQ ID NO: 162435 - DNA, 25 bp, Saccharomyces pastorianus
gtcacctgttactgtgaacacgaaa

SEQ ID NO: 162436 - DNA, 25 bp, Saccharomyces pastorianus
aacacctccagcttgtttattggcc

SEQ ID NO: 162437 - DNA, 25 bp, Saccharomyces pastorianus
cttccacatgtgactctttgaatca

SEQ ID NO: 162438 - DNA, 25 bp, Saccharomyces pastorianus
aactccgccgtcaagaaatgtctag

SEQ ID NO: 162439 - DNA, 25 bp, Saccharomyces pastorianus
tattatcttcagtcgtttctttggc

SEQ ID NO: 162440 - DNA, 25 bp, Saccharomyces pastorianus
tttattggcctgtgttgcgcaagtc

SEQ ID NO: 162441 - DNA, 25 bp, Saccharomyces pastorianus
aaatgtctagactccatctgcccaa

SEQ ID NO: 162442 - DNA, 25 bp, Saccharomyces pastorianus
gaacctagagtttctcaaacggagg

SEQ ID NO: 162443 - DNA, 25 bp, Saccharomyces pastorianus
tcggaagccacttttgcttacagtg

SEQ ID NO: 162444 - DNA, 25 bp, Saccharomyces pastorianus
gaagacgagcatgctgccgataaaa

SEQ ID NO: 162445 - DNA, 25 bp, Saccharomyces pastorianus
gttccataattattcctcgcagcag

SEQ ID NO: 162446 - DNA, 25 bp, Saccharomyces pastorianus
atatggagactcacatgcgatcgac

SEQ ID NO: 162447 - DNA, 25 bp, Saccharomyces pastorianus
gaacgatgacttctcggaagccact

SEQ ID NO: 162448 - DNA, 25 bp, Saccharomyces pastorianus
ctcgcagcagcctttatactgtcaa

SEQ ID NO: 162449 - DNA, 25 bp, Saccharomyces pastorianus
tactcgagttgcagtaccagtacga

SEQ ID NO: 162450 - DNA, 25 bp, Saccharomyces pastorianus
agaacctttatgatcgactcttggg

SEQ ID NO: 162451 - DNA, 25 bp, Saccharomyces pastorianus
gataggtctatcttgttccataatt

SEQ ID NO: 162452 - DNA, 25 bp, Saccharomyces pastorianus
agtggtgtagtacccttgacaatga

SEQ ID NO: 162453 - DNA, 25 bp, Saccharomyces pastorianus
ccacaactgcttgatgctgctcaaa

SEQ ID NO: 162454 - DNA, 25 bp, Saccharomyces pastorianus
ggttcaaccaagtgtattgccagta

SEQ ID NO: 162455 - DNA, 25 bp, Saccharomyces pastorianus
ttgcccttcccacagattgatgaaa

SEQ ID NO: 162456 - DNA, 25 bp, Saccharomyces pastorianus
atgttctattgactcattcccttta

SEQ ID NO: 162457 - DNA, 25 bp, Saccharomyces pastorianus
attatcccaacttacgttctttgca

SEQ ID NO: 162458 - DNA, 25 bp, Saccharomyces pastorianus
gttctttgcagagtgccacagagtc

SEQ ID NO: 162459 - DNA, 25 bp, Saccharomyces pastorianus
atactgtcgatggaaaccgtctttc

SEQ ID NO: 162460 - DNA, 25 bp, Saccharomyces pastorianus
gccgatggactatgtgctaccttaa

SEQ ID NO: 162461 - DNA, 25 bp, Saccharomyces pastorianus
gacgatttaccgagtgccttaggca

SEQ ID NO: 162462 - DNA, 25 bp, Saccharomyces pastorianus
gcagcgttccgcaaatggatcttat

SEQ ID NO: 162463 - DNA, 25 bp, Saccharomyces pastorianus
tgactcaatcaactcctgtaaggaa

SEQ ID NO: 162464 - DNA, 25 bp, Saccharomyces pastorianus
atgaactttccagacaccctagttt

SEQ ID NO: 162465 - DNA, 25 bp, Saccharomyces pastorianus
gacaccctagtttgcgaaaggcctt

SEQ ID NO: 162466 - DNA, 25 bp, Saccharomyces pastorianus
gaaaggccttttttcagaggcgact

SEQ ID NO: 162467 - DNA, 25 bp, Saccharomyces pastorianus
gagattcaaatcactgcgcgttttc

SEQ ID NO: 162468 - DNA, 25 bp, Saccharomyces pastorianus
aaatccacctgtatttacctgctat

SEQ ID NO: 162469 - DNA, 25 bp, Saccharomyces pastorianus
gctatgtgagccactcaggtacagt

SEQ ID NO: 162470 - DNA, 25 bp, Saccharomyces pastorianus
aaatcactgcgcgttttctaaatcc

SEQ ID NO: 162471 - DNA, 25 bp, Saccharomyces pastorianus
ttttcagaggcgacttgcgagattc

SEQ ID NO: 162472 - DNA, 25 bp, Saccharomyces pastorianus
gaggcgacttgcgagattcaaatca

SEQ ID NO: 162473 - DNA, 25 bp, Saccharomyces pastorianus
atttacctgctatgtgagccactca

SEQ ID NO: 162474 - DNA, 25 bp, Saccharomyces pastorianus
tgcgcgttttctaaatccacctgta

SEQ ID NO: 162475 - DNA, 25 bp, Saccharomyces pastorianus
gtttctctacatccgtgcattatta

SEQ ID NO: 162476 - DNA, 25 bp, Saccharomyces pastorianus
tattatcctcgtttctgtttctcta

SEQ ID NO: 162477 - DNA, 25 bp, Saccharomyces pastorianus
accgattttattatcctcgtttctg

SEQ ID NO: 162478 - DNA, 25 bp, Saccharomyces pastorianus
acatccgtgcattattacatagtat

SEQ ID NO: 162479 - DNA, 25 bp, Saccharomyces pastorianus
ttctgtttctctacatccgtgcatt

SEQ ID NO: 162480 - DNA, 25 bp, Saccharomyces pastorianus
ctcgtttctgtttctctacatccgt

SEQ ID NO: 162481 - DNA, 25 bp, Saccharomyces pastorianus
attacatagtatacatccgtacatc

SEQ ID NO: 162482 - DNA, 25 bp, Saccharomyces pastorianus
tttattatcctcgtttctgtttctc

SEQ ID NO: 162483 - DNA, 25 bp, Saccharomyces pastorianus
tatcctcgtttctgtttctctacat

SEQ ID NO: 162484 - DNA, 25 bp, Saccharomyces pastorianus
gattttattatcctcgtttctgttt

SEQ ID NO: 162485 - DNA, 25 bp, Saccharomyces pastorianus
ctctacatccgtgcattattacata

SEQ ID NO: 162486 - DNA, 25 bp, Saccharomyces pastorianus
gtaaaaatgccaaacaggtctgaag

SEQ ID NO: 162487 - DNA, 25 bp, Saccharomyces pastorianus
aaaaatgccaaacaggtctgaagaa

SEQ ID NO: 162488 - DNA, 25 bp, Saccharomyces pastorianus
aatcgtaaaaatgccaaacaggtct

SEQ ID NO: 162489 - DNA, 25 bp, Saccharomyces pastorianus
aactggataatcgtaaaaatgccaa

SEQ ID NO: 162490 - DNA, 25 bp, Saccharomyces pastorianus
ggataatcgtaaaaatgccaaacag

SEQ ID NO: 162491 - DNA, 25 bp, Saccharomyces pastorianus
cgtaaaaatgccaaacaggtctgaa

SEQ ID NO: 162492 - DNA, 25 bp, Saccharomyces pastorianus
gataatcgtaaaaatgccaaacagg

SEQ ID NO: 162493 - DNA, 25 bp, Saccharomyces pastorianus
ataatcgtaaaaatgccaaacaggt

SEQ ID NO: 162494 - DNA, 25 bp, Saccharomyces pastorianus
taaaaatgccaaacaggtctgaaga

SEQ ID NO: 162495 - DNA, 25 bp, Saccharomyces pastorianus
tcgtaaaaatgccaaacaggtctga

SEQ ID NO: 162496 - DNA, 25 bp, Saccharomyces pastorianus
taatcgtaaaaatgccaaacaggtc

SEQ ID NO: 162497 - DNA, 25 bp, Saccharomyces pastorianus
aattggccaacttgcgactttttga

SEQ ID NO: 162498 - DNA, 25 bp, Saccharomyces pastorianus
gttccaacacctcctagactggaaa

SEQ ID NO: 162499 - DNA, 25 bp, Saccharomyces pastorianus
cgtcaagttacgcaagcctttcatt

SEQ ID NO: 162500 - DNA, 25 bp, Saccharomyces pastorianus
gcatggcgtagaagttaaacccgtt

SEQ ID NO: 162501 - DNA, 25 bp, Saccharomyces pastorianus
gtattagaagcctacaacgttccaa

SEQ ID NO: 162502 - DNA, 25 bp, Saccharomyces pastorianus
aatcagtagagatggtggtccccgt

SEQ ID NO: 162503 - DNA, 25 bp, Saccharomyces pastorianus
tggtccccgtgccaacgaagaatta

SEQ ID NO: 162504 - DNA, 25 bp, Saccharomyces pastorianus
gggaaaaccatgactaagccctttg

SEQ ID NO: 162505 - DNA, 25 bp, Saccharomyces pastorianus
gccctttgttgaaaagcccgttgat

SEQ ID NO: 162506 - DNA, 25 bp, Saccharomyces pastorianus
tcttttcttcaggatttcccctaga

SEQ ID NO: 162507 - DNA, 25 bp, Saccharomyces pastorianus
gaggcggtcgtcgtctattccgtaa

SEQ ID NO: 162508 - DNA, 25 bp, Saccharomyces pastorianus
taaaaaaagcgcgtctggaaaacag

SEQ ID NO: 162509 - DNA, 25 bp, Saccharomyces pastorianus
ttgatcctaaaaaaagcgcgtctgg

SEQ ID NO: 162510 - DNA, 25 bp, Saccharomyces pastorianus
cgttgatcctaaaaaaagcgcgtct

SEQ ID NO: 162511 - DNA, 25 bp, Saccharomyces pastorianus
tgatcctaaaaaaagcgcgtctgga

SEQ ID NO: 162512 - DNA, 25 bp, Saccharomyces pastorianus
gttgatcctaaaaaaagcgcgtctg

SEQ ID NO: 162513 - DNA, 25 bp, Saccharomyces pastorianus
gatcctaaaaaaagcgcgtctggaa

SEQ ID NO: 162514 - DNA, 25 bp, Saccharomyces pastorianus
tcgttgatcctaaaaaaagcgcgtc

SEQ ID NO: 162515 - DNA, 25 bp, Saccharomyces pastorianus
ttcgttgatcctaaaaaaagcgcgt

SEQ ID NO: 162516 - DNA, 25 bp, Saccharomyces pastorianus
gatcagtccgtaggtctttaccatg

SEQ ID NO: 162517 - DNA, 25 bp, Saccharomyces pastorianus
gtccgtaggtctttaccatggcaaa

SEQ ID NO: 162518 - DNA, 25 bp, Saccharomyces pastorianus
ggaaactacttcatcgggccaacct

SEQ ID NO: 162519 - DNA, 25 bp, Saccharomyces pastorianus
tcgggccaacctcttcttcgaaaag

SEQ ID NO: 162520 - DNA, 25 bp, Saccharomyces pastorianus
atcgatcagtccgtaggtctttacc

SEQ ID NO: 162521 - DNA, 25 bp, Saccharomyces pastorianus
ggcattatgtggaaactacttcatc

SEQ ID NO: 162522 - DNA, 25 bp, Saccharomyces pastorianus
ctttatcgatcagtccgtaggtctt

SEQ ID NO: 162523 - DNA, 25 bp, Saccharomyces pastorianus
tgtggaaactacttcatcgggccaa

SEQ ID NO: 162524 - DNA, 25 bp, Saccharomyces pastorianus
aggtctttaccatggcaaatctaag

SEQ ID NO: 162525 - DNA, 25 bp, Saccharomyces pastorianus
gccaacctcttcttcgaaaaggtga

SEQ ID NO: 162526 - DNA, 25 bp, Saccharomyces pastorianus
gatatctttatcgatcagtccgtag

SEQ ID NO: 162527 - DNA, 25 bp, Saccharomyces pastorianus
gaaacaagagctcgcattcaggcat

SEQ ID NO: 162528 - DNA, 25 bp, Saccharomyces pastorianus
tatgagctcaccaagtcgtctataa

SEQ ID NO: 162529 - DNA, 25 bp, Saccharomyces pastorianus
gaattcgtgcaattgagtttccgca

SEQ ID NO: 162530 - DNA, 25 bp, Saccharomyces pastorianus
attgttctaatgcaatcgacccgaa

SEQ ID NO: 162531 - DNA, 25 bp, Saccharomyces pastorianus
attgcgagatttgcggccacagatt

SEQ ID NO: 162532 - DNA, 25 bp, Saccharomyces pastorianus
tgaactctgagaacatttgccccgc

SEQ ID NO: 162533 - DNA, 25 bp, Saccharomyces pastorianus
cctgtacttttgctaatcatcctca

SEQ ID NO: 162534 - DNA, 25 bp, Saccharomyces pastorianus
gccaacccacggaatcagttcggag

SEQ ID NO: 162535 - DNA, 25 bp, Saccharomyces pastorianus
tcaggcattatcagtcctcagtcct

SEQ ID NO: 162536 - DNA, 25 bp, Saccharomyces pastorianus
tatcaattgcggtgtgccagcggac

SEQ ID NO: 162537 - DNA, 25 bp, Saccharomyces pastorianus
taaagatactctacctacacccatt

SEQ ID NO: 162538 - DNA, 25 bp, Saccharomyces pastorianus
tattagcctgatgcctgtcatggat

SEQ ID NO: 162539 - DNA, 25 bp, Saccharomyces pastorianus
tttatccacacatagccagggtgca

SEQ ID NO: 162540 - DNA, 25 bp, Saccharomyces pastorianus
gtaggctttctaccaatggactata

SEQ ID NO: 162541 - DNA, 25 bp, Saccharomyces pastorianus
acaagttccggtgctgttgaaaaag

SEQ ID NO: 162542 - DNA, 25 bp, Saccharomyces pastorianus
aagtcactcacacagctaggtcaat

SEQ ID NO: 162543 - DNA, 25 bp, Saccharomyces pastorianus
ggctgtacggacatttctgttttac

SEQ ID NO: 162544 - DNA, 25 bp, Saccharomyces pastorianus
gccagggtgcaactaccagatgtaa

SEQ ID NO: 162545 - DNA, 25 bp, Saccharomyces pastorianus
taagggccattctcacgggtgcgtt

SEQ ID NO: 162546 - DNA, 25 bp, Saccharomyces pastorianus
acggcattctgtttggctgtacgga

SEQ ID NO: 162547 - DNA, 25 bp, Saccharomyces pastorianus
gttttacttgtctcgatactcggta

SEQ ID NO: 162548 - DNA, 25 bp, Saccharomyces pastorianus
gtattggagttttgcctttcatcgg

SEQ ID NO: 162549 - DNA, 25 bp, Saccharomyces pastorianus
aatctcggctattgggcttgctgaa

SEQ ID NO: 162550 - DNA, 25 bp, Saccharomyces pastorianus
gaacgtgtttctgatgaacgctgtg

SEQ ID NO: 162551 - DNA, 25 bp, Saccharomyces pastorianus
tccccatcactgattacttcttgga

SEQ ID NO: 162552 - DNA, 25 bp, Saccharomyces pastorianus
acacgtatcaagttcatgaccacag

SEQ ID NO: 162553 - DNA, 25 bp, Saccharomyces pastorianus
gaacgttctattgatactgacttga

SEQ ID NO: 162554 - DNA, 25 bp, Saccharomyces pastorianus
aaaaccaaagcttccacacgtatca

SEQ ID NO: 162555 - DNA, 25 bp, Saccharomyces pastorianus
atcgtatgtacgcaacccagaagaa

SEQ ID NO: 162556 - DNA, 25 bp, Saccharomyces pastorianus
gacattcttagtgaccttgacttca

SEQ ID NO: 162557 - DNA, 25 bp, Saccharomyces pastorianus
gacttgttcaaaacattctttccgg

SEQ ID NO: 162558 - DNA, 25 bp, Saccharomyces pastorianus
ctcttacatagagttcgcggcatga

SEQ ID NO: 162559 - DNA, 25 bp, Saccharomyces pastorianus
atagaaggacgcactttccccatca

SEQ ID NO: 162560 - DNA, 25 bp, Saccharomyces pastorianus
gcacgaactattttatctagccatg

SEQ ID NO: 162561 - DNA, 25 bp, Saccharomyces pastorianus
atctagccatggtggaattcttctt

SEQ ID NO: 162562 - DNA, 25 bp, Saccharomyces pastorianus
atacaacaccaacctgcacatgatg

SEQ ID NO: 162563 - DNA, 25 bp, Saccharomyces pastorianus
gaaaaacatggtatgccctcgacga

SEQ ID NO: 162564 - DNA, 25 bp, Saccharomyces pastorianus
gtatgccctcgacgattttcgaaaa

SEQ ID NO: 162565 - DNA, 25 bp, Saccharomyces pastorianus
aattgcctcatacagtcttacacga

SEQ ID NO: 162566 - DNA, 25 bp, Saccharomyces pastorianus
gcagttttgtcattcactgacccaa

SEQ ID NO: 162567 - DNA, 25 bp, Saccharomyces pastorianus
gaacgatccaacctatgacaaagct

SEQ ID NO: 162568 - DNA, 25 bp, Saccharomyces pastorianus
aactatttgatcttgatcccttcaa

SEQ ID NO: 162569 - DNA, 25 bp, Saccharomyces pastorianus
tgatgcttccgccaaaccatagaaa

SEQ ID NO: 162570 - DNA, 25 bp, Saccharomyces pastorianus
attgaagctagacacatggcctcca

SEQ ID NO: 162571 - DNA, 25 bp, Saccharomyces pastorianus
tttttaccatgctttttcccagaga

SEQ ID NO: 162572 - DNA, 25 bp, Saccharomyces pastorianus
aagcacgtttaatgaggcctcgaag

SEQ ID NO: 162573 - DNA, 25 bp, Saccharomyces pastorianus
ttccatgcaactacataccggttga

SEQ ID NO: 162574 - DNA, 25 bp, Saccharomyces pastorianus
gtgtaagtccttcgtccatttaaga

SEQ ID NO: 162575 - DNA, 25 bp, Saccharomyces pastorianus
ggcctcgaagagtttttaccatgct

SEQ ID NO: 162576 - DNA, 25 bp, Saccharomyces pastorianus
ggaagatcgtctctaatattgctta

SEQ ID NO: 162577 - DNA, 25 bp, Saccharomyces pastorianus
aagtggcttggcgtatcagcgttat

SEQ ID NO: 162578 - DNA, 25 bp, Saccharomyces pastorianus
aaataattcaccttctccatcaaag

SEQ ID NO: 162579 - DNA, 25 bp, Saccharomyces pastorianus
attgcatcaagcagatttccatcat

SEQ ID NO: 162580 - DNA, 25 bp, Saccharomyces pastorianus
tttccatcatatcaatctttcagcg

SEQ ID NO: 162581 - DNA, 25 bp, Saccharomyces pastorianus
gaagttcttctagagcttgccatca

SEQ ID NO: 162582 - DNA, 25 bp, Saccharomyces pastorianus
ggccaacgtgttacatttactctat

SEQ ID NO: 162583 - DNA, 25 bp, Saccharomyces pastorianus
gagtctatggagcagtcgacatcta

SEQ ID NO: 162584 - DNA, 25 bp, Saccharomyces pastorianus
atcacagtgtcgctttatgggaggt

SEQ ID NO: 162585 - DNA, 25 bp, Saccharomyces pastorianus
tccagaaccttacagcccttgagaa

SEQ ID NO: 162586 - DNA, 25 bp, Saccharomyces pastorianus
gtaggcctaacaacatccgaactgt

SEQ ID NO: 162587 - DNA, 25 bp, Saccharomyces pastorianus
gaacattgtacatgtcacgactgga

SEQ ID NO: 162588 - DNA, 25 bp, Saccharomyces pastorianus
actcataatctctttcgggttggcg

SEQ ID NO: 162589 - DNA, 25 bp, Saccharomyces pastorianus
tactctgctgatattacgacgggtt

SEQ ID NO: 162590 - DNA, 25 bp, Saccharomyces pastorianus
gaaagttctgcatacacgacctaca

SEQ ID NO: 162591 - DNA, 25 bp, Saccharomyces pastorianus
gtgcgattcaacatataccatggtg

SEQ ID NO: 162592 - DNA, 25 bp, Saccharomyces pastorianus
tgttcctcagtacatcacagtgtcg

SEQ ID NO: 162593 - DNA, 25 bp, Saccharomyces pastorianus
gaattcaaaactgtaatgctgacga

SEQ ID NO: 162594 - DNA, 25 bp, Saccharomyces pastorianus
actgtcgttgcttgaccggaatctt

SEQ ID NO: 162595 - DNA, 25 bp, Saccharomyces pastorianus
tttgcatactttcttcactgtcgtt

SEQ ID NO: 162596 - DNA, 25 bp, Saccharomyces pastorianus
ggcttgataaccctttgcatacttt

SEQ ID NO: 162597 - DNA, 25 bp, Saccharomyces pastorianus
gcaattcgaattcctctctagtagc

SEQ ID NO: 162598 - DNA, 25 bp, Saccharomyces pastorianus
ttcctctctagtagcaaatggttcg

SEQ ID NO: 162599 - DNA, 25 bp, Saccharomyces pastorianus
gataaccctttgcatactttcttca

SEQ ID NO: 162600 - DNA, 25 bp, Saccharomyces pastorianus
gaccggaatcttatgtcctgcaatt

SEQ ID NO: 162601 - DNA, 25 bp, Saccharomyces pastorianus
atactttcttcactgtcgttgcttg

SEQ ID NO: 162602 - DNA, 25 bp, Saccharomyces pastorianus
aatgctgacgaaggcttgataaccc

SEQ ID NO: 162603 - DNA, 25 bp, Saccharomyces pastorianus
tatgtcctgcaattcgaattcctct

SEQ ID NO: 162604 - DNA, 25 bp, Saccharomyces pastorianus
taaagttcgacttgcggcattctcg

SEQ ID NO: 162605 - DNA, 25 bp, Saccharomyces pastorianus
taagcttttctgctctttcaaactc

SEQ ID NO: 162606 - DNA, 25 bp, Saccharomyces pastorianus
gctgcttaccttactcttttttata

SEQ ID NO: 162607 - DNA, 25 bp, Saccharomyces pastorianus
tgaagaaacccgcttccttattaag

SEQ ID NO: 162608 - DNA, 25 bp, Saccharomyces pastorianus
atttacagtgttgaccataccaggt

SEQ ID NO: 162609 - DNA, 25 bp, Saccharomyces pastorianus
tgccttcccttgatgacgttattta

SEQ ID NO: 162610 - DNA, 25 bp, Saccharomyces pastorianus
ggtcattggactaccatttatcgta

SEQ ID NO: 162611 - DNA, 25 bp, Saccharomyces pastorianus
ttgtttatcatcctagctgcttacc

SEQ ID NO: 162612 - DNA, 25 bp, Saccharomyces pastorianus
gcggcattctcgctacaaaaattcc

SEQ ID NO: 162613 - DNA, 25 bp, Saccharomyces pastorianus
ggacaattcaacgactttgccttcc

SEQ ID NO: 162614 - DNA, 25 bp, Saccharomyces pastorianus
ggacctgcataatatttaccgaaat

SEQ ID NO: 162615 - DNA, 25 bp, Saccharomyces pastorianus
tctgtttgtaccgtacacagtgttg

SEQ ID NO: 162616 - DNA, 25 bp, Saccharomyces pastorianus
tgtcgtttctgtttgtaccgtacac

SEQ ID NO: 162617 - DNA, 25 bp, Saccharomyces pastorianus
aatatgtgtcgtttctgtttgtacc

SEQ ID NO: 162618 - DNA, 25 bp, Saccharomyces pastorianus
gtgtcgtttctgtttgtaccgtaca

SEQ ID NO: 162619 - DNA, 25 bp, Saccharomyces pastorianus
gtcgtttctgtttgtaccgtacaca

SEQ ID NO: 162620 - DNA, 25 bp, Saccharomyces pastorianus
atgtgtcgtttctgtttgtaccgta

SEQ ID NO: 162621 - DNA, 25 bp, Saccharomyces pastorianus
tcgtttctgtttgtaccgtacacag

SEQ ID NO: 162622 - DNA, 25 bp, Saccharomyces pastorianus
tgtgtcgtttctgtttgtaccgtac

SEQ ID NO: 162623 - DNA, 25 bp, Saccharomyces pastorianus
tatgtgtcgtttctgtttgtaccgt

SEQ ID NO: 162624 - DNA, 25 bp, Saccharomyces pastorianus
atatgtgtcgtttctgtttgtaccg

SEQ ID NO: 162625 - DNA, 25 bp, Saccharomyces pastorianus
gtttctgtttgtaccgtacacagtg

SEQ ID NO: 162626 - DNA, 25 bp, Saccharomyces pastorianus
ggattcttttcatgttggtacaagg

SEQ ID NO: 162627 - DNA, 25 bp, Saccharomyces pastorianus
tatctcgggtggattcttttcatgt

SEQ ID NO: 162628 - DNA, 25 bp, Saccharomyces pastorianus
attccttaattttttgtgctgcata

SEQ ID NO: 162629 - DNA, 25 bp, Saccharomyces pastorianus
gggaatgtgccttctattacgcacc

SEQ ID NO: 162630 - DNA, 25 bp, Saccharomyces pastorianus
aagaggatttccaatatttttatgt

SEQ ID NO: 162631 - DNA, 25 bp, Saccharomyces pastorianus
atttttatgttgataccattcctta

SEQ ID NO: 162632 - DNA, 25 bp, Saccharomyces pastorianus
gataccattccttaattttttgtgc

SEQ ID NO: 162633 - DNA, 25 bp, Saccharomyces pastorianus
cgggtggattcttttcatgttggta

SEQ ID NO: 162634 - DNA, 25 bp, Saccharomyces pastorianus
gaatgtgccttctattacgcacctt

SEQ ID NO: 162635 - DNA, 25 bp, Saccharomyces pastorianus
ttgtgctgcatatatgtgtcacggg

SEQ ID NO: 162636 - DNA, 25 bp, Saccharomyces pastorianus
gtggattcttttcatgttggtacaa

SEQ ID NO: 162637 - DNA, 25 bp, Saccharomyces pastorianus
gtgatcataatcaggacacgcgtca

SEQ ID NO: 162638 - DNA, 25 bp, Saccharomyces pastorianus
atgctcactagcgtatcggtattca

SEQ ID NO: 162639 - DNA, 25 bp, Saccharomyces pastorianus
aatgctaacggaagccacggcgaac

SEQ ID NO: 162640 - DNA, 25 bp, Saccharomyces pastorianus
gggactctcaaactgggccaataca

SEQ ID NO: 162641 - DNA, 25 bp, Saccharomyces pastorianus
tgggtgatttcaataccgaacctga

SEQ ID NO: 162642 - DNA, 25 bp, Saccharomyces pastorianus
ggcgaaggccattcagatcaaccac

SEQ ID NO: 162643 - DNA, 25 bp, Saccharomyces pastorianus
ttggctacggtaaagtgcatcctga

SEQ ID NO: 162644 - DNA, 25 bp, Saccharomyces pastorianus
gttgcgttgcataattcactacatg

SEQ ID NO: 162645 - DNA, 25 bp, Saccharomyces pastorianus
gaaagagcctctgaatgcctttgaa

SEQ ID NO: 162646 - DNA, 25 bp, Saccharomyces pastorianus
atatctgaggatgccgtgtgcacaa

SEQ ID NO: 162647 - DNA, 25 bp, Saccharomyces pastorianus
agaaccaccttacttggccataacg

SEQ ID NO: 162648 - DNA, 25 bp, Saccharomyces pastorianus
aaacgaagtgctactcatggacata

SEQ ID NO: 162649 - DNA, 25 bp, Saccharomyces pastorianus
gagactctatcacatcatcgtcgac

SEQ ID NO: 162650 - DNA, 25 bp, Saccharomyces pastorianus
atggactctcttgaagctagattac

SEQ ID NO: 162651 - DNA, 25 bp, Saccharomyces pastorianus
acttggtttttgagctttgtctgcc

SEQ ID NO: 162652 - DNA, 25 bp, Saccharomyces pastorianus
tgtctgccctgccaggactggaaat

SEQ ID NO: 162653 - DNA, 25 bp, Saccharomyces pastorianus
tagattacaattcattcaggtcctg

SEQ ID NO: 162654 - DNA, 25 bp, Saccharomyces pastorianus
attacgaggacttccaccagtgttt

SEQ ID NO: 162655 - DNA, 25 bp, Saccharomyces pastorianus
ctcacgaatcaagccacctgtaaag

SEQ ID NO: 162656 - DNA, 25 bp, Saccharomyces pastorianus
gacgctgcacaagaccagagactct

SEQ ID NO: 162657 - DNA, 25 bp, Saccharomyces pastorianus
agagctattccttgacttatccaaa

SEQ ID NO: 162658 - DNA, 25 bp, Saccharomyces pastorianus
ttatatccgcatagccattccaatg

SEQ ID NO: 162659 - DNA, 25 bp, Saccharomyces pastorianus
acagggaactgcacaagaggtcgaa

SEQ ID NO: 162660 - DNA, 25 bp, Saccharomyces pastorianus
aaactactgattccggatttgataa

SEQ ID NO: 162661 - DNA, 25 bp, Saccharomyces pastorianus
agttggtacatcgaaaggccctcca

SEQ ID NO: 162662 - DNA, 25 bp, Saccharomyces pastorianus
gaaaggccctccaacgatatactgg

SEQ ID NO: 162663 - DNA, 25 bp, Saccharomyces pastorianus
gtcgaaagagacaagttggtacatc

SEQ ID NO: 162664 - DNA, 25 bp, Saccharomyces pastorianus
ccaacgatatactggatgaatccga

SEQ ID NO: 162665 - DNA, 25 bp, Saccharomyces pastorianus
aaagcttgtggacgcattttgaaac

SEQ ID NO: 162666 - DNA, 25 bp, Saccharomyces pastorianus
tggacgcattttgaaactactgatt

SEQ ID NO: 162667 - DNA, 25 bp, Saccharomyces pastorianus
gatgaatccgaatttaaaagcttgt

SEQ ID NO: 162668 - DNA, 25 bp, Saccharomyces pastorianus
ttccggatttgataaggacgattac

SEQ ID NO: 162669 - DNA, 25 bp, Saccharomyces pastorianus
ggacgattacaaaaatatcaaggct

SEQ ID NO: 162670 - DNA, 25 bp, Saccharomyces pastorianus
gaatccgtatttaaatgccagctta

SEQ ID NO: 162671 - DNA, 25 bp, Saccharomyces pastorianus
gagattctcatgaagctgctggccg

SEQ ID NO: 162672 - DNA, 25 bp, Saccharomyces pastorianus
cacttgtggtcgtgtagttggtcta

SEQ ID NO: 162673 - DNA, 25 bp, Saccharomyces pastorianus
ggacggaacaactcgctttaaccag

SEQ ID NO: 162674 - DNA, 25 bp, Saccharomyces pastorianus
aagactcttcgcagacacttgtggt

SEQ ID NO: 162675 - DNA, 25 bp, Saccharomyces pastorianus
gaggagccacttcatgaacctattg

SEQ ID NO: 162676 - DNA, 25 bp, Saccharomyces pastorianus
tccatgccatgctacagaatccgta

SEQ ID NO: 162677 - DNA, 25 bp, Saccharomyces pastorianus
taccgttttacaacagcttcttggg

SEQ ID NO: 162678 - DNA, 25 bp, Saccharomyces pastorianus
caaagctctgaagacggcggtgaat

SEQ ID NO: 162679 - DNA, 25 bp, Saccharomyces pastorianus
acagcttcttgggagcactattgaa

SEQ ID NO: 162680 - DNA, 25 bp, Saccharomyces pastorianus
accgattctggctatcctttttatt

SEQ ID NO: 162681 - DNA, 25 bp, Saccharomyces pastorianus
gtgtcccgagttattgttctaaagc

SEQ ID NO: 162682 - DNA, 25 bp, Saccharomyces pastorianus
tcaaaaatcgcgttcagggtaaaag

SEQ ID NO: 162683 - DNA, 25 bp, Saccharomyces pastorianus
gttattgttctaaagcgggcaccat

SEQ ID NO: 162684 - DNA, 25 bp, Saccharomyces pastorianus
aaagcgggcaccattgtagtaactt

SEQ ID NO: 162685 - DNA, 25 bp, Saccharomyces pastorianus
attgcgaaatttctgctcttctcgt

SEQ ID NO: 162686 - DNA, 25 bp, Saccharomyces pastorianus
gcgggcaccattgtagtaacttatt

SEQ ID NO: 162687 - DNA, 25 bp, Saccharomyces pastorianus
tgctcttctcgtctcgctcaaaaat

SEQ ID NO: 162688 - DNA, 25 bp, Saccharomyces pastorianus
ttctcgtctcgctcaaaaatcgcgt

SEQ ID NO: 162689 - DNA, 25 bp, Saccharomyces pastorianus
gtaacttattgcgaaatttctgctc

SEQ ID NO: 162690 - DNA, 25 bp, Saccharomyces pastorianus
gtctcgctcaaaaatcgcgttcagg

SEQ ID NO: 162691 - DNA, 25 bp, Saccharomyces pastorianus
aaatgtgtcccgagttattgttcta

SEQ ID NO: 162692 - DNA, 25 bp, Saccharomyces pastorianus
ggctccggctattcatgaaaaatcc

SEQ ID NO: 162693 - DNA, 25 bp, Saccharomyces pastorianus
gtaaaggcgtttatatatttgtact

SEQ ID NO: 162694 - DNA, 25 bp, Saccharomyces pastorianus
tagtaagataaccttcaagcccaat

SEQ ID NO: 162695 - DNA, 25 bp, Saccharomyces pastorianus
aagacacagttcttccagctactgg

SEQ ID NO: 162696 - DNA, 25 bp, Saccharomyces pastorianus
gataaccttcaagcccaatattcta

SEQ ID NO: 162697 - DNA, 25 bp, Saccharomyces pastorianus
acacagttcttccagctactggctc

SEQ ID NO: 162698 - DNA, 25 bp, Saccharomyces pastorianus
atatttgtactttatggtatgtgca

SEQ ID NO: 162699 - DNA, 25 bp, Saccharomyces pastorianus
ttcaagcccaatattctaagtaaag

SEQ ID NO: 162700 - DNA, 25 bp, Saccharomyces pastorianus
tactggctccggctattcatgaaaa

SEQ ID NO: 162701 - DNA, 25 bp, Saccharomyces pastorianus
ttatttcaagacacagttcttccag

SEQ ID NO: 162702 - DNA, 25 bp, Saccharomyces pastorianus
ggtatgtgcatatgtattgtaaaga

SEQ ID NO: 162703 - DNA, 25 bp, Saccharomyces pastorianus
aatgtggttcctaaaactgctgaaa

SEQ ID NO: 162704 - DNA, 25 bp, Saccharomyces pastorianus
gcttattctccaattctgcttctag

SEQ ID NO: 162705 - DNA, 25 bp, Saccharomyces pastorianus
ccaattctgcttctagactaggtaa

SEQ ID NO: 162706 - DNA, 25 bp, Saccharomyces pastorianus
catcccagacttcatgatccaaggt

SEQ ID NO: 162707 - DNA, 25 bp, Saccharomyces pastorianus
atcattcaacagtcccgcttattct

SEQ ID NO: 162708 - DNA, 25 bp, Saccharomyces pastorianus
ggctataaaggtgtccctttccaca

SEQ ID NO: 162709 - DNA, 25 bp, Saccharomyces pastorianus
gatcctgcggtcaatggaaccaaaa

SEQ ID NO: 162710 - DNA, 25 bp, Saccharomyces pastorianus
atgtttaaacgttccatcattcaac

SEQ ID NO: 162711 - DNA, 25 bp, Saccharomyces pastorianus
tacggtcccaagttcgctgacgaaa

SEQ ID NO: 162712 - DNA, 25 bp, Saccharomyces pastorianus
atccatttacggtcccaagttcgct

SEQ ID NO: 162713 - DNA, 25 bp, Saccharomyces pastorianus
aaaagtgttctttgatcctgcggtc

SEQ ID NO: 162714 - DNA, 25 bp, Saccharomyces pastorianus
aactgacaacacttctagctcaagc

SEQ ID NO: 162715 - DNA, 25 bp, Saccharomyces pastorianus
aggtggtcaccttctaaaatctcta

SEQ ID NO: 162716 - DNA, 25 bp, Saccharomyces pastorianus
aactctagaggacattctcgtgcaa

SEQ ID NO: 162717 - DNA, 25 bp, Saccharomyces pastorianus
agttttgcgcgtactttagctcctc

SEQ ID NO: 162718 - DNA, 25 bp, Saccharomyces pastorianus
gagcttcactagactatgatccatc

SEQ ID NO: 162719 - DNA, 25 bp, Saccharomyces pastorianus
agctcctcatggcacttacaatggt

SEQ ID NO: 162720 - DNA, 25 bp, Saccharomyces pastorianus
atgatccatcagtacctaacacaag

SEQ ID NO: 162721 - DNA, 25 bp, Saccharomyces pastorianus
ctgttggcatagctggtactggtat

SEQ ID NO: 162722 - DNA, 25 bp, Saccharomyces pastorianus
aaagatacccctagtagcaactcta

SEQ ID NO: 162723 - DNA, 25 bp, Saccharomyces pastorianus
tggttgctgcggaaaacgttgccaa

SEQ ID NO: 162724 - DNA, 25 bp, Saccharomyces pastorianus
taacacaagttacgcgcccgttcaa

SEQ ID NO: 162725 - DNA, 25 bp, Saccharomyces pastorianus
gaggtacttctggtggtttatattc

SEQ ID NO: 162726 - DNA, 25 bp, Saccharomyces pastorianus
ggatgaacccgtcactaaggaaatt

SEQ ID NO: 162727 - DNA, 25 bp, Saccharomyces pastorianus
gaaggactcattatctcaggcggtt

SEQ ID NO: 162728 - DNA, 25 bp, Saccharomyces pastorianus
ggctaagtcactcggaattgcattg

SEQ ID NO: 162729 - DNA, 25 bp, Saccharomyces pastorianus
tgaacgcatttacgaacgcaccggg

SEQ ID NO: 162730 - DNA, 25 bp, Saccharomyces pastorianus
ttttgaaaagacttctgccccatct

SEQ ID NO: 162731 - DNA, 25 bp, Saccharomyces pastorianus
caggcggttgcccaaatttcagatt

SEQ ID NO: 162732 - DNA, 25 bp, Saccharomyces pastorianus
aggcatcaccgaaaaccttgacaag

SEQ ID NO: 162733 - DNA, 25 bp, Saccharomyces pastorianus
aaggccgtcggtacttatgactttg

SEQ ID NO: 162734 - DNA, 25 bp, Saccharomyces pastorianus
accgggctggccaattgcagatttt

SEQ ID NO: 162735 - DNA, 25 bp, Saccharomyces pastorianus
tgtcgggtttttcacacggattaat

SEQ ID NO: 162736 - DNA, 25 bp, Saccharomyces pastorianus
agtagtaactcggtattgtgctttc

SEQ ID NO: 162737 - DNA, 25 bp, Saccharomyces pastorianus
tattgtgctttcgtcgccataatca

SEQ ID NO: 162738 - DNA, 25 bp, Saccharomyces pastorianus
tttcgtacgtttctacatccgagta

SEQ ID NO: 162739 - DNA, 25 bp, Saccharomyces pastorianus
gcctttatgggcgtatatactcttt

SEQ ID NO: 162740 - DNA, 25 bp, Saccharomyces pastorianus
ttttttgcgttttgttgtcaccaca

SEQ ID NO: 162741 - DNA, 25 bp, Saccharomyces pastorianus
gaaatatgcctttatgggcgtatat

SEQ ID NO: 162742 - DNA, 25 bp, Saccharomyces pastorianus
gtttctacatccgagtagcagtagt

SEQ ID NO: 162743 - DNA, 25 bp, Saccharomyces pastorianus
tatactctttcgtacgtttctacat

SEQ ID NO: 162744 - DNA, 25 bp, Saccharomyces pastorianus
gtcgccataatcaggactatcataa

SEQ ID NO: 162745 - DNA, 25 bp, Saccharomyces pastorianus
gatttacttttaatgcatttttgca

SEQ ID NO: 162746 - DNA, 25 bp, Saccharomyces pastorianus
gcgttttgttgtcaccacatatggt

SEQ ID NO: 162747 - DNA, 25 bp, Saccharomyces pastorianus
caatgagacagtatcgcgttattta

SEQ ID NO: 162748 - DNA, 25 bp, Saccharomyces pastorianus
gagacatcaatcaccaactacatca

SEQ ID NO: 162749 - DNA, 25 bp, Saccharomyces pastorianus
gaattccttagatcaatcgccaaag

SEQ ID NO: 162750 - DNA, 25 bp, Saccharomyces pastorianus
aagactttctatttaactcattcaa

SEQ ID NO: 162751 - DNA, 25 bp, Saccharomyces pastorianus
atttgaccctatcttgtatcctgag

SEQ ID NO: 162752 - DNA, 25 bp, Saccharomyces pastorianus
tctgtaccgttctggttaacttact

SEQ ID NO: 162753 - DNA, 25 bp, Saccharomyces pastorianus
gatttggcccaacgacatattactt

SEQ ID NO: 162754 - DNA, 25 bp, Saccharomyces pastorianus
gacggagtacctttgtatgttgaaa

SEQ ID NO: 162755 - DNA, 25 bp, Saccharomyces pastorianus
tagaaatatacttgccgactacagt

SEQ ID NO: 162756 - DNA, 25 bp, Saccharomyces pastorianus
atcgtcacgtatgaatcctccatta

SEQ ID NO: 162757 - DNA, 25 bp, Saccharomyces pastorianus
gatgccaaggtgcatttacagacct

SEQ ID NO: 162758 - DNA, 25 bp, Saccharomyces pastorianus
agactgttgaggaaccatggttggc

SEQ ID NO: 162759 - DNA, 25 bp, Saccharomyces pastorianus
gccagcgaacttccgcaatgatttc

SEQ ID NO: 162760 - DNA, 25 bp, Saccharomyces pastorianus
aagacttgccagatgtggtgagact

SEQ ID NO: 162761 - DNA, 25 bp, Saccharomyces pastorianus
ggacctagaccgttgttatttacag

SEQ ID NO: 162762 - DNA, 25 bp, Saccharomyces pastorianus
caaacgtctacacccatggctgaga

SEQ ID NO: 162763 - DNA, 25 bp, Saccharomyces pastorianus
ggtccatgtttgaatcttttagtta

SEQ ID NO: 162764 - DNA, 25 bp, Saccharomyces pastorianus
aaccagcattgagccgatatttcga

SEQ ID NO: 162765 - DNA, 25 bp, Saccharomyces pastorianus
aaggcgaaccagaccagatgggaga

SEQ ID NO: 162766 - DNA, 25 bp, Saccharomyces pastorianus
atggctgagaccttggttcctcccg

SEQ ID NO: 162767 - DNA, 25 bp, Saccharomyces pastorianus
gggagagtccactcaaacgtctaca

SEQ ID NO: 162768 - DNA, 25 bp, Saccharomyces pastorianus
tttcacctttcgcacacagaagagg

SEQ ID NO: 162769 - DNA, 25 bp, Saccharomyces pastorianus
aaactaaacctcttcgtgcgtgatt

SEQ ID NO: 162770 - DNA, 25 bp, Saccharomyces pastorianus
tgatctctttggtggtggcagtgca

SEQ ID NO: 162771 - DNA, 25 bp, Saccharomyces pastorianus
gcagtgcagggattacatttcgaca

SEQ ID NO: 162772 - DNA, 25 bp, Saccharomyces pastorianus
aatcaggctcagtatcgtggccgtt

SEQ ID NO: 162773 - DNA, 25 bp, Saccharomyces pastorianus
gcatctacagatccagaacaggttt

SEQ ID NO: 162774 - DNA, 25 bp, Saccharomyces pastorianus
gttcgtgttgcgtttactgctccat

SEQ ID NO: 162775 - DNA, 25 bp, Saccharomyces pastorianus
gtatcgtggccgttctttaagcagg

SEQ ID NO: 162776 - DNA, 25 bp, Saccharomyces pastorianus
ggttgacaactttgatctctttggt

SEQ ID NO: 162777 - DNA, 25 bp, Saccharomyces pastorianus
gtggatattcactcagatggttctg

SEQ ID NO: 162778 - DNA, 25 bp, Saccharomyces pastorianus
aaagagggactttgcaggcgacgtt

SEQ ID NO: 162779 - DNA, 25 bp, Saccharomyces pastorianus
ccacggcattcgacgtttgttttga

SEQ ID NO: 162780 - DNA, 25 bp, Saccharomyces pastorianus
ggatttgcaactagagcccacaatt

SEQ ID NO: 162781 - DNA, 25 bp, Saccharomyces pastorianus
ggctgaccaaagttctgggaccatt

SEQ ID NO: 162782 - DNA, 25 bp, Saccharomyces pastorianus
ggtacaatgcacatgccagttactg

SEQ ID NO: 162783 - DNA, 25 bp, Saccharomyces pastorianus
agtctggaccatgatatgaccgtta

SEQ ID NO: 162784 - DNA, 25 bp, Saccharomyces pastorianus
aaatatgcggaatccagtctggacc

SEQ ID NO: 162785 - DNA, 25 bp, Saccharomyces pastorianus
gtggcagagacgtggatttcccgca

SEQ ID NO: 162786 - DNA, 25 bp, Saccharomyces pastorianus
atttcccgcaagtggccttaagaga

SEQ ID NO: 162787 - DNA, 25 bp, Saccharomyces pastorianus
ggcttttcatgacatacttggactt

SEQ ID NO: 162788 - DNA, 25 bp, Saccharomyces pastorianus
gctactgatggcaagaggcttttca

SEQ ID NO: 162789 - DNA, 25 bp, Saccharomyces pastorianus
gagaacccgaaagtacctatcgaag

SEQ ID NO: 162790 - DNA, 25 bp, Saccharomyces pastorianus
gatgatttatggtcgatgcttatta

SEQ ID NO: 162791 - DNA, 25 bp, Saccharomyces pastorianus
gatggttatctgtataagtccttca

SEQ ID NO: 162792 - DNA, 25 bp, Saccharomyces pastorianus
gggatgatcgccactttacttataa

SEQ ID NO: 162793 - DNA, 25 bp, Saccharomyces pastorianus
caagattcggttccaaagagggcgc

SEQ ID NO: 162794 - DNA, 25 bp, Saccharomyces pastorianus
tttccagccaggtgatcgtatcgaa

SEQ ID NO: 162795 - DNA, 25 bp, Saccharomyces pastorianus
gggcgcggtagatctaacatcagtt

SEQ ID NO: 162796 - DNA, 25 bp, Saccharomyces pastorianus
aagtccttcagaattcaacatgtgg

SEQ ID NO: 162797 - DNA, 25 bp, Saccharomyces pastorianus
gggtgacttagctatggtcgaccaa

SEQ ID NO: 162798 - DNA, 25 bp, Saccharomyces pastorianus
tcatagagcaccaccgcaattattt

SEQ ID NO: 162799 - DNA, 25 bp, Saccharomyces pastorianus
gctgaaaattgttcctcgtctggat

SEQ ID NO: 162800 - DNA, 25 bp, Saccharomyces pastorianus
tagaccaagctaacctgtacaaaag

SEQ ID NO: 162801 - DNA, 25 bp, Saccharomyces pastorianus
aagaccaacttttgctcatagagca

SEQ ID NO: 162802 - DNA, 25 bp, Saccharomyces pastorianus
gtggttccgcagtcaactgacacta

SEQ ID NO: 162803 - DNA, 25 bp, Saccharomyces pastorianus
catgttgctgatcccgtagtggttc

SEQ ID NO: 162804 - DNA, 25 bp, Saccharomyces pastorianus
gagcatgcaggaccatgatcaacat

SEQ ID NO: 162805 - DNA, 25 bp, Saccharomyces pastorianus
ttgctgatcccgtagtggttccgca

SEQ ID NO: 162806 - DNA, 25 bp, Saccharomyces pastorianus
gtagtggttccgcagtcaactgaca

SEQ ID NO: 162807 - DNA, 25 bp, Saccharomyces pastorianus
gatcccgtagtggttccgcagtcaa

SEQ ID NO: 162808 - DNA, 25 bp, Saccharomyces pastorianus
gcagtcaactgacactaaagatgaa

SEQ ID NO: 162809 - DNA, 25 bp, Saccharomyces pastorianus
atcaacatgttgctgatcccgtagt

SEQ ID NO: 162810 - DNA, 25 bp, Saccharomyces pastorianus
gcatgcaggaccatgatcaacatgt

SEQ ID NO: 162811 - DNA, 25 bp, Saccharomyces pastorianus
aacatgttgctgatcccgtagtggt

SEQ ID NO: 162812 - DNA, 25 bp, Saccharomyces pastorianus
ggttccgcagtcaactgacactaaa

SEQ ID NO: 162813 - DNA, 25 bp, Saccharomyces pastorianus
gtcattgtagaactcgacgctatta

SEQ ID NO: 162814 - DNA, 25 bp, Saccharomyces pastorianus
gaaaccgtggcatcaaacttcagtt

SEQ ID NO: 162815 - DNA, 25 bp, Saccharomyces pastorianus
aagagttttgactactttcccagat

SEQ ID NO: 162816 - DNA, 25 bp, Saccharomyces pastorianus
gaataggttacttcacttttagcta

SEQ ID NO: 162817 - DNA, 25 bp, Saccharomyces pastorianus
ttgcatttgaactaaacccttggag

SEQ ID NO: 162818 - DNA, 25 bp, Saccharomyces pastorianus
ttaatttaggtctcctgccttcaag

SEQ ID NO: 162819 - DNA, 25 bp, Saccharomyces pastorianus
gggaactgccacgttttccaagaat

SEQ ID NO: 162820 - DNA, 25 bp, Saccharomyces pastorianus
gcatgtatgcgttgatgtcgacgtt

SEQ ID NO: 162821 - DNA, 25 bp, Saccharomyces pastorianus
aagggcgctaggacactttttgcat

SEQ ID NO: 162822 - DNA, 25 bp, Saccharomyces pastorianus
gaattcttatctcagaatcccggat

SEQ ID NO: 162823 - DNA, 25 bp, Saccharomyces pastorianus
aaatgtgcgttcaaaggcttactga

SEQ ID NO: 162824 - DNA, 25 bp, Saccharomyces pastorianus
aaaaatgctctcatcgcttcaaaac

SEQ ID NO: 162825 - DNA, 25 bp, Saccharomyces pastorianus
taaaaaatgctctcatcgcttcaaa

SEQ ID NO: 162826 - DNA, 25 bp, Saccharomyces pastorianus
tgctctcatcgcttcaaaacatttt

SEQ ID NO: 162827 - DNA, 25 bp, Saccharomyces pastorianus
aaatgctctcatcgcttcaaaacat

SEQ ID NO: 162828 - DNA, 25 bp, Saccharomyces pastorianus
aaaatgctctcatcgcttcaaaaca

SEQ ID NO: 162829 - DNA, 25 bp, Saccharomyces pastorianus
atgctctcatcgcttcaaaacattt

SEQ ID NO: 162830 - DNA, 25 bp, Saccharomyces pastorianus
gctctcatcgcttcaaaacattttg

SEQ ID NO: 162831 - DNA, 25 bp, Saccharomyces pastorianus
tctcatcgcttcaaaacattttgat

SEQ ID NO: 162832 - DNA, 25 bp, Saccharomyces pastorianus
tttaaaaaatgctctcatcgcttca

SEQ ID NO: 162833 - DNA, 25 bp, Saccharomyces pastorianus
aaaaaatgctctcatcgcttcaaaa

SEQ ID NO: 162834 - DNA, 25 bp, Saccharomyces pastorianus
aaaacattttgattcacttgatcta

SEQ ID NO: 162835 - DNA, 25 bp, Saccharomyces pastorianus
gtcgtatcactctgcgataaatgcg

SEQ ID NO: 162836 - DNA, 25 bp, Saccharomyces pastorianus
ggaaaacttagcaattcaccatata

SEQ ID NO: 162837 - DNA, 25 bp, Saccharomyces pastorianus
aggcccatttggtgcatattctaga

SEQ ID NO: 162838 - DNA, 25 bp, Saccharomyces pastorianus
aatgcttagagtttttactactgga

SEQ ID NO: 162839 - DNA, 25 bp, Saccharomyces pastorianus
gagagcttgctttgcgaaattgctt

SEQ ID NO: 162840 - DNA, 25 bp, Saccharomyces pastorianus
aagcagccatttcacaagatccaag

SEQ ID NO: 162841 - DNA, 25 bp, Saccharomyces pastorianus
attctagaatccctgttgaatatgg

SEQ ID NO: 162842 - DNA, 25 bp, Saccharomyces pastorianus
attttggccaatactaagtcgtatc

SEQ ID NO: 162843 - DNA, 25 bp, Saccharomyces pastorianus
gatatggtgctattttggccaatac

SEQ ID NO: 162844 - DNA, 25 bp, Saccharomyces pastorianus
tttagcgatcgcctacatgaataag

SEQ ID NO: 162845 - DNA, 25 bp, Saccharomyces pastorianus
tcgaaggttttccaaccttctgcgg

SEQ ID NO: 162846 - DNA, 25 bp, Saccharomyces pastorianus
taagatagatttacgggccgcacta

SEQ ID NO: 162847 - DNA, 25 bp, Saccharomyces pastorianus
actaccggcagataaatctcaacat

SEQ ID NO: 162848 - DNA, 25 bp, Saccharomyces pastorianus
ctcaacatagtggtgtcagcgaaaa

SEQ ID NO: 162849 - DNA, 25 bp, Saccharomyces pastorianus
ccgcactaccggcagataaatctca

SEQ ID NO: 162850 - DNA, 25 bp, Saccharomyces pastorianus
gaattttcaagccttgaaaaccagg

SEQ ID NO: 162851 - DNA, 25 bp, Saccharomyces pastorianus
gtaagatagatttacgggccgcact

SEQ ID NO: 162852 - DNA, 25 bp, Saccharomyces pastorianus
atttacgggccgcactaccggcaga

SEQ ID NO: 162853 - DNA, 25 bp, Saccharomyces pastorianus
tacgggccgcactaccggcagataa

SEQ ID NO: 162854 - DNA, 25 bp, Saccharomyces pastorianus
atctcaacatagtggtgtcagcgaa

SEQ ID NO: 162855 - DNA, 25 bp, Saccharomyces pastorianus
agtggtgtcagcgaaaaagaatttt

SEQ ID NO: 162856 - DNA, 25 bp, Saccharomyces pastorianus
aaatctcaacatagtggtgtcagcg

SEQ ID NO: 162857 - DNA, 25 bp, Saccharomyces pastorianus
attgcaggatgctatagttgaccat

SEQ ID NO: 162858 - DNA, 25 bp, Saccharomyces pastorianus
aagatatcactgaagcgcgcaaaga

SEQ ID NO: 162859 - DNA, 25 bp, Saccharomyces pastorianus
gaaaccttaccatgacgatctggca

SEQ ID NO: 162860 - DNA, 25 bp, Saccharomyces pastorianus
gatggaacgttctatcatttctaat

SEQ ID NO: 162861 - DNA, 25 bp, Saccharomyces pastorianus
gaaagatctctggttacggaaatga

SEQ ID NO: 162862 - DNA, 25 bp, Saccharomyces pastorianus
gaaagcttggaatcccatttgaatg

SEQ ID NO: 162863 - DNA, 25 bp, Saccharomyces pastorianus
gaatggataccaaagtcgctgaaag

SEQ ID NO: 162864 - DNA, 25 bp, Saccharomyces pastorianus
gggaaactctgcttgaagataccaa

SEQ ID NO: 162865 - DNA, 25 bp, Saccharomyces pastorianus
acggaaatgatcttgacgcccagaa

SEQ ID NO: 162866 - DNA, 25 bp, Saccharomyces pastorianus
gactactacggctaataggcatcaa

SEQ ID NO: 162867 - DNA, 25 bp, Saccharomyces pastorianus
taaagccagctttgatgcacttgtg

SEQ ID NO: 162868 - DNA, 25 bp, Saccharomyces pastorianus
gtataccagacaacgggcgaaccat

SEQ ID NO: 162869 - DNA, 25 bp, Saccharomyces pastorianus
taacttcgtcgaaaaagtcgctgaa

SEQ ID NO: 162870 - DNA, 25 bp, Saccharomyces pastorianus
gtcacctgcccaaagttactcaatt

SEQ ID NO: 162871 - DNA, 25 bp, Saccharomyces pastorianus
gcagggaggctttatataaggcgaa

SEQ ID NO: 162872 - DNA, 25 bp, Saccharomyces pastorianus
gctgaaacacggctctaaatctttg

SEQ ID NO: 162873 - DNA, 25 bp, Saccharomyces pastorianus
agtcgctgaaacacggctctaaatc

SEQ ID NO: 162874 - DNA, 25 bp, Saccharomyces pastorianus
caacgggcgaaccattaagcaggga

SEQ ID NO: 162875 - DNA, 25 bp, Saccharomyces pastorianus
gagggagcaggacttcgtctataac

SEQ ID NO: 162876 - DNA, 25 bp, Saccharomyces pastorianus
caatataggaaagacttctggtgga

SEQ ID NO: 162877 - DNA, 25 bp, Saccharomyces pastorianus
gggtttaccagtcacctgcccaaag

SEQ ID NO: 162878 - DNA, 25 bp, Saccharomyces pastorianus
aagttactcaattggcgtcagcgac

SEQ ID NO: 162879 - DNA, 25 bp, Saccharomyces pastorianus
aatggtgtgaacatccttctgggtc

SEQ ID NO: 162880 - DNA, 25 bp, Saccharomyces pastorianus
gatacatttctttaagcagcgtagt

SEQ ID NO: 162881 - DNA, 25 bp, Saccharomyces pastorianus
ttacacggatactaaggcatttgcc

SEQ ID NO: 162882 - DNA, 25 bp, Saccharomyces pastorianus
ggcatttgccgctaacttgcaagca

SEQ ID NO: 162883 - DNA, 25 bp, Saccharomyces pastorianus
aaagctcgagcacaatcgcattcca

SEQ ID NO: 162884 - DNA, 25 bp, Saccharomyces pastorianus
cttctgggtcacatttctcagggaa

SEQ ID NO: 162885 - DNA, 25 bp, Saccharomyces pastorianus
ggcttggagccatcacgggaaaact

SEQ ID NO: 162886 - DNA, 25 bp, Saccharomyces pastorianus
ctcagggaataaaatcttgcgactc

SEQ ID NO: 162887 - DNA, 25 bp, Saccharomyces pastorianus
catttaatgtggtgctcagtgttga

SEQ ID NO: 162888 - DNA, 25 bp, Saccharomyces pastorianus
tgagaaggactatgccaggcggctt

SEQ ID NO: 162889 - DNA, 25 bp, Saccharomyces pastorianus
tatgaagcttgtttttgggacccaa

SEQ ID NO: 162890 - DNA, 25 bp, Saccharomyces pastorianus
gaaggacacctctccggatttgtaa

SEQ ID NO: 162891 - DNA, 25 bp, Saccharomyces pastorianus
aaagatatacgctgccgtgggagaa

SEQ ID NO: 162892 - DNA, 25 bp, Saccharomyces pastorianus
gctgccgtgggagaaggacacctct

SEQ ID NO: 162893 - DNA, 25 bp, Saccharomyces pastorianus
tgggagaaggacacctctccggatt

SEQ ID NO: 162894 - DNA, 25 bp, Saccharomyces pastorianus
atatacgctgccgtgggagaaggac

SEQ ID NO: 162895 - DNA, 25 bp, Saccharomyces pastorianus
atacgctgccgtgggagaaggacac

SEQ ID NO: 162896 - DNA, 25 bp, Saccharomyces pastorianus
aagtataatgtcagatttttgttaa

SEQ ID NO: 162897 - DNA, 25 bp, Saccharomyces pastorianus
aatagaaagatatacgctgccgtgg

SEQ ID NO: 162898 - DNA, 25 bp, Saccharomyces pastorianus
gagaaggacacctctccggatttgt

SEQ ID NO: 162899 - DNA, 25 bp, Saccharomyces pastorianus
tctccggatttgtaactaaaaatca

SEQ ID NO: 162900 - DNA, 25 bp, Saccharomyces pastorianus
gacacctctccggatttgtaactaa

SEQ ID NO: 162901 - DNA, 25 bp, Saccharomyces pastorianus
actattctggttctgagtttcctta

SEQ ID NO: 162902 - DNA, 25 bp, Saccharomyces pastorianus
ttttgttgcgcggtaaaggctgcta

SEQ ID NO: 162903 - DNA, 25 bp, Saccharomyces pastorianus
atagtattgggtacggctgcgtcgc

SEQ ID NO: 162904 - DNA, 25 bp, Saccharomyces pastorianus
gtccaacaaccgtggcttcaaacgt

SEQ ID NO: 162905 - DNA, 25 bp, Saccharomyces pastorianus
agaatttctgaaatcccagtggttt

SEQ ID NO: 162906 - DNA, 25 bp, Saccharomyces pastorianus
agtggtttttcatctgtttggctat

SEQ ID NO: 162907 - DNA, 25 bp, Saccharomyces pastorianus
tggagagctcatgccactattctgg

SEQ ID NO: 162908 - DNA, 25 bp, Saccharomyces pastorianus
attttgactgccacttgtccaacaa

SEQ ID NO: 162909 - DNA, 25 bp, Saccharomyces pastorianus
tttccttattacctcgtccatagta

SEQ ID NO: 162910 - DNA, 25 bp, Saccharomyces pastorianus
tgcgtcgcctggatttttctccaaa

SEQ ID NO: 162911 - DNA, 25 bp, Saccharomyces pastorianus
gatttttctccaaagtggcctggga

SEQ ID NO: 162912 - DNA, 25 bp, Saccharomyces pastorianus
gcatgagtttcgatgttggcacacg

SEQ ID NO: 162913 - DNA, 25 bp, Saccharomyces pastorianus
ggcccgttggccttgaagaaaatga

SEQ ID NO: 162914 - DNA, 25 bp, Saccharomyces pastorianus
ttattcagttttaccagctttgggc

SEQ ID NO: 162915 - DNA, 25 bp, Saccharomyces pastorianus
gacattcagggtacaagggcccgtt

SEQ ID NO: 162916 - DNA, 25 bp, Saccharomyces pastorianus
gaagagaggcctattgtcgcagata

SEQ ID NO: 162917 - DNA, 25 bp, Saccharomyces pastorianus
ggtacctaacaatgttgtgccgcct

SEQ ID NO: 162918 - DNA, 25 bp, Saccharomyces pastorianus
gagtcagcctttttagggacgagat

SEQ ID NO: 162919 - DNA, 25 bp, Saccharomyces pastorianus
aagaacatgtcacttccgcggaaga

SEQ ID NO: 162920 - DNA, 25 bp, Saccharomyces pastorianus
cacacgggagactgggcaagacctg

SEQ ID NO: 162921 - DNA, 25 bp, Saccharomyces pastorianus
atctatcacctttcttatcgcaaca

SEQ ID NO: 162922 - DNA, 25 bp, Saccharomyces pastorianus
gtcgcagatagttccgcgcaagaca

SEQ ID NO: 162923 - DNA, 25 bp, Saccharomyces pastorianus
ggaacaagccttctcaaaagcaact

SEQ ID NO: 162924 - DNA, 25 bp, Saccharomyces pastorianus
agctctgccgctgatgacggtacca

SEQ ID NO: 162925 - DNA, 25 bp, Saccharomyces pastorianus
tgcccgttggttatcgaaaatcgat

SEQ ID NO: 162926 - DNA, 25 bp, Saccharomyces pastorianus
gacggtaccatacatgttttccatg

SEQ ID NO: 162927 - DNA, 25 bp, Saccharomyces pastorianus
gattactttgtcactgttcaacctg

SEQ ID NO: 162928 - DNA, 25 bp, Saccharomyces pastorianus
aacacttctgttttgattcaccaag

SEQ ID NO: 162929 - DNA, 25 bp, Saccharomyces pastorianus
gagttttatggcacgacctggattt

SEQ ID NO: 162930 - DNA, 25 bp, Saccharomyces pastorianus
gattcaccaagtttccaagcattta

SEQ ID NO: 162931 - DNA, 25 bp, Saccharomyces pastorianus
acctggatttggctagcacacctta

SEQ ID NO: 162932 - DNA, 25 bp, Saccharomyces pastorianus
aaaagttacctctattcagctctgc

SEQ ID NO: 162933 - DNA, 25 bp, Saccharomyces pastorianus
aaatccgatgattgtgccactaaag

SEQ ID NO: 162934 - DNA, 25 bp, Saccharomyces pastorianus
taattctttacacaataatgccagt

SEQ ID NO: 162935 - DNA, 25 bp, Saccharomyces pastorianus
ttctttacacaataatgccagtgaa

SEQ ID NO: 162936 - DNA, 25 bp, Saccharomyces pastorianus
ttacacaataatgccagtgaagacg

SEQ ID NO: 162937 - DNA, 25 bp, Saccharomyces pastorianus
aattctttacacaataatgccagtg

SEQ ID NO: 162938 - DNA, 25 bp, Saccharomyces pastorianus
gtggttcaggtggttatttggtaat

SEQ ID NO: 162939 - DNA, 25 bp, Saccharomyces pastorianus
gccagtgaagacgatagaggaatac

SEQ ID NO: 162940 - DNA, 25 bp, Saccharomyces pastorianus
tctttacacaataatgccagtgaag

SEQ ID NO: 162941 - DNA, 25 bp, Saccharomyces pastorianus
ataattctttacacaataatgccag

SEQ ID NO: 162942 - DNA, 25 bp, Saccharomyces pastorianus
attctttacacaataatgccagtga

SEQ ID NO: 162943 - DNA, 25 bp, Saccharomyces pastorianus
tgaagacgatagaggaatacgagta

SEQ ID NO: 162944 - DNA, 25 bp, Saccharomyces pastorianus
tggttcaggtggttatttggtaata

SEQ ID NO: 162945 - DNA, 25 bp, Saccharomyces pastorianus
caaactctccagtggttagcttctg

SEQ ID NO: 162946 - DNA, 25 bp, Saccharomyces pastorianus
atctactggtgcttccattatgcca

SEQ ID NO: 162947 - DNA, 25 bp, Saccharomyces pastorianus
ttatgccacgtgatatcgccaaggt

SEQ ID NO: 162948 - DNA, 25 bp, Saccharomyces pastorianus
ttctggcctttctgactctacgaaa

SEQ ID NO: 162949 - DNA, 25 bp, Saccharomyces pastorianus
gagctcgtctcaaggtcctattgta

SEQ ID NO: 162950 - DNA, 25 bp, Saccharomyces pastorianus
gagtccacagactgctaacggtttt

SEQ ID NO: 162951 - DNA, 25 bp, Saccharomyces pastorianus
cattcacttcatttttcgctttcaa

SEQ ID NO: 162952 - DNA, 25 bp, Saccharomyces pastorianus
gtaagttacagacgccaggactatt

SEQ ID NO: 162953 - DNA, 25 bp, Saccharomyces pastorianus
tagacaccataccatccactttata

SEQ ID NO: 162954 - DNA, 25 bp, Saccharomyces pastorianus
gaatacctactaccgtttgaaccag

SEQ ID NO: 162955 - DNA, 25 bp, Saccharomyces pastorianus
taaatgcctgtgtcaccaacgatat

SEQ ID NO: 162956 - DNA, 25 bp, Saccharomyces pastorianus
gatttccataaagttcctaccacta

SEQ ID NO: 162957 - DNA, 25 bp, Saccharomyces pastorianus
gaagcgccaaagaagcatagacctt

SEQ ID NO: 162958 - DNA, 25 bp, Saccharomyces pastorianus
gaacttcagtttgctctattattta

SEQ ID NO: 162959 - DNA, 25 bp, Saccharomyces pastorianus
tattgccgcccaagagaacttcagt

SEQ ID NO: 162960 - DNA, 25 bp, Saccharomyces pastorianus
acaactttatcaaaccttcggacat

SEQ ID NO: 162961 - DNA, 25 bp, Saccharomyces pastorianus
gtatatcataggtgagctgtcgcaa

SEQ ID NO: 162962 - DNA, 25 bp, Saccharomyces pastorianus
ttatgtggctaatgaactgatttcc

SEQ ID NO: 162963 - DNA, 25 bp, Saccharomyces pastorianus
aagagctttgcctaggttgatacat

SEQ ID NO: 162964 - DNA, 25 bp, Saccharomyces pastorianus
gttttactttgactctattgccgcc

SEQ ID NO: 162965 - DNA, 25 bp, Saccharomyces pastorianus
atgcgattgcacatcaccctgatat

SEQ ID NO: 162966 - DNA, 25 bp, Saccharomyces pastorianus
gttgaagatgaatcgctgccagtaa

SEQ ID NO: 162967 - DNA, 25 bp, Saccharomyces pastorianus
aaccaagcctattttctagaaacat

SEQ ID NO: 162968 - DNA, 25 bp, Saccharomyces pastorianus
gtgtccaaccaagcctattttctag

SEQ ID NO: 162969 - DNA, 25 bp, Saccharomyces pastorianus
gagaacgtcaacattgttcaccagg

SEQ ID NO: 162970 - DNA, 25 bp, Saccharomyces pastorianus
gaaacattcttagattgcaatccac

SEQ ID NO: 162971 - DNA, 25 bp, Saccharomyces pastorianus
aatccacagctgcaatccctaagac

SEQ ID NO: 162972 - DNA, 25 bp, Saccharomyces pastorianus
ttcttagattgcaatccacagctgc

SEQ ID NO: 162973 - DNA, 25 bp, Saccharomyces pastorianus
tgttcaccaggcgtgtccaaccaag

SEQ ID NO: 162974 - DNA, 25 bp, Saccharomyces pastorianus
aacattgttcaccaggcgtgtccaa

SEQ ID NO: 162975 - DNA, 25 bp, Saccharomyces pastorianus
cagctgcaatccctaagactcaaaa

SEQ ID NO: 162976 - DNA, 25 bp, Saccharomyces pastorianus
aagactcaaaaaggtgtcatctttt

SEQ ID NO: 162977 - DNA, 25 bp, Saccharomyces pastorianus
gaagctgcattacaaagatatccct

SEQ ID NO: 162978 - DNA, 25 bp, Saccharomyces pastorianus
gttgggctatttgctactttcacat

SEQ ID NO: 162979 - DNA, 25 bp, Saccharomyces pastorianus
gatttatgtgtttgcatcagtcctt

SEQ ID NO: 162980 - DNA, 25 bp, Saccharomyces pastorianus
gtaagcatcgtattcaccgtcgaaa

SEQ ID NO: 162981 - DNA, 25 bp, Saccharomyces pastorianus
agcagtactactcccttatcaatga

SEQ ID NO: 162982 - DNA, 25 bp, Saccharomyces pastorianus
ttagtggccacgttagtaagcatcg

SEQ ID NO: 162983 - DNA, 25 bp, Saccharomyces pastorianus
atcagtccttgtgtcctttggttac

SEQ ID NO: 162984 - DNA, 25 bp, Saccharomyces pastorianus
ttgaatcctgactacaccatatatg

SEQ ID NO: 162985 - DNA, 25 bp, Saccharomyces pastorianus
tggtgcctctttaactttagtgtcc

SEQ ID NO: 162986 - DNA, 25 bp, Saccharomyces pastorianus
accatgactggtgttttctatttgt

SEQ ID NO: 162987 - DNA, 25 bp, Saccharomyces pastorianus
ctttaggtcgccaatctatttacaa

SEQ ID NO: 162988 - DNA, 25 bp, Saccharomyces pastorianus
gttacgcttgtctattagtggccac

SEQ ID NO: 162989 - DNA, 25 bp, Saccharomyces pastorianus
tgaggaagctgaagcccctcccttg

SEQ ID NO: 162990 - DNA, 25 bp, Saccharomyces pastorianus
tttgagttccttggatagcactatt

SEQ ID NO: 162991 - DNA, 25 bp, Saccharomyces pastorianus
tactccctccacctgaggaagctga

SEQ ID NO: 162992 - DNA, 25 bp, Saccharomyces pastorianus
tgttttcgctatggttgggtagttt

SEQ ID NO: 162993 - DNA, 25 bp, Saccharomyces pastorianus
tagttttttgagttccttggatagc

SEQ ID NO: 162994 - DNA, 25 bp, Saccharomyces pastorianus
tttcccattttgttttcgctatggt

SEQ ID NO: 162995 - DNA, 25 bp, Saccharomyces pastorianus
atgcaaacactagacgagacttcaa

SEQ ID NO: 162996 - DNA, 25 bp, Saccharomyces pastorianus
tgaatacaatttggctttacctaag

SEQ ID NO: 162997 - DNA, 25 bp, Saccharomyces pastorianus
atggattgcgacgagttttcttttg

SEQ ID NO: 162998 - DNA, 25 bp, Saccharomyces pastorianus
gacgagacttcaaatctactccctc

SEQ ID NO: 162999 - DNA, 25 bp, Saccharomyces pastorianus
cctcccttggaacaaaaatttcatg

SEQ ID NO: 163000 - DNA, 25 bp, Saccharomyces pastorianus
gggaagctatcacaccaacggaagg

SEQ ID NO: 163001 - DNA, 25 bp, Saccharomyces pastorianus
aaattccatggtcgcggatgaacgg

SEQ ID NO: 163002 - DNA, 25 bp, Saccharomyces pastorianus
aagcagacccacaattttattcaga

SEQ ID NO: 163003 - DNA, 25 bp, Saccharomyces pastorianus
ggacgatggctcagttgtttacgat

SEQ ID NO: 163004 - DNA, 25 bp, Saccharomyces pastorianus
attcagatcgtgttttcctcaagga

SEQ ID NO: 163005 - DNA, 25 bp, Saccharomyces pastorianus
aacgcagcattctagtcattcatac

SEQ ID NO: 163006 - DNA, 25 bp, Saccharomyces pastorianus
gttgacttcaggcatgattgtctca

SEQ ID NO: 163007 - DNA, 25 bp, Saccharomyces pastorianus
atagaccacattttccaaacatttg

SEQ ID NO: 163008 - DNA, 25 bp, Saccharomyces pastorianus
atatcccttcttttaaattccatgg

SEQ ID NO: 163009 - DNA, 25 bp, Saccharomyces pastorianus
tcaatcggctgcatattggccacta

SEQ ID NO: 163010 - DNA, 25 bp, Saccharomyces pastorianus
ggccactacgactagaatatgcgat

SEQ ID NO: 163011 - DNA, 25 bp, Saccharomyces pastorianus
gaaggtcatcttttccatacatggt

SEQ ID NO: 163012 - DNA, 25 bp, Saccharomyces pastorianus
agttggctagctcaggtcaacctga

SEQ ID NO: 163013 - DNA, 25 bp, Saccharomyces pastorianus
ataggctcggcgatagagtaccaaa

SEQ ID NO: 163014 - DNA, 25 bp, Saccharomyces pastorianus
tttacaggatgattgggtcgccatt

SEQ ID NO: 163015 - DNA, 25 bp, Saccharomyces pastorianus
ggtaacccacctaattctcaagtgc

SEQ ID NO: 163016 - DNA, 25 bp, Saccharomyces pastorianus
tttcctattaactccaactacattg

SEQ ID NO: 163017 - DNA, 25 bp, Saccharomyces pastorianus
gagtccaaatcgaagggcgcttata

SEQ ID NO: 163018 - DNA, 25 bp, Saccharomyces pastorianus
acattgttggtcagactttggtcca

SEQ ID NO: 163019 - DNA, 25 bp, Saccharomyces pastorianus
acctgaccccttaatcaacacatat

SEQ ID NO: 163020 - DNA, 25 bp, Saccharomyces pastorianus
gtacaatatcagttcgtcgtggtaa

SEQ ID NO: 163021 - DNA, 25 bp, Saccharomyces pastorianus
catacatggtgaggccttgcataca

SEQ ID NO: 163022 - DNA, 25 bp, Saccharomyces pastorianus
gcagtcaagcaaatccaaacaaagt

SEQ ID NO: 163023 - DNA, 25 bp, Saccharomyces pastorianus
aaagcgctatgatctatcttataat

SEQ ID NO: 163024 - DNA, 25 bp, Saccharomyces pastorianus
ttagactcttccattacccaggacg

SEQ ID NO: 163025 - DNA, 25 bp, Saccharomyces pastorianus
gcaaccagaatattttgagtctcct

SEQ ID NO: 163026 - DNA, 25 bp, Saccharomyces pastorianus
cattacccaggacggcaaatttgca

SEQ ID NO: 163027 - DNA, 25 bp, Saccharomyces pastorianus
tttgagtctcctttgcagtcaagca

SEQ ID NO: 163028 - DNA, 25 bp, Saccharomyces pastorianus
taactgatggtctgggaaatgtcgt

SEQ ID NO: 163029 - DNA, 25 bp, Saccharomyces pastorianus
atgtcgtggattttacatctctccc

SEQ ID NO: 163030 - DNA, 25 bp, Saccharomyces pastorianus
gattttacatctctccctgaagaat

SEQ ID NO: 163031 - DNA, 25 bp, Saccharomyces pastorianus
gtagactccagcttgcaaccagaat

SEQ ID NO: 163032 - DNA, 25 bp, Saccharomyces pastorianus
aaactttttcatatgtagactccag

SEQ ID NO: 163033 - DNA, 25 bp, Saccharomyces pastorianus
attcggtagagttacggtctttgag

SEQ ID NO: 163034 - DNA, 25 bp, Saccharomyces pastorianus
gatcagtcagttctaaagtcacatt

SEQ ID NO: 163035 - DNA, 25 bp, Saccharomyces pastorianus
aactcttcaagatattggcttttat

SEQ ID NO: 163036 - DNA, 25 bp, Saccharomyces pastorianus
aaggcagtacaattcgttatttggc

SEQ ID NO: 163037 - DNA, 25 bp, Saccharomyces pastorianus
ttaactcaattgacgtacccatcag

SEQ ID NO: 163038 - DNA, 25 bp, Saccharomyces pastorianus
tttgcccatggataccaatcttttt

SEQ ID NO: 163039 - DNA, 25 bp, Saccharomyces pastorianus
aatcatcgataaccccaaatccttt

SEQ ID NO: 163040 - DNA, 25 bp, Saccharomyces pastorianus
ttcatgaatcatattgtttgcccat

SEQ ID NO: 163041 - DNA, 25 bp, Saccharomyces pastorianus
gttatttggctgtaactcttcaaga

SEQ ID NO: 163042 - DNA, 25 bp, Saccharomyces pastorianus
gacgtacccatcagaataaactcaa

SEQ ID NO: 163043 - DNA, 25 bp, Saccharomyces pastorianus
gagatctttacacaaattcggtaga

SEQ ID NO: 163044 - DNA, 25 bp, Saccharomyces pastorianus
gaacattttcatatcaagcgatcac

SEQ ID NO: 163045 - DNA, 25 bp, Saccharomyces pastorianus
gaattaagtgtaacaggttcagcca

SEQ ID NO: 163046 - DNA, 25 bp, Saccharomyces pastorianus
ttttcatatcaagcgatcacgagtt

SEQ ID NO: 163047 - DNA, 25 bp, Saccharomyces pastorianus
ttcagccattaaccatcatcgtatt

SEQ ID NO: 163048 - DNA, 25 bp, Saccharomyces pastorianus
cacgagttcgttttgatttcattaa

SEQ ID NO: 163049 - DNA, 25 bp, Saccharomyces pastorianus
gatttcattaattatgaccacatgg

SEQ ID NO: 163050 - DNA, 25 bp, Saccharomyces pastorianus
aagcgatcacgagttcgttttgatt

SEQ ID NO: 163051 - DNA, 25 bp, Saccharomyces pastorianus
aagtgtaacaggttcagccattaac

SEQ ID NO: 163052 - DNA, 25 bp, Saccharomyces pastorianus
agccattaaccatcatcgtattttt

SEQ ID NO: 163053 - DNA, 25 bp, Saccharomyces pastorianus
tcattaattatgaccacatggagaa

SEQ ID NO: 163054 - DNA, 25 bp, Saccharomyces pastorianus
tatcaagcgatcacgagttcgtttt

SEQ ID NO: 163055 - DNA, 25 bp, Saccharomyces pastorianus
aaatccgacctttacgctcgaggag

SEQ ID NO: 163056 - DNA, 25 bp, Saccharomyces pastorianus
aggtagacatttattcactgcctct

SEQ ID NO: 163057 - DNA, 25 bp, Saccharomyces pastorianus
cactgcctctaatatcaaccgatgt

SEQ ID NO: 163058 - DNA, 25 bp, Saccharomyces pastorianus
tgtaaacacaacacgacgcttccaa

SEQ ID NO: 163059 - DNA, 25 bp, Saccharomyces pastorianus
tgatactccacgagggaaccattgg

SEQ ID NO: 163060 - DNA, 25 bp, Saccharomyces pastorianus
acgacgcttccaatatagtgacgat

SEQ ID NO: 163061 - DNA, 25 bp, Saccharomyces pastorianus
atcaccacgtccatcttatagcagt

SEQ ID NO: 163062 - DNA, 25 bp, Saccharomyces pastorianus
atagcagtcgtcctaatgtaaacac

SEQ ID NO: 163063 - DNA, 25 bp, Saccharomyces pastorianus
gagcccgctgagaaaatccgacctt

SEQ ID NO: 163064 - DNA, 25 bp, Saccharomyces pastorianus
ggcagttctgtgtcaggatcaccac

SEQ ID NO: 163065 - DNA, 25 bp, Saccharomyces pastorianus
tatagtgacgatgagcccgctgaga

SEQ ID NO: 163066 - DNA, 25 bp, Saccharomyces pastorianus
gctacctaacggcacacttaatgaa

SEQ ID NO: 163067 - DNA, 25 bp, Saccharomyces pastorianus
gtagtacactcttcacaagacctca

SEQ ID NO: 163068 - DNA, 25 bp, Saccharomyces pastorianus
caaagcgtcactggtttagatgcaa

SEQ ID NO: 163069 - DNA, 25 bp, Saccharomyces pastorianus
gattgctctgtgtaaaactggttta

SEQ ID NO: 163070 - DNA, 25 bp, Saccharomyces pastorianus
gcaaactgttttgggtcgtcctgag

SEQ ID NO: 163071 - DNA, 25 bp, Saccharomyces pastorianus
caacgattatatggagccccgggaa

SEQ ID NO: 163072 - DNA, 25 bp, Saccharomyces pastorianus
gtcgtcctgagtcgctaattgtaca

SEQ ID NO: 163073 - DNA, 25 bp, Saccharomyces pastorianus
aagacctcaacactccaatggctat

SEQ ID NO: 163074 - DNA, 25 bp, Saccharomyces pastorianus
ggaaatacacatacccctgatagaa

SEQ ID NO: 163075 - DNA, 25 bp, Saccharomyces pastorianus
gtcgacaccacttctgattttactt

SEQ ID NO: 163076 - DNA, 25 bp, Saccharomyces pastorianus
tggaggtttctcaatctctaccaaa

SEQ ID NO: 163077 - DNA, 25 bp, Saccharomyces pastorianus
cgtggtctcgttactaagagtagat

SEQ ID NO: 163078 - DNA, 25 bp, Saccharomyces pastorianus
atggcagaatacttggccacctgct

SEQ ID NO: 163079 - DNA, 25 bp, Saccharomyces pastorianus
agtcatttctatttgttaccacaca

SEQ ID NO: 163080 - DNA, 25 bp, Saccharomyces pastorianus
gtgaagcacttctttccatacgtaa

SEQ ID NO: 163081 - DNA, 25 bp, Saccharomyces pastorianus
taaagtctttcccaccattcttgcc

SEQ ID NO: 163082 - DNA, 25 bp, Saccharomyces pastorianus
ttccattcttccttcgtgaagcact

SEQ ID NO: 163083 - DNA, 25 bp, Saccharomyces pastorianus
catacgtaaagtctttcccaccatt

SEQ ID NO: 163084 - DNA, 25 bp, Saccharomyces pastorianus
gctcttcgtggtctcgttactaaga

SEQ ID NO: 163085 - DNA, 25 bp, Saccharomyces pastorianus
ctgcaagatccgctcttcgtggtct

SEQ ID NO: 163086 - DNA, 25 bp, Saccharomyces pastorianus
agaatacttggccacctgctccttc

SEQ ID NO: 163087 - DNA, 25 bp, Saccharomyces pastorianus
cattcttgccttggccgctgcaaga

SEQ ID NO: 163088 - DNA, 25 bp, Saccharomyces pastorianus
gtgcctcctacaaatcaacaattta

SEQ ID NO: 163089 - DNA, 25 bp, Saccharomyces pastorianus
aatgttttcagaccagcagcgcttc

SEQ ID NO: 163090 - DNA, 25 bp, Saccharomyces pastorianus
attcaaccggacttatgccttcagt

SEQ ID NO: 163091 - DNA, 25 bp, Saccharomyces pastorianus
aaccggacttatgccttcagtgcct

SEQ ID NO: 163092 - DNA, 25 bp, Saccharomyces pastorianus
ttatgccttcagtgcctcctacaaa

SEQ ID NO: 163093 - DNA, 25 bp, Saccharomyces pastorianus
tttaatgcacaaacccaatcttcaa

SEQ ID NO: 163094 - DNA, 25 bp, Saccharomyces pastorianus
aacccaatcttcaatgttttcagac

SEQ ID NO: 163095 - DNA, 25 bp, Saccharomyces pastorianus
gcagcgcttctttcaatatcaatta

SEQ ID NO: 163096 - DNA, 25 bp, Saccharomyces pastorianus
attacaccaccaaaatcaaggacag

SEQ ID NO: 163097 - DNA, 25 bp, Saccharomyces pastorianus
ttcagtgcctcctacaaatcaacaa

SEQ ID NO: 163098 - DNA, 25 bp, Saccharomyces pastorianus
agaccagcagcgcttctttcaatat

SEQ ID NO: 163099 - DNA, 25 bp, Saccharomyces pastorianus
tctaccgtcgtactcaaaaccaatg

SEQ ID NO: 163100 - DNA, 25 bp, Saccharomyces pastorianus
gtatggtaacaagtggaggctcaat

SEQ ID NO: 163101 - DNA, 25 bp, Saccharomyces pastorianus
ggctcccactgatgtaaagactata

SEQ ID NO: 163102 - DNA, 25 bp, Saccharomyces pastorianus
agcggaggaggagcttgcatcataa

SEQ ID NO: 163103 - DNA, 25 bp, Saccharomyces pastorianus
gaaacagagcttctactctaccgtc

SEQ ID NO: 163104 - DNA, 25 bp, Saccharomyces pastorianus
aagattgtacaagttcattctgaac

SEQ ID NO: 163105 - DNA, 25 bp, Saccharomyces pastorianus
atgtcgacgatgatggctatctaga

SEQ ID NO: 163106 - DNA, 25 bp, Saccharomyces pastorianus
aagaaagcttcacggcgagtcggct

SEQ ID NO: 163107 - DNA, 25 bp, Saccharomyces pastorianus
gatattgaaggctcccactgatgta

SEQ ID NO: 163108 - DNA, 25 bp, Saccharomyces pastorianus
gagtcggctactaagcccaacataa

SEQ ID NO: 163109 - DNA, 25 bp, Saccharomyces pastorianus
gaaagccatcgatcaagcatcttga

SEQ ID NO: 163110 - DNA, 25 bp, Saccharomyces pastorianus
tgtggttgttccatccgttgtggaa

SEQ ID NO: 163111 - DNA, 25 bp, Saccharomyces pastorianus
gacagtacacaattatccaaccgga

SEQ ID NO: 163112 - DNA, 25 bp, Saccharomyces pastorianus
caatggctgaacttacccaattgtt

SEQ ID NO: 163113 - DNA, 25 bp, Saccharomyces pastorianus
agatcttttcccaagcgttgctaaa

SEQ ID NO: 163114 - DNA, 25 bp, Saccharomyces pastorianus
acgtcgaagacgctcagcaagatgt

SEQ ID NO: 163115 - DNA, 25 bp, Saccharomyces pastorianus
tatccaaccggaagccactgacgaa

SEQ ID NO: 163116 - DNA, 25 bp, Saccharomyces pastorianus
gagacggattgcacgactctaataa

SEQ ID NO: 163117 - DNA, 25 bp, Saccharomyces pastorianus
aagtaatagagcacatgcgcctccc

SEQ ID NO: 163118 - DNA, 25 bp, Saccharomyces pastorianus
attgttgttgtcgttgtggttgttc

SEQ ID NO: 163119 - DNA, 25 bp, Saccharomyces pastorianus
gatgtcaatggccagcagatctttt

SEQ ID NO: 163120 - DNA, 25 bp, Saccharomyces pastorianus
gatcatctgctttattatctttgct

SEQ ID NO: 163121 - DNA, 25 bp, Saccharomyces pastorianus
aacgcctccgatgctttagacaaaa

SEQ ID NO: 163122 - DNA, 25 bp, Saccharomyces pastorianus
ataccaagctttgtctgatccaaag

SEQ ID NO: 163123 - DNA, 25 bp, Saccharomyces pastorianus
ccaagctttgtctgatccaaagcaa

SEQ ID NO: 163124 - DNA, 25 bp, Saccharomyces pastorianus
cgcctccgatgctttagacaaaatt

SEQ ID NO: 163125 - DNA, 25 bp, Saccharomyces pastorianus
acgcctccgatgctttagacaaaat

SEQ ID NO: 163126 - DNA, 25 bp, Saccharomyces pastorianus
agctttgtctgatccaaagcaattg

SEQ ID NO: 163127 - DNA, 25 bp, Saccharomyces pastorianus
tagacaaaattagataccaagcttt

SEQ ID NO: 163128 - DNA, 25 bp, Saccharomyces pastorianus
gcctccgatgctttagacaaaatta

SEQ ID NO: 163129 - DNA, 25 bp, Saccharomyces pastorianus
ctccgatgctttagacaaaattaga

SEQ ID NO: 163130 - DNA, 25 bp, Saccharomyces pastorianus
gttcattagaatcaccccaaaacca

SEQ ID NO: 163131 - DNA, 25 bp, Saccharomyces pastorianus
taacgcctccgatgctttagacaaa

SEQ ID NO: 163132 - DNA, 25 bp, Saccharomyces pastorianus
aagaagtcatcacgagaccattctg

SEQ ID NO: 163133 - DNA, 25 bp, Saccharomyces pastorianus
caattggcagtacttgcgaagaaaa

SEQ ID NO: 163134 - DNA, 25 bp, Saccharomyces pastorianus
agtcatcacgagaccattctgaatt

SEQ ID NO: 163135 - DNA, 25 bp, Saccharomyces pastorianus
tcaagaagtcatcacgagaccattc

SEQ ID NO: 163136 - DNA, 25 bp, Saccharomyces pastorianus
attcgttgcttaccctatccaactt

SEQ ID NO: 163137 - DNA, 25 bp, Saccharomyces pastorianus
gtcatcacgagaccattctgaattc

SEQ ID NO: 163138 - DNA, 25 bp, Saccharomyces pastorianus
aagtcatcacgagaccattctgaat

SEQ ID NO: 163139 - DNA, 25 bp, Saccharomyces pastorianus
tatccaacttctagtcaccaaggaa

SEQ ID NO: 163140 - DNA, 25 bp, Saccharomyces pastorianus
atcacgagaccattctgaattcgtt

SEQ ID NO: 163141 - DNA, 25 bp, Saccharomyces pastorianus
ttggcagtacttgcgaagaaaagag

SEQ ID NO: 163142 - DNA, 25 bp, Saccharomyces pastorianus
gaagtcatcacgagaccattctgaa

SEQ ID NO: 163143 - DNA, 25 bp, Saccharomyces pastorianus
tactgtgacaacgttactgactgca

SEQ ID NO: 163144 - DNA, 25 bp, Saccharomyces pastorianus
tgagatttgtttaccactttaccgt

SEQ ID NO: 163145 - DNA, 25 bp, Saccharomyces pastorianus
gggacattagaaccatgcagacaat

SEQ ID NO: 163146 - DNA, 25 bp, Saccharomyces pastorianus
gggatgttacagaacctgccaagaa

SEQ ID NO: 163147 - DNA, 25 bp, Saccharomyces pastorianus
gtctttaaaggttcgagaagctcca

SEQ ID NO: 163148 - DNA, 25 bp, Saccharomyces pastorianus
gttcaggctaaccatgacaccttag

SEQ ID NO: 163149 - DNA, 25 bp, Saccharomyces pastorianus
ggattttcttccatttgattacgat

SEQ ID NO: 163150 - DNA, 25 bp, Saccharomyces pastorianus
tattatcaagaaaccggccgtgctg

SEQ ID NO: 163151 - DNA, 25 bp, Saccharomyces pastorianus
gaggattttgactccaaacagtgtc

SEQ ID NO: 163152 - DNA, 25 bp, Saccharomyces pastorianus
gtattacctacttttcattcaggga

SEQ ID NO: 163153 - DNA, 25 bp, Saccharomyces pastorianus
gctactgttgctttcggaatgggta

SEQ ID NO: 163154 - DNA, 25 bp, Saccharomyces pastorianus
tataggttcctatctggtcagacta

SEQ ID NO: 163155 - DNA, 25 bp, Saccharomyces pastorianus
ataacaacttccagtcaggcctatt

SEQ ID NO: 163156 - DNA, 25 bp, Saccharomyces pastorianus
ggaatagcgcatttaacagccagta

SEQ ID NO: 163157 - DNA, 25 bp, Saccharomyces pastorianus
tgtggtatccaaattccgcgttcaa

SEQ ID NO: 163158 - DNA, 25 bp, Saccharomyces pastorianus
atggtcatcatatgtcccggcgaaa

SEQ ID NO: 163159 - DNA, 25 bp, Saccharomyces pastorianus
gattcttcagagttttccgttaaag

SEQ ID NO: 163160 - DNA, 25 bp, Saccharomyces pastorianus
gggatgtagacttcaaacctgccaa

SEQ ID NO: 163161 - DNA, 25 bp, Saccharomyces pastorianus
atactgacgggtgcatcggcgatta

SEQ ID NO: 163162 - DNA, 25 bp, Saccharomyces pastorianus
atcgaagaaataatccccgctgacc

SEQ ID NO: 163163 - DNA, 25 bp, Saccharomyces pastorianus
gaggtattcccgtaggtgttattgc

SEQ ID NO: 163164 - DNA, 25 bp, Saccharomyces pastorianus
tgagtcctccacttcttgaaactat

SEQ ID NO: 163165 - DNA, 25 bp, Saccharomyces pastorianus
gaagggctacctaattctgatttaa

SEQ ID NO: 163166 - DNA, 25 bp, Saccharomyces pastorianus
ctgatttaattgttcctttggtgca

SEQ ID NO: 163167 - DNA, 25 bp, Saccharomyces pastorianus
tcaagttttggaaacggcacgtcat

SEQ ID NO: 163168 - DNA, 25 bp, Saccharomyces pastorianus
gcaataccatgtacgacaagtctat

SEQ ID NO: 163169 - DNA, 25 bp, Saccharomyces pastorianus
ggcacgtcatcttcaagggcaggtt

SEQ ID NO: 163170 - DNA, 25 bp, Saccharomyces pastorianus
cagaacccttattatcgggagctca

SEQ ID NO: 163171 - DNA, 25 bp, Saccharomyces pastorianus
gtatacgcttggcttcttactggac

SEQ ID NO: 163172 - DNA, 25 bp, Saccharomyces pastorianus
gaaggtactcaaatgcggttgtata

SEQ ID NO: 163173 - DNA, 25 bp, Saccharomyces pastorianus
gtgcatattttgaaggagcgccaga

SEQ ID NO: 163174 - DNA, 25 bp, Saccharomyces pastorianus
tcctttggtgcagaggttcgttaaa

SEQ ID NO: 163175 - DNA, 25 bp, Saccharomyces pastorianus
actggacctgttgtacctgtaatag

SEQ ID NO: 163176 - DNA, 25 bp, Saccharomyces pastorianus
acggcgcttcaggtgggtttattat

SEQ ID NO: 163177 - DNA, 25 bp, Saccharomyces pastorianus
agccatcatatgcttgacccagagt

SEQ ID NO: 163178 - DNA, 25 bp, Saccharomyces pastorianus
ggtatcccacagaagccatcatatg

SEQ ID NO: 163179 - DNA, 25 bp, Saccharomyces pastorianus
aatgccgattggttccggtatccca

SEQ ID NO: 163180 - DNA, 25 bp, Saccharomyces pastorianus
tataatgtcttctgcgtgccaagtg

SEQ ID NO: 163181 - DNA, 25 bp, Saccharomyces pastorianus
gaaggttgcagatgtcttgtcccaa

SEQ ID NO: 163182 - DNA, 25 bp, Saccharomyces pastorianus
caatcatgttgggtggactcgccat

SEQ ID NO: 163183 - DNA, 25 bp, Saccharomyces pastorianus
gatattccaatccatgcggacggcg

SEQ ID NO: 163184 - DNA, 25 bp, Saccharomyces pastorianus
cataagtttggcttaaccactcccg

SEQ ID NO: 163185 - DNA, 25 bp, Saccharomyces pastorianus
tgtgccaccacaggctctagtgagg

SEQ ID NO: 163186 - DNA, 25 bp, Saccharomyces pastorianus
atggcacgccaatcccgatgaagaa

SEQ ID NO: 163187 - DNA, 25 bp, Saccharomyces pastorianus
aagaatgctgcccaacctattgccg

SEQ ID NO: 163188 - DNA, 25 bp, Saccharomyces pastorianus
gtaagtgctgctaacagttctaaca

SEQ ID NO: 163189 - DNA, 25 bp, Saccharomyces pastorianus
tcaaagaatgctgcccaacctattg

SEQ ID NO: 163190 - DNA, 25 bp, Saccharomyces pastorianus
aacggtaaggttgcaggcgccgtct

SEQ ID NO: 163191 - DNA, 25 bp, Saccharomyces pastorianus
gccgtctggtgttgctctaactggt

SEQ ID NO: 163192 - DNA, 25 bp, Saccharomyces pastorianus
cttcactggtttagtaagtgctgct

SEQ ID NO: 163193 - DNA, 25 bp, Saccharomyces pastorianus
taacagttctaacagctcaagctca

SEQ ID NO: 163194 - DNA, 25 bp, Saccharomyces pastorianus
tggtgttgctctaactggtgcttgg

SEQ ID NO: 163195 - DNA, 25 bp, Saccharomyces pastorianus
gctgcccaacctattgccggtttaa

SEQ ID NO: 163196 - DNA, 25 bp, Saccharomyces pastorianus
gtctggtgttgctctaactggtgct

SEQ ID NO: 163197 - DNA, 25 bp, Saccharomyces pastorianus
gctcaagctcaaagaatgctgccca

SEQ ID NO: 163198 - DNA, 25 bp, Saccharomyces pastorianus
aatgcagtccatacatgcgtttctg

SEQ ID NO: 163199 - DNA, 25 bp, Saccharomyces pastorianus
ccatacatgcgtttctgggtagttt

SEQ ID NO: 163200 - DNA, 25 bp, Saccharomyces pastorianus
atgcacgttttttatatgacgataa

SEQ ID NO: 163201 - DNA, 25 bp, Saccharomyces pastorianus
gcaaatgcagtccatacatgcgttt

SEQ ID NO: 163202 - DNA, 25 bp, Saccharomyces pastorianus
tgcagtccatacatgcgtttctggg

SEQ ID NO: 163203 - DNA, 25 bp, Saccharomyces pastorianus
atacatgcgtttctgggtagtttat

SEQ ID NO: 163204 - DNA, 25 bp, Saccharomyces pastorianus
tggtcaggaagcaaatgcagtccat

SEQ ID NO: 163205 - DNA, 25 bp, Saccharomyces pastorianus
cagtccatacatgcgtttctgggta

SEQ ID NO: 163206 - DNA, 25 bp, Saccharomyces pastorianus
gacgataatacttattttggtcagg

SEQ ID NO: 163207 - DNA, 25 bp, Saccharomyces pastorianus
aatacttattttggtcaggaagcaa

SEQ ID NO: 163208 - DNA, 25 bp, Saccharomyces pastorianus
gtccatacatgcgtttctgggtagt

SEQ ID NO: 163209 - DNA, 25 bp, Saccharomyces pastorianus
gccccagcagcttagatattcttaa

SEQ ID NO: 163210 - DNA, 25 bp, Saccharomyces pastorianus
gatgacaataattagcctttccact

SEQ ID NO: 163211 - DNA, 25 bp, Saccharomyces pastorianus
ataagcggtgtgtatgagtctcgga

SEQ ID NO: 163212 - DNA, 25 bp, Saccharomyces pastorianus
aaagggactacgatattggacaaat

SEQ ID NO: 163213 - DNA, 25 bp, Saccharomyces pastorianus
tgatgtctgtgaaaccttatttgca

SEQ ID NO: 163214 - DNA, 25 bp, Saccharomyces pastorianus
aggcacatatggtcagttcatcgaa

SEQ ID NO: 163215 - DNA, 25 bp, Saccharomyces pastorianus
gatggactccattaccaaaagcccc

SEQ ID NO: 163216 - DNA, 25 bp, Saccharomyces pastorianus
gaataaactcgattggatggactcc

SEQ ID NO: 163217 - DNA, 25 bp, Saccharomyces pastorianus
gtaataacactcaactagccgtgga

SEQ ID NO: 163218 - DNA, 25 bp, Saccharomyces pastorianus
catatgagcaattcacgcccttatt

SEQ ID NO: 163219 - DNA, 25 bp, Saccharomyces pastorianus
gcccttattagcaagccacactgat

SEQ ID NO: 163220 - DNA, 25 bp, Saccharomyces pastorianus
ggacgtaccggacaacctgacgctg

SEQ ID NO: 163221 - DNA, 25 bp, Saccharomyces pastorianus
acgcaagtaacaacaatggcagctg

SEQ ID NO: 163222 - DNA, 25 bp, Saccharomyces pastorianus
tagagacacatatcaccgacaacca

SEQ ID NO: 163223 - DNA, 25 bp, Saccharomyces pastorianus
gccccaagagtcacccaatggattt

SEQ ID NO: 163224 - DNA, 25 bp, Saccharomyces pastorianus
gacgctgcagggatacttattgggt

SEQ ID NO: 163225 - DNA, 25 bp, Saccharomyces pastorianus
ttgggcgcgaagacttattcataca

SEQ ID NO: 163226 - DNA, 25 bp, Saccharomyces pastorianus
gcaaagactcacagctgcacaacag

SEQ ID NO: 163227 - DNA, 25 bp, Saccharomyces pastorianus
cttattgggtccaaattgggcgcga

SEQ ID NO: 163228 - DNA, 25 bp, Saccharomyces pastorianus
gaccactttcaattggacgtaccgg

SEQ ID NO: 163229 - DNA, 25 bp, Saccharomyces pastorianus
gcaataacaataacgggcctacctc

SEQ ID NO: 163230 - DNA, 25 bp, Saccharomyces pastorianus
cctccagcgggagaaccaatgggaa

SEQ ID NO: 163231 - DNA, 25 bp, Saccharomyces pastorianus
gcttgttcatgcacatctgagtctt

SEQ ID NO: 163232 - DNA, 25 bp, Saccharomyces pastorianus
gagtcgcttgttcatgcacatctga

SEQ ID NO: 163233 - DNA, 25 bp, Saccharomyces pastorianus
acgcggagtcgcttgttcatgcaca

SEQ ID NO: 163234 - DNA, 25 bp, Saccharomyces pastorianus
aaggatttcatacgcggagtcgctt

SEQ ID NO: 163235 - DNA, 25 bp, Saccharomyces pastorianus
atcaaatattcgtcctcaaggattt

SEQ ID NO: 163236 - DNA, 25 bp, Saccharomyces pastorianus
tcatacgcggagtcgcttgttcatg

SEQ ID NO: 163237 - DNA, 25 bp, Saccharomyces pastorianus
gtcgcttgttcatgcacatctgagt

SEQ ID NO: 163238 - DNA, 25 bp, Saccharomyces pastorianus
ttgttcatgcacatctgagtctttc

SEQ ID NO: 163239 - DNA, 25 bp, Saccharomyces pastorianus
tcaaggatttcatacgcggagtcgc

SEQ ID NO: 163240 - DNA, 25 bp, Saccharomyces pastorianus
tcgtcctcaaggatttcatacgcgg

SEQ ID NO: 163241 - DNA, 25 bp, Saccharomyces pastorianus
atttcatacgcggagtcgcttgttc

SEQ ID NO: 163242 - DNA, 25 bp, Saccharomyces pastorianus
gttatccaatagctatgtactcaag

SEQ ID NO: 163243 - DNA, 25 bp, Saccharomyces pastorianus
gtagccatacttctcctgttaatat

SEQ ID NO: 163244 - DNA, 25 bp, Saccharomyces pastorianus
ccctcaggtgcggtattgttttgtt

SEQ ID NO: 163245 - DNA, 25 bp, Saccharomyces pastorianus
tggcctttaaagttggctgtgataa

SEQ ID NO: 163246 - DNA, 25 bp, Saccharomyces pastorianus
gaagtgctcttttcatctactacag

SEQ ID NO: 163247 - DNA, 25 bp, Saccharomyces pastorianus
tgtactcaagtaccgtgtatacact

SEQ ID NO: 163248 - DNA, 25 bp, Saccharomyces pastorianus
ggctgtgataactttagttcttcga

SEQ ID NO: 163249 - DNA, 25 bp, Saccharomyces pastorianus
agttcttcgaacttttccacacaag

SEQ ID NO: 163250 - DNA, 25 bp, Saccharomyces pastorianus
acaagtagtttgttctccctcaggt

SEQ ID NO: 163251 - DNA, 25 bp, Saccharomyces pastorianus
atctctagaacgtttattcgacggg

SEQ ID NO: 163252 - DNA, 25 bp, Saccharomyces pastorianus
ctcctgttaatattgctcagcttaa

SEQ ID NO: 163253 - DNA, 25 bp, Saccharomyces pastorianus
aagaggtttctgatcctttggaagc

SEQ ID NO: 163254 - DNA, 25 bp, Saccharomyces pastorianus
aagaaggcaaccgactacgttctag

SEQ ID NO: 163255 - DNA, 25 bp, Saccharomyces pastorianus
cactacggtatgaagccagaagact

SEQ ID NO: 163256 - DNA, 25 bp, Saccharomyces pastorianus
gactatgtctcgaactacactaatg

SEQ ID NO: 163257 - DNA, 25 bp, Saccharomyces pastorianus
ccggttacggtaagagattagccat

SEQ ID NO: 163258 - DNA, 25 bp, Saccharomyces pastorianus
tacgttctagccgaccctgtgaagg

SEQ ID NO: 163259 - DNA, 25 bp, Saccharomyces pastorianus
ccgaccctgtgaaggcttggaaaga

SEQ ID NO: 163260 - DNA, 25 bp, Saccharomyces pastorianus
aagcctcaattgaacaacgatctat

SEQ ID NO: 163261 - DNA, 25 bp, Saccharomyces pastorianus
tgccaccagactatgtctcgaacta

SEQ ID NO: 163262 - DNA, 25 bp, Saccharomyces pastorianus
gaatacatcgacttcaagcctcaat

SEQ ID NO: 163263 - DNA, 25 bp, Saccharomyces pastorianus
acaagttggcttgcttgggttgctg

SEQ ID NO: 163264 - DNA, 25 bp, Saccharomyces pastorianus
gggccctggttacggagaccacaat

SEQ ID NO: 163265 - DNA, 25 bp, Saccharomyces pastorianus
taacgatgtcggaaccaccgtcact

SEQ ID NO: 163266 - DNA, 25 bp, Saccharomyces pastorianus
gtattcactaccactaacgatgtcg

SEQ ID NO: 163267 - DNA, 25 bp, Saccharomyces pastorianus
ggtttcttcactacggtattcacta

SEQ ID NO: 163268 - DNA, 25 bp, Saccharomyces pastorianus
tacgctgctactttctttgtcgttg

SEQ ID NO: 163269 - DNA, 25 bp, Saccharomyces pastorianus
gtcactcttactcagacagtcaaca

SEQ ID NO: 163270 - DNA, 25 bp, Saccharomyces pastorianus
ttgtcgttgtggtcagctgcggtca

SEQ ID NO: 163271 - DNA, 25 bp, Saccharomyces pastorianus
actaccgctcaaacaggtttcttca

SEQ ID NO: 163272 - DNA, 25 bp, Saccharomyces pastorianus
tgcgtcgcacgctattacattcatt

SEQ ID NO: 163273 - DNA, 25 bp, Saccharomyces pastorianus
ggcagctgtgacaactcaggttaca

SEQ ID NO: 163274 - DNA, 25 bp, Saccharomyces pastorianus
attacattcattcgctacgctgcta

SEQ ID NO: 163275 - DNA, 25 bp, Saccharomyces pastorianus
accccttcgggacaagatgagaaat

SEQ ID NO: 163276 - DNA, 25 bp, Saccharomyces pastorianus
aagacagtagatgctcaaacgagaa

SEQ ID NO: 163277 - DNA, 25 bp, Saccharomyces pastorianus
gatcaagaatccgatcaagatcaaa

SEQ ID NO: 163278 - DNA, 25 bp, Saccharomyces pastorianus
agtagatgctcaaacgagaagggac

SEQ ID NO: 163279 - DNA, 25 bp, Saccharomyces pastorianus
gacaagatgagaaatcaccactgga

SEQ ID NO: 163280 - DNA, 25 bp, Saccharomyces pastorianus
ataccccttcgggacaagatgagaa

SEQ ID NO: 163281 - DNA, 25 bp, Saccharomyces pastorianus
aatcaccactggaaactaagacagt

SEQ ID NO: 163282 - DNA, 25 bp, Saccharomyces pastorianus
gatgagaaatcaccactggaaacta

SEQ ID NO: 163283 - DNA, 25 bp, Saccharomyces pastorianus
gaagagataccccttcgggacaaga

SEQ ID NO: 163284 - DNA, 25 bp, Saccharomyces pastorianus
agagataccccttcgggacaagatg

SEQ ID NO: 163285 - DNA, 25 bp, Saccharomyces pastorianus
ttctgagaatgatcaagaatccgat

SEQ ID NO: 163286 - DNA, 25 bp, Saccharomyces pastorianus
gcttaagagagatttcaacgacgaa

SEQ ID NO: 163287 - DNA, 25 bp, Saccharomyces pastorianus
gatcatataccgtgggcttaagaga

SEQ ID NO: 163288 - DNA, 25 bp, Saccharomyces pastorianus
ttcaacgacgaaagagatttagtgc

SEQ ID NO: 163289 - DNA, 25 bp, Saccharomyces pastorianus
cgtgatcatataccgtgggcttaag

SEQ ID NO: 163290 - DNA, 25 bp, Saccharomyces pastorianus
gcagaataaagccatcattgaaacg

SEQ ID NO: 163291 - DNA, 25 bp, Saccharomyces pastorianus
cgacgaaagagatttagtgcagaat

SEQ ID NO: 163292 - DNA, 25 bp, Saccharomyces pastorianus
ccgtgggcttaagagagatttcaac

SEQ ID NO: 163293 - DNA, 25 bp, Saccharomyces pastorianus
tataccgtgggcttaagagagattt

SEQ ID NO: 163294 - DNA, 25 bp, Saccharomyces pastorianus
ttagtgcagaataaagccatcattg

SEQ ID NO: 163295 - DNA, 25 bp, Saccharomyces pastorianus
aacgtgatcatataccgtgggctta

SEQ ID NO: 163296 - DNA, 25 bp, Saccharomyces pastorianus
gaaacgtgatcatataccgtgggct

SEQ ID NO: 163297 - DNA, 25 bp, Saccharomyces pastorianus
aaacgcgagtgcctattatcaaatt

SEQ ID NO: 163298 - DNA, 25 bp, Saccharomyces pastorianus
ggagtaaattctcgctagctattca

SEQ ID NO: 163299 - DNA, 25 bp, Saccharomyces pastorianus
agagccccaatcacagttacatatt

SEQ ID NO: 163300 - DNA, 25 bp, Saccharomyces pastorianus
aacctgggtgttctactgattgact

SEQ ID NO: 163301 - DNA, 25 bp, Saccharomyces pastorianus
ggtgccttcgaactgttggtcaata

SEQ ID NO: 163302 - DNA, 25 bp, Saccharomyces pastorianus
agcatatctgatggttacgcctctt

SEQ ID NO: 163303 - DNA, 25 bp, Saccharomyces pastorianus
gctagctattcaagatcctggtgat

SEQ ID NO: 163304 - DNA, 25 bp, Saccharomyces pastorianus
atcgacgttctagataacctgggtg

SEQ ID NO: 163305 - DNA, 25 bp, Saccharomyces pastorianus
taagagactctccagggttacgtga

SEQ ID NO: 163306 - DNA, 25 bp, Saccharomyces pastorianus
ggttacgcctcttatattcctaaat

SEQ ID NO: 163307 - DNA, 25 bp, Saccharomyces pastorianus
aaaaaggcctttgctggtgccttcg

SEQ ID NO: 163308 - DNA, 25 bp, Saccharomyces pastorianus
aaagaggttcacacggagggcctgt

SEQ ID NO: 163309 - DNA, 25 bp, Saccharomyces pastorianus
gcgtctacagactatattccgaata

SEQ ID NO: 163310 - DNA, 25 bp, Saccharomyces pastorianus
tacaggtagtggacgcttccgagaa

SEQ ID NO: 163311 - DNA, 25 bp, Saccharomyces pastorianus
taaatcccgtttgcacgagtcactt

SEQ ID NO: 163312 - DNA, 25 bp, Saccharomyces pastorianus
gttagacgacgttcttcccaatata

SEQ ID NO: 163313 - DNA, 25 bp, Saccharomyces pastorianus
actggttcctagagttgcgtctaca

SEQ ID NO: 163314 - DNA, 25 bp, Saccharomyces pastorianus
gtatggaacagctaccatcttcgca

SEQ ID NO: 163315 - DNA, 25 bp, Saccharomyces pastorianus
gaactcaggttttccgtctgatgca

SEQ ID NO: 163316 - DNA, 25 bp, Saccharomyces pastorianus
gaatcaatgacaccccagagttagt

SEQ ID NO: 163317 - DNA, 25 bp, Saccharomyces pastorianus
catcttcgcacaaacgtaaacccgt

SEQ ID NO: 163318 - DNA, 25 bp, Saccharomyces pastorianus
ccgtaataccgtgggacgcatctat

SEQ ID NO: 163319 - DNA, 25 bp, Saccharomyces pastorianus
ttggccttttattccatcttgggac

SEQ ID NO: 163320 - DNA, 25 bp, Saccharomyces pastorianus
gaaatcaagctctggaggcgccttt

SEQ ID NO: 163321 - DNA, 25 bp, Saccharomyces pastorianus
gatctcggttcccttcaatgaagtt

SEQ ID NO: 163322 - DNA, 25 bp, Saccharomyces pastorianus
tcgtatacgtccttttccagtgtaa

SEQ ID NO: 163323 - DNA, 25 bp, Saccharomyces pastorianus
gacatgtcctgaaaatagccaccgt

SEQ ID NO: 163324 - DNA, 25 bp, Saccharomyces pastorianus
atacattccttcctcaatcaacgat

SEQ ID NO: 163325 - DNA, 25 bp, Saccharomyces pastorianus
gccaccgtagtgtgcattaccgtat

SEQ ID NO: 163326 - DNA, 25 bp, Saccharomyces pastorianus
taccgtattgatatgcttcgctgtt

SEQ ID NO: 163327 - DNA, 25 bp, Saccharomyces pastorianus
gatggcgcccgttgcatggaatgaa

SEQ ID NO: 163328 - DNA, 25 bp, Saccharomyces pastorianus
ttaaccatatctgcgcttcacaatt

SEQ ID NO: 163329 - DNA, 25 bp, Saccharomyces pastorianus
gggatttgctcatccaatcaatcag

SEQ ID NO: 163330 - DNA, 25 bp, Saccharomyces pastorianus
attgggcataactcccgatgacgat

SEQ ID NO: 163331 - DNA, 25 bp, Saccharomyces pastorianus
agaacacccttagctaaggtccctg

SEQ ID NO: 163332 - DNA, 25 bp, Saccharomyces pastorianus
atgaagtgccaaagcggtctcccga

SEQ ID NO: 163333 - DNA, 25 bp, Saccharomyces pastorianus
aaaactgatcgtagcattacccctc

SEQ ID NO: 163334 - DNA, 25 bp, Saccharomyces pastorianus
ggtgcaaacaactcggcaatgggtt

SEQ ID NO: 163335 - DNA, 25 bp, Saccharomyces pastorianus
ctgcggcctttcaatcaactggatt

SEQ ID NO: 163336 - DNA, 25 bp, Saccharomyces pastorianus
atccaaagacgagagcgccaccagg

SEQ ID NO: 163337 - DNA, 25 bp, Saccharomyces pastorianus
atgggttcgcccaggaatccaaaga

SEQ ID NO: 163338 - DNA, 25 bp, Saccharomyces pastorianus
cctcgccttcaaatatttaccaacg

SEQ ID NO: 163339 - DNA, 25 bp, Saccharomyces pastorianus
gccaccaggtccatacaatcaggga

SEQ ID NO: 163340 - DNA, 25 bp, Saccharomyces pastorianus
cccgtaccaaccttatgcgatgaat

SEQ ID NO: 163341 - DNA, 25 bp, Saccharomyces pastorianus
ggaaactaacccattgctcaaacta

SEQ ID NO: 163342 - DNA, 25 bp, Saccharomyces pastorianus
aactagtgcttgagtctggcgtggt

SEQ ID NO: 163343 - DNA, 25 bp, Saccharomyces pastorianus
atatggttgctctgaccacatcagc

SEQ ID NO: 163344 - DNA, 25 bp, Saccharomyces pastorianus
aatttgtcatgccttgactgggtcc

SEQ ID NO: 163345 - DNA, 25 bp, Saccharomyces pastorianus
ggtgcatatcgtgttctgaggccca

SEQ ID NO: 163346 - DNA, 25 bp, Saccharomyces pastorianus
attcccattatgtactgtgcgcgat

SEQ ID NO: 163347 - DNA, 25 bp, Saccharomyces pastorianus
aattgttctggattctctgggagta

SEQ ID NO: 163348 - DNA, 25 bp, Saccharomyces pastorianus
ggtaacgacttagcattcgacccat

SEQ ID NO: 163349 - DNA, 25 bp, Saccharomyces pastorianus
tgcgcgatgacgttagagctcacag

SEQ ID NO: 163350 - DNA, 25 bp, Saccharomyces pastorianus
gactgggtccgcagatgttgctgac

SEQ ID NO: 163351 - DNA, 25 bp, Saccharomyces pastorianus
tatgggctctccatatgggtctttt

SEQ ID NO: 163352 - DNA, 25 bp, Saccharomyces pastorianus
aaacgtcaaagcgtggtgtccaccg

SEQ ID NO: 163353 - DNA, 25 bp, Saccharomyces pastorianus
gttcatcaataggttcgacgccaat

SEQ ID NO: 163354 - DNA, 25 bp, Saccharomyces pastorianus
aaagcctgcgcagacgtatttttct

SEQ ID NO: 163355 - DNA, 25 bp, Saccharomyces pastorianus
actgccattgctggtatttctgggc

SEQ ID NO: 163356 - DNA, 25 bp, Saccharomyces pastorianus
agttacttgaggtaccagggcacaa

SEQ ID NO: 163357 - DNA, 25 bp, Saccharomyces pastorianus
ccgcatcttcttcggattcattgaa

SEQ ID NO: 163358 - DNA, 25 bp, Saccharomyces pastorianus
aggagacacgcaaaccatctactgt

SEQ ID NO: 163359 - DNA, 25 bp, Saccharomyces pastorianus
atgacatcactgaggtcctttctac

SEQ ID NO: 163360 - DNA, 25 bp, Saccharomyces pastorianus
gaagatctccttcaatagcacaaca

SEQ ID NO: 163361 - DNA, 25 bp, Saccharomyces pastorianus
aacaaccatccctgatcatcggtat

SEQ ID NO: 163362 - DNA, 25 bp, Saccharomyces pastorianus
aattcttcaacatcgatgacttcgg

SEQ ID NO: 163363 - DNA, 25 bp, Saccharomyces pastorianus
ggactgcctcatatgggcacacata

SEQ ID NO: 163364 - DNA, 25 bp, Saccharomyces pastorianus
ggtgccctaagaaacttcggtattg

SEQ ID NO: 163365 - DNA, 25 bp, Saccharomyces pastorianus
taacacagcgcgtggtgccgtgata

SEQ ID NO: 163366 - DNA, 25 bp, Saccharomyces pastorianus
agccgtttgggttcgagaatttcat

SEQ ID NO: 163367 - DNA, 25 bp, Saccharomyces pastorianus
tgtaaacgtcccactgaaccacaat

SEQ ID NO: 163368 - DNA, 25 bp, Saccharomyces pastorianus
tatttttgctattgggtgccctaag

SEQ ID NO: 163369 - DNA, 25 bp, Saccharomyces pastorianus
atatcataacagacaccagcttcct

SEQ ID NO: 163370 - DNA, 25 bp, Saccharomyces pastorianus
atgtggttctccctttggatacgac

SEQ ID NO: 163371 - DNA, 25 bp, Saccharomyces pastorianus
gatgtcccaagtcttaggactgcct

SEQ ID NO: 163372 - DNA, 25 bp, Saccharomyces pastorianus
tgactgatgctttgcgttctggaaa

SEQ ID NO: 163373 - DNA, 25 bp, Saccharomyces pastorianus
tgaaccacaatactcaccatctaat

SEQ ID NO: 163374 - DNA, 25 bp, Saccharomyces pastorianus
ggcagtttttgacgctatgacaccc

SEQ ID NO: 163375 - DNA, 25 bp, Saccharomyces pastorianus
aaaacatacatactgtgccgcacgg

SEQ ID NO: 163376 - DNA, 25 bp, Saccharomyces pastorianus
aaaagacgacattcgcccaacttat

SEQ ID NO: 163377 - DNA, 25 bp, Saccharomyces pastorianus
aaacgccgcgactcaaaaacataca

SEQ ID NO: 163378 - DNA, 25 bp, Saccharomyces pastorianus
tgccgcacggcagtttttgacgcta

SEQ ID NO: 163379 - DNA, 25 bp, Saccharomyces pastorianus
tcgcccaacttatcactcgcttgaa

SEQ ID NO: 163380 - DNA, 25 bp, Saccharomyces pastorianus
gctatgacacccttttccccaagaa

SEQ ID NO: 163381 - DNA, 25 bp, Saccharomyces pastorianus
tttttgacgctatgacacccttttc

SEQ ID NO: 163382 - DNA, 25 bp, Saccharomyces pastorianus
ttatgccaagcccttaaacgccgcg

SEQ ID NO: 163383 - DNA, 25 bp, Saccharomyces pastorianus
tttccccaagaaaatcgcatattaa

SEQ ID NO: 163384 - DNA, 25 bp, Saccharomyces pastorianus
tcactcgcttgaaccactttttatg

SEQ ID NO: 163385 - DNA, 25 bp, Saccharomyces pastorianus
gttacgcagaccaagttatccacat

SEQ ID NO: 163386 - DNA, 25 bp, Saccharomyces pastorianus
gtatcttaccaaaatctttccctga

SEQ ID NO: 163387 - DNA, 25 bp, Saccharomyces pastorianus
gaaaatccattctacgtcgataccg

SEQ ID NO: 163388 - DNA, 25 bp, Saccharomyces pastorianus
gaaaggctctcgttggtattccatg

SEQ ID NO: 163389 - DNA, 25 bp, Saccharomyces pastorianus
ttgacccatctgataagcatgcgag

SEQ ID NO: 163390 - DNA, 25 bp, Saccharomyces pastorianus
cgtcgataccgtgaaatcctttcgt

SEQ ID NO: 163391 - DNA, 25 bp, Saccharomyces pastorianus
gaacgagaagccattgtctgccaaa

SEQ ID NO: 163392 - DNA, 25 bp, Saccharomyces pastorianus
aaatcctttcgtgataggcgttacg

SEQ ID NO: 163393 - DNA, 25 bp, Saccharomyces pastorianus
ggaaatctgtccaaaattgacccat

SEQ ID NO: 163394 - DNA, 25 bp, Saccharomyces pastorianus
taaaaagctttatctctcctaccca

SEQ ID NO: 163395 - DNA, 25 bp, Saccharomyces pastorianus
tacgtgtttaacaggtgccacaatc

SEQ ID NO: 163396 - DNA, 25 bp, Saccharomyces pastorianus
agataattactattccagcagcatt

SEQ ID NO: 163397 - DNA, 25 bp, Saccharomyces pastorianus
tcggagattccttccatggacgagg

SEQ ID NO: 163398 - DNA, 25 bp, Saccharomyces pastorianus
gaatcatatgcgaactccacttggg

SEQ ID NO: 163399 - DNA, 25 bp, Saccharomyces pastorianus
ttggtaatacaaacagctcccgtga

SEQ ID NO: 163400 - DNA, 25 bp, Saccharomyces pastorianus
agaagatccactagtattgccctcg

SEQ ID NO: 163401 - DNA, 25 bp, Saccharomyces pastorianus
gcagacttcactaaccaaatttttt

SEQ ID NO: 163402 - DNA, 25 bp, Saccharomyces pastorianus
tccacttgggaggtcttacaataca

SEQ ID NO: 163403 - DNA, 25 bp, Saccharomyces pastorianus
cgaggactatgttgggtggctaaat

SEQ ID NO: 163404 - DNA, 25 bp, Saccharomyces pastorianus
gtttccaatcctgttccaagggttg

SEQ ID NO: 163405 - DNA, 25 bp, Saccharomyces pastorianus
aatacaaggattccggtgagccagg

SEQ ID NO: 163406 - DNA, 25 bp, Saccharomyces pastorianus
aagggttgaacatccagattggcta

SEQ ID NO: 163407 - DNA, 25 bp, Saccharomyces pastorianus
atgcgtcagatgtcacaaagccttt

SEQ ID NO: 163408 - DNA, 25 bp, Saccharomyces pastorianus
ctcgttgaacggattttctcacctt

SEQ ID NO: 163409 - DNA, 25 bp, Saccharomyces pastorianus
caagtttgagtctcgtggtgccgga

SEQ ID NO: 163410 - DNA, 25 bp, Saccharomyces pastorianus
tgccatgtcatgttactttcaaaga

SEQ ID NO: 163411 - DNA, 25 bp, Saccharomyces pastorianus
gagttcattttagatcctcagtatg

SEQ ID NO: 163412 - DNA, 25 bp, Saccharomyces pastorianus
tcctggttcccatctgaatgtgaaa

SEQ ID NO: 163413 - DNA, 25 bp, Saccharomyces pastorianus
aactacgttctgatatcgaatccta

SEQ ID NO: 163414 - DNA, 25 bp, Saccharomyces pastorianus
aggcagctcctgaatctattttttc

SEQ ID NO: 163415 - DNA, 25 bp, Saccharomyces pastorianus
gactatgttattcctgttcttcctg

SEQ ID NO: 163416 - DNA, 25 bp, Saccharomyces pastorianus
gtgaaaaatccccttctagaacttg

SEQ ID NO: 163417 - DNA, 25 bp, Saccharomyces pastorianus
cgtggtgccggattttttatgtgaa

SEQ ID NO: 163418 - DNA, 25 bp, Saccharomyces pastorianus
cccgaatttgtgtctgtgaacccta

SEQ ID NO: 163419 - DNA, 25 bp, Saccharomyces pastorianus
ttccaaacgtcagggcatgcgccaa

SEQ ID NO: 163420 - DNA, 25 bp, Saccharomyces pastorianus
ggacaacttgtctatttgggaatca

SEQ ID NO: 163421 - DNA, 25 bp, Saccharomyces pastorianus
acaggtctgcgcctaatggattcaa

SEQ ID NO: 163422 - DNA, 25 bp, Saccharomyces pastorianus
gacaacaacaacaggcattttcgga

SEQ ID NO: 163423 - DNA, 25 bp, Saccharomyces pastorianus
gtaatccattactctggtccgatga

SEQ ID NO: 163424 - DNA, 25 bp, Saccharomyces pastorianus
aacgcatggttgttcttccaaacgt

SEQ ID NO: 163425 - DNA, 25 bp, Saccharomyces pastorianus
agagttccagctttaatcgatcatg

SEQ ID NO: 163426 - DNA, 25 bp, Saccharomyces pastorianus
tactctggtccgatgatttagctga

SEQ ID NO: 163427 - DNA, 25 bp, Saccharomyces pastorianus
gatggccttggctgaacgtagagaa

SEQ ID NO: 163428 - DNA, 25 bp, Saccharomyces pastorianus
tcaatcttggcgaacatagggcccc

SEQ ID NO: 163429 - DNA, 25 bp, Saccharomyces pastorianus
agtatatattcagccgacattctcg

SEQ ID NO: 163430 - DNA, 25 bp, Saccharomyces pastorianus
gccgacattctcgttaatttcagat

SEQ ID NO: 163431 - DNA, 25 bp, Saccharomyces pastorianus
accattagtttattactgttgttat

SEQ ID NO: 163432 - DNA, 25 bp, Saccharomyces pastorianus
tctcgttaatttcagattgcgatga

SEQ ID NO: 163433 - DNA, 25 bp, Saccharomyces pastorianus
atgaattgcaaggcggtaaccatta

SEQ ID NO: 163434 - DNA, 25 bp, Saccharomyces pastorianus
tattcagccgacattctcgttaatt

SEQ ID NO: 163435 - DNA, 25 bp, Saccharomyces pastorianus
tcagccgacattctcgttaatttca

SEQ ID NO: 163436 - DNA, 25 bp, Saccharomyces pastorianus
gcggtaaccattagtttattactgt

SEQ ID NO: 163437 - DNA, 25 bp, Saccharomyces pastorianus
aagagtatatattcagccgacattc

SEQ ID NO: 163438 - DNA, 25 bp, Saccharomyces pastorianus
gacattctcgttaatttcagattgc

SEQ ID NO: 163439 - DNA, 25 bp, Saccharomyces pastorianus
atatattcagccgacattctcgtta

SEQ ID NO: 163440 - DNA, 25 bp, Saccharomyces pastorianus
ctggcggtcaaggtttcggaagaca

SEQ ID NO: 163441 - DNA, 25 bp, Saccharomyces pastorianus
aaggatttggaggtcctggtccaca

SEQ ID NO: 163442 - DNA, 25 bp, Saccharomyces pastorianus
tccacaagagtttggtggtccaggt

SEQ ID NO: 163443 - DNA, 25 bp, Saccharomyces pastorianus
ttggaggtcctggtccacaagagtt

SEQ ID NO: 163444 - DNA, 25 bp, Saccharomyces pastorianus
ggtttcggaagacaaggcccacaag

SEQ ID NO: 163445 - DNA, 25 bp, Saccharomyces pastorianus
gtggccaaggattcggtggtccaaa

SEQ ID NO: 163446 - DNA, 25 bp, Saccharomyces pastorianus
ccaaatcctcaagaattcggcgggc

SEQ ID NO: 163447 - DNA, 25 bp, Saccharomyces pastorianus
ggtggtccaaatcctcaagaattcg

SEQ ID NO: 163448 - DNA, 25 bp, Saccharomyces pastorianus
aggcccacaaggatttggaggtcct

SEQ ID NO: 163449 - DNA, 25 bp, Saccharomyces pastorianus
aggtcctggtccacaagagtttggt

SEQ ID NO: 163450 - DNA, 25 bp, Saccharomyces pastorianus
gattcggtggtccaaatcctcaaga

SEQ ID NO: 163451 - DNA, 25 bp, Saccharomyces pastorianus
agactttaaaggctcggttgttcag

SEQ ID NO: 163452 - DNA, 25 bp, Saccharomyces pastorianus
gctcggttgttcagccaacgattga

SEQ ID NO: 163453 - DNA, 25 bp, Saccharomyces pastorianus
aaaggctcggttgttcagccaacga

SEQ ID NO: 163454 - DNA, 25 bp, Saccharomyces pastorianus
tcgccagttttttcttgttttactg

SEQ ID NO: 163455 - DNA, 25 bp, Saccharomyces pastorianus
agttgcatgaaacgccccatttacc

SEQ ID NO: 163456 - DNA, 25 bp, Saccharomyces pastorianus
ttcgtgcactttaatgagaagttgc

SEQ ID NO: 163457 - DNA, 25 bp, Saccharomyces pastorianus
gaatttgccgaatgatatcaagaga

SEQ ID NO: 163458 - DNA, 25 bp, Saccharomyces pastorianus
gagaagttgcatgaaacgccccatt

SEQ ID NO: 163459 - DNA, 25 bp, Saccharomyces pastorianus
atcaagagatcattcgtgcacttta

SEQ ID NO: 163460 - DNA, 25 bp, Saccharomyces pastorianus
gagatattctccctccagaattcaa

SEQ ID NO: 163461 - DNA, 25 bp, Saccharomyces pastorianus
gttcagccaacgattgaaaacattc

SEQ ID NO: 163462 - DNA, 25 bp, Saccharomyces pastorianus
attgcctccatacggtttaatgtct

SEQ ID NO: 163463 - DNA, 25 bp, Saccharomyces pastorianus
tgccagctcgcaacaaccaatgatg

SEQ ID NO: 163464 - DNA, 25 bp, Saccharomyces pastorianus
atattactggatctgcctcgatttc

SEQ ID NO: 163465 - DNA, 25 bp, Saccharomyces pastorianus
atcccaacatggttcttcgttcttt

SEQ ID NO: 163466 - DNA, 25 bp, Saccharomyces pastorianus
ttccctaacctcttcaaattcattg

SEQ ID NO: 163467 - DNA, 25 bp, Saccharomyces pastorianus
tttaatgtcttctcaatcgcagcac

SEQ ID NO: 163468 - DNA, 25 bp, Saccharomyces pastorianus
gtaccgcccgcaagattaagttcaa

SEQ ID NO: 163469 - DNA, 25 bp, Saccharomyces pastorianus
tataccttccagcatcaacggttac

SEQ ID NO: 163470 - DNA, 25 bp, Saccharomyces pastorianus
ggaaatacttctgcatcccaacatg

SEQ ID NO: 163471 - DNA, 25 bp, Saccharomyces pastorianus
gacagccattgcacctacgaatagc

SEQ ID NO: 163472 - DNA, 25 bp, Saccharomyces pastorianus
tctactacctcattatcctcaaata

SEQ ID NO: 163473 - DNA, 25 bp, Saccharomyces pastorianus
gaaaatagcggcgtctctgcttctt

SEQ ID NO: 163474 - DNA, 25 bp, Saccharomyces pastorianus
gaacgtgccgattggttgtcaagac

SEQ ID NO: 163475 - DNA, 25 bp, Saccharomyces pastorianus
gtgtggcagggcaagcgacctcaaa

SEQ ID NO: 163476 - DNA, 25 bp, Saccharomyces pastorianus
agggatatcccgcaagtattccatc

SEQ ID NO: 163477 - DNA, 25 bp, Saccharomyces pastorianus
gacctcaaatatcctcatcgtgacg

SEQ ID NO: 163478 - DNA, 25 bp, Saccharomyces pastorianus
aaacggcttcctcagacaggtacaa

SEQ ID NO: 163479 - DNA, 25 bp, Saccharomyces pastorianus
atctcacgaacagcgctctggaatt

SEQ ID NO: 163480 - DNA, 25 bp, Saccharomyces pastorianus
aacgtacagcgttccagggtgtggc

SEQ ID NO: 163481 - DNA, 25 bp, Saccharomyces pastorianus
aatgggcctatcgaccaacatgttc

SEQ ID NO: 163482 - DNA, 25 bp, Saccharomyces pastorianus
aggtctacgctagccaattttgata

SEQ ID NO: 163483 - DNA, 25 bp, Saccharomyces pastorianus
attttaccaactgaatgcccaggcc

SEQ ID NO: 163484 - DNA, 25 bp, Saccharomyces pastorianus
gaccagtaaggcctcaatttatttt

SEQ ID NO: 163485 - DNA, 25 bp, Saccharomyces pastorianus
ggctccacttactgtttgtacctaa

SEQ ID NO: 163486 - DNA, 25 bp, Saccharomyces pastorianus
ggcggaaattcccttaatgaccagt

SEQ ID NO: 163487 - DNA, 25 bp, Saccharomyces pastorianus
ttcatcatcgttgctgttgtcttag

SEQ ID NO: 163488 - DNA, 25 bp, Saccharomyces pastorianus
tcggcctactgagccatcttatgat

SEQ ID NO: 163489 - DNA, 25 bp, Saccharomyces pastorianus
tgagtccttcttacatcaatgtttt

SEQ ID NO: 163490 - DNA, 25 bp, Saccharomyces pastorianus
gatctctcgtgattatcttttgggt

SEQ ID NO: 163491 - DNA, 25 bp, Saccharomyces pastorianus
tgggtcatcacaaatttcatcatcg

SEQ ID NO: 163492 - DNA, 25 bp, Saccharomyces pastorianus
gtgcaatggcaaatccgctgggtaa

SEQ ID NO: 163493 - DNA, 25 bp, Saccharomyces pastorianus
aatggaagttctggtctctagttca

SEQ ID NO: 163494 - DNA, 25 bp, Saccharomyces pastorianus
gatattgttatctctctgggctcca

SEQ ID NO: 163495 - DNA, 25 bp, Saccharomyces pastorianus
cacgatccttgacccatcattgtat

SEQ ID NO: 163496 - DNA, 25 bp, Saccharomyces pastorianus
ttcctattttgctgtttaaagtaag

SEQ ID NO: 163497 - DNA, 25 bp, Saccharomyces pastorianus
atggaccaaagcacgatccttgacc

SEQ ID NO: 163498 - DNA, 25 bp, Saccharomyces pastorianus
ttcagtttctcggtagcttttccta

SEQ ID NO: 163499 - DNA, 25 bp, Saccharomyces pastorianus
tttacttttcagtttctcggtagct

SEQ ID NO: 163500 - DNA, 25 bp, Saccharomyces pastorianus
aaagcacgatccttgacccatcatt

SEQ ID NO: 163501 - DNA, 25 bp, Saccharomyces pastorianus
atccacccatggaccaaagcacgat

SEQ ID NO: 163502 - DNA, 25 bp, Saccharomyces pastorianus
tttctcggtagcttttcctattttg

SEQ ID NO: 163503 - DNA, 25 bp, Saccharomyces pastorianus
ggtagcttttcctattttgctgttt

SEQ ID NO: 163504 - DNA, 25 bp, Saccharomyces pastorianus
taaatagtaccctcactaaacacgt

SEQ ID NO: 163505 - DNA, 25 bp, Saccharomyces pastorianus
tagtaccctcactaaacacgtacgg

SEQ ID NO: 163506 - DNA, 25 bp, Saccharomyces pastorianus
tgaagtactagaaccttccgtatat

SEQ ID NO: 163507 - DNA, 25 bp, Saccharomyces pastorianus
atatcatatctttacagcaaccgga

SEQ ID NO: 163508 - DNA, 25 bp, Saccharomyces pastorianus
atcgtcgatgaaaaaggctacactt

SEQ ID NO: 163509 - DNA, 25 bp, Saccharomyces pastorianus
tctgattcttctggagaggctcctg

SEQ ID NO: 163510 - DNA, 25 bp, Saccharomyces pastorianus
ttagcgattgcttctgattcttctg

SEQ ID NO: 163511 - DNA, 25 bp, Saccharomyces pastorianus
ggaggtctcgacgttatgaaagcta

SEQ ID NO: 163512 - DNA, 25 bp, Saccharomyces pastorianus
gcaaccggaacaattagcatcacag

SEQ ID NO: 163513 - DNA, 25 bp, Saccharomyces pastorianus
atgcaggcagcttctctaataggtt

SEQ ID NO: 163514 - DNA, 25 bp, Saccharomyces pastorianus
caggaggatcactattcggaagcat

SEQ ID NO: 163515 - DNA, 25 bp, Saccharomyces pastorianus
gcatcacagagcttattatctcctt

SEQ ID NO: 163516 - DNA, 25 bp, Saccharomyces pastorianus
aagctatatctcagtgtcacttttc

SEQ ID NO: 163517 - DNA, 25 bp, Saccharomyces pastorianus
gtcatcatcatggtcgtcgttatca

SEQ ID NO: 163518 - DNA, 25 bp, Saccharomyces pastorianus
gtatagttcccaatatgacccagct

SEQ ID NO: 163519 - DNA, 25 bp, Saccharomyces pastorianus
acacatacttgtcttccatatctac

SEQ ID NO: 163520 - DNA, 25 bp, Saccharomyces pastorianus
attttctcatcgacgtcaccaatgt

SEQ ID NO: 163521 - DNA, 25 bp, Saccharomyces pastorianus
gttttacagttcatcgctttcatcg

SEQ ID NO: 163522 - DNA, 25 bp, Saccharomyces pastorianus
gttttcgttcgacagcagatcttct

SEQ ID NO: 163523 - DNA, 25 bp, Saccharomyces pastorianus
gcttcatcttcgacagtttccataa

SEQ ID NO: 163524 - DNA, 25 bp, Saccharomyces pastorianus
agatcttctattttctcaccatcaa

SEQ ID NO: 163525 - DNA, 25 bp, Saccharomyces pastorianus
tggttctcaacaatttctccttcta

SEQ ID NO: 163526 - DNA, 25 bp, Saccharomyces pastorianus
gttatcatcaccatcttcgttactg

SEQ ID NO: 163527 - DNA, 25 bp, Saccharomyces pastorianus
gctacctcctcatactcaataatta

SEQ ID NO: 163528 - DNA, 25 bp, Saccharomyces pastorianus
ctgccagtaacgtttgatagcccta

SEQ ID NO: 163529 - DNA, 25 bp, Saccharomyces pastorianus
gcaacgcgcaaatggctatagcaca

SEQ ID NO: 163530 - DNA, 25 bp, Saccharomyces pastorianus
tattctgacaggcacgttcgacgac

SEQ ID NO: 163531 - DNA, 25 bp, Saccharomyces pastorianus
atggcccaaaggacccgaagcagtt

SEQ ID NO: 163532 - DNA, 25 bp, Saccharomyces pastorianus
tttgccgatggtgaaggaccccagt

SEQ ID NO: 163533 - DNA, 25 bp, Saccharomyces pastorianus
acgactggaaaggtactttgccgat

SEQ ID NO: 163534 - DNA, 25 bp, Saccharomyces pastorianus
ggctatagcacactggtacctgaaa

SEQ ID NO: 163535 - DNA, 25 bp, Saccharomyces pastorianus
cgccttcgaaataacgctgccagta

SEQ ID NO: 163536 - DNA, 25 bp, Saccharomyces pastorianus
gatagccctagcagcaagttttatt

SEQ ID NO: 163537 - DNA, 25 bp, Saccharomyces pastorianus
gagcctacctcaatttacgttcaaa

SEQ ID NO: 163538 - DNA, 25 bp, Saccharomyces pastorianus
gttgatggccaatggctgccaagca

SEQ ID NO: 163539 - DNA, 25 bp, Saccharomyces pastorianus
attagacagagtgtcttccggtaat

SEQ ID NO: 163540 - DNA, 25 bp, Saccharomyces pastorianus
agtgtcttccggtaataaggatcta

SEQ ID NO: 163541 - DNA, 25 bp, Saccharomyces pastorianus
gtgtcttccggtaataaggatctag

SEQ ID NO: 163542 - DNA, 25 bp, Saccharomyces pastorianus
gtattagacagagtgtcttccggta

SEQ ID NO: 163543 - DNA, 25 bp, Saccharomyces pastorianus
tggtccttttaactggaaaaatgtg

SEQ ID NO: 163544 - DNA, 25 bp, Saccharomyces pastorianus
acttgtattagacagagtgtcttcc

SEQ ID NO: 163545 - DNA, 25 bp, Saccharomyces pastorianus
agacagagtgtcttccggtaataag

SEQ ID NO: 163546 - DNA, 25 bp, Saccharomyces pastorianus
acagagtgtcttccggtaataagga

SEQ ID NO: 163547 - DNA, 25 bp, Saccharomyces pastorianus
gacagagtgtcttccggtaataagg

SEQ ID NO: 163548 - DNA, 25 bp, Saccharomyces pastorianus
gagtgtcttccggtaataaggatct

SEQ ID NO: 163549 - DNA, 25 bp, Saccharomyces pastorianus
gaagatggtaccaaacttggtcctt

SEQ ID NO: 163550 - DNA, 25 bp, Saccharomyces pastorianus
aaccatagttgtaggaggtgacaat

SEQ ID NO: 163551 - DNA, 25 bp, Saccharomyces pastorianus
tgaatacaaccatgagagcagccgt

SEQ ID NO: 163552 - DNA, 25 bp, Saccharomyces pastorianus
tcccaatcgctctggaggaagcact

SEQ ID NO: 163553 - DNA, 25 bp, Saccharomyces pastorianus
aaaattgtcccaatcgctctggagg

SEQ ID NO: 163554 - DNA, 25 bp, Saccharomyces pastorianus
aaccgcaaaccatagttgtaggagg

SEQ ID NO: 163555 - DNA, 25 bp, Saccharomyces pastorianus
aaacaccccatgacgataattcaga

SEQ ID NO: 163556 - DNA, 25 bp, Saccharomyces pastorianus
gagagcagccgtttagctgatcaaa

SEQ ID NO: 163557 - DNA, 25 bp, Saccharomyces pastorianus
agcactcccttagattctcaaacta

SEQ ID NO: 163558 - DNA, 25 bp, Saccharomyces pastorianus
gatctagatatacaaccgcaaacca

SEQ ID NO: 163559 - DNA, 25 bp, Saccharomyces pastorianus
aggaagcactcccttagattctcaa

SEQ ID NO: 163560 - DNA, 25 bp, Saccharomyces pastorianus
tttagctgatcaaacaccccatgac

SEQ ID NO: 163561 - DNA, 25 bp, Saccharomyces pastorianus
gaatttcggttcctcgtcgaataag

SEQ ID NO: 163562 - DNA, 25 bp, Saccharomyces pastorianus
gtgaccccaagattcctatgcaaaa

SEQ ID NO: 163563 - DNA, 25 bp, Saccharomyces pastorianus
gggtagggccatggactatttgtct

SEQ ID NO: 163564 - DNA, 25 bp, Saccharomyces pastorianus
gcctttgagaggttctaacactgcc

SEQ ID NO: 163565 - DNA, 25 bp, Saccharomyces pastorianus
aacactgccaaagtgagctctactt

SEQ ID NO: 163566 - DNA, 25 bp, Saccharomyces pastorianus
gggccagtgttagaatccagagagt

SEQ ID NO: 163567 - DNA, 25 bp, Saccharomyces pastorianus
gccgggatggctcaagttctaacga

SEQ ID NO: 163568 - DNA, 25 bp, Saccharomyces pastorianus
attggcgcttccttaagagtcacta

SEQ ID NO: 163569 - DNA, 25 bp, Saccharomyces pastorianus
ggactatttgtctatccagctaaac

SEQ ID NO: 163570 - DNA, 25 bp, Saccharomyces pastorianus
gagtctgttacctgagagggccagt

SEQ ID NO: 163571 - DNA, 25 bp, Saccharomyces pastorianus
gaaaattgctaaaggtgaccccaag

SEQ ID NO: 163572 - DNA, 25 bp, Saccharomyces pastorianus
aaaagacgcagaacgtctcgacaac

SEQ ID NO: 163573 - DNA, 25 bp, Saccharomyces pastorianus
aagacgcagaacgtctcgacaacaa

SEQ ID NO: 163574 - DNA, 25 bp, Saccharomyces pastorianus
aatagagactttagaggacaagcaa

SEQ ID NO: 163575 - DNA, 25 bp, Saccharomyces pastorianus
tcgacaacaaaatagagactttaga

SEQ ID NO: 163576 - DNA, 25 bp, Saccharomyces pastorianus
gaaaaagacgcagaacgtctcgaca

SEQ ID NO: 163577 - DNA, 25 bp, Saccharomyces pastorianus
gcagaacgtctcgacaacaaaatag

SEQ ID NO: 163578 - DNA, 25 bp, Saccharomyces pastorianus
gaacgtctcgacaacaaaatagaga

SEQ ID NO: 163579 - DNA, 25 bp, Saccharomyces pastorianus
gcacagctcgaaaaagacgcagaac

SEQ ID NO: 163580 - DNA, 25 bp, Saccharomyces pastorianus
acgcagaacgtctcgacaacaaaat

SEQ ID NO: 163581 - DNA, 25 bp, Saccharomyces pastorianus
gacgcagaacgtctcgacaacaaaa

SEQ ID NO: 163582 - DNA, 25 bp, Saccharomyces pastorianus
acagctcgaaaaagacgcagaacgt

SEQ ID NO: 163583 - DNA, 25 bp, Saccharomyces pastorianus
gcaaaagatcaacgagttttcgaag

SEQ ID NO: 163584 - DNA, 25 bp, Saccharomyces pastorianus
gatgtgtctctagaaattgaattga

SEQ ID NO: 163585 - DNA, 25 bp, Saccharomyces pastorianus
ggtaacgttcgaagatcagcaaaag

SEQ ID NO: 163586 - DNA, 25 bp, Saccharomyces pastorianus
gtaaggacgccattgcgcaggaatt

SEQ ID NO: 163587 - DNA, 25 bp, Saccharomyces pastorianus
cctcgatgatgtgtctctagaaatt

SEQ ID NO: 163588 - DNA, 25 bp, Saccharomyces pastorianus
ttatgcgtaaggacgccattgcgca

SEQ ID NO: 163589 - DNA, 25 bp, Saccharomyces pastorianus
gtacctcgatgatgtgtctctagaa

SEQ ID NO: 163590 - DNA, 25 bp, Saccharomyces pastorianus
gttttcgaagttgattatgcgtaag

SEQ ID NO: 163591 - DNA, 25 bp, Saccharomyces pastorianus
gacgccattgcgcaggaattgagtt

SEQ ID NO: 163592 - DNA, 25 bp, Saccharomyces pastorianus
attgcgcaggaattgagtttacaga

SEQ ID NO: 163593 - DNA, 25 bp, Saccharomyces pastorianus
aacaacactcaggtaacgttcgaag

SEQ ID NO: 163594 - DNA, 25 bp, Saccharomyces pastorianus
gacgatgcagatttacacggctttg

SEQ ID NO: 163595 - DNA, 25 bp, Saccharomyces pastorianus
gtcgccttcgttcaatgagcacggt

SEQ ID NO: 163596 - DNA, 25 bp, Saccharomyces pastorianus
gctccattttggaactgggcataaa

SEQ ID NO: 163597 - DNA, 25 bp, Saccharomyces pastorianus
aatgcaagttcttctgatcacaagg

SEQ ID NO: 163598 - DNA, 25 bp, Saccharomyces pastorianus
tgcgccaactaccatatcaacgtcg

SEQ ID NO: 163599 - DNA, 25 bp, Saccharomyces pastorianus
gatacgatccgagccaactttaaat

SEQ ID NO: 163600 - DNA, 25 bp, Saccharomyces pastorianus
atgacagtcaagaggcacccattct

SEQ ID NO: 163601 - DNA, 25 bp, Saccharomyces pastorianus
ttaagtgtcttaataccaccctctc

SEQ ID NO: 163602 - DNA, 25 bp, Saccharomyces pastorianus
ccgtcgaccgcaagtattctgataa

SEQ ID NO: 163603 - DNA, 25 bp, Saccharomyces pastorianus
agaggcttcttttctaagctccatt

SEQ ID NO: 163604 - DNA, 25 bp, Saccharomyces pastorianus
gtttaaaaagatcacactccggaga

SEQ ID NO: 163605 - DNA, 25 bp, Saccharomyces pastorianus
aacccaatattttactgccatccaa

SEQ ID NO: 163606 - DNA, 25 bp, Saccharomyces pastorianus
aatcaacactgctagcacatgcaaa

SEQ ID NO: 163607 - DNA, 25 bp, Saccharomyces pastorianus
gaaatcgaatcatcaccgttaaaat

SEQ ID NO: 163608 - DNA, 25 bp, Saccharomyces pastorianus
ctgcgctacgcaaatgatgtacagg

SEQ ID NO: 163609 - DNA, 25 bp, Saccharomyces pastorianus
actcttcgccgactagtgaatttag

SEQ ID NO: 163610 - DNA, 25 bp, Saccharomyces pastorianus
aggctacgtcgatcgtggtgtcgaa

SEQ ID NO: 163611 - DNA, 25 bp, Saccharomyces pastorianus
gtcaagtcatgatgccggtatttct

SEQ ID NO: 163612 - DNA, 25 bp, Saccharomyces pastorianus
ggagaaagaccaccagattacagat

SEQ ID NO: 163613 - DNA, 25 bp, Saccharomyces pastorianus
aagtatccccatcgataattttgat

SEQ ID NO: 163614 - DNA, 25 bp, Saccharomyces pastorianus
gatatgctgcgaactcaacattcca

SEQ ID NO: 163615 - DNA, 25 bp, Saccharomyces pastorianus
aagacactggaaaccttgctagcaa

SEQ ID NO: 163616 - DNA, 25 bp, Saccharomyces pastorianus
atcatcgccctaactgttgcattta

SEQ ID NO: 163617 - DNA, 25 bp, Saccharomyces pastorianus
tttggaaagccgctgtgacactcgt

SEQ ID NO: 163618 - DNA, 25 bp, Saccharomyces pastorianus
ccttatatattttcccgccagtatt

SEQ ID NO: 163619 - DNA, 25 bp, Saccharomyces pastorianus
ttgccaacgatgactacccttatat

SEQ ID NO: 163620 - DNA, 25 bp, Saccharomyces pastorianus
tttacaggttatgtcggtgccgcat

SEQ ID NO: 163621 - DNA, 25 bp, Saccharomyces pastorianus
gattggcaacctttatcctggattt

SEQ ID NO: 163622 - DNA, 25 bp, Saccharomyces pastorianus
atccggcgaatcattaccacagtgg

SEQ ID NO: 163623 - DNA, 25 bp, Saccharomyces pastorianus
ataagccaagctcctgacaatgcac

SEQ ID NO: 163624 - DNA, 25 bp, Saccharomyces pastorianus
aaggctttgttcgtgactaccgcta

SEQ ID NO: 163625 - DNA, 25 bp, Saccharomyces pastorianus
ttgagaccgtgctctatggccgtga

SEQ ID NO: 163626 - DNA, 25 bp, Saccharomyces pastorianus
ttatcccatgggtcaaggctttgtt

SEQ ID NO: 163627 - DNA, 25 bp, Saccharomyces pastorianus
ggtaatttcttttccactatcatga

SEQ ID NO: 163628 - DNA, 25 bp, Saccharomyces pastorianus
gatgtcgcagacgttgatttctttt

SEQ ID NO: 163629 - DNA, 25 bp, Saccharomyces pastorianus
tatgtttctaattcacccatccaaa

SEQ ID NO: 163630 - DNA, 25 bp, Saccharomyces pastorianus
atatatttgcgccaattttcctccg

SEQ ID NO: 163631 - DNA, 25 bp, Saccharomyces pastorianus
tcatcgaattacaacaacgggccat

SEQ ID NO: 163632 - DNA, 25 bp, Saccharomyces pastorianus
ggctttacaatttccgaaccagatt

SEQ ID NO: 163633 - DNA, 25 bp, Saccharomyces pastorianus
attttggtcggtgattctggtgaac

SEQ ID NO: 163634 - DNA, 25 bp, Saccharomyces pastorianus
catcaagcatactggcgttacgggt

SEQ ID NO: 163635 - DNA, 25 bp, Saccharomyces pastorianus
aattccatgagtgatgtcccatcgc

SEQ ID NO: 163636 - DNA, 25 bp, Saccharomyces pastorianus
gaagcgtataccactacggctttac

SEQ ID NO: 163637 - DNA, 25 bp, Saccharomyces pastorianus
tgaccaagtctaccgtacataccag

SEQ ID NO: 163638 - DNA, 25 bp, Saccharomyces pastorianus
gaatttgagtttgaaccccgctata

SEQ ID NO: 163639 - DNA, 25 bp, Saccharomyces pastorianus
atggcggtgtgctacatcttgaatt

SEQ ID NO: 163640 - DNA, 25 bp, Saccharomyces pastorianus
gccgggcttggaaattttgccacga

SEQ ID NO: 163641 - DNA, 25 bp, Saccharomyces pastorianus
ttgatccagagagcgataccacctt

SEQ ID NO: 163642 - DNA, 25 bp, Saccharomyces pastorianus
aaagccgttgttccattatctacta

SEQ ID NO: 163643 - DNA, 25 bp, Saccharomyces pastorianus
gtaactgccacggaattgcctcaat

SEQ ID NO: 163644 - DNA, 25 bp, Saccharomyces pastorianus
gataccacctttaatataccgttag

SEQ ID NO: 163645 - DNA, 25 bp, Saccharomyces pastorianus
tgtagtcaaacgtgaagccgggctt

SEQ ID NO: 163646 - DNA, 25 bp, Saccharomyces pastorianus
agactacgaatccactaactccaat

SEQ ID NO: 163647 - DNA, 25 bp, Saccharomyces pastorianus
aagagcacatcacccttctttaaaa

SEQ ID NO: 163648 - DNA, 25 bp, Saccharomyces pastorianus
ttagttcaagtgtcatggttccccg

SEQ ID NO: 163649 - DNA, 25 bp, Saccharomyces pastorianus
aaaaattctgctaatcctgtttgga

SEQ ID NO: 163650 - DNA, 25 bp, Saccharomyces pastorianus
ctggctattccaggcttaatgagat

SEQ ID NO: 163651 - DNA, 25 bp, Saccharomyces pastorianus
caacttctttccaagactggcttac

SEQ ID NO: 163652 - DNA, 25 bp, Saccharomyces pastorianus
acattctgttgcaatcttttactga

SEQ ID NO: 163653 - DNA, 25 bp, Saccharomyces pastorianus
ttactgatccacttacaatagccgt

SEQ ID NO: 163654 - DNA, 25 bp, Saccharomyces pastorianus
atacttgacatttgagctctctggt

SEQ ID NO: 163655 - DNA, 25 bp, Saccharomyces pastorianus
atacttgagccctgttttactccca

SEQ ID NO: 163656 - DNA, 25 bp, Saccharomyces pastorianus
tattgggtaactccgtctttaattg

SEQ ID NO: 163657 - DNA, 25 bp, Saccharomyces pastorianus
gaaaacagttgacccatacttgaca

SEQ ID NO: 163658 - DNA, 25 bp, Saccharomyces pastorianus
ccacctttctctttgcaacttaata

SEQ ID NO: 163659 - DNA, 25 bp, Saccharomyces pastorianus
tgacatttgatttgcgattttcccc

SEQ ID NO: 163660 - DNA, 25 bp, Saccharomyces pastorianus
gatatggtcggtcacattacttcaa

SEQ ID NO: 163661 - DNA, 25 bp, Saccharomyces pastorianus
aatatatcctcagtattcggtgcag

SEQ ID NO: 163662 - DNA, 25 bp, Saccharomyces pastorianus
aacaacttcaccaccaaaagcggat

SEQ ID NO: 163663 - DNA, 25 bp, Saccharomyces pastorianus
atttcataacttgcctgttagacag

SEQ ID NO: 163664 - DNA, 25 bp, Saccharomyces pastorianus
atagtgcttgatttgaaccccttca

SEQ ID NO: 163665 - DNA, 25 bp, Saccharomyces pastorianus
tagaatgcttgggatatacaccgat

SEQ ID NO: 163666 - DNA, 25 bp, Saccharomyces pastorianus
agcgccagtttaccaaatgtctcac

SEQ ID NO: 163667 - DNA, 25 bp, Saccharomyces pastorianus
tatacaccgatgatcctgatttctt

SEQ ID NO: 163668 - DNA, 25 bp, Saccharomyces pastorianus
ggacgaccgtgttagtttcgcagtt

SEQ ID NO: 163669 - DNA, 25 bp, Saccharomyces pastorianus
tgatttcttagacctcgattataaa

SEQ ID NO: 163670 - DNA, 25 bp, Saccharomyces pastorianus
ggccctatcttctttatgtggcata

SEQ ID NO: 163671 - DNA, 25 bp, Saccharomyces pastorianus
atcagatcaagtctttaaccgtcaa

SEQ ID NO: 163672 - DNA, 25 bp, Saccharomyces pastorianus
gatcaagtccttgacggtgaagaac

SEQ ID NO: 163673 - DNA, 25 bp, Saccharomyces pastorianus
agctggaagcgggactttctgactc

SEQ ID NO: 163674 - DNA, 25 bp, Saccharomyces pastorianus
gacaccaagctaaaggaaaccactg

SEQ ID NO: 163675 - DNA, 25 bp, Saccharomyces pastorianus
ttgctgcatctctggaaaactgtga

SEQ ID NO: 163676 - DNA, 25 bp, Saccharomyces pastorianus
actggacgaaattgctgcatctctg

SEQ ID NO: 163677 - DNA, 25 bp, Saccharomyces pastorianus
gagagtccgacttgaaggcagatca

SEQ ID NO: 163678 - DNA, 25 bp, Saccharomyces pastorianus
aagagtagctgccttggaagaacaa

SEQ ID NO: 163679 - DNA, 25 bp, Saccharomyces pastorianus
caacaacgacaatttctccaagaag

SEQ ID NO: 163680 - DNA, 25 bp, Saccharomyces pastorianus
gggactttctgactctaagcaaaca

SEQ ID NO: 163681 - DNA, 25 bp, Saccharomyces pastorianus
aactgtgatctactttgtttttgtt

SEQ ID NO: 163682 - DNA, 25 bp, Saccharomyces pastorianus
tgcggaatcattggcattttttttc

SEQ ID NO: 163683 - DNA, 25 bp, Saccharomyces pastorianus
ggaatcattggcattttttttcttt

SEQ ID NO: 163684 - DNA, 25 bp, Saccharomyces pastorianus
atgcggaatcattggcatttttttt

SEQ ID NO: 163685 - DNA, 25 bp, Saccharomyces pastorianus
cggaatcattggcattttttttctt

SEQ ID NO: 163686 - DNA, 25 bp, Saccharomyces pastorianus
tcattggcattttttttctttattt

SEQ ID NO: 163687 - DNA, 25 bp, Saccharomyces pastorianus
gcggaatcattggcattttttttct

SEQ ID NO: 163688 - DNA, 25 bp, Saccharomyces pastorianus
atcattggcattttttttctttatt

SEQ ID NO: 163689 - DNA, 25 bp, Saccharomyces pastorianus
aatcattggcattttttttctttat

SEQ ID NO: 163690 - DNA, 25 bp, Saccharomyces pastorianus
gaatcattggcattttttttcttta

SEQ ID NO: 163691 - DNA, 25 bp, Saccharomyces pastorianus
actcatgtggtgcactggtgttgtt

SEQ ID NO: 163692 - DNA, 25 bp, Saccharomyces pastorianus
taaactcatgtggtgcactggtgtt

SEQ ID NO: 163693 - DNA, 25 bp, Saccharomyces pastorianus
gtgtaaactcatgtggtgcactggt

SEQ ID NO: 163694 - DNA, 25 bp, Saccharomyces pastorianus
tgtggtgcactggtgttgtttccaa

SEQ ID NO: 163695 - DNA, 25 bp, Saccharomyces pastorianus
atgtgtaaactcatgtggtgcactg

SEQ ID NO: 163696 - DNA, 25 bp, Saccharomyces pastorianus
caagactgcactattaactgggaat

SEQ ID NO: 163697 - DNA, 25 bp, Saccharomyces pastorianus
gtgcactggtgttgtttccaagact

SEQ ID NO: 163698 - DNA, 25 bp, Saccharomyces pastorianus
gcactggtgttgtttccaagactgc

SEQ ID NO: 163699 - DNA, 25 bp, Saccharomyces pastorianus
actggtgttgtttccaagactgcac

SEQ ID NO: 163700 - DNA, 25 bp, Saccharomyces pastorianus
catgtggtgcactggtgttgtttcc

SEQ ID NO: 163701 - DNA, 25 bp, Saccharomyces pastorianus
tggtgcactggtgttgtttccaaga

SEQ ID NO: 163702 - DNA, 25 bp, Saccharomyces pastorianus
tattggtcgatttgtacccaacgaa

SEQ ID NO: 163703 - DNA, 25 bp, Saccharomyces pastorianus
aatgggttccttcttcacaggtaga

SEQ ID NO: 163704 - DNA, 25 bp, Saccharomyces pastorianus
tatctacccggtggtattggcggtt

SEQ ID NO: 163705 - DNA, 25 bp, Saccharomyces pastorianus
caaagtccgtttagtttgtcttctg

SEQ ID NO: 163706 - DNA, 25 bp, Saccharomyces pastorianus
gccgtcgtagcctatcttttatttg

SEQ ID NO: 163707 - DNA, 25 bp, Saccharomyces pastorianus
ttctgccccaaaatttcttggccgt

SEQ ID NO: 163708 - DNA, 25 bp, Saccharomyces pastorianus
aacgggttgattccacaagacgcag

SEQ ID NO: 163709 - DNA, 25 bp, Saccharomyces pastorianus
gacgttaatgctttcctctatttca

SEQ ID NO: 163710 - DNA, 25 bp, Saccharomyces pastorianus
agtggcgccatacaactatcatttg

SEQ ID NO: 163711 - DNA, 25 bp, Saccharomyces pastorianus
atttcatccggtttatcagtggcgc

SEQ ID NO: 163712 - DNA, 25 bp, Saccharomyces pastorianus
catcttcatgggttgctttgccaaa

SEQ ID NO: 163713 - DNA, 25 bp, Saccharomyces pastorianus
atacggtgttattatcttcttgagg

SEQ ID NO: 163714 - DNA, 25 bp, Saccharomyces pastorianus
atacgttattgcatccatcgggcta

SEQ ID NO: 163715 - DNA, 25 bp, Saccharomyces pastorianus
actgtggttgtgtatctgttgtttc

SEQ ID NO: 163716 - DNA, 25 bp, Saccharomyces pastorianus
acaatgtgtggcttttggtcttcat

SEQ ID NO: 163717 - DNA, 25 bp, Saccharomyces pastorianus
gcaggtaacctttccattaagccta

SEQ ID NO: 163718 - DNA, 25 bp, Saccharomyces pastorianus
agaggtacatttgttggcgccacct

SEQ ID NO: 163719 - DNA, 25 bp, Saccharomyces pastorianus
gttgttttctaattgcctttcttat

SEQ ID NO: 163720 - DNA, 25 bp, Saccharomyces pastorianus
gcggattgctttggacggagaccta

SEQ ID NO: 163721 - DNA, 25 bp, Saccharomyces pastorianus
tctattatcccgctttgaggcagtt

SEQ ID NO: 163722 - DNA, 25 bp, Saccharomyces pastorianus
gccacctcagggtttgttttactgg

SEQ ID NO: 163723 - DNA, 25 bp, Saccharomyces pastorianus
aggtatatctcccacagttagcggt

SEQ ID NO: 163724 - DNA, 25 bp, Saccharomyces pastorianus
gaagagctgcctccggataaatcaa

SEQ ID NO: 163725 - DNA, 25 bp, Saccharomyces pastorianus
agcaaattgcacgttcactgccatt

SEQ ID NO: 163726 - DNA, 25 bp, Saccharomyces pastorianus
tacatcttaagatcgcaaccgtttg

SEQ ID NO: 163727 - DNA, 25 bp, Saccharomyces pastorianus
gtggtggtaagctcgtgcaacataa

SEQ ID NO: 163728 - DNA, 25 bp, Saccharomyces pastorianus
gtttgcaagcctggtgttcttatac

SEQ ID NO: 163729 - DNA, 25 bp, Saccharomyces pastorianus
aaggcatactataccactgcatatt

SEQ ID NO: 163730 - DNA, 25 bp, Saccharomyces pastorianus
gcatcttttgcttccagaatgtagg

SEQ ID NO: 163731 - DNA, 25 bp, Saccharomyces pastorianus
taaatcaatccgctgggcttgctta

SEQ ID NO: 163732 - DNA, 25 bp, Saccharomyces pastorianus
atacgacctggtttgcatcttttgc

SEQ ID NO: 163733 - DNA, 25 bp, Saccharomyces pastorianus
gtaggactctcgagcaagcgaaact

SEQ ID NO: 163734 - DNA, 25 bp, Saccharomyces pastorianus
gttcactgccattgacgtgtcaaca

SEQ ID NO: 163735 - DNA, 25 bp, Saccharomyces pastorianus
tgaggcacctgtggcaaataatctt

SEQ ID NO: 163736 - DNA, 25 bp, Saccharomyces pastorianus
gatagaaagctcactgtagagacag

SEQ ID NO: 163737 - DNA, 25 bp, Saccharomyces pastorianus
agagacagaaacagttgaggcacct

SEQ ID NO: 163738 - DNA, 25 bp, Saccharomyces pastorianus
gcacctgtggcaaataatcttttat

SEQ ID NO: 163739 - DNA, 25 bp, Saccharomyces pastorianus
gaaagctcactgtagagacagaaac

SEQ ID NO: 163740 - DNA, 25 bp, Saccharomyces pastorianus
aacagttgaggcacctgtggcaaat

SEQ ID NO: 163741 - DNA, 25 bp, Saccharomyces pastorianus
aatcttttattgtcgaataacagta

SEQ ID NO: 163742 - DNA, 25 bp, Saccharomyces pastorianus
agaaacagttgaggcacctgtggca

SEQ ID NO: 163743 - DNA, 25 bp, Saccharomyces pastorianus
cagttgaggcacctgtggcaaataa

SEQ ID NO: 163744 - DNA, 25 bp, Saccharomyces pastorianus
gaagaagatagaaagctcactgtag

SEQ ID NO: 163745 - DNA, 25 bp, Saccharomyces pastorianus
tgtggcaaataatcttttattgtcg

SEQ ID NO: 163746 - DNA, 25 bp, Saccharomyces pastorianus
tatttacctgcccacacttcgattt

SEQ ID NO: 163747 - DNA, 25 bp, Saccharomyces pastorianus
aatgttgcctctttcaattgagcag

SEQ ID NO: 163748 - DNA, 25 bp, Saccharomyces pastorianus
cttcgatttcgaggtttacttactg

SEQ ID NO: 163749 - DNA, 25 bp, Saccharomyces pastorianus
atttccacccctcataaaatgttgc

SEQ ID NO: 163750 - DNA, 25 bp, Saccharomyces pastorianus
attgagcagagaagaccttcccgct

SEQ ID NO: 163751 - DNA, 25 bp, Saccharomyces pastorianus
ttcacaccgatttaaacctgtctgt

SEQ ID NO: 163752 - DNA, 25 bp, Saccharomyces pastorianus
aagaaacatacacatttccacccct

SEQ ID NO: 163753 - DNA, 25 bp, Saccharomyces pastorianus
gaatacgatcagtctactttgtcaa

SEQ ID NO: 163754 - DNA, 25 bp, Saccharomyces pastorianus
tcattcgtcattccagctctattta

SEQ ID NO: 163755 - DNA, 25 bp, Saccharomyces pastorianus
ataaggacttcgcagttcttcacac

SEQ ID NO: 163756 - DNA, 25 bp, Saccharomyces pastorianus
tcttgcttccatttgtcattcgtca

SEQ ID NO: 163757 - DNA, 25 bp, Saccharomyces pastorianus
gtcaagcggttcttattctgcagat

SEQ ID NO: 163758 - DNA, 25 bp, Saccharomyces pastorianus
atgaggatggattccgccaattcat

SEQ ID NO: 163759 - DNA, 25 bp, Saccharomyces pastorianus
gcatcccggactcatttgattctaa

SEQ ID NO: 163760 - DNA, 25 bp, Saccharomyces pastorianus
gggacgatatcttaacacctgctga

SEQ ID NO: 163761 - DNA, 25 bp, Saccharomyces pastorianus
ggatcacatacgttccaattatcgg

SEQ ID NO: 163762 - DNA, 25 bp, Saccharomyces pastorianus
atcaaagaacctttcctctggcatc

SEQ ID NO: 163763 - DNA, 25 bp, Saccharomyces pastorianus
gattctaacgtgaacagcttgctgt

SEQ ID NO: 163764 - DNA, 25 bp, Saccharomyces pastorianus
tagacgataacagcgcttacagacg

SEQ ID NO: 163765 - DNA, 25 bp, Saccharomyces pastorianus
gatggtaccactaggagctcgggca

SEQ ID NO: 163766 - DNA, 25 bp, Saccharomyces pastorianus
atacaaaccagatcttccacagcaa

SEQ ID NO: 163767 - DNA, 25 bp, Saccharomyces pastorianus
gagctcgggcattgactccaattat

SEQ ID NO: 163768 - DNA, 25 bp, Saccharomyces pastorianus
ggacagatcatatcgaccctagcgt

SEQ ID NO: 163769 - DNA, 25 bp, Saccharomyces pastorianus
taatgagatttccttagacagcccg

SEQ ID NO: 163770 - DNA, 25 bp, Saccharomyces pastorianus
cccgatgccaattttcaatgagagt

SEQ ID NO: 163771 - DNA, 25 bp, Saccharomyces pastorianus
agatcatatcgaccctagcgtacta

SEQ ID NO: 163772 - DNA, 25 bp, Saccharomyces pastorianus
gagatttccttagacagcccgatgc

SEQ ID NO: 163773 - DNA, 25 bp, Saccharomyces pastorianus
gaccctagcgtactacaggcatact

SEQ ID NO: 163774 - DNA, 25 bp, Saccharomyces pastorianus
tagggttgcgggtgtagtaacaaca

SEQ ID NO: 163775 - DNA, 25 bp, Saccharomyces pastorianus
caggcatacttagatgatactatta

SEQ ID NO: 163776 - DNA, 25 bp, Saccharomyces pastorianus
gtaacaacagggacagatcatatcg

SEQ ID NO: 163777 - DNA, 25 bp, Saccharomyces pastorianus
acagcccgatgccaattttcaatga

SEQ ID NO: 163778 - DNA, 25 bp, Saccharomyces pastorianus
gcgtactacaggcatacttagatga

SEQ ID NO: 163779 - DNA, 25 bp, Saccharomyces pastorianus
aaggatttccggctctatgcagacg

SEQ ID NO: 163780 - DNA, 25 bp, Saccharomyces pastorianus
agagagctatctgagttggtattaa

SEQ ID NO: 163781 - DNA, 25 bp, Saccharomyces pastorianus
atatttatgcagttctcgattcgtg

SEQ ID NO: 163782 - DNA, 25 bp, Saccharomyces pastorianus
ggcaaacaccccatcaaagattatg

SEQ ID NO: 163783 - DNA, 25 bp, Saccharomyces pastorianus
accactcttttcaaggctaactttg

SEQ ID NO: 163784 - DNA, 25 bp, Saccharomyces pastorianus
tttgaagtttaagagcccattgcat

SEQ ID NO: 163785 - DNA, 25 bp, Saccharomyces pastorianus
ccaatgaccttcctcctgttagatg

SEQ ID NO: 163786 - DNA, 25 bp, Saccharomyces pastorianus
agcgaggatatttccaatgaccttc

SEQ ID NO: 163787 - DNA, 25 bp, Saccharomyces pastorianus
gcagttctcgattcgtgttggaaat

SEQ ID NO: 163788 - DNA, 25 bp, Saccharomyces pastorianus
gctttgccatgatttgctgttgtct

SEQ ID NO: 163789 - DNA, 25 bp, Saccharomyces pastorianus
ggctctatgcagacgctggtactga

SEQ ID NO: 163790 - DNA, 25 bp, Saccharomyces pastorianus
tgctaacaagcctcttcgttcacct

SEQ ID NO: 163791 - DNA, 25 bp, Saccharomyces pastorianus
gttcacctcccttgtaacggcagtg

SEQ ID NO: 163792 - DNA, 25 bp, Saccharomyces pastorianus
cacctcccttgtaacggcagtggga

SEQ ID NO: 163793 - DNA, 25 bp, Saccharomyces pastorianus
taacggcagtgggaagggtaagcaa

SEQ ID NO: 163794 - DNA, 25 bp, Saccharomyces pastorianus
ttcacctcccttgtaacggcagtgg

SEQ ID NO: 163795 - DNA, 25 bp, Saccharomyces pastorianus
cgttcacctcccttgtaacggcagt

SEQ ID NO: 163796 - DNA, 25 bp, Saccharomyces pastorianus
tcttcgttcacctcccttgtaacgg

SEQ ID NO: 163797 - DNA, 25 bp, Saccharomyces pastorianus
atgctaacaagcctcttcgttcacc

SEQ ID NO: 163798 - DNA, 25 bp, Saccharomyces pastorianus
tcacctcccttgtaacggcagtggg

SEQ ID NO: 163799 - DNA, 25 bp, Saccharomyces pastorianus
cctcccttgtaacggcagtgggaag

SEQ ID NO: 163800 - DNA, 25 bp, Saccharomyces pastorianus
tcgttcacctcccttgtaacggcag

SEQ ID NO: 163801 - DNA, 25 bp, Saccharomyces pastorianus
gtatttcttcggagctttcctcatt

SEQ ID NO: 163802 - DNA, 25 bp, Saccharomyces pastorianus
gagagggtatttcttcggagctttc

SEQ ID NO: 163803 - DNA, 25 bp, Saccharomyces pastorianus
tgctacttcggaaacaagagagggt

SEQ ID NO: 163804 - DNA, 25 bp, Saccharomyces pastorianus
tccgaaagttggaaactgctacttc

SEQ ID NO: 163805 - DNA, 25 bp, Saccharomyces pastorianus
gttggaaactgctacttcggaaaca

SEQ ID NO: 163806 - DNA, 25 bp, Saccharomyces pastorianus
tttaaacgggaatatcatcgagcat

SEQ ID NO: 163807 - DNA, 25 bp, Saccharomyces pastorianus
atcaatcaccgttctagaagagctt

SEQ ID NO: 163808 - DNA, 25 bp, Saccharomyces pastorianus
tcgagcatgacgttcccgaagtttt

SEQ ID NO: 163809 - DNA, 25 bp, Saccharomyces pastorianus
tcttcggagctttcctcatttttaa

SEQ ID NO: 163810 - DNA, 25 bp, Saccharomyces pastorianus
atatcatcgagcatgacgttcccga

SEQ ID NO: 163811 - DNA, 25 bp, Saccharomyces pastorianus
gattcacaacaatcaatcaccgttc

SEQ ID NO: 163812 - DNA, 25 bp, Saccharomyces pastorianus
aaaactcctctttgtcttttctgtg

SEQ ID NO: 163813 - DNA, 25 bp, Saccharomyces pastorianus
gtcttttctgtgttattgacagtag

SEQ ID NO: 163814 - DNA, 25 bp, Saccharomyces pastorianus
atgcaaaaactcctctttgtctttt

SEQ ID NO: 163815 - DNA, 25 bp, Saccharomyces pastorianus
tcctctttgtcttttctgtgttatt

SEQ ID NO: 163816 - DNA, 25 bp, Saccharomyces pastorianus
gtagtactagcaacagcaccatttc

SEQ ID NO: 163817 - DNA, 25 bp, Saccharomyces pastorianus
gacagtagtactagcaacagcacca

SEQ ID NO: 163818 - DNA, 25 bp, Saccharomyces pastorianus
actcctctttgtcttttctgtgtta

SEQ ID NO: 163819 - DNA, 25 bp, Saccharomyces pastorianus
aaactcctctttgtcttttctgtgt

SEQ ID NO: 163820 - DNA, 25 bp, Saccharomyces pastorianus
tactagcaacagcaccatttcaggt

SEQ ID NO: 163821 - DNA, 25 bp, Saccharomyces pastorianus
caaaaactcctctttgtcttttctg

SEQ ID NO: 163822 - DNA, 25 bp, Saccharomyces pastorianus
ctctttgtcttttctgtgttattga

SEQ ID NO: 163823 - DNA, 25 bp, Saccharomyces pastorianus
gtacggtgtccttttatgatattaa

SEQ ID NO: 163824 - DNA, 25 bp, Saccharomyces pastorianus
atggatgattctcccgttaacgaag

SEQ ID NO: 163825 - DNA, 25 bp, Saccharomyces pastorianus
gtatccactggatctggtacggtgt

SEQ ID NO: 163826 - DNA, 25 bp, Saccharomyces pastorianus
tccaccaccgtcaaacaatatcaag

SEQ ID NO: 163827 - DNA, 25 bp, Saccharomyces pastorianus
gatcgtaaaatcttcgtcaggcaag

SEQ ID NO: 163828 - DNA, 25 bp, Saccharomyces pastorianus
ggccttcttcatggatcgtaaaatc

SEQ ID NO: 163829 - DNA, 25 bp, Saccharomyces pastorianus
gtcaggcaagataatccaccaccgt

SEQ ID NO: 163830 - DNA, 25 bp, Saccharomyces pastorianus
attcggatgatgttgacagggccat

SEQ ID NO: 163831 - DNA, 25 bp, Saccharomyces pastorianus
atttacctgcttccgttaattggca

SEQ ID NO: 163832 - DNA, 25 bp, Saccharomyces pastorianus
ggaatgtcgcacacgctgatgtgga

SEQ ID NO: 163833 - DNA, 25 bp, Saccharomyces pastorianus
ggaaagcgtacataaccacagtgat

SEQ ID NO: 163834 - DNA, 25 bp, Saccharomyces pastorianus
atggtgatggatgaatttttgttgc

SEQ ID NO: 163835 - DNA, 25 bp, Saccharomyces pastorianus
gttttgaaaaatccactatatgctt

SEQ ID NO: 163836 - DNA, 25 bp, Saccharomyces pastorianus
ctgagtatggcgcaattagttattt

SEQ ID NO: 163837 - DNA, 25 bp, Saccharomyces pastorianus
aaatccactatatgcttcaaagctg

SEQ ID NO: 163838 - DNA, 25 bp, Saccharomyces pastorianus
ggatgaatttttgttgcatttaaac

SEQ ID NO: 163839 - DNA, 25 bp, Saccharomyces pastorianus
agctgcaagatactaaatactccaa

SEQ ID NO: 163840 - DNA, 25 bp, Saccharomyces pastorianus
aatactccaaagaaatcatggtgat

SEQ ID NO: 163841 - DNA, 25 bp, Saccharomyces pastorianus
tgataaagcttggtatggtgaaaaa

SEQ ID NO: 163842 - DNA, 25 bp, Saccharomyces pastorianus
cttacagggcattaatgaagttttg

SEQ ID NO: 163843 - DNA, 25 bp, Saccharomyces pastorianus
aaagcggctgagtatggcgcaatta

SEQ ID NO: 163844 - DNA, 25 bp, Saccharomyces pastorianus
aaagaggtagttaaagcggctgagt

SEQ ID NO: 163845 - DNA, 25 bp, Saccharomyces pastorianus
ttattctttgctctccaggtttcta

SEQ ID NO: 163846 - DNA, 25 bp, Saccharomyces pastorianus
aagggatcgcccatgtttgtttagt

SEQ ID NO: 163847 - DNA, 25 bp, Saccharomyces pastorianus
tatttgagctttacccttgactacg

SEQ ID NO: 163848 - DNA, 25 bp, Saccharomyces pastorianus
aaaattttccagtatgccgaagagg

SEQ ID NO: 163849 - DNA, 25 bp, Saccharomyces pastorianus
tgacatacctgtcggcaaatatttg

SEQ ID NO: 163850 - DNA, 25 bp, Saccharomyces pastorianus
gtttgtttagtgacatcctcctcta

SEQ ID NO: 163851 - DNA, 25 bp, Saccharomyces pastorianus
aacaaggaatgttctttatagccca

SEQ ID NO: 163852 - DNA, 25 bp, Saccharomyces pastorianus
gctctccaggtttctacgctaagat

SEQ ID NO: 163853 - DNA, 25 bp, Saccharomyces pastorianus
gactacgtgtatccctttactatca

SEQ ID NO: 163854 - DNA, 25 bp, Saccharomyces pastorianus
gacatcctcctctactattttaaaa

SEQ ID NO: 163855 - DNA, 25 bp, Saccharomyces pastorianus
agtataaatcagacaccgcggcggt

SEQ ID NO: 163856 - DNA, 25 bp, Saccharomyces pastorianus
cgaagataccaaggatttattaagt

SEQ ID NO: 163857 - DNA, 25 bp, Saccharomyces pastorianus
gacgtcttggatgatctttatcgca

SEQ ID NO: 163858 - DNA, 25 bp, Saccharomyces pastorianus
gaatggcaggatatcatccatcaac

SEQ ID NO: 163859 - DNA, 25 bp, Saccharomyces pastorianus
taaaagtccatcagaatggcaggat

SEQ ID NO: 163860 - DNA, 25 bp, Saccharomyces pastorianus
tcggaaaacgaagataccaaggatt

SEQ ID NO: 163861 - DNA, 25 bp, Saccharomyces pastorianus
taaatctttgatatcggaaaacgaa

SEQ ID NO: 163862 - DNA, 25 bp, Saccharomyces pastorianus
tcttggatgatctttatcgcaagtt

SEQ ID NO: 163863 - DNA, 25 bp, Saccharomyces pastorianus
gagagacgtcttggatgatctttat

SEQ ID NO: 163864 - DNA, 25 bp, Saccharomyces pastorianus
ggatatcatccatcaacgtgaacaa

SEQ ID NO: 163865 - DNA, 25 bp, Saccharomyces pastorianus
gaactgcaaattaagagagacgtct

SEQ ID NO: 163866 - DNA, 25 bp, Saccharomyces pastorianus
atcaacgtgaacaagaactgcaaat

SEQ ID NO: 163867 - DNA, 25 bp, Saccharomyces pastorianus
aaagactatcttaccaaccagcagc

SEQ ID NO: 163868 - DNA, 25 bp, Saccharomyces pastorianus
aaaggaagaattttcgtctgcagaa

SEQ ID NO: 163869 - DNA, 25 bp, Saccharomyces pastorianus
tataccgcatattttttactcgctg

SEQ ID NO: 163870 - DNA, 25 bp, Saccharomyces pastorianus
catattttttactcgctgcaccaaa

SEQ ID NO: 163871 - DNA, 25 bp, Saccharomyces pastorianus
tttttactcgctgcaccaaataagg

SEQ ID NO: 163872 - DNA, 25 bp, Saccharomyces pastorianus
accttaacaggttcgattagacatc

SEQ ID NO: 163873 - DNA, 25 bp, Saccharomyces pastorianus
ggaaggatccaaacaatctctcaaa

SEQ ID NO: 163874 - DNA, 25 bp, Saccharomyces pastorianus
agcagccgaaaaatctgagtactcc

SEQ ID NO: 163875 - DNA, 25 bp, Saccharomyces pastorianus
gattagacatcgtttgaaactttgt

SEQ ID NO: 163876 - DNA, 25 bp, Saccharomyces pastorianus
ctccaccagttccaacggtgaattt

SEQ ID NO: 163877 - DNA, 25 bp, Saccharomyces pastorianus
tatcttaccaaccagcagccgaaaa

SEQ ID NO: 163878 - DNA, 25 bp, Saccharomyces pastorianus
gagacacattgaaagctaatgcagt

SEQ ID NO: 163879 - DNA, 25 bp, Saccharomyces pastorianus
gaaagctaatgcagtcatggatggt

SEQ ID NO: 163880 - DNA, 25 bp, Saccharomyces pastorianus
agctaatgcagtcatggatggtgaa

SEQ ID NO: 163881 - DNA, 25 bp, Saccharomyces pastorianus
tatcccaacatggacaattccatat

SEQ ID NO: 163882 - DNA, 25 bp, Saccharomyces pastorianus
cggtatatcccaacatggacaattc

SEQ ID NO: 163883 - DNA, 25 bp, Saccharomyces pastorianus
tcatggatggtgaagtagatgtcaa

SEQ ID NO: 163884 - DNA, 25 bp, Saccharomyces pastorianus
gaacgatcttcatcatttatttcaa

SEQ ID NO: 163885 - DNA, 25 bp, Saccharomyces pastorianus
aagaacgatcttcatcatttatttc

SEQ ID NO: 163886 - DNA, 25 bp, Saccharomyces pastorianus
acaattccatatatactaggtatac

SEQ ID NO: 163887 - DNA, 25 bp, Saccharomyces pastorianus
catttatttcaattttagacgatga

SEQ ID NO: 163888 - DNA, 25 bp, Saccharomyces pastorianus
caaaggaaaaagctctcggtatatc

SEQ ID NO: 163889 - DNA, 25 bp, Saccharomyces pastorianus
gctgatttgcacgataggtcttcac

SEQ ID NO: 163890 - DNA, 25 bp, Saccharomyces pastorianus
gatcgtgagagagaactattgccaa

SEQ ID NO: 163891 - DNA, 25 bp, Saccharomyces pastorianus
aagaattagatcgtggtaccctgct

SEQ ID NO: 163892 - DNA, 25 bp, Saccharomyces pastorianus
ctggaatggaccgaggcacgtcgtt

SEQ ID NO: 163893 - DNA, 25 bp, Saccharomyces pastorianus
tgataggcaagtcgcaacatggatt

SEQ ID NO: 163894 - DNA, 25 bp, Saccharomyces pastorianus
gagtcattcgctcaagacttagcta

SEQ ID NO: 163895 - DNA, 25 bp, Saccharomyces pastorianus
gtaccctgcttcagtggaccatgaa

SEQ ID NO: 163896 - DNA, 25 bp, Saccharomyces pastorianus
gtttggctccagaagtacatcagca

SEQ ID NO: 163897 - DNA, 25 bp, Saccharomyces pastorianus
gaagcgaccatgacaagctattgat

SEQ ID NO: 163898 - DNA, 25 bp, Saccharomyces pastorianus
ttgagccatcaggtaggcgaagcat

SEQ ID NO: 163899 - DNA, 25 bp, Saccharomyces pastorianus
cgataggtcttcacgtatggtggcc

SEQ ID NO: 163900 - DNA, 25 bp, Saccharomyces pastorianus
gttaacgagcccttcaagaccaaat

SEQ ID NO: 163901 - DNA, 25 bp, Saccharomyces pastorianus
tatatgggttagacacctccggcaa

SEQ ID NO: 163902 - DNA, 25 bp, Saccharomyces pastorianus
gcacggtataggcaagggtcctcta

SEQ ID NO: 163903 - DNA, 25 bp, Saccharomyces pastorianus
agaatcacagcgtggtggcctcaaa

SEQ ID NO: 163904 - DNA, 25 bp, Saccharomyces pastorianus
ggagacgtcgcattcatcccaggaa

SEQ ID NO: 163905 - DNA, 25 bp, Saccharomyces pastorianus
gaaagagctaatggccatgcgcaaa

SEQ ID NO: 163906 - DNA, 25 bp, Saccharomyces pastorianus
gggtcctctaactttatatcgtatt

SEQ ID NO: 163907 - DNA, 25 bp, Saccharomyces pastorianus
aaaccaccatactttcatccaattt

SEQ ID NO: 163908 - DNA, 25 bp, Saccharomyces pastorianus
aaaagctcaacgctgccgatgcggg

SEQ ID NO: 163909 - DNA, 25 bp, Saccharomyces pastorianus
tgaacacacagctaccacaattaca

SEQ ID NO: 163910 - DNA, 25 bp, Saccharomyces pastorianus
gtcatttgaacacaggcccagtata

SEQ ID NO: 163911 - DNA, 25 bp, Saccharomyces pastorianus
aattggagttcctcactagtgtaga

SEQ ID NO: 163912 - DNA, 25 bp, Saccharomyces pastorianus
ttggaagacaacgacgactctccta

SEQ ID NO: 163913 - DNA, 25 bp, Saccharomyces pastorianus
gcggatgactacacgaagctggttt

SEQ ID NO: 163914 - DNA, 25 bp, Saccharomyces pastorianus
attgacccgagcgacttgacagaga

SEQ ID NO: 163915 - DNA, 25 bp, Saccharomyces pastorianus
caaacaagctgacggtcttgcgcgt

SEQ ID NO: 163916 - DNA, 25 bp, Saccharomyces pastorianus
accggttctagcttggaagtgattt

SEQ ID NO: 163917 - DNA, 25 bp, Saccharomyces pastorianus
agggtatcattttggttggctgcaa

SEQ ID NO: 163918 - DNA, 25 bp, Saccharomyces pastorianus
gatttacacttttccactgatggta

SEQ ID NO: 163919 - DNA, 25 bp, Saccharomyces pastorianus
ctactgcaattgacgcttccaaggg

SEQ ID NO: 163920 - DNA, 25 bp, Saccharomyces pastorianus
cttgcgcgtggatcctaccaaagat

SEQ ID NO: 163921 - DNA, 25 bp, Saccharomyces pastorianus
gaaggtaccgttgcagctatcgcat

SEQ ID NO: 163922 - DNA, 25 bp, Saccharomyces pastorianus
caggatttgattgctcggccagtga

SEQ ID NO: 163923 - DNA, 25 bp, Saccharomyces pastorianus
aagtaccctcgagtaagccgaatag

SEQ ID NO: 163924 - DNA, 25 bp, Saccharomyces pastorianus
gctcgtcaccagtatcctacaaaaa

SEQ ID NO: 163925 - DNA, 25 bp, Saccharomyces pastorianus
atgctcactgactcgttactaggcg

SEQ ID NO: 163926 - DNA, 25 bp, Saccharomyces pastorianus
attaagcgcatccttgggccaagtg

SEQ ID NO: 163927 - DNA, 25 bp, Saccharomyces pastorianus
ggtgatttaatcagcgccatgctca

SEQ ID NO: 163928 - DNA, 25 bp, Saccharomyces pastorianus
gattttagatcctgtactgggcgat

SEQ ID NO: 163929 - DNA, 25 bp, Saccharomyces pastorianus
gaattcctgagcaacgacacttacg

SEQ ID NO: 163930 - DNA, 25 bp, Saccharomyces pastorianus
gctgcacacagctgtcattaagcgc

SEQ ID NO: 163931 - DNA, 25 bp, Saccharomyces pastorianus
gggatgtcaattcgtaccttagacg

SEQ ID NO: 163932 - DNA, 25 bp, Saccharomyces pastorianus
gatattcttctatgaaatccccaag

SEQ ID NO: 163933 - DNA, 25 bp, Saccharomyces pastorianus
aggtgtcacctcgtggagcaggtta

SEQ ID NO: 163934 - DNA, 25 bp, Saccharomyces pastorianus
caacgttttcgaagaggcacctgaa

SEQ ID NO: 163935 - DNA, 25 bp, Saccharomyces pastorianus
gatagcatatctaatccggtagcca

SEQ ID NO: 163936 - DNA, 25 bp, Saccharomyces pastorianus
ggttactactgtatggtcggcgcca

SEQ ID NO: 163937 - DNA, 25 bp, Saccharomyces pastorianus
taaccccacgttagatcatccagat

SEQ ID NO: 163938 - DNA, 25 bp, Saccharomyces pastorianus
ggagcaggttacactttcggaagaa

SEQ ID NO: 163939 - DNA, 25 bp, Saccharomyces pastorianus
acagagcccatcagttatgtaacga

SEQ ID NO: 163940 - DNA, 25 bp, Saccharomyces pastorianus
gttatgctgtattatcgacgacgaa

SEQ ID NO: 163941 - DNA, 25 bp, Saccharomyces pastorianus
gatcaattctacttcaacgttttcg

SEQ ID NO: 163942 - DNA, 25 bp, Saccharomyces pastorianus
ggtcggcgccaaactattgttatcg

SEQ ID NO: 163943 - DNA, 25 bp, Saccharomyces pastorianus
gagaaattccacacgatggcgccat

SEQ ID NO: 163944 - DNA, 25 bp, Saccharomyces pastorianus
gggaaaaagtttccctgtgattctg

SEQ ID NO: 163945 - DNA, 25 bp, Saccharomyces pastorianus
aatgttctctacatttgcatggtta

SEQ ID NO: 163946 - DNA, 25 bp, Saccharomyces pastorianus
gataaatgttctctacatttgcatg

SEQ ID NO: 163947 - DNA, 25 bp, Saccharomyces pastorianus
ttgaagcctccaaagaaggattcgg

SEQ ID NO: 163948 - DNA, 25 bp, Saccharomyces pastorianus
gcatggttacactgaacgtaaggat

SEQ ID NO: 163949 - DNA, 25 bp, Saccharomyces pastorianus
catttgcatggttacactgaacgta

SEQ ID NO: 163950 - DNA, 25 bp, Saccharomyces pastorianus
gttcaaggtcttgaaggtattatta

SEQ ID NO: 163951 - DNA, 25 bp, Saccharomyces pastorianus
tttgaagcctccaaagaaggattcg

SEQ ID NO: 163952 - DNA, 25 bp, Saccharomyces pastorianus
tacatttgcatggttacactgaacg

SEQ ID NO: 163953 - DNA, 25 bp, Saccharomyces pastorianus
tttgcatggttacactgaacgtaag

SEQ ID NO: 163954 - DNA, 25 bp, Saccharomyces pastorianus
aggatatcagggatacatattcctc

SEQ ID NO: 163955 - DNA, 25 bp, Saccharomyces pastorianus
gacctttgtggattttttgactcca

SEQ ID NO: 163956 - DNA, 25 bp, Saccharomyces pastorianus
ggatagttccatttggctttcaaaa

SEQ ID NO: 163957 - DNA, 25 bp, Saccharomyces pastorianus
gagctttctactctaaaattttcgg

SEQ ID NO: 163958 - DNA, 25 bp, Saccharomyces pastorianus
acgacagttctagtggcagcttaat

SEQ ID NO: 163959 - DNA, 25 bp, Saccharomyces pastorianus
gaggttcctcactatggttaaacga

SEQ ID NO: 163960 - DNA, 25 bp, Saccharomyces pastorianus
gtttaggttatggtcgtttgtcaga

SEQ ID NO: 163961 - DNA, 25 bp, Saccharomyces pastorianus
aatagagcgagcgattcccattcat

SEQ ID NO: 163962 - DNA, 25 bp, Saccharomyces pastorianus
agacgtaacctgtaagcacggccac

SEQ ID NO: 163963 - DNA, 25 bp, Saccharomyces pastorianus
gggtttgatagaccatcgagttctc

SEQ ID NO: 163964 - DNA, 25 bp, Saccharomyces pastorianus
tcgagttctcatccagagctttcta

SEQ ID NO: 163965 - DNA, 25 bp, Saccharomyces pastorianus
tagcttctgggcgtgtttgtttaat

SEQ ID NO: 163966 - DNA, 25 bp, Saccharomyces pastorianus
gatggtcctgatgctgatattcacg

SEQ ID NO: 163967 - DNA, 25 bp, Saccharomyces pastorianus
tgatagagatattcaggatggtcct

SEQ ID NO: 163968 - DNA, 25 bp, Saccharomyces pastorianus
aggatggtcctgatgctgatattca

SEQ ID NO: 163969 - DNA, 25 bp, Saccharomyces pastorianus
gcaatcatccactgaaagtgataga

SEQ ID NO: 163970 - DNA, 25 bp, Saccharomyces pastorianus
cctgatgctgatattcacgtcgcac

SEQ ID NO: 163971 - DNA, 25 bp, Saccharomyces pastorianus
cccgtggaaaaagagtggtcagatg

SEQ ID NO: 163972 - DNA, 25 bp, Saccharomyces pastorianus
gtcgcaccacccgtggaaaaagagt

SEQ ID NO: 163973 - DNA, 25 bp, Saccharomyces pastorianus
gtcctgatgctgatattcacgtcgc

SEQ ID NO: 163974 - DNA, 25 bp, Saccharomyces pastorianus
tattcacgtcgcaccacccgtggaa

SEQ ID NO: 163975 - DNA, 25 bp, Saccharomyces pastorianus
ggtcctgatgctgatattcacgtcg

SEQ ID NO: 163976 - DNA, 25 bp, Saccharomyces pastorianus
atgcaatcatccactgaaagtgata

SEQ ID NO: 163977 - DNA, 25 bp, Saccharomyces pastorianus
gagtggtcagatggatttgatgaca

SEQ ID NO: 163978 - DNA, 25 bp, Saccharomyces pastorianus
cttcggttcttacaagcatagcact

SEQ ID NO: 163979 - DNA, 25 bp, Saccharomyces pastorianus
gaacttcggttcttacaagcatagc

SEQ ID NO: 163980 - DNA, 25 bp, Saccharomyces pastorianus
gagggctcataggttatcttgtcat

SEQ ID NO: 163981 - DNA, 25 bp, Saccharomyces pastorianus
gctcataggttatcttgtcatttac

SEQ ID NO: 163982 - DNA, 25 bp, Saccharomyces pastorianus
gtcagatggatttgatgacaacgaa

SEQ ID NO: 163983 - DNA, 25 bp, Saccharomyces pastorianus
taacgttgagccaccaaaaagaggg

SEQ ID NO: 163984 - DNA, 25 bp, Saccharomyces pastorianus
gggctcataggttatcttgtcattt

SEQ ID NO: 163985 - DNA, 25 bp, Saccharomyces pastorianus
acgttgagccaccaaaaagagggct

SEQ ID NO: 163986 - DNA, 25 bp, Saccharomyces pastorianus
cataggttatcttgtcatttactta

SEQ ID NO: 163987 - DNA, 25 bp, Saccharomyces pastorianus
gggataacgttgagccaccaaaaag

SEQ ID NO: 163988 - DNA, 25 bp, Saccharomyces pastorianus
gatatcttggttcttgcaactggct

SEQ ID NO: 163989 - DNA, 25 bp, Saccharomyces pastorianus
acatactttttcttggcggtggctt

SEQ ID NO: 163990 - DNA, 25 bp, Saccharomyces pastorianus
tacggctgccagctttgatgataag

SEQ ID NO: 163991 - DNA, 25 bp, Saccharomyces pastorianus
gaactgggtgggacatacgcaataa

SEQ ID NO: 163992 - DNA, 25 bp, Saccharomyces pastorianus
gcaactggctcaaagtgggctgatc

SEQ ID NO: 163993 - DNA, 25 bp, Saccharomyces pastorianus
attccgataagctattgccagcctt

SEQ ID NO: 163994 - DNA, 25 bp, Saccharomyces pastorianus
tatgtgtattttctaccctcagctg

SEQ ID NO: 163995 - DNA, 25 bp, Saccharomyces pastorianus
gattataccaagtcgatcctgccgt

SEQ ID NO: 163996 - DNA, 25 bp, Saccharomyces pastorianus
gatcctgccgttaaaaaatgttctt

SEQ ID NO: 163997 - DNA, 25 bp, Saccharomyces pastorianus
cagctgtccgtttgacggtttcaaa

SEQ ID NO: 163998 - DNA, 25 bp, Saccharomyces pastorianus
tgggctgatccaattggttcaactt

SEQ ID NO: 163999 - DNA, 25 bp, Saccharomyces pastorianus
aactggtctaaagctgtgtctaatc

SEQ ID NO: 164000 - DNA, 25 bp, Saccharomyces pastorianus
agaccaccttatttaatcactgtat

SEQ ID NO: 164001 - DNA, 25 bp, Saccharomyces pastorianus
caagaggtatatacggctgccaatt

SEQ ID NO: 164002 - DNA, 25 bp, Saccharomyces pastorianus
aatatttctattgcagaccacctta

SEQ ID NO: 164003 - DNA, 25 bp, Saccharomyces pastorianus
gtcttcagagctgcacaagaggtat

SEQ ID NO: 164004 - DNA, 25 bp, Saccharomyces pastorianus
tagcgctacattggaaaattatcat

SEQ ID NO: 164005 - DNA, 25 bp, Saccharomyces pastorianus
tatagcattcatttgtcttcagagc

SEQ ID NO: 164006 - DNA, 25 bp, Saccharomyces pastorianus
gctgccaattttatagcgctacatt

SEQ ID NO: 164007 - DNA, 25 bp, Saccharomyces pastorianus
cactgtatctctttaaactggtcta

SEQ ID NO: 164008 - DNA, 25 bp, Saccharomyces pastorianus
gcactgttacaattaccaggtgagt

SEQ ID NO: 164009 - DNA, 25 bp, Saccharomyces pastorianus
gtgtctaatcgtattaagaggcgaa

SEQ ID NO: 164010 - DNA, 25 bp, Saccharomyces pastorianus
aataaacttcaagccgctttggctt

SEQ ID NO: 164011 - DNA, 25 bp, Saccharomyces pastorianus
atcgctttaataaacttcaagccgc

SEQ ID NO: 164012 - DNA, 25 bp, Saccharomyces pastorianus
ttcaatcgctttaataaacttcaag

SEQ ID NO: 164013 - DNA, 25 bp, Saccharomyces pastorianus
ttcaagccgctttggctttggtcct

SEQ ID NO: 164014 - DNA, 25 bp, Saccharomyces pastorianus
ttaataaacttcaagccgctttggc

SEQ ID NO: 164015 - DNA, 25 bp, Saccharomyces pastorianus
taataaacttcaagccgctttggct

SEQ ID NO: 164016 - DNA, 25 bp, Saccharomyces pastorianus
tcaagccgctttggctttggtcctt

SEQ ID NO: 164017 - DNA, 25 bp, Saccharomyces pastorianus
acttcaagccgctttggctttggtc

SEQ ID NO: 164018 - DNA, 25 bp, Saccharomyces pastorianus
gccgctttggctttggtcctttact

SEQ ID NO: 164019 - DNA, 25 bp, Saccharomyces pastorianus
tttaataaacttcaagccgctttgg

SEQ ID NO: 164020 - DNA, 25 bp, Saccharomyces pastorianus
aacttcaagccgctttggctttggt

SEQ ID NO: 164021 - DNA, 25 bp, Saccharomyces pastorianus
gggagcttattaccgttacctattg

SEQ ID NO: 164022 - DNA, 25 bp, Saccharomyces pastorianus
cagcttaagatgtgccgtgggaaat

SEQ ID NO: 164023 - DNA, 25 bp, Saccharomyces pastorianus
atatctgatctgttccggttcaggt

SEQ ID NO: 164024 - DNA, 25 bp, Saccharomyces pastorianus
gacactgagtctgtttcaactttaa

SEQ ID NO: 164025 - DNA, 25 bp, Saccharomyces pastorianus
gacgaaattcgtactcttttggtcg

SEQ ID NO: 164026 - DNA, 25 bp, Saccharomyces pastorianus
ggttacaagccaaagtcttctctag

SEQ ID NO: 164027 - DNA, 25 bp, Saccharomyces pastorianus
atgcttgccattcctgcaacgatac

SEQ ID NO: 164028 - DNA, 25 bp, Saccharomyces pastorianus
gatacggccccttgttgcataagac

SEQ ID NO: 164029 - DNA, 25 bp, Saccharomyces pastorianus
ccgttacctattgcaagcctgaatt

SEQ ID NO: 164030 - DNA, 25 bp, Saccharomyces pastorianus
aatttacgtgtgttccagctcagac

SEQ ID NO: 164031 - DNA, 25 bp, Saccharomyces pastorianus
gtcgatttacgcacgttgttcttga

SEQ ID NO: 164032 - DNA, 25 bp, Saccharomyces pastorianus
atggccccatactccataagacaaa

SEQ ID NO: 164033 - DNA, 25 bp, Saccharomyces pastorianus
tggcctcgaccattgcaaatgtcag

SEQ ID NO: 164034 - DNA, 25 bp, Saccharomyces pastorianus
gtggtagaagtttcatggcctcgac

SEQ ID NO: 164035 - DNA, 25 bp, Saccharomyces pastorianus
ttccccaggtcaacacatattcgtg

SEQ ID NO: 164036 - DNA, 25 bp, Saccharomyces pastorianus
gtggtttggtttgcacaactgtttt

SEQ ID NO: 164037 - DNA, 25 bp, Saccharomyces pastorianus
ataagggcatcatttccaaccatcc

SEQ ID NO: 164038 - DNA, 25 bp, Saccharomyces pastorianus
tctttccgagtgcaaagtatcccgg

SEQ ID NO: 164039 - DNA, 25 bp, Saccharomyces pastorianus
tgtggaaatggcctattccccaggt

SEQ ID NO: 164040 - DNA, 25 bp, Saccharomyces pastorianus
gatgaaatgtgtaccctctcaaata

SEQ ID NO: 164041 - DNA, 25 bp, Saccharomyces pastorianus
tacatgcttacctttcctgcaaaaa

SEQ ID NO: 164042 - DNA, 25 bp, Saccharomyces pastorianus
atgtctacttgatttgctctggttc

SEQ ID NO: 164043 - DNA, 25 bp, Saccharomyces pastorianus
ctctccattctgctttgatatcact

SEQ ID NO: 164044 - DNA, 25 bp, Saccharomyces pastorianus
ggctcatttagttgccttccaaaag

SEQ ID NO: 164045 - DNA, 25 bp, Saccharomyces pastorianus
gttaagggaattctccactcaatta

SEQ ID NO: 164046 - DNA, 25 bp, Saccharomyces pastorianus
gagttgccaaagtgacccggttagc

SEQ ID NO: 164047 - DNA, 25 bp, Saccharomyces pastorianus
aacgtgtagttctgacctcttctta

SEQ ID NO: 164048 - DNA, 25 bp, Saccharomyces pastorianus
tgaacacatcttgcgaactcgtcaa

SEQ ID NO: 164049 - DNA, 25 bp, Saccharomyces pastorianus
aatacgccgctgattctgtagaacg

SEQ ID NO: 164050 - DNA, 25 bp, Saccharomyces pastorianus
tattaattcctgctgtgaacggtgt

SEQ ID NO: 164051 - DNA, 25 bp, Saccharomyces pastorianus
ggttagcgcctactgtggttctaag

SEQ ID NO: 164052 - DNA, 25 bp, Saccharomyces pastorianus
aagatagttctacatacggcctctc

SEQ ID NO: 164053 - DNA, 25 bp, Saccharomyces pastorianus
tcttcttatgcagctgtgttcgaca

SEQ ID NO: 164054 - DNA, 25 bp, Saccharomyces pastorianus
taagaatttgtgaagcggtatcgtc

SEQ ID NO: 164055 - DNA, 25 bp, Saccharomyces pastorianus
tagtttccttcaaatttctgaactt

SEQ ID NO: 164056 - DNA, 25 bp, Saccharomyces pastorianus
tagttatagtttgccttcagattta

SEQ ID NO: 164057 - DNA, 25 bp, Saccharomyces pastorianus
gtctatagtttccttcaaatttctg

SEQ ID NO: 164058 - DNA, 25 bp, Saccharomyces pastorianus
cggtatcgtctatagtttccttcaa

SEQ ID NO: 164059 - DNA, 25 bp, Saccharomyces pastorianus
gtttgccttcagatttaagaatttg

SEQ ID NO: 164060 - DNA, 25 bp, Saccharomyces pastorianus
gtatttagttatagtttgccttcag

SEQ ID NO: 164061 - DNA, 25 bp, Saccharomyces pastorianus
agcggtatcgtctatagtttccttc

SEQ ID NO: 164062 - DNA, 25 bp, Saccharomyces pastorianus
tttgtgaagcggtatcgtctatagt

SEQ ID NO: 164063 - DNA, 25 bp, Saccharomyces pastorianus
gtatcgtctatagtttccttcaaat

SEQ ID NO: 164064 - DNA, 25 bp, Saccharomyces pastorianus
gaagcggtatcgtctatagtttcct

SEQ ID NO: 164065 - DNA, 25 bp, Saccharomyces pastorianus
agcgcaagtagcacgccctcttcta

SEQ ID NO: 164066 - DNA, 25 bp, Saccharomyces pastorianus
acagagcgcaagtagcacgccctct

SEQ ID NO: 164067 - DNA, 25 bp, Saccharomyces pastorianus
aaagcgagagcggtacaccagctcc

SEQ ID NO: 164068 - DNA, 25 bp, Saccharomyces pastorianus
aaaaaagcgagagcggtacaccagc

SEQ ID NO: 164069 - DNA, 25 bp, Saccharomyces pastorianus
cagagcgcaagtagcacgccctctt

SEQ ID NO: 164070 - DNA, 25 bp, Saccharomyces pastorianus
gagcgcaagtagcacgccctcttct

SEQ ID NO: 164071 - DNA, 25 bp, Saccharomyces pastorianus
gcgagagcggtacaccagctcctaa

SEQ ID NO: 164072 - DNA, 25 bp, Saccharomyces pastorianus
tagcacgccctcttctactacaatg

SEQ ID NO: 164073 - DNA, 25 bp, Saccharomyces pastorianus
agcgagagcggtacaccagctccta

SEQ ID NO: 164074 - DNA, 25 bp, Saccharomyces pastorianus
aagtagcacgccctcttctactaca

SEQ ID NO: 164075 - DNA, 25 bp, Saccharomyces pastorianus
cgagagcggtacaccagctcctaaa

SEQ ID NO: 164076 - DNA, 25 bp, Saccharomyces pastorianus
agattgctagctccagttccaacgg

SEQ ID NO: 164077 - DNA, 25 bp, Saccharomyces pastorianus
ctcaacttcgaattccgcatcaaat

SEQ ID NO: 164078 - DNA, 25 bp, Saccharomyces pastorianus
gggtacgtggagcttcgtcctcaac

SEQ ID NO: 164079 - DNA, 25 bp, Saccharomyces pastorianus
atcaagtagctttggcagcagctgc

SEQ ID NO: 164080 - DNA, 25 bp, Saccharomyces pastorianus
gataaccaactccacgtttgctgtt

SEQ ID NO: 164081 - DNA, 25 bp, Saccharomyces pastorianus
cacgaagggcgttgtagggcatatc

SEQ ID NO: 164082 - DNA, 25 bp, Saccharomyces pastorianus
aacgcgatgaatttccgcaacatag

SEQ ID NO: 164083 - DNA, 25 bp, Saccharomyces pastorianus
tgcggctgcagtgggatctaccatg

SEQ ID NO: 164084 - DNA, 25 bp, Saccharomyces pastorianus
aaaatccttcattcacgaacatcgt

SEQ ID NO: 164085 - DNA, 25 bp, Saccharomyces pastorianus
cgaacatcgtgctgagtctacgaga

SEQ ID NO: 164086 - DNA, 25 bp, Saccharomyces pastorianus
cacgtttgctgtttcgttaaccaag

SEQ ID NO: 164087 - DNA, 25 bp, Saccharomyces pastorianus
tcgtgggcgacgatggcactagctt

SEQ ID NO: 164088 - DNA, 25 bp, Saccharomyces pastorianus
ttcattctacgaagacctcggttcc

SEQ ID NO: 164089 - DNA, 25 bp, Saccharomyces pastorianus
ccatgagttttcgtattcattctac

SEQ ID NO: 164090 - DNA, 25 bp, Saccharomyces pastorianus
agtgccccggcggttcgatgagtct

SEQ ID NO: 164091 - DNA, 25 bp, Saccharomyces pastorianus
catttcccgaatgtgtatgctgctc

SEQ ID NO: 164092 - DNA, 25 bp, Saccharomyces pastorianus
agcagccttgaaacgccacaattta

SEQ ID NO: 164093 - DNA, 25 bp, Saccharomyces pastorianus
gggctctgccgagttccaggtgacc

SEQ ID NO: 164094 - DNA, 25 bp, Saccharomyces pastorianus
ttccgaagacgctaaacccacagag

SEQ ID NO: 164095 - DNA, 25 bp, Saccharomyces pastorianus
cactagctttgtacggtgcgggcgt

SEQ ID NO: 164096 - DNA, 25 bp, Saccharomyces pastorianus
aatttagtacacagcttcccggtag

SEQ ID NO: 164097 - DNA, 25 bp, Saccharomyces pastorianus
cgatgagtctcgtagcagccttgaa

SEQ ID NO: 164098 - DNA, 25 bp, Saccharomyces pastorianus
gcccgccgatgcttagaggtcataa

SEQ ID NO: 164099 - DNA, 25 bp, Saccharomyces pastorianus
tacaaaacgttactacccactgcaa

SEQ ID NO: 164100 - DNA, 25 bp, Saccharomyces pastorianus
gtgataccaccttggttaacgtcgt

SEQ ID NO: 164101 - DNA, 25 bp, Saccharomyces pastorianus
gaatcaagtcgatctcgttacgaat

SEQ ID NO: 164102 - DNA, 25 bp, Saccharomyces pastorianus
tttttcacactatttccaactcagc

SEQ ID NO: 164103 - DNA, 25 bp, Saccharomyces pastorianus
aggagttgcgtcgaatgtttgcccg

SEQ ID NO: 164104 - DNA, 25 bp, Saccharomyces pastorianus
agcctgtagcatcatcctctggaaa

SEQ ID NO: 164105 - DNA, 25 bp, Saccharomyces pastorianus
caagtattttactgcagcctgtagc

SEQ ID NO: 164106 - DNA, 25 bp, Saccharomyces pastorianus
gaattccatgactcaaagctgcata

SEQ ID NO: 164107 - DNA, 25 bp, Saccharomyces pastorianus
gaggaacttaatttcttgccactag

SEQ ID NO: 164108 - DNA, 25 bp, Saccharomyces pastorianus
gatcggaacgatagtgataccacct

SEQ ID NO: 164109 - DNA, 25 bp, Saccharomyces pastorianus
aacctgcaagtactggcctgttagc

SEQ ID NO: 164110 - DNA, 25 bp, Saccharomyces pastorianus
gctcatctgagcacgaaaacctaac

SEQ ID NO: 164111 - DNA, 25 bp, Saccharomyces pastorianus
agcttcctcgcttcttggtgtgaga

SEQ ID NO: 164112 - DNA, 25 bp, Saccharomyces pastorianus
agtccatgatcagctcatctgagca

SEQ ID NO: 164113 - DNA, 25 bp, Saccharomyces pastorianus
atgcagtccatgatcagctcatctg

SEQ ID NO: 164114 - DNA, 25 bp, Saccharomyces pastorianus
tgggtctggcacactgatgcaaaaa

SEQ ID NO: 164115 - DNA, 25 bp, Saccharomyces pastorianus
aaacctaacctgcaagtactggcct

SEQ ID NO: 164116 - DNA, 25 bp, Saccharomyces pastorianus
aagtactggcctgttagcttcctcg

SEQ ID NO: 164117 - DNA, 25 bp, Saccharomyces pastorianus
tcctcgcttcttggtgtgagaatgg

SEQ ID NO: 164118 - DNA, 25 bp, Saccharomyces pastorianus
gagaatgggtctggcacactgatgc

SEQ ID NO: 164119 - DNA, 25 bp, Saccharomyces pastorianus
aagatggtagtcttttatatgccgt

SEQ ID NO: 164120 - DNA, 25 bp, Saccharomyces pastorianus
caacaaccgcttttgaattcccaag

SEQ ID NO: 164121 - DNA, 25 bp, Saccharomyces pastorianus
aagaaatggctgctccttcatccga

SEQ ID NO: 164122 - DNA, 25 bp, Saccharomyces pastorianus
aagtgggatatctgggtccatctcc

SEQ ID NO: 164123 - DNA, 25 bp, Saccharomyces pastorianus
attcttgctgcttactatacggtgg

SEQ ID NO: 164124 - DNA, 25 bp, Saccharomyces pastorianus
attcccaaggtcagccaaatcgtat

SEQ ID NO: 164125 - DNA, 25 bp, Saccharomyces pastorianus
gtgatgatactctccgtgaagtcaa

SEQ ID NO: 164126 - DNA, 25 bp, Saccharomyces pastorianus
gccggcgatgtctttaaccttatgg

SEQ ID NO: 164127 - DNA, 25 bp, Saccharomyces pastorianus
ggctgtctttattgttcgtggtact

SEQ ID NO: 164128 - DNA, 25 bp, Saccharomyces pastorianus
tctcctgctggatcattgtgtttgt

SEQ ID NO: 164129 - DNA, 25 bp, Saccharomyces pastorianus
ggtgccgttatgcaacatcttttgt

SEQ ID NO: 164130 - DNA, 25 bp, Saccharomyces pastorianus
taccggaagtcgtctgatgggctgt

SEQ ID NO: 164131 - DNA, 25 bp, Saccharomyces pastorianus
tactcgtcgactcattccaatggca

SEQ ID NO: 164132 - DNA, 25 bp, Saccharomyces pastorianus
gaatcgcttcttcaagggcacgaaa

SEQ ID NO: 164133 - DNA, 25 bp, Saccharomyces pastorianus
tttcccgagatgcaaacgctatggt

SEQ ID NO: 164134 - DNA, 25 bp, Saccharomyces pastorianus
ttgaaagaattctcccgatccttcc

SEQ ID NO: 164135 - DNA, 25 bp, Saccharomyces pastorianus
gatccttccggtggagtctaatcta

SEQ ID NO: 164136 - DNA, 25 bp, Saccharomyces pastorianus
caaacactttttccaccagagcaaa

SEQ ID NO: 164137 - DNA, 25 bp, Saccharomyces pastorianus
ttctaacgactttgagttcctcgat

SEQ ID NO: 164138 - DNA, 25 bp, Saccharomyces pastorianus
aaagcttcacaatattctgcccgac

SEQ ID NO: 164139 - DNA, 25 bp, Saccharomyces pastorianus
gatctgtgctcattaacgttaccgt

SEQ ID NO: 164140 - DNA, 25 bp, Saccharomyces pastorianus
agccttcattacaacgacatttcga

SEQ ID NO: 164141 - DNA, 25 bp, Saccharomyces pastorianus
aaggcactgataccggaactggcat

SEQ ID NO: 164142 - DNA, 25 bp, Saccharomyces pastorianus
gttctattacgcacagatccggtta

SEQ ID NO: 164143 - DNA, 25 bp, Saccharomyces pastorianus
gtctctctgcatgatatcacgcttt

SEQ ID NO: 164144 - DNA, 25 bp, Saccharomyces pastorianus
aagtcttgcatgaaactcctaggca

SEQ ID NO: 164145 - DNA, 25 bp, Saccharomyces pastorianus
ataggcgatatttactttcaagtct

SEQ ID NO: 164146 - DNA, 25 bp, Saccharomyces pastorianus
gacaacgtatatgtttcctcgaaaa

SEQ ID NO: 164147 - DNA, 25 bp, Saccharomyces pastorianus
gcaagatattcgtgtctctctgcat

SEQ ID NO: 164148 - DNA, 25 bp, Saccharomyces pastorianus
gactattaccagaagttgcacccaa

SEQ ID NO: 164149 - DNA, 25 bp, Saccharomyces pastorianus
gagacatgggtactttattcgacgt

SEQ ID NO: 164150 - DNA, 25 bp, Saccharomyces pastorianus
gatttacgccggtatcgttgaaaat

SEQ ID NO: 164151 - DNA, 25 bp, Saccharomyces pastorianus
tttacagtaacttttcaggacgaga

SEQ ID NO: 164152 - DNA, 25 bp, Saccharomyces pastorianus
gataataattcgagtacctcctccc

SEQ ID NO: 164153 - DNA, 25 bp, Saccharomyces pastorianus
atatcgttactaactgtcctaccca

SEQ ID NO: 164154 - DNA, 25 bp, Saccharomyces pastorianus
attttcatcgctcttccgaggtgta

SEQ ID NO: 164155 - DNA, 25 bp, Saccharomyces pastorianus
aaggccccgaaaacatatctcacat

SEQ ID NO: 164156 - DNA, 25 bp, Saccharomyces pastorianus
tttccgaattcttatcaggctctct

SEQ ID NO: 164157 - DNA, 25 bp, Saccharomyces pastorianus
aatagctgccactgaggcgtcattt

SEQ ID NO: 164158 - DNA, 25 bp, Saccharomyces pastorianus
gatgatggccgcttaactgacatta

SEQ ID NO: 164159 - DNA, 25 bp, Saccharomyces pastorianus
gcggtttgtcttattggatccctaa

SEQ ID NO: 164160 - DNA, 25 bp, Saccharomyces pastorianus
ttggtttgaactttggctcccattt

SEQ ID NO: 164161 - DNA, 25 bp, Saccharomyces pastorianus
gtacgtccccgaagatactacaaca

SEQ ID NO: 164162 - DNA, 25 bp, Saccharomyces pastorianus
gtctaatccagaactcacagcctat

SEQ ID NO: 164163 - DNA, 25 bp, Saccharomyces pastorianus
atgtttacatccctcataccatttg

SEQ ID NO: 164164 - DNA, 25 bp, Saccharomyces pastorianus
atcacgtcacccgataatttttgag

SEQ ID NO: 164165 - DNA, 25 bp, Saccharomyces pastorianus
gtttatgtttgggttcagcgaggac

SEQ ID NO: 164166 - DNA, 25 bp, Saccharomyces pastorianus
aaggcgcctatacatggcccagttt

SEQ ID NO: 164167 - DNA, 25 bp, Saccharomyces pastorianus
aatatcctggatttcttcatcaata

SEQ ID NO: 164168 - DNA, 25 bp, Saccharomyces pastorianus
gttatcgccgaaccaaagattactg

SEQ ID NO: 164169 - DNA, 25 bp, Saccharomyces pastorianus
agggtgcccttctctttgtgtcaaa

SEQ ID NO: 164170 - DNA, 25 bp, Saccharomyces pastorianus
gtgtcaaactgtataaggcgcctat

SEQ ID NO: 164171 - DNA, 25 bp, Saccharomyces pastorianus
taattcttttctttcggcacgttca

SEQ ID NO: 164172 - DNA, 25 bp, Saccharomyces pastorianus
tagcgcttcttcttttgcaagcaag

SEQ ID NO: 164173 - DNA, 25 bp, Saccharomyces pastorianus
ggttttcaacactcttccttgaatc

SEQ ID NO: 164174 - DNA, 25 bp, Saccharomyces pastorianus
gacgagcatcttttcttagccatat

SEQ ID NO: 164175 - DNA, 25 bp, Saccharomyces pastorianus
gagcttgtctttctcatgcttacta

SEQ ID NO: 164176 - DNA, 25 bp, Saccharomyces pastorianus
gaaatacccacttttactggctctt

SEQ ID NO: 164177 - DNA, 25 bp, Saccharomyces pastorianus
tatttcccaatttctttactcttat

SEQ ID NO: 164178 - DNA, 25 bp, Saccharomyces pastorianus
aaacacttttccctcgagcttgtct

SEQ ID NO: 164179 - DNA, 25 bp, Saccharomyces pastorianus
ctagtatttgctttatttgggttga

SEQ ID NO: 164180 - DNA, 25 bp, Saccharomyces pastorianus
gcttactaatctccttgttcatgtt

SEQ ID NO: 164181 - DNA, 25 bp, Saccharomyces pastorianus
cgagtatcttccgaaatacccactt

SEQ ID NO: 164182 - DNA, 25 bp, Saccharomyces pastorianus
actggctctttaatagtagtactag

SEQ ID NO: 164183 - DNA, 25 bp, Saccharomyces pastorianus
tttctcatgcttactaatctccttg

SEQ ID NO: 164184 - DNA, 25 bp, Saccharomyces pastorianus
atataccatgtccataattttactg

SEQ ID NO: 164185 - DNA, 25 bp, Saccharomyces pastorianus
atctccttgttcatgttatatacca

SEQ ID NO: 164186 - DNA, 25 bp, Saccharomyces pastorianus
tacgaacgtggcagatttctttctt

SEQ ID NO: 164187 - DNA, 25 bp, Saccharomyces pastorianus
ttggcacaagaatctacagcactat

SEQ ID NO: 164188 - DNA, 25 bp, Saccharomyces pastorianus
tactctcaggagtcatttttcacag

SEQ ID NO: 164189 - DNA, 25 bp, Saccharomyces pastorianus
ggcgcgtattgcacaaattccagga

SEQ ID NO: 164190 - DNA, 25 bp, Saccharomyces pastorianus
gaactgctttcaatggatcaccaga

SEQ ID NO: 164191 - DNA, 25 bp, Saccharomyces pastorianus
acagcactatattttgtgggcatgc

SEQ ID NO: 164192 - DNA, 25 bp, Saccharomyces pastorianus
attctttgccccagtcaagcataat

SEQ ID NO: 164193 - DNA, 25 bp, Saccharomyces pastorianus
cagctaatttggttttggcgtacat

SEQ ID NO: 164194 - DNA, 25 bp, Saccharomyces pastorianus
ttttgactctttgatggcgcgtatt

SEQ ID NO: 164195 - DNA, 25 bp, Saccharomyces pastorianus
gggatataactgtccttcgtttacg

SEQ ID NO: 164196 - DNA, 25 bp, Saccharomyces pastorianus
attttcgcattattctttgccccag

SEQ ID NO: 164197 - DNA, 25 bp, Saccharomyces pastorianus
ttaacagcatcaaacctccacgagg

SEQ ID NO: 164198 - DNA, 25 bp, Saccharomyces pastorianus
atattcaaggcgtgagtctctggct

SEQ ID NO: 164199 - DNA, 25 bp, Saccharomyces pastorianus
gaaggtactacttgttgaactctca

SEQ ID NO: 164200 - DNA, 25 bp, Saccharomyces pastorianus
tccacgaggtaacgcatcttctaca

SEQ ID NO: 164201 - DNA, 25 bp, Saccharomyces pastorianus
cagtccttattgaacttgccgttaa

SEQ ID NO: 164202 - DNA, 25 bp, Saccharomyces pastorianus
cgagtcaccgcaattatgttccaat

SEQ ID NO: 164203 - DNA, 25 bp, Saccharomyces pastorianus
aacaacgaatactgctctacctggt

SEQ ID NO: 164204 - DNA, 25 bp, Saccharomyces pastorianus
gtacataatgccttcgttcaattca

SEQ ID NO: 164205 - DNA, 25 bp, Saccharomyces pastorianus
tctatcacatatatcgtccatccta

SEQ ID NO: 164206 - DNA, 25 bp, Saccharomyces pastorianus
agcatgcttgcacatttcaacgaat

SEQ ID NO: 164207 - DNA, 25 bp, Saccharomyces pastorianus
atctacttcaggatcgagtcaccgc

SEQ ID NO: 164208 - DNA, 25 bp, Saccharomyces pastorianus
gtgagctctatgatgtgctgagaat

SEQ ID NO: 164209 - DNA, 25 bp, Saccharomyces pastorianus
ttccagcgaggtgcaagagtctaat

SEQ ID NO: 164210 - DNA, 25 bp, Saccharomyces pastorianus
cgaactgaaacggaacttgtgggat

SEQ ID NO: 164211 - DNA, 25 bp, Saccharomyces pastorianus
ttatccgagggaatcaaagagctaa

SEQ ID NO: 164212 - DNA, 25 bp, Saccharomyces pastorianus
gcaagatacagtgacgacgttcgaa

SEQ ID NO: 164213 - DNA, 25 bp, Saccharomyces pastorianus
ttagacgacttaaccgcacaacaga

SEQ ID NO: 164214 - DNA, 25 bp, Saccharomyces pastorianus
gaagctctgagtttccaaatagtgg

SEQ ID NO: 164215 - DNA, 25 bp, Saccharomyces pastorianus
gttcgaaaccataattagtgagctc

SEQ ID NO: 164216 - DNA, 25 bp, Saccharomyces pastorianus
taatatacctgatgagcaagagctc

SEQ ID NO: 164217 - DNA, 25 bp, Saccharomyces pastorianus
taatgactataagatctccaagcag

SEQ ID NO: 164218 - DNA, 25 bp, Saccharomyces pastorianus
gatctccaagcagtcaatctttaaa

SEQ ID NO: 164219 - DNA, 25 bp, Saccharomyces pastorianus
actgcttttagtgttggtgccgttc

SEQ ID NO: 164220 - DNA, 25 bp, Saccharomyces pastorianus
gagccttgctgcgatagaatcctgg

SEQ ID NO: 164221 - DNA, 25 bp, Saccharomyces pastorianus
actcggatacgcaaaaacctctctg

SEQ ID NO: 164222 - DNA, 25 bp, Saccharomyces pastorianus
gtgccgttcttgttcatggaactca

SEQ ID NO: 164223 - DNA, 25 bp, Saccharomyces pastorianus
gtgctctatacaaccatggaaccct

SEQ ID NO: 164224 - DNA, 25 bp, Saccharomyces pastorianus
gaaccctgttccttcaggctaagtg

SEQ ID NO: 164225 - DNA, 25 bp, Saccharomyces pastorianus
aaggtgccattggtactgtcttcgt

SEQ ID NO: 164226 - DNA, 25 bp, Saccharomyces pastorianus
aagtgtggcccgacaaagactgctt

SEQ ID NO: 164227 - DNA, 25 bp, Saccharomyces pastorianus
atgccttccggtacgagtcattgga

SEQ ID NO: 164228 - DNA, 25 bp, Saccharomyces pastorianus
gtccctatgggaacagtgctctata

SEQ ID NO: 164229 - DNA, 25 bp, Saccharomyces pastorianus
taaagtactcgcagttacacccgaa

SEQ ID NO: 164230 - DNA, 25 bp, Saccharomyces pastorianus
ccgccagtcacatctaaaccaatag

SEQ ID NO: 164231 - DNA, 25 bp, Saccharomyces pastorianus
tgataagcccagcagtattccagtg

SEQ ID NO: 164232 - DNA, 25 bp, Saccharomyces pastorianus
gattgagccttattttttcacttat

SEQ ID NO: 164233 - DNA, 25 bp, Saccharomyces pastorianus
gataccatcattcgtgacggtgatc

SEQ ID NO: 164234 - DNA, 25 bp, Saccharomyces pastorianus
tattagccaagactccattaggtgc

SEQ ID NO: 164235 - DNA, 25 bp, Saccharomyces pastorianus
gagttattcaaaccgatgggcacaa

SEQ ID NO: 164236 - DNA, 25 bp, Saccharomyces pastorianus
aagtacatcgacatgaaccgccagt

SEQ ID NO: 164237 - DNA, 25 bp, Saccharomyces pastorianus
gctaggttattcagtacatccatgt

SEQ ID NO: 164238 - DNA, 25 bp, Saccharomyces pastorianus
tattccagtgcacccaacgggcaga

SEQ ID NO: 164239 - DNA, 25 bp, Saccharomyces pastorianus
gaacctgcaaaccttgataccatca

SEQ ID NO: 164240 - DNA, 25 bp, Saccharomyces pastorianus
gagagcccagctattattccaaaac

SEQ ID NO: 164241 - DNA, 25 bp, Saccharomyces pastorianus
ggccctgagaaaaatccaagctttg

SEQ ID NO: 164242 - DNA, 25 bp, Saccharomyces pastorianus
caagaagccatcgaaacctgcaaga

SEQ ID NO: 164243 - DNA, 25 bp, Saccharomyces pastorianus
aagtctacaagattcaccagcagtt

SEQ ID NO: 164244 - DNA, 25 bp, Saccharomyces pastorianus
gacggaacctgtcaagcaaagtttt

SEQ ID NO: 164245 - DNA, 25 bp, Saccharomyces pastorianus
aagaattcctaacattccacccaat

SEQ ID NO: 164246 - DNA, 25 bp, Saccharomyces pastorianus
gaaagtggcacctattcccaaacaa

SEQ ID NO: 164247 - DNA, 25 bp, Saccharomyces pastorianus
tgcgaacaacaaccctttgcaacag

SEQ ID NO: 164248 - DNA, 25 bp, Saccharomyces pastorianus
tgcaacctcccaattcaagtgcgaa

SEQ ID NO: 164249 - DNA, 25 bp, Saccharomyces pastorianus
taaccaaatcttttctccagaggag

SEQ ID NO: 164250 - DNA, 25 bp, Saccharomyces pastorianus
aggtcactgctttggctcaacaaaa

SEQ ID NO: 164251 - DNA, 25 bp, Saccharomyces pastorianus
tctccagaggagcaacgcagcttat

SEQ ID NO: 164252 - DNA, 25 bp, Saccharomyces pastorianus
gaccttttggatctgtactacgacg

SEQ ID NO: 164253 - DNA, 25 bp, Saccharomyces pastorianus
aagtgctaagttccattccagatcc

SEQ ID NO: 164254 - DNA, 25 bp, Saccharomyces pastorianus
gaaagcgtacggtgtatccaaggag

SEQ ID NO: 164255 - DNA, 25 bp, Saccharomyces pastorianus
gaatcgaaatcatccgctgctgaaa

SEQ ID NO: 164256 - DNA, 25 bp, Saccharomyces pastorianus
cagatcccgtttacaacgtcgcaaa

SEQ ID NO: 164257 - DNA, 25 bp, Saccharomyces pastorianus
gatagcgttttggataacttgtcaa

SEQ ID NO: 164258 - DNA, 25 bp, Saccharomyces pastorianus
gaccacaattggcagcaatgtcgaa

SEQ ID NO: 164259 - DNA, 25 bp, Saccharomyces pastorianus
gtttatgtcactaaggccatttggt

SEQ ID NO: 164260 - DNA, 25 bp, Saccharomyces pastorianus
atcaagcttgtgtgtctcgtggtat

SEQ ID NO: 164261 - DNA, 25 bp, Saccharomyces pastorianus
ggcattctcgccactagctgaaaaa

SEQ ID NO: 164262 - DNA, 25 bp, Saccharomyces pastorianus
ttgagttccacgttcacgtttggag

SEQ ID NO: 164263 - DNA, 25 bp, Saccharomyces pastorianus
aagtgttacgaagcccgtagctcca

SEQ ID NO: 164264 - DNA, 25 bp, Saccharomyces pastorianus
gtgtcattggcctttgagagcgcaa

SEQ ID NO: 164265 - DNA, 25 bp, Saccharomyces pastorianus
aatccaagtttctactaagcttttg

SEQ ID NO: 164266 - DNA, 25 bp, Saccharomyces pastorianus
ttccactattccctcgtgtcattgg

SEQ ID NO: 164267 - DNA, 25 bp, Saccharomyces pastorianus
tatgctaatgggacgaaacttttgg

SEQ ID NO: 164268 - DNA, 25 bp, Saccharomyces pastorianus
gcacgccttgaaacattatgctaat

SEQ ID NO: 164269 - DNA, 25 bp, Saccharomyces pastorianus
gagcgcaaggagtacagcccaacta

SEQ ID NO: 164270 - DNA, 25 bp, Saccharomyces pastorianus
agcccaactatcctttatctttgag

SEQ ID NO: 164271 - DNA, 25 bp, Saccharomyces pastorianus
atggtcaaagtgaagcacgccttga

SEQ ID NO: 164272 - DNA, 25 bp, Saccharomyces pastorianus
ggccctagattaatagcttccacta

SEQ ID NO: 164273 - DNA, 25 bp, Saccharomyces pastorianus
ctgccaagcccaaggagacgcttat

SEQ ID NO: 164274 - DNA, 25 bp, Saccharomyces pastorianus
gatgatctttgtgccgtccctaatt

SEQ ID NO: 164275 - DNA, 25 bp, Saccharomyces pastorianus
aactctcgaagatcgacgcattatt

SEQ ID NO: 164276 - DNA, 25 bp, Saccharomyces pastorianus
gtgccgtccctaatttactcaaaag

SEQ ID NO: 164277 - DNA, 25 bp, Saccharomyces pastorianus
gcttcctgttgtgttgtctaaaatg

SEQ ID NO: 164278 - DNA, 25 bp, Saccharomyces pastorianus
gttgaggcacaatatgtcaacattt

SEQ ID NO: 164279 - DNA, 25 bp, Saccharomyces pastorianus
gacactgcaagagttgaggcacaat

SEQ ID NO: 164280 - DNA, 25 bp, Saccharomyces pastorianus
cgacgcattattgtgaggctttaaa

SEQ ID NO: 164281 - DNA, 25 bp, Saccharomyces pastorianus
ggaagaaccgccaaaatctaaagag

SEQ ID NO: 164282 - DNA, 25 bp, Saccharomyces pastorianus
gagtttttcgatgatctttgtgccg

SEQ ID NO: 164283 - DNA, 25 bp, Saccharomyces pastorianus
ataaatatttatgacacctgtaagg

SEQ ID NO: 164284 - DNA, 25 bp, Saccharomyces pastorianus
agacgttttccaaactctcgaagat

SEQ ID NO: 164285 - DNA, 25 bp, Saccharomyces pastorianus
aagatcggacatcccatgtctttcg

SEQ ID NO: 164286 - DNA, 25 bp, Saccharomyces pastorianus
gagttgccgaagttcatcttgtcag

SEQ ID NO: 164287 - DNA, 25 bp, Saccharomyces pastorianus
tagaattaagcgcacccattggtaa

SEQ ID NO: 164288 - DNA, 25 bp, Saccharomyces pastorianus
ataccaacgtggtgttacaggcaat

SEQ ID NO: 164289 - DNA, 25 bp, Saccharomyces pastorianus
gaattgttttttcgacgtcattgtc

SEQ ID NO: 164290 - DNA, 25 bp, Saccharomyces pastorianus
catcttgtcagattctcccttagaa

SEQ ID NO: 164291 - DNA, 25 bp, Saccharomyces pastorianus
gcattacgtcgtcttggataccaac

SEQ ID NO: 164292 - DNA, 25 bp, Saccharomyces pastorianus
accaagtgtccgcaaattgtcgtcc

SEQ ID NO: 164293 - DNA, 25 bp, Saccharomyces pastorianus
gcagatggtttaagcgtcactcaga

SEQ ID NO: 164294 - DNA, 25 bp, Saccharomyces pastorianus
ggaggcgctaccaagatcgtaacag

SEQ ID NO: 164295 - DNA, 25 bp, Saccharomyces pastorianus
gtcgtccccgatgctcaaaatgagt

SEQ ID NO: 164296 - DNA, 25 bp, Saccharomyces pastorianus
attgtgatgatatagagatcttctc

SEQ ID NO: 164297 - DNA, 25 bp, Saccharomyces pastorianus
ttctcagaacccgttaggcaactac

SEQ ID NO: 164298 - DNA, 25 bp, Saccharomyces pastorianus
gatcttctcagaacccgttaggcaa

SEQ ID NO: 164299 - DNA, 25 bp, Saccharomyces pastorianus
tagagatcttctcagaacccgttag

SEQ ID NO: 164300 - DNA, 25 bp, Saccharomyces pastorianus
gaacccgttaggcaactacaagata

SEQ ID NO: 164301 - DNA, 25 bp, Saccharomyces pastorianus
acccgttaggcaactacaagataat

SEQ ID NO: 164302 - DNA, 25 bp, Saccharomyces pastorianus
atcttctcagaacccgttaggcaac

SEQ ID NO: 164303 - DNA, 25 bp, Saccharomyces pastorianus
tcagaacccgttaggcaactacaag

SEQ ID NO: 164304 - DNA, 25 bp, Saccharomyces pastorianus
ggcaactacaagataattctcggga

SEQ ID NO: 164305 - DNA, 25 bp, Saccharomyces pastorianus
gagatcttctcagaacccgttaggc

SEQ ID NO: 164306 - DNA, 25 bp, Saccharomyces pastorianus
actacaagataattctcgggaaaga

SEQ ID NO: 164307 - DNA, 25 bp, Saccharomyces pastorianus
aatactgcctgcaaaaaccgcacaa

SEQ ID NO: 164308 - DNA, 25 bp, Saccharomyces pastorianus
tgctgcccctacagacagtactgaa

SEQ ID NO: 164309 - DNA, 25 bp, Saccharomyces pastorianus
gacgtcatttgcgaacaagctctca

SEQ ID NO: 164310 - DNA, 25 bp, Saccharomyces pastorianus
gttgcaggagactcgaattctttga

SEQ ID NO: 164311 - DNA, 25 bp, Saccharomyces pastorianus
aagctctcagagaagaaccacggta

SEQ ID NO: 164312 - DNA, 25 bp, Saccharomyces pastorianus
atgatgttcactttgccgaggtgcc

SEQ ID NO: 164313 - DNA, 25 bp, Saccharomyces pastorianus
aacactcctgcatgtatccgtaatt

SEQ ID NO: 164314 - DNA, 25 bp, Saccharomyces pastorianus
cgaggtgccgcattggtttgaagtt

SEQ ID NO: 164315 - DNA, 25 bp, Saccharomyces pastorianus
tgagactattcagcgcataactgct

SEQ ID NO: 164316 - DNA, 25 bp, Saccharomyces pastorianus
gaaccacggtacattactcgagtga

SEQ ID NO: 164317 - DNA, 25 bp, Saccharomyces pastorianus
gttgacattgacgttagcgatgact

SEQ ID NO: 164318 - DNA, 25 bp, Saccharomyces pastorianus
tagaagtattcggtcagacgtagct

SEQ ID NO: 164319 - DNA, 25 bp, Saccharomyces pastorianus
tgcgagaggccctgggttcaattcc

SEQ ID NO: 164320 - DNA, 25 bp, Saccharomyces pastorianus
gcgagaggccctgggttcaattccc

SEQ ID NO: 164321 - DNA, 25 bp, Saccharomyces pastorianus
aagcatgcgagaggccctgggttca

SEQ ID NO: 164322 - DNA, 25 bp, Saccharomyces pastorianus
gagaggccctgggttcaattcccag

SEQ ID NO: 164323 - DNA, 25 bp, Saccharomyces pastorianus
gaggccctgggttcaattcccagct

SEQ ID NO: 164324 - DNA, 25 bp, Saccharomyces pastorianus
atgcgagaggccctgggttcaattc

SEQ ID NO: 164325 - DNA, 25 bp, Saccharomyces pastorianus
aatagaagtattcggtcagacgtag

SEQ ID NO: 164326 - DNA, 25 bp, Saccharomyces pastorianus
cagctcgcccccttttttactattg

SEQ ID NO: 164327 - DNA, 25 bp, Saccharomyces pastorianus
ggccctgggttcaattcccagctcg

SEQ ID NO: 164328 - DNA, 25 bp, Saccharomyces pastorianus
atagaagtattcggtcagacgtagc

SEQ ID NO: 164329 - DNA, 25 bp, Saccharomyces pastorianus
gagccagttagattttgatttccct

SEQ ID NO: 164330 - DNA, 25 bp, Saccharomyces pastorianus
ggctgacacttttataacccatacc

SEQ ID NO: 164331 - DNA, 25 bp, Saccharomyces pastorianus
agccaattttaaactgcctccaggt

SEQ ID NO: 164332 - DNA, 25 bp, Saccharomyces pastorianus
tcgtttctttctactctcttgggaa

SEQ ID NO: 164333 - DNA, 25 bp, Saccharomyces pastorianus
gcctccaggtcttggtcatacttca

SEQ ID NO: 164334 - DNA, 25 bp, Saccharomyces pastorianus
ctatgatatcttgtgtttggctgac

SEQ ID NO: 164335 - DNA, 25 bp, Saccharomyces pastorianus
cacagcctattctaatcccgataaa

SEQ ID NO: 164336 - DNA, 25 bp, Saccharomyces pastorianus
gacagccccagtcgttctgaaaaga

SEQ ID NO: 164337 - DNA, 25 bp, Saccharomyces pastorianus
tgatgctttgcatgagcaccctgca

SEQ ID NO: 164338 - DNA, 25 bp, Saccharomyces pastorianus
aaatacttcatctcttcgtttcttt

SEQ ID NO: 164339 - DNA, 25 bp, Saccharomyces pastorianus
aacatcgaagaactcgtcgctactc

SEQ ID NO: 164340 - DNA, 25 bp, Saccharomyces pastorianus
tacgcacaagtgacgcatcttttcc

SEQ ID NO: 164341 - DNA, 25 bp, Saccharomyces pastorianus
ttagctacttcttctggtttacctt

SEQ ID NO: 164342 - DNA, 25 bp, Saccharomyces pastorianus
acggatgcacaggaacttggttctt

SEQ ID NO: 164343 - DNA, 25 bp, Saccharomyces pastorianus
tcaagaaattcttgcccggactctt

SEQ ID NO: 164344 - DNA, 25 bp, Saccharomyces pastorianus
tgaaatgcctgcacatcgccaaatc

SEQ ID NO: 164345 - DNA, 25 bp, Saccharomyces pastorianus
atagaatccaatgctcctctaatcc

SEQ ID NO: 164346 - DNA, 25 bp, Saccharomyces pastorianus
tttgccgaccaacctgatatttaca

SEQ ID NO: 164347 - DNA, 25 bp, Saccharomyces pastorianus
tcaatacttttctaccccaaggcta

SEQ ID NO: 164348 - DNA, 25 bp, Saccharomyces pastorianus
acaatctttgcctcttttagctact

SEQ ID NO: 164349 - DNA, 25 bp, Saccharomyces pastorianus
aatggtgccttcgagtgtgtatcaa

SEQ ID NO: 164350 - DNA, 25 bp, Saccharomyces pastorianus
aacagccctccaatgtgccaatggt

SEQ ID NO: 164351 - DNA, 25 bp, Saccharomyces pastorianus
ttcaaggtattgtcgtttcgccaaa

SEQ ID NO: 164352 - DNA, 25 bp, Saccharomyces pastorianus
gttccaggcaaaaccataggcgcat

SEQ ID NO: 164353 - DNA, 25 bp, Saccharomyces pastorianus
gccctgatgatctagaaattgtcga

SEQ ID NO: 164354 - DNA, 25 bp, Saccharomyces pastorianus
acaacacggcgcttcggtggtcgag

SEQ ID NO: 164355 - DNA, 25 bp, Saccharomyces pastorianus
ataagatgcacgaacccaaaaatgg

SEQ ID NO: 164356 - DNA, 25 bp, Saccharomyces pastorianus
aaaggtgttgtttgccctgatgatc

SEQ ID NO: 164357 - DNA, 25 bp, Saccharomyces pastorianus
gtttcctgttaaactggctatgtgg

SEQ ID NO: 164358 - DNA, 25 bp, Saccharomyces pastorianus
gaaattgtcgaacaacacggcgctt

SEQ ID NO: 164359 - DNA, 25 bp, Saccharomyces pastorianus
gtgggattttgatcattgcgatcca

SEQ ID NO: 164360 - DNA, 25 bp, Saccharomyces pastorianus
ggtcgagtgttcttgggcacgttta

SEQ ID NO: 164361 - DNA, 25 bp, Saccharomyces pastorianus
gagaggcgctaatggacacagttcc

SEQ ID NO: 164362 - DNA, 25 bp, Saccharomyces pastorianus
gaaatctatcagcagtgcactgact

SEQ ID NO: 164363 - DNA, 25 bp, Saccharomyces pastorianus
tgcactgactgcgactctgtaaaga

SEQ ID NO: 164364 - DNA, 25 bp, Saccharomyces pastorianus
tatcagcagtgcactgactgcgact

SEQ ID NO: 164365 - DNA, 25 bp, Saccharomyces pastorianus
gctgaagaggaatggttgcaaaaat

SEQ ID NO: 164366 - DNA, 25 bp, Saccharomyces pastorianus
gcactgactgcgactctgtaaagag

SEQ ID NO: 164367 - DNA, 25 bp, Saccharomyces pastorianus
ggattgggccagtgaattgttatca

SEQ ID NO: 164368 - DNA, 25 bp, Saccharomyces pastorianus
gaattgttatcacacttctcgtggg

SEQ ID NO: 164369 - DNA, 25 bp, Saccharomyces pastorianus
ctgcgactctgtaaagagggctgaa

SEQ ID NO: 164370 - DNA, 25 bp, Saccharomyces pastorianus
tgactgcgactctgtaaagagggct

SEQ ID NO: 164371 - DNA, 25 bp, Saccharomyces pastorianus
gggccagtgaattgttatcacactt

SEQ ID NO: 164372 - DNA, 25 bp, Saccharomyces pastorianus
agtgcactgactgcgactctgtaaa

SEQ ID NO: 164373 - DNA, 25 bp, Saccharomyces pastorianus
ttccttggaccaaattccagctggt

SEQ ID NO: 164374 - DNA, 25 bp, Saccharomyces pastorianus
ctgctgttgagcatatgttgactat

SEQ ID NO: 164375 - DNA, 25 bp, Saccharomyces pastorianus
cttctagactgcttccagaattaga

SEQ ID NO: 164376 - DNA, 25 bp, Saccharomyces pastorianus
attcaggtctttccttggaccaaat

SEQ ID NO: 164377 - DNA, 25 bp, Saccharomyces pastorianus
ctttgtactctgaagtggacttttc

SEQ ID NO: 164378 - DNA, 25 bp, Saccharomyces pastorianus
tactcttctagactgcttccagaat

SEQ ID NO: 164379 - DNA, 25 bp, Saccharomyces pastorianus
ggaccaaattccagctggtattatg

SEQ ID NO: 164380 - DNA, 25 bp, Saccharomyces pastorianus
ggtattatggacattgctgggcaat

SEQ ID NO: 164381 - DNA, 25 bp, Saccharomyces pastorianus
aagtggacttttctgctgttgagca

SEQ ID NO: 164382 - DNA, 25 bp, Saccharomyces pastorianus
tgctattgcttacgctcaaacccaa

SEQ ID NO: 164383 - DNA, 25 bp, Saccharomyces pastorianus
cttacgctcaaacccaagcacaaat

SEQ ID NO: 164384 - DNA, 25 bp, Saccharomyces pastorianus
ctacgtcccagatcaagtttgcaac

SEQ ID NO: 164385 - DNA, 25 bp, Saccharomyces pastorianus
aataccatattcttcctcagaggaa

SEQ ID NO: 164386 - DNA, 25 bp, Saccharomyces pastorianus
aaggcacagtatgtccttcgacaaa

SEQ ID NO: 164387 - DNA, 25 bp, Saccharomyces pastorianus
gatatttcttcacatatttccgtag

SEQ ID NO: 164388 - DNA, 25 bp, Saccharomyces pastorianus
aaatgtatcgcagtccagtcacggt

SEQ ID NO: 164389 - DNA, 25 bp, Saccharomyces pastorianus
atttccgtagattcgtacgccgaag

SEQ ID NO: 164390 - DNA, 25 bp, Saccharomyces pastorianus
tagagatggaagagccgcccttggc

SEQ ID NO: 164391 - DNA, 25 bp, Saccharomyces pastorianus
ggtctcgcccagcattcaagaagga

SEQ ID NO: 164392 - DNA, 25 bp, Saccharomyces pastorianus
gaaaattcctttgatccatctgata

SEQ ID NO: 164393 - DNA, 25 bp, Saccharomyces pastorianus
gtcacggtgaccaaatttccagctt

SEQ ID NO: 164394 - DNA, 25 bp, Saccharomyces pastorianus
gattaaactcagtagctcgcctacg

SEQ ID NO: 164395 - DNA, 25 bp, Saccharomyces pastorianus
gtttccaaccatctgttgcctttga

SEQ ID NO: 164396 - DNA, 25 bp, Saccharomyces pastorianus
tttccaaccatctgttgcctttgac

SEQ ID NO: 164397 - DNA, 25 bp, Saccharomyces pastorianus
ttccaaccatctgttgcctttgaca

SEQ ID NO: 164398 - DNA, 25 bp, Saccharomyces pastorianus
ggcagtttccaaccatctgttgcct

SEQ ID NO: 164399 - DNA, 25 bp, Saccharomyces pastorianus
gcagtttccaaccatctgttgcctt

SEQ ID NO: 164400 - DNA, 25 bp, Saccharomyces pastorianus
aaaggcagtttccaaccatctgttg

SEQ ID NO: 164401 - DNA, 25 bp, Saccharomyces pastorianus
aaggcagtttccaaccatctgttgc

SEQ ID NO: 164402 - DNA, 25 bp, Saccharomyces pastorianus
agtttccaaccatctgttgcctttg

SEQ ID NO: 164403 - DNA, 25 bp, Saccharomyces pastorianus
caaccatctgttgcctttgacacag

SEQ ID NO: 164404 - DNA, 25 bp, Saccharomyces pastorianus
gaaaggcagtttccaaccatctgtt

SEQ ID NO: 164405 - DNA, 25 bp, Saccharomyces pastorianus
aggcagtttccaaccatctgttgcc

SEQ ID NO: 164406 - DNA, 25 bp, Saccharomyces pastorianus
tttctgtggcgggtatccctcaatt

SEQ ID NO: 164407 - DNA, 25 bp, Saccharomyces pastorianus
tacgctatagcaccagtgccaaagc

SEQ ID NO: 164408 - DNA, 25 bp, Saccharomyces pastorianus
gtcagtggccctagttcatcacggt

SEQ ID NO: 164409 - DNA, 25 bp, Saccharomyces pastorianus
tgcgggtaacaataagtaactcaac

SEQ ID NO: 164410 - DNA, 25 bp, Saccharomyces pastorianus
aatggcgctgtcagtggccctagtt

SEQ ID NO: 164411 - DNA, 25 bp, Saccharomyces pastorianus
agttcatcacggtccgtagcacggg

SEQ ID NO: 164412 - DNA, 25 bp, Saccharomyces pastorianus
gtttccctgcggtcctacgctatag

SEQ ID NO: 164413 - DNA, 25 bp, Saccharomyces pastorianus
gtagcacgggtcttactgtctgctc

SEQ ID NO: 164414 - DNA, 25 bp, Saccharomyces pastorianus
ttactgtctgctcttcccgcgtctt

SEQ ID NO: 164415 - DNA, 25 bp, Saccharomyces pastorianus
gtatccctcaattgcgggtaacaat

SEQ ID NO: 164416 - DNA, 25 bp, Saccharomyces pastorianus
ttcagagttaatggcgctgtcagtg

SEQ ID NO: 164417 - DNA, 25 bp, Saccharomyces pastorianus
gtccggattgcgaggcacttatcaa

SEQ ID NO: 164418 - DNA, 25 bp, Saccharomyces pastorianus
ttcgtgtacaaagtgcttccagact

SEQ ID NO: 164419 - DNA, 25 bp, Saccharomyces pastorianus
ccagacttttccttggagcaggtac

SEQ ID NO: 164420 - DNA, 25 bp, Saccharomyces pastorianus
gacctaatatcgtcctgtatggtga

SEQ ID NO: 164421 - DNA, 25 bp, Saccharomyces pastorianus
gagttaccattgtgtccggattgcg

SEQ ID NO: 164422 - DNA, 25 bp, Saccharomyces pastorianus
ggtcacctttcttgaatcccaaata

SEQ ID NO: 164423 - DNA, 25 bp, Saccharomyces pastorianus
aaattcacgatcgtggcggcctgat

SEQ ID NO: 164424 - DNA, 25 bp, Saccharomyces pastorianus
ggtgaaaaccatccatcctgtgaaa

SEQ ID NO: 164425 - DNA, 25 bp, Saccharomyces pastorianus
aagacatccattggcgaatcctcct

SEQ ID NO: 164426 - DNA, 25 bp, Saccharomyces pastorianus
aatcctcctggcacggcattataga

SEQ ID NO: 164427 - DNA, 25 bp, Saccharomyces pastorianus
agcaggtactggtctcgttgtctaa

SEQ ID NO: 164428 - DNA, 25 bp, Saccharomyces pastorianus
gcaaggccggtgacaataaacaatt

SEQ ID NO: 164429 - DNA, 25 bp, Saccharomyces pastorianus
tactgcgggcccacatattgcaagg

SEQ ID NO: 164430 - DNA, 25 bp, Saccharomyces pastorianus
ggctgatttgcatacaatttcggta

SEQ ID NO: 164431 - DNA, 25 bp, Saccharomyces pastorianus
ggatgttccaaatactgcgggccca

SEQ ID NO: 164432 - DNA, 25 bp, Saccharomyces pastorianus
actggctcacttacagatctttctg

SEQ ID NO: 164433 - DNA, 25 bp, Saccharomyces pastorianus
gtgccaagccctcctgtagggttta

SEQ ID NO: 164434 - DNA, 25 bp, Saccharomyces pastorianus
aacctattttagcttcccattcaat

SEQ ID NO: 164435 - DNA, 25 bp, Saccharomyces pastorianus
gactgaacacataccagcttagacc

SEQ ID NO: 164436 - DNA, 25 bp, Saccharomyces pastorianus
aatgacggacaacgctttcgtgcca

SEQ ID NO: 164437 - DNA, 25 bp, Saccharomyces pastorianus
attgcaacacttgaagagcctggtt

SEQ ID NO: 164438 - DNA, 25 bp, Saccharomyces pastorianus
gcttcgaatgtgactctaccgcaaa

SEQ ID NO: 164439 - DNA, 25 bp, Saccharomyces pastorianus
attttcgtagccagagaatatcctc

SEQ ID NO: 164440 - DNA, 25 bp, Saccharomyces pastorianus
gaatatcctctggtagtggtgctct

SEQ ID NO: 164441 - DNA, 25 bp, Saccharomyces pastorianus
aattatgtctggtaccctacgtgtt

SEQ ID NO: 164442 - DNA, 25 bp, Saccharomyces pastorianus
tattttgttctatttttacaccaga

SEQ ID NO: 164443 - DNA, 25 bp, Saccharomyces pastorianus
ctacgtgttctaaaagaatctgggt

SEQ ID NO: 164444 - DNA, 25 bp, Saccharomyces pastorianus
cctctggtagtggtgctctttatat

SEQ ID NO: 164445 - DNA, 25 bp, Saccharomyces pastorianus
ttacaccagaagtatcacactactc

SEQ ID NO: 164446 - DNA, 25 bp, Saccharomyces pastorianus
tctggtaccctacgtgttctaaaag

SEQ ID NO: 164447 - DNA, 25 bp, Saccharomyces pastorianus
cacactactctaaattatgtctggt

SEQ ID NO: 164448 - DNA, 25 bp, Saccharomyces pastorianus
gaactatgtaagattttcgtagcca

SEQ ID NO: 164449 - DNA, 25 bp, Saccharomyces pastorianus
gtggtgctctttatatattttgttc

SEQ ID NO: 164450 - DNA, 25 bp, Saccharomyces pastorianus
taccaggcagccaaatagtcattga

SEQ ID NO: 164451 - DNA, 25 bp, Saccharomyces pastorianus
agggatgtccgttactcttttcaag

SEQ ID NO: 164452 - DNA, 25 bp, Saccharomyces pastorianus
gaaggccatgcggtaccaaaaacgt

SEQ ID NO: 164453 - DNA, 25 bp, Saccharomyces pastorianus
aaagtactcgaataccaggcagcca

SEQ ID NO: 164454 - DNA, 25 bp, Saccharomyces pastorianus
gataacactcaattggcttcagacg

SEQ ID NO: 164455 - DNA, 25 bp, Saccharomyces pastorianus
gtgttgttcaacagcagggtgtgct

SEQ ID NO: 164456 - DNA, 25 bp, Saccharomyces pastorianus
tgcgattgaggaagctagcctggat

SEQ ID NO: 164457 - DNA, 25 bp, Saccharomyces pastorianus
aggcgggctcattaaaaaggtcaat

SEQ ID NO: 164458 - DNA, 25 bp, Saccharomyces pastorianus
gtattcagcggcagtttacccaagt

SEQ ID NO: 164459 - DNA, 25 bp, Saccharomyces pastorianus
ttcagacgagctaaggaaggccatg

SEQ ID NO: 164460 - DNA, 25 bp, Saccharomyces pastorianus
gatggcaaatgatgctgctttatta

SEQ ID NO: 164461 - DNA, 25 bp, Saccharomyces pastorianus
tattgagttggaaccagaacaccct

SEQ ID NO: 164462 - DNA, 25 bp, Saccharomyces pastorianus
gctctggctttatctgaattgacta

SEQ ID NO: 164463 - DNA, 25 bp, Saccharomyces pastorianus
catttccctgaatcccaatttctaa

SEQ ID NO: 164464 - DNA, 25 bp, Saccharomyces pastorianus
tgactattttcaaggcaggcgatga

SEQ ID NO: 164465 - DNA, 25 bp, Saccharomyces pastorianus
tttggtcgcgaacaatctattcaag

SEQ ID NO: 164466 - DNA, 25 bp, Saccharomyces pastorianus
tgcatcaatagctaacaccctaggg

SEQ ID NO: 164467 - DNA, 25 bp, Saccharomyces pastorianus
gacatcgtcgagaattttggtcgcg

SEQ ID NO: 164468 - DNA, 25 bp, Saccharomyces pastorianus
aacttgatcttgtaggacagcttga

SEQ ID NO: 164469 - DNA, 25 bp, Saccharomyces pastorianus
tatatcccctacaacaatcgctaga

SEQ ID NO: 164470 - DNA, 25 bp, Saccharomyces pastorianus
ttccatggtatatatgctctggctt

SEQ ID NO: 164471 - DNA, 25 bp, Saccharomyces pastorianus
gaattaggtctttcgcatttccctg

SEQ ID NO: 164472 - DNA, 25 bp, Saccharomyces pastorianus
aatggcctgggaaccgcttatagtt

SEQ ID NO: 164473 - DNA, 25 bp, Saccharomyces pastorianus
gggacgcactattcttattatacta

SEQ ID NO: 164474 - DNA, 25 bp, Saccharomyces pastorianus
tacggtagccttctatacggcgttt

SEQ ID NO: 164475 - DNA, 25 bp, Saccharomyces pastorianus
gctctctaatggcattcttcacaat

SEQ ID NO: 164476 - DNA, 25 bp, Saccharomyces pastorianus
aattctcccaatagccctggttatg

SEQ ID NO: 164477 - DNA, 25 bp, Saccharomyces pastorianus
aaaagattccgggatctggctataa

SEQ ID NO: 164478 - DNA, 25 bp, Saccharomyces pastorianus
gcgtttattacggattgcgacccat

SEQ ID NO: 164479 - DNA, 25 bp, Saccharomyces pastorianus
gaatattgcctaagattgtcgacct

SEQ ID NO: 164480 - DNA, 25 bp, Saccharomyces pastorianus
acgggtccatcataaattcggcttt

SEQ ID NO: 164481 - DNA, 25 bp, Saccharomyces pastorianus
agttgcaacattcttaattctccca

SEQ ID NO: 164482 - DNA, 25 bp, Saccharomyces pastorianus
atgttacagatgcatacgggtccat

SEQ ID NO: 164483 - DNA, 25 bp, Saccharomyces pastorianus
atctcagcgttgaacaggaagtcgt

SEQ ID NO: 164484 - DNA, 25 bp, Saccharomyces pastorianus
gactccgatcggatacatagtgtta

SEQ ID NO: 164485 - DNA, 25 bp, Saccharomyces pastorianus
agtttactatatgcgtctttcacag

SEQ ID NO: 164486 - DNA, 25 bp, Saccharomyces pastorianus
aatcttctgcttatgagtggtggca

SEQ ID NO: 164487 - DNA, 25 bp, Saccharomyces pastorianus
gattcactgctcatagtggtgttaa

SEQ ID NO: 164488 - DNA, 25 bp, Saccharomyces pastorianus
tattcataaaattcctgccgttctt

SEQ ID NO: 164489 - DNA, 25 bp, Saccharomyces pastorianus
aacgttttcttgtttgcgtcatcga

SEQ ID NO: 164490 - DNA, 25 bp, Saccharomyces pastorianus
gttctttccctcactagtttgatgg

SEQ ID NO: 164491 - DNA, 25 bp, Saccharomyces pastorianus
gaatttgagtcattcgccaacgatg

SEQ ID NO: 164492 - DNA, 25 bp, Saccharomyces pastorianus
ttgcgtcatcgactccgatcggata

SEQ ID NO: 164493 - DNA, 25 bp, Saccharomyces pastorianus
gatctcatgatcacgatctcagcgt

SEQ ID NO: 164494 - DNA, 25 bp, Saccharomyces pastorianus
agcgtgtgtcgaacatgatgggaac

SEQ ID NO: 164495 - DNA, 25 bp, Saccharomyces pastorianus
gattgccgttctatcacaattcggt

SEQ ID NO: 164496 - DNA, 25 bp, Saccharomyces pastorianus
agggcttatcccattgtattatatt

SEQ ID NO: 164497 - DNA, 25 bp, Saccharomyces pastorianus
gttaccgtgtgaagattgccgttct

SEQ ID NO: 164498 - DNA, 25 bp, Saccharomyces pastorianus
aaagttccattgtcacaaaccaaga

SEQ ID NO: 164499 - DNA, 25 bp, Saccharomyces pastorianus
accggaaggtatcaaagcgtgtgtc

SEQ ID NO: 164500 - DNA, 25 bp, Saccharomyces pastorianus
ttgctaccttcctcatagggcttat

SEQ ID NO: 164501 - DNA, 25 bp, Saccharomyces pastorianus
gaacgcagatactcaaacgatcaat

SEQ ID NO: 164502 - DNA, 25 bp, Saccharomyces pastorianus
atttctgattttactacgaacgcag

SEQ ID NO: 164503 - DNA, 25 bp, Saccharomyces pastorianus
caagttttcttttgattgctacctt

SEQ ID NO: 164504 - DNA, 25 bp, Saccharomyces pastorianus
gaaggtgctgactcaatttctgatt

SEQ ID NO: 164505 - DNA, 25 bp, Saccharomyces pastorianus
gataccattggtacagcagaaatcc

SEQ ID NO: 164506 - DNA, 25 bp, Saccharomyces pastorianus
ttaagccaagatacaccattagcgt

SEQ ID NO: 164507 - DNA, 25 bp, Saccharomyces pastorianus
ggacaagatgccctgtgttaaatat

SEQ ID NO: 164508 - DNA, 25 bp, Saccharomyces pastorianus
gatgccacatctgcggatgatacca

SEQ ID NO: 164509 - DNA, 25 bp, Saccharomyces pastorianus
aggaagactgcgcttacaagacgaa

SEQ ID NO: 164510 - DNA, 25 bp, Saccharomyces pastorianus
gtattcggtggactaggcagcctca

SEQ ID NO: 164511 - DNA, 25 bp, Saccharomyces pastorianus
tagcatccaagggactaggcactgg

SEQ ID NO: 164512 - DNA, 25 bp, Saccharomyces pastorianus
aaagctggtacgaccgtgataggcg

SEQ ID NO: 164513 - DNA, 25 bp, Saccharomyces pastorianus
taggcactggtttgaaagctggtac

SEQ ID NO: 164514 - DNA, 25 bp, Saccharomyces pastorianus
gcatttagctttcagctttaagcca

SEQ ID NO: 164515 - DNA, 25 bp, Saccharomyces pastorianus
ggcagcctcaccaaccataagaaga

SEQ ID NO: 164516 - DNA, 25 bp, Saccharomyces pastorianus
gattggttccaactctgtagcttac

SEQ ID NO: 164517 - DNA, 25 bp, Saccharomyces pastorianus
gagccaaactttgaatcctgtctgg

SEQ ID NO: 164518 - DNA, 25 bp, Saccharomyces pastorianus
ttatgttgcagttacttcaccaaac

SEQ ID NO: 164519 - DNA, 25 bp, Saccharomyces pastorianus
gtggaattcagactacgaagcagtt

SEQ ID NO: 164520 - DNA, 25 bp, Saccharomyces pastorianus
ctgtagcttacacgccaccaattgg

SEQ ID NO: 164521 - DNA, 25 bp, Saccharomyces pastorianus
gattaccacatattggagacctgtt

SEQ ID NO: 164522 - DNA, 25 bp, Saccharomyces pastorianus
ataagtttgtcgtcaaggatggcaa

SEQ ID NO: 164523 - DNA, 25 bp, Saccharomyces pastorianus
tggagacctgttagactggagattg

SEQ ID NO: 164524 - DNA, 25 bp, Saccharomyces pastorianus
ttggatctaccattcaaaccctgaa

SEQ ID NO: 164525 - DNA, 25 bp, Saccharomyces pastorianus
gtaccattgatccatactgtaaggt

SEQ ID NO: 164526 - DNA, 25 bp, Saccharomyces pastorianus
caattggcgccatcagagtattcat

SEQ ID NO: 164527 - DNA, 25 bp, Saccharomyces pastorianus
ttggtaaatcgtcaatagtcctaag

SEQ ID NO: 164528 - DNA, 25 bp, Saccharomyces pastorianus
gttggtaaatcgtcaatagtcctaa

SEQ ID NO: 164529 - DNA, 25 bp, Saccharomyces pastorianus
ggtaaatcgtcaatagtcctaaggt

SEQ ID NO: 164530 - DNA, 25 bp, Saccharomyces pastorianus
tggtaaatcgtcaatagtcctaagg

SEQ ID NO: 164531 - DNA, 25 bp, Saccharomyces pastorianus
gtgaggcagcagttggtaaatcgtc

SEQ ID NO: 164532 - DNA, 25 bp, Saccharomyces pastorianus
ggtttgtatctaatgatttgacctg

SEQ ID NO: 164533 - DNA, 25 bp, Saccharomyces pastorianus
gtaaatcgtcaatagtcctaaggtt

SEQ ID NO: 164534 - DNA, 25 bp, Saccharomyces pastorianus
taaatcgtcaatagtcctaaggttt

SEQ ID NO: 164535 - DNA, 25 bp, Saccharomyces pastorianus
aatcgtcaatagtcctaaggtttgt

SEQ ID NO: 164536 - DNA, 25 bp, Saccharomyces pastorianus
atcgtcaatagtcctaaggtttgta

SEQ ID NO: 164537 - DNA, 25 bp, Saccharomyces pastorianus
gtttgtatctaatgatttgacctgc

SEQ ID NO: 164538 - DNA, 25 bp, Saccharomyces pastorianus
atcagttcctccagcttaagcaaaa

SEQ ID NO: 164539 - DNA, 25 bp, Saccharomyces pastorianus
atgcgttctccttacacaatacaaa

SEQ ID NO: 164540 - DNA, 25 bp, Saccharomyces pastorianus
gccattagccatgtgatgggcctgt

SEQ ID NO: 164541 - DNA, 25 bp, Saccharomyces pastorianus
agaaaaagtactccgccacatatgc

SEQ ID NO: 164542 - DNA, 25 bp, Saccharomyces pastorianus
tggactcgcccaaagaatgcaactt

SEQ ID NO: 164543 - DNA, 25 bp, Saccharomyces pastorianus
gagtctacaacttctttttcgtcat

SEQ ID NO: 164544 - DNA, 25 bp, Saccharomyces pastorianus
aacgaagtacctgccgacgtagacg

SEQ ID NO: 164545 - DNA, 25 bp, Saccharomyces pastorianus
atatgcccacaatgactctgctatg

SEQ ID NO: 164546 - DNA, 25 bp, Saccharomyces pastorianus
aaaaacattgccgtggactcgccca

SEQ ID NO: 164547 - DNA, 25 bp, Saccharomyces pastorianus
acgtagacgtcctgtgtgccattag

SEQ ID NO: 164548 - DNA, 25 bp, Saccharomyces pastorianus
gggcctgttaatggacgggtatcac

SEQ ID NO: 164549 - DNA, 25 bp, Saccharomyces pastorianus
tactcgaaaagctctttctgggaaa

SEQ ID NO: 164550 - DNA, 25 bp, Saccharomyces pastorianus
ctataagatttgagtacggtgccac

SEQ ID NO: 164551 - DNA, 25 bp, Saccharomyces pastorianus
tcatctcgcagcaggagctacgaat

SEQ ID NO: 164552 - DNA, 25 bp, Saccharomyces pastorianus
ctggcagtgtattcgaaggttcaaa

SEQ ID NO: 164553 - DNA, 25 bp, Saccharomyces pastorianus
tgttttgtcaattctcatctcgcag

SEQ ID NO: 164554 - DNA, 25 bp, Saccharomyces pastorianus
aactatctgcgggttcgattttgaa

SEQ ID NO: 164555 - DNA, 25 bp, Saccharomyces pastorianus
gcattttgatcaactttacctaggt

SEQ ID NO: 164556 - DNA, 25 bp, Saccharomyces pastorianus
ttccattttctggttaggtgacatg

SEQ ID NO: 164557 - DNA, 25 bp, Saccharomyces pastorianus
ccgatattgttgttttaggtcttca

SEQ ID NO: 164558 - DNA, 25 bp, Saccharomyces pastorianus
gattttgaacgctgattactcgaaa

SEQ ID NO: 164559 - DNA, 25 bp, Saccharomyces pastorianus
gattcctcatcacgattccattttc

SEQ ID NO: 164560 - DNA, 25 bp, Saccharomyces pastorianus
aaaattcacccactacctatggagc

SEQ ID NO: 164561 - DNA, 25 bp, Saccharomyces pastorianus
gtggtcagacggtacatattcgcta

SEQ ID NO: 164562 - DNA, 25 bp, Saccharomyces pastorianus
tcgaccctccaagttttgaggccaa

SEQ ID NO: 164563 - DNA, 25 bp, Saccharomyces pastorianus
ggtcaacgatacgagcaacactttt

SEQ ID NO: 164564 - DNA, 25 bp, Saccharomyces pastorianus
aagggtcctggaacatacattgtaa

SEQ ID NO: 164565 - DNA, 25 bp, Saccharomyces pastorianus
gaatccccagatgccgcttttgaga

SEQ ID NO: 164566 - DNA, 25 bp, Saccharomyces pastorianus
gaggatcaactagacgaccgcctga

SEQ ID NO: 164567 - DNA, 25 bp, Saccharomyces pastorianus
gacgaccgcctgattgatgaaaaca

SEQ ID NO: 164568 - DNA, 25 bp, Saccharomyces pastorianus
agcaattcagcttctagggaggatc

SEQ ID NO: 164569 - DNA, 25 bp, Saccharomyces pastorianus
gacagtatcgcatgaccaacaagag

SEQ ID NO: 164570 - DNA, 25 bp, Saccharomyces pastorianus
tgatgtttattccaacttcgacgaa

SEQ ID NO: 164571 - DNA, 25 bp, Saccharomyces pastorianus
ctattcactgaagacgatgggtaca

SEQ ID NO: 164572 - DNA, 25 bp, Saccharomyces pastorianus
gcactacgtcagttgaaagctgcaa

SEQ ID NO: 164573 - DNA, 25 bp, Saccharomyces pastorianus
gaggtttgtcacgtctaggacgcca

SEQ ID NO: 164574 - DNA, 25 bp, Saccharomyces pastorianus
taggacgccatgctgtctcaaacaa

SEQ ID NO: 164575 - DNA, 25 bp, Saccharomyces pastorianus
aagcacgcaggttccggtcaagaag

SEQ ID NO: 164576 - DNA, 25 bp, Saccharomyces pastorianus
gtctcaaacaacaactccgatactt

SEQ ID NO: 164577 - DNA, 25 bp, Saccharomyces pastorianus
gacccttaagcttcaacgaatcacg

SEQ ID NO: 164578 - DNA, 25 bp, Saccharomyces pastorianus
gcgaaatctagttcaggcacagcag

SEQ ID NO: 164579 - DNA, 25 bp, Saccharomyces pastorianus
aagatcgctcatactgaatttgatg

SEQ ID NO: 164580 - DNA, 25 bp, Saccharomyces pastorianus
gcaaaagtcaaatccccatcacaag

SEQ ID NO: 164581 - DNA, 25 bp, Saccharomyces pastorianus
tccgatacttctcaaacccttaaag

SEQ ID NO: 164582 - DNA, 25 bp, Saccharomyces pastorianus
gaatcttttgttcctactcttccct

SEQ ID NO: 164583 - DNA, 25 bp, Saccharomyces pastorianus
aagtccaaatcactcgcatctgggt

SEQ ID NO: 164584 - DNA, 25 bp, Saccharomyces pastorianus
gactttaatacgtacacacccatca

SEQ ID NO: 164585 - DNA, 25 bp, Saccharomyces pastorianus
ccctctgcgtatactacattcggaa

SEQ ID NO: 164586 - DNA, 25 bp, Saccharomyces pastorianus
gaaacaattagcacctccatatgat

SEQ ID NO: 164587 - DNA, 25 bp, Saccharomyces pastorianus
gtttaacaggctatcgcaagacccc

SEQ ID NO: 164588 - DNA, 25 bp, Saccharomyces pastorianus
gaacgatttggatctgcaaccggta

SEQ ID NO: 164589 - DNA, 25 bp, Saccharomyces pastorianus
gattgctccacaaatttgccaacat

SEQ ID NO: 164590 - DNA, 25 bp, Saccharomyces pastorianus
atatgttgtttctcagagcttgcaa

SEQ ID NO: 164591 - DNA, 25 bp, Saccharomyces pastorianus
agaagtggcctttttcattgaaagt

SEQ ID NO: 164592 - DNA, 25 bp, Saccharomyces pastorianus
gcaagaccccttaattattcggaat

SEQ ID NO: 164593 - DNA, 25 bp, Saccharomyces pastorianus
tcactgttgaccaaatgcgttctat

SEQ ID NO: 164594 - DNA, 25 bp, Saccharomyces pastorianus
aaatgcgttctataatggacaaagt

SEQ ID NO: 164595 - DNA, 25 bp, Saccharomyces pastorianus
cactgttgaccaaatgcgttctata

SEQ ID NO: 164596 - DNA, 25 bp, Saccharomyces pastorianus
actgttgaccaaatgcgttctataa

SEQ ID NO: 164597 - DNA, 25 bp, Saccharomyces pastorianus
gcgttctataatggacaaagttacc

SEQ ID NO: 164598 - DNA, 25 bp, Saccharomyces pastorianus
aatggacaaagttaccaatgtgagt

SEQ ID NO: 164599 - DNA, 25 bp, Saccharomyces pastorianus
tgttgaccaaatgcgttctataatg

SEQ ID NO: 164600 - DNA, 25 bp, Saccharomyces pastorianus
tggacaaagttaccaatgtgagtaa

SEQ ID NO: 164601 - DNA, 25 bp, Saccharomyces pastorianus
ttcactgttgaccaaatgcgttcta

SEQ ID NO: 164602 - DNA, 25 bp, Saccharomyces pastorianus
atggttgctttcactgttgaccaaa

SEQ ID NO: 164603 - DNA, 25 bp, Saccharomyces pastorianus
gaccaaatgcgttctataatggaca

SEQ ID NO: 164604 - DNA, 25 bp, Saccharomyces pastorianus
aattttattgatagggtactcgcat

SEQ ID NO: 164605 - DNA, 25 bp, Saccharomyces pastorianus
acgtgcattatgaaagttgtccaac

SEQ ID NO: 164606 - DNA, 25 bp, Saccharomyces pastorianus
aaataccctacgcaatttcattggg

SEQ ID NO: 164607 - DNA, 25 bp, Saccharomyces pastorianus
aaccctgatttagttgtgatcacag

SEQ ID NO: 164608 - DNA, 25 bp, Saccharomyces pastorianus
gatcacaggtgatttgttagactca

SEQ ID NO: 164609 - DNA, 25 bp, Saccharomyces pastorianus
aagttgtccaaccaatgatttctaa

SEQ ID NO: 164610 - DNA, 25 bp, Saccharomyces pastorianus
ggtactcgcatcagaaaaccctgat

SEQ ID NO: 164611 - DNA, 25 bp, Saccharomyces pastorianus
gggtgtttctgacgaatccaatttg

SEQ ID NO: 164612 - DNA, 25 bp, Saccharomyces pastorianus
tactattgactatcaaacgtgcatt

SEQ ID NO: 164613 - DNA, 25 bp, Saccharomyces pastorianus
gttagactcacataatactattgac

SEQ ID NO: 164614 - DNA, 25 bp, Saccharomyces pastorianus
agaagagggtcatatggccatagaa

SEQ ID NO: 164615 - DNA, 25 bp, Saccharomyces pastorianus
gttacatgactccaacagacttaat

SEQ ID NO: 164616 - DNA, 25 bp, Saccharomyces pastorianus
tattggcgatctggattcactatca

SEQ ID NO: 164617 - DNA, 25 bp, Saccharomyces pastorianus
aatactatgaccgagtccctggttt

SEQ ID NO: 164618 - DNA, 25 bp, Saccharomyces pastorianus
aagtgcgttaatttgatctctctac

SEQ ID NO: 164619 - DNA, 25 bp, Saccharomyces pastorianus
aggtctgtgcagatggtgcagccaa

SEQ ID NO: 164620 - DNA, 25 bp, Saccharomyces pastorianus
gagtccctggttttctcgaaagtga

SEQ ID NO: 164621 - DNA, 25 bp, Saccharomyces pastorianus
aacgcaattgtataccttatccgag

SEQ ID NO: 164622 - DNA, 25 bp, Saccharomyces pastorianus
agatgatgacgaaaccctaaggata

SEQ ID NO: 164623 - DNA, 25 bp, Saccharomyces pastorianus
gatccccaatttaggaacacttgta

SEQ ID NO: 164624 - DNA, 25 bp, Saccharomyces pastorianus
gaactttgattgagtatgatcccca

SEQ ID NO: 164625 - DNA, 25 bp, Saccharomyces pastorianus
aattcaccagaatttcgctctttaa

SEQ ID NO: 164626 - DNA, 25 bp, Saccharomyces pastorianus
aagtccctctgagagaaccctgaac

SEQ ID NO: 164627 - DNA, 25 bp, Saccharomyces pastorianus
tccgctaccgctttggaatttgttc

SEQ ID NO: 164628 - DNA, 25 bp, Saccharomyces pastorianus
tatttccaatacatctgccacagtg

SEQ ID NO: 164629 - DNA, 25 bp, Saccharomyces pastorianus
cgacatcgtcagaggtgtttccggt

SEQ ID NO: 164630 - DNA, 25 bp, Saccharomyces pastorianus
gaatttgttcgtgccttaaagactc

SEQ ID NO: 164631 - DNA, 25 bp, Saccharomyces pastorianus
cattgctgaagtctccatctgtgga

SEQ ID NO: 164632 - DNA, 25 bp, Saccharomyces pastorianus
aaggaagcgtgtctccattgctgaa

SEQ ID NO: 164633 - DNA, 25 bp, Saccharomyces pastorianus
aagcagacaaaccaccgcagatttt

SEQ ID NO: 164634 - DNA, 25 bp, Saccharomyces pastorianus
caccgcagattttttgacctcagtt

SEQ ID NO: 164635 - DNA, 25 bp, Saccharomyces pastorianus
agatgcgtacgacttgttcaataaa

SEQ ID NO: 164636 - DNA, 25 bp, Saccharomyces pastorianus
ggttatcagatctactatggccccg

SEQ ID NO: 164637 - DNA, 25 bp, Saccharomyces pastorianus
gaacttaagtgcttctggtgcttcc

SEQ ID NO: 164638 - DNA, 25 bp, Saccharomyces pastorianus
atatggctcacctaagtgcggcaga

SEQ ID NO: 164639 - DNA, 25 bp, Saccharomyces pastorianus
aaaactggcaaggactctgaccgca

SEQ ID NO: 164640 - DNA, 25 bp, Saccharomyces pastorianus
tgttcgctatcagtccattgtggta

SEQ ID NO: 164641 - DNA, 25 bp, Saccharomyces pastorianus
gtatgcaaaactccactcaatcggc

SEQ ID NO: 164642 - DNA, 25 bp, Saccharomyces pastorianus
aaagccttattccttaggttgcgct

SEQ ID NO: 164643 - DNA, 25 bp, Saccharomyces pastorianus
gaagctccaggctatgacccaaaat

SEQ ID NO: 164644 - DNA, 25 bp, Saccharomyces pastorianus
gaaaatttttctagtgccgtctggg

SEQ ID NO: 164645 - DNA, 25 bp, Saccharomyces pastorianus
tggtgcttccgcagatgttcgctat

SEQ ID NO: 164646 - DNA, 25 bp, Saccharomyces pastorianus
taaacccgatattctctgatcctga

SEQ ID NO: 164647 - DNA, 25 bp, Saccharomyces pastorianus
gaaaacgctgctgatctacacaatt

SEQ ID NO: 164648 - DNA, 25 bp, Saccharomyces pastorianus
tggttcatcgtcatattcttcatca

SEQ ID NO: 164649 - DNA, 25 bp, Saccharomyces pastorianus
ttcatctcagaaccgggccagtaca

SEQ ID NO: 164650 - DNA, 25 bp, Saccharomyces pastorianus
aaattccctaatgccggagatttct

SEQ ID NO: 164651 - DNA, 25 bp, Saccharomyces pastorianus
cttcttcaaacaattcctccacaaa

SEQ ID NO: 164652 - DNA, 25 bp, Saccharomyces pastorianus
caatcactatattctggttcatcgt

SEQ ID NO: 164653 - DNA, 25 bp, Saccharomyces pastorianus
atgataccttcacaacggccaattt

SEQ ID NO: 164654 - DNA, 25 bp, Saccharomyces pastorianus
tcttcattatcctttgcttcttcaa

SEQ ID NO: 164655 - DNA, 25 bp, Saccharomyces pastorianus
aatcatctgcaaacagcaccagtgc

SEQ ID NO: 164656 - DNA, 25 bp, Saccharomyces pastorianus
agatttctactccatcattcttcgg

SEQ ID NO: 164657 - DNA, 25 bp, Saccharomyces pastorianus
tttcccacttactgagctcgataat

SEQ ID NO: 164658 - DNA, 25 bp, Saccharomyces pastorianus
gattatgcgaacctatatgaaccta

SEQ ID NO: 164659 - DNA, 25 bp, Saccharomyces pastorianus
aattgcgctatctggactggtacta

SEQ ID NO: 164660 - DNA, 25 bp, Saccharomyces pastorianus
gatcggcttcattatcttccatatc

SEQ ID NO: 164661 - DNA, 25 bp, Saccharomyces pastorianus
cagatttggttcctctaattgcgct

SEQ ID NO: 164662 - DNA, 25 bp, Saccharomyces pastorianus
tactttcttcgccatgttgggtatg

SEQ ID NO: 164663 - DNA, 25 bp, Saccharomyces pastorianus
agcaaccttgatcccagtattcggt

SEQ ID NO: 164664 - DNA, 25 bp, Saccharomyces pastorianus
gtgacttgttcacttctactcattc

SEQ ID NO: 164665 - DNA, 25 bp, Saccharomyces pastorianus
aacgcttggttaggtggcctttgtg

SEQ ID NO: 164666 - DNA, 25 bp, Saccharomyces pastorianus
tttggtcgtgtgttggtactttctt

SEQ ID NO: 164667 - DNA, 25 bp, Saccharomyces pastorianus
gtttctccaggctgtaccaatcaaa

SEQ ID NO: 164668 - DNA, 25 bp, Saccharomyces pastorianus
tccttaccgcgttctgttactttat

SEQ ID NO: 164669 - DNA, 25 bp, Saccharomyces pastorianus
agtattcggtatcattggtgcttct

SEQ ID NO: 164670 - DNA, 25 bp, Saccharomyces pastorianus
gaaaccctgatttgcaacctatcaa

SEQ ID NO: 164671 - DNA, 25 bp, Saccharomyces pastorianus
gtcaaaaatagggcctccgtgaatt

SEQ ID NO: 164672 - DNA, 25 bp, Saccharomyces pastorianus
taagaaaccctgatttgcaacctat

SEQ ID NO: 164673 - DNA, 25 bp, Saccharomyces pastorianus
gcaacctatcaagtctgttaatcaa

SEQ ID NO: 164674 - DNA, 25 bp, Saccharomyces pastorianus
cctgtcaaaaatagggcctccgtga

SEQ ID NO: 164675 - DNA, 25 bp, Saccharomyces pastorianus
acctatcaagtctgttaatcaaacg

SEQ ID NO: 164676 - DNA, 25 bp, Saccharomyces pastorianus
attcctgtcaaaaatagggcctccg

SEQ ID NO: 164677 - DNA, 25 bp, Saccharomyces pastorianus
tgatttgcaacctatcaagtctgtt

SEQ ID NO: 164678 - DNA, 25 bp, Saccharomyces pastorianus
gaaattcctgtcaaaaatagggcct

SEQ ID NO: 164679 - DNA, 25 bp, Saccharomyces pastorianus
ctgtcaaaaatagggcctccgtgaa

SEQ ID NO: 164680 - DNA, 25 bp, Saccharomyces pastorianus
ttcctgtcaaaaatagggcctccgt

SEQ ID NO: 164681 - DNA, 25 bp, Saccharomyces pastorianus
gagtctcaaggctccttttaccaaa

SEQ ID NO: 164682 - DNA, 25 bp, Saccharomyces pastorianus
actgctgtcattatggctccaacta

SEQ ID NO: 164683 - DNA, 25 bp, Saccharomyces pastorianus
actctgatgttctcagctactttcc

SEQ ID NO: 164684 - DNA, 25 bp, Saccharomyces pastorianus
actccaggtcgtttgaatgacttgt

SEQ ID NO: 164685 - DNA, 25 bp, Saccharomyces pastorianus
gccaacgtcaagtacttggttctag

SEQ ID NO: 164686 - DNA, 25 bp, Saccharomyces pastorianus
aaaggcctacccaactgctgtcatt

SEQ ID NO: 164687 - DNA, 25 bp, Saccharomyces pastorianus
gatctaatatgtctgcatccactga

SEQ ID NO: 164688 - DNA, 25 bp, Saccharomyces pastorianus
gaagtcagccttatatggatctaat

SEQ ID NO: 164689 - DNA, 25 bp, Saccharomyces pastorianus
gttggccacccaaattttcgatgaa

SEQ ID NO: 164690 - DNA, 25 bp, Saccharomyces pastorianus
aaggcctgcgtcgtctacggtggtt

SEQ ID NO: 164691 - DNA, 25 bp, Saccharomyces pastorianus
aatttacttatagatcctgggtcaa

SEQ ID NO: 164692 - DNA, 25 bp, Saccharomyces pastorianus
aaaggaagtggagcctaccatcctc

SEQ ID NO: 164693 - DNA, 25 bp, Saccharomyces pastorianus
aaaagacgactgaactcgctgccat

SEQ ID NO: 164694 - DNA, 25 bp, Saccharomyces pastorianus
aactcgctgccattttttatcaagg

SEQ ID NO: 164695 - DNA, 25 bp, Saccharomyces pastorianus
gaactcatcatgttagatgcaacag

SEQ ID NO: 164696 - DNA, 25 bp, Saccharomyces pastorianus
gcactctagcttcaaacagcccaaa

SEQ ID NO: 164697 - DNA, 25 bp, Saccharomyces pastorianus
ggtggcaaatggaactcatcatgtt

SEQ ID NO: 164698 - DNA, 25 bp, Saccharomyces pastorianus
ggaaatgaacttcccttgcgtcggt

SEQ ID NO: 164699 - DNA, 25 bp, Saccharomyces pastorianus
aatgcttttttataggtaacgctgg

SEQ ID NO: 164700 - DNA, 25 bp, Saccharomyces pastorianus
catataccatttgcactctagcttc

SEQ ID NO: 164701 - DNA, 25 bp, Saccharomyces pastorianus
cctaccatcctctctaaatgcatat

SEQ ID NO: 164702 - DNA, 25 bp, Saccharomyces pastorianus
tcccttgcgtcggtggcaaatggaa

SEQ ID NO: 164703 - DNA, 25 bp, Saccharomyces pastorianus
tcatctgcatcaacgacatcttcga

SEQ ID NO: 164704 - DNA, 25 bp, Saccharomyces pastorianus
catactgttgtatttccgcgtgaat

SEQ ID NO: 164705 - DNA, 25 bp, Saccharomyces pastorianus
gtgtttcttcatcatctgcgggaac

SEQ ID NO: 164706 - DNA, 25 bp, Saccharomyces pastorianus
tttttgctaccaccaggtttactgg

SEQ ID NO: 164707 - DNA, 25 bp, Saccharomyces pastorianus
gcagtcttcctcttcgtaggtttgg

SEQ ID NO: 164708 - DNA, 25 bp, Saccharomyces pastorianus
gtaggtttggctttctgcttgataa

SEQ ID NO: 164709 - DNA, 25 bp, Saccharomyces pastorianus
gcgggaactggattgtcatctgcat

SEQ ID NO: 164710 - DNA, 25 bp, Saccharomyces pastorianus
taaatcatgctttcgttttcctttt

SEQ ID NO: 164711 - DNA, 25 bp, Saccharomyces pastorianus
gtctgtgctactatcttgtgtttct

SEQ ID NO: 164712 - DNA, 25 bp, Saccharomyces pastorianus
gtgaatccacttttaaccgtagctg

SEQ ID NO: 164713 - DNA, 25 bp, Saccharomyces pastorianus
ttatccttcttcaagtctgtgctac

SEQ ID NO: 164714 - DNA, 25 bp, Saccharomyces pastorianus
ccaagaaacgttgggtccatggata

SEQ ID NO: 164715 - DNA, 25 bp, Saccharomyces pastorianus
gattttaccatcctaaggtaattga

SEQ ID NO: 164716 - DNA, 25 bp, Saccharomyces pastorianus
aagtccttagctaatgtcggcacag

SEQ ID NO: 164717 - DNA, 25 bp, Saccharomyces pastorianus
gccctgcatgtggtatgtgataaaa

SEQ ID NO: 164718 - DNA, 25 bp, Saccharomyces pastorianus
gctgccaaaagattttaccatccta

SEQ ID NO: 164719 - DNA, 25 bp, Saccharomyces pastorianus
gcacaggaatcgtgggcgccctgca

SEQ ID NO: 164720 - DNA, 25 bp, Saccharomyces pastorianus
gggtccatggataagtccttagcta

SEQ ID NO: 164721 - DNA, 25 bp, Saccharomyces pastorianus
acgttgggtccatggataagtcctt

SEQ ID NO: 164722 - DNA, 25 bp, Saccharomyces pastorianus
taatgtcggcacaggaatcgtgggc

SEQ ID NO: 164723 - DNA, 25 bp, Saccharomyces pastorianus
gataagtccttagctaatgtcggca

SEQ ID NO: 164724 - DNA, 25 bp, Saccharomyces pastorianus
ggcgccctgcatgtggtatgtgata

SEQ ID NO: 164725 - DNA, 25 bp, Saccharomyces pastorianus
ggatcagagatcaggttaccggaat

SEQ ID NO: 164726 - DNA, 25 bp, Saccharomyces pastorianus
gaaccaattttcatagaccatttaa

SEQ ID NO: 164727 - DNA, 25 bp, Saccharomyces pastorianus
ctgagtcattaccaggcatcactga

SEQ ID NO: 164728 - DNA, 25 bp, Saccharomyces pastorianus
aggacgaggcggaaatcttcagaat

SEQ ID NO: 164729 - DNA, 25 bp, Saccharomyces pastorianus
gaatcttcaactactaacacagcat

SEQ ID NO: 164730 - DNA, 25 bp, Saccharomyces pastorianus
gtgcaggtacaactcgacaacattg

SEQ ID NO: 164731 - DNA, 25 bp, Saccharomyces pastorianus
ggaacagtcgactttgaaccaattt

SEQ ID NO: 164732 - DNA, 25 bp, Saccharomyces pastorianus
gaatctaatgatcctctaacgaata

SEQ ID NO: 164733 - DNA, 25 bp, Saccharomyces pastorianus
ggcatcactgaataatcttctcatt

SEQ ID NO: 164734 - DNA, 25 bp, Saccharomyces pastorianus
aaattggactttacctgaatcttca

SEQ ID NO: 164735 - DNA, 25 bp, Saccharomyces pastorianus
actgacaatcagctccgactaaaac

SEQ ID NO: 164736 - DNA, 25 bp, Saccharomyces pastorianus
aatgggcttgattatgtccgcacgc

SEQ ID NO: 164737 - DNA, 25 bp, Saccharomyces pastorianus
gctgcggcaacgagtcctattgata

SEQ ID NO: 164738 - DNA, 25 bp, Saccharomyces pastorianus
gacactgataatgacggtcctagaa

SEQ ID NO: 164739 - DNA, 25 bp, Saccharomyces pastorianus
gctctagacttataccactttgctc

SEQ ID NO: 164740 - DNA, 25 bp, Saccharomyces pastorianus
gatcgggcagatacggatttggcaa

SEQ ID NO: 164741 - DNA, 25 bp, Saccharomyces pastorianus
aaccttccaaagcactatatcccga

SEQ ID NO: 164742 - DNA, 25 bp, Saccharomyces pastorianus
aaactttctgacattttcctctcca

SEQ ID NO: 164743 - DNA, 25 bp, Saccharomyces pastorianus
gcttgaatcaagtccagttactggc

SEQ ID NO: 164744 - DNA, 25 bp, Saccharomyces pastorianus
gaaaattctgaaccaccagcgcttg

SEQ ID NO: 164745 - DNA, 25 bp, Saccharomyces pastorianus
tggcgataactctcccagtgaggat

SEQ ID NO: 164746 - DNA, 25 bp, Saccharomyces pastorianus
ggacattccaaaaccacgtacagcg

SEQ ID NO: 164747 - DNA, 25 bp, Saccharomyces pastorianus
gcgtgctgcgttagttacatctttt

SEQ ID NO: 164748 - DNA, 25 bp, Saccharomyces pastorianus
gaggctgaagcttcagttgctgctc

SEQ ID NO: 164749 - DNA, 25 bp, Saccharomyces pastorianus
tctacgcaagaatgtcgcctgatga

SEQ ID NO: 164750 - DNA, 25 bp, Saccharomyces pastorianus
gatcgttccaatcgcaatttgcatg

SEQ ID NO: 164751 - DNA, 25 bp, Saccharomyces pastorianus
attagctgcgtacttgatgtcatta

SEQ ID NO: 164752 - DNA, 25 bp, Saccharomyces pastorianus
acatcttttgcatgtttccagtaca

SEQ ID NO: 164753 - DNA, 25 bp, Saccharomyces pastorianus
gggagatttccaattcctgtacatt

SEQ ID NO: 164754 - DNA, 25 bp, Saccharomyces pastorianus
actatactcttgcagttagcggcga

SEQ ID NO: 164755 - DNA, 25 bp, Saccharomyces pastorianus
ggtatttccctttcggaggctgaag

SEQ ID NO: 164756 - DNA, 25 bp, Saccharomyces pastorianus
tgagtttgtactctgccatccaatt

SEQ ID NO: 164757 - DNA, 25 bp, Saccharomyces pastorianus
gctgctccgttcacttcaaagatat

SEQ ID NO: 164758 - DNA, 25 bp, Saccharomyces pastorianus
gagctggtacatcaagccaatcgtt

SEQ ID NO: 164759 - DNA, 25 bp, Saccharomyces pastorianus
aataccgtattgttcttcgtctcaa

SEQ ID NO: 164760 - DNA, 25 bp, Saccharomyces pastorianus
acgacgccgtgcaatcttcagataa

SEQ ID NO: 164761 - DNA, 25 bp, Saccharomyces pastorianus
acagctgacccctatatcaaacagt

SEQ ID NO: 164762 - DNA, 25 bp, Saccharomyces pastorianus
gtaagatgttacagctgacccctat

SEQ ID NO: 164763 - DNA, 25 bp, Saccharomyces pastorianus
gatatcactgtctctatcggtgcaa

SEQ ID NO: 164764 - DNA, 25 bp, Saccharomyces pastorianus
atgctcaactgtatataccgccatc

SEQ ID NO: 164765 - DNA, 25 bp, Saccharomyces pastorianus
atagttttgtctgtgggtccaccat

SEQ ID NO: 164766 - DNA, 25 bp, Saccharomyces pastorianus
atcggtgcaagtctactgctaatga

SEQ ID NO: 164767 - DNA, 25 bp, Saccharomyces pastorianus
ggatacagaatcataccttggtaag

SEQ ID NO: 164768 - DNA, 25 bp, Saccharomyces pastorianus
tgggtccaccatatagagagccgat

SEQ ID NO: 164769 - DNA, 25 bp, Saccharomyces pastorianus
gaatattatagtcgtgcgccgccat

SEQ ID NO: 164770 - DNA, 25 bp, Saccharomyces pastorianus
gcgccgccatttgcattgtaaaagc

SEQ ID NO: 164771 - DNA, 25 bp, Saccharomyces pastorianus
ttctgaatattatagtcgtgcgccg

SEQ ID NO: 164772 - DNA, 25 bp, Saccharomyces pastorianus
gtgcgccgccatttgcattgtaaaa

SEQ ID NO: 164773 - DNA, 25 bp, Saccharomyces pastorianus
aatattatagtcgtgcgccgccatt

SEQ ID NO: 164774 - DNA, 25 bp, Saccharomyces pastorianus
tattatagtcgtgcgccgccatttg

SEQ ID NO: 164775 - DNA, 25 bp, Saccharomyces pastorianus
gccgccatttgcattgtaaaagcta

SEQ ID NO: 164776 - DNA, 25 bp, Saccharomyces pastorianus
ctgaatattatagtcgtgcgccgcc

SEQ ID NO: 164777 - DNA, 25 bp, Saccharomyces pastorianus
atattatagtcgtgcgccgccattt

SEQ ID NO: 164778 - DNA, 25 bp, Saccharomyces pastorianus
tcgtgcgccgccatttgcattgtaa

SEQ ID NO: 164779 - DNA, 25 bp, Saccharomyces pastorianus
gccatttgcattgtaaaagctacag

SEQ ID NO: 164780 - DNA, 25 bp, Saccharomyces pastorianus
ggattgagataactaccgggtactt

SEQ ID NO: 164781 - DNA, 25 bp, Saccharomyces pastorianus
tgggccgtaaatgttgccaaaaaca

SEQ ID NO: 164782 - DNA, 25 bp, Saccharomyces pastorianus
atgaaactcggaagcaaacaggtaa

SEQ ID NO: 164783 - DNA, 25 bp, Saccharomyces pastorianus
aattatatccttgttgctgctagac

SEQ ID NO: 164784 - DNA, 25 bp, Saccharomyces pastorianus
tgttgctgctagacacagtgttctt

SEQ ID NO: 164785 - DNA, 25 bp, Saccharomyces pastorianus
tacttgtctcactctttggctctaa

SEQ ID NO: 164786 - DNA, 25 bp, Saccharomyces pastorianus
tttggctctaatcgcggactcattc

SEQ ID NO: 164787 - DNA, 25 bp, Saccharomyces pastorianus
ggactcattccatatgctaaacgat

SEQ ID NO: 164788 - DNA, 25 bp, Saccharomyces pastorianus
taactaccgggtacttgtctcactc

SEQ ID NO: 164789 - DNA, 25 bp, Saccharomyces pastorianus
gacacagtgttcttcgggattgaga

SEQ ID NO: 164790 - DNA, 25 bp, Saccharomyces pastorianus
aatcgcggactcattccatatgcta

SEQ ID NO: 164791 - DNA, 25 bp, Saccharomyces pastorianus
tggtatagcttcatctgcctggcaa

SEQ ID NO: 164792 - DNA, 25 bp, Saccharomyces pastorianus
gttgtctgtttaaaacacgcctcca

SEQ ID NO: 164793 - DNA, 25 bp, Saccharomyces pastorianus
actgggttgctatttagctcagtca

SEQ ID NO: 164794 - DNA, 25 bp, Saccharomyces pastorianus
gagaacctggtggaatatcgaaaca

SEQ ID NO: 164795 - DNA, 25 bp, Saccharomyces pastorianus
agtcccagcgcctatatcgaaaagt

SEQ ID NO: 164796 - DNA, 25 bp, Saccharomyces pastorianus
ggcaagaatctacacacccatgaag

SEQ ID NO: 164797 - DNA, 25 bp, Saccharomyces pastorianus
tagattaatgcatcgcctaacaggc

SEQ ID NO: 164798 - DNA, 25 bp, Saccharomyces pastorianus
agaagatccaacactactacacccg

SEQ ID NO: 164799 - DNA, 25 bp, Saccharomyces pastorianus
gctatccacatctttccgtattaaa

SEQ ID NO: 164800 - DNA, 25 bp, Saccharomyces pastorianus
atgaagtttctgcttacggagatgt

SEQ ID NO: 164801 - DNA, 25 bp, Saccharomyces pastorianus
gattgccacagggagaagatttcgt

SEQ ID NO: 164802 - DNA, 25 bp, Saccharomyces pastorianus
caacgttgtcaacatctgatgctga

SEQ ID NO: 164803 - DNA, 25 bp, Saccharomyces pastorianus
ctggtacactaactgccttgattgg

SEQ ID NO: 164804 - DNA, 25 bp, Saccharomyces pastorianus
caaatggcggtctgttggtattggt

SEQ ID NO: 164805 - DNA, 25 bp, Saccharomyces pastorianus
taaaactgtcgccaaggagcattat

SEQ ID NO: 164806 - DNA, 25 bp, Saccharomyces pastorianus
ttgattggcgcatctggtgcaggaa

SEQ ID NO: 164807 - DNA, 25 bp, Saccharomyces pastorianus
gagcattattcatctccttcatctt

SEQ ID NO: 164808 - DNA, 25 bp, Saccharomyces pastorianus
atcttctgcgtctcaaagccatagt

SEQ ID NO: 164809 - DNA, 25 bp, Saccharomyces pastorianus
gattgtcttgccgagagaactacga

SEQ ID NO: 164810 - DNA, 25 bp, Saccharomyces pastorianus
atggttgggtcaagcctggtacact

SEQ ID NO: 164811 - DNA, 25 bp, Saccharomyces pastorianus
aaacttatgctacgatatcccgatt

SEQ ID NO: 164812 - DNA, 25 bp, Saccharomyces pastorianus
gatttttacgcgattctgatgcagc

SEQ ID NO: 164813 - DNA, 25 bp, Saccharomyces pastorianus
ttcgttatagatttcgcccgtttag

SEQ ID NO: 164814 - DNA, 25 bp, Saccharomyces pastorianus
cttttgcaagaactcgagccatcaa

SEQ ID NO: 164815 - DNA, 25 bp, Saccharomyces pastorianus
atcgaaattcggagagttgcctgaa

SEQ ID NO: 164816 - DNA, 25 bp, Saccharomyces pastorianus
aaagcgacccgcaatatgacgaatt

SEQ ID NO: 164817 - DNA, 25 bp, Saccharomyces pastorianus
gactccgtacaatttgcttactgct

SEQ ID NO: 164818 - DNA, 25 bp, Saccharomyces pastorianus
ccacacaattccagggttctcagaa

SEQ ID NO: 164819 - DNA, 25 bp, Saccharomyces pastorianus
gagctgaagaactcaactgacaatt

SEQ ID NO: 164820 - DNA, 25 bp, Saccharomyces pastorianus
ttcgtgccgttaatgttgtctccca

SEQ ID NO: 164821 - DNA, 25 bp, Saccharomyces pastorianus
ggaaaattacctcactgactccgta

SEQ ID NO: 164822 - DNA, 25 bp, Saccharomyces pastorianus
tgtctcccagggatatccgcaaaga

SEQ ID NO: 164823 - DNA, 25 bp, Saccharomyces pastorianus
gagtcggactattgccatttagttc

SEQ ID NO: 164824 - DNA, 25 bp, Saccharomyces pastorianus
gtatgctagtctttaccctatgggt

SEQ ID NO: 164825 - DNA, 25 bp, Saccharomyces pastorianus
ggttctagaatgagctccatacctc

SEQ ID NO: 164826 - DNA, 25 bp, Saccharomyces pastorianus
attgatcttgtacggttgtcctacc

SEQ ID NO: 164827 - DNA, 25 bp, Saccharomyces pastorianus
aaccttacgatgttgtcattggtac

SEQ ID NO: 164828 - DNA, 25 bp, Saccharomyces pastorianus
aatcttgtggcgctaacttccaatg

SEQ ID NO: 164829 - DNA, 25 bp, Saccharomyces pastorianus
gttgtcctaccgttattgactccga

SEQ ID NO: 164830 - DNA, 25 bp, Saccharomyces pastorianus
agatccacatgttcccttgatggga

SEQ ID NO: 164831 - DNA, 25 bp, Saccharomyces pastorianus
aagcgtggagtatcccttaactcat

SEQ ID NO: 164832 - DNA, 25 bp, Saccharomyces pastorianus
ggtactaactcagaagcgccgatat

SEQ ID NO: 164833 - DNA, 25 bp, Saccharomyces pastorianus
tacgaaaagcccgacgacgtgttct

SEQ ID NO: 164834 - DNA, 25 bp, Saccharomyces pastorianus
atacagcacgatatcagttccaatg

SEQ ID NO: 164835 - DNA, 25 bp, Saccharomyces pastorianus
gatccaagcctcagtacctgctgga

SEQ ID NO: 164836 - DNA, 25 bp, Saccharomyces pastorianus
agtacctgctggacttcagggcagt

SEQ ID NO: 164837 - DNA, 25 bp, Saccharomyces pastorianus
ggcagtgggtatttcgcgccttccg

SEQ ID NO: 164838 - DNA, 25 bp, Saccharomyces pastorianus
aagcctcagtacctgctggacttca

SEQ ID NO: 164839 - DNA, 25 bp, Saccharomyces pastorianus
agggcagtgggtatttcgcgccttc

SEQ ID NO: 164840 - DNA, 25 bp, Saccharomyces pastorianus
tttgagatccaagcctcagtacctg

SEQ ID NO: 164841 - DNA, 25 bp, Saccharomyces pastorianus
gcaccccacgcttttgagatccaag

SEQ ID NO: 164842 - DNA, 25 bp, Saccharomyces pastorianus
tcagtacctgctggacttcagggca

SEQ ID NO: 164843 - DNA, 25 bp, Saccharomyces pastorianus
gagatccaagcctcagtacctgctg

SEQ ID NO: 164844 - DNA, 25 bp, Saccharomyces pastorianus
tacctgctggacttcagggcagtgg

SEQ ID NO: 164845 - DNA, 25 bp, Saccharomyces pastorianus
acgcttttgagatccaagcctcagt

SEQ ID NO: 164846 - DNA, 25 bp, Saccharomyces pastorianus
gagtatgccgtcaaagcagtcgaaa

SEQ ID NO: 164847 - DNA, 25 bp, Saccharomyces pastorianus
attacgtctaaactgctggtcccac

SEQ ID NO: 164848 - DNA, 25 bp, Saccharomyces pastorianus
ggcacctggttaatcgtggtcgtga

SEQ ID NO: 164849 - DNA, 25 bp, Saccharomyces pastorianus
gacggtgtagtctttgcagtggaaa

SEQ ID NO: 164850 - DNA, 25 bp, Saccharomyces pastorianus
gtcacatcggttgcgtttattcagg

SEQ ID NO: 164851 - DNA, 25 bp, Saccharomyces pastorianus
gcagtggaaaagctcattacgtcta

SEQ ID NO: 164852 - DNA, 25 bp, Saccharomyces pastorianus
ttcaagtcgtagaccgtcacatcgg

SEQ ID NO: 164853 - DNA, 25 bp, Saccharomyces pastorianus
tgattcctgatggtaggcacctggt

SEQ ID NO: 164854 - DNA, 25 bp, Saccharomyces pastorianus
gaaaacggtaccacatcaatcggta

SEQ ID NO: 164855 - DNA, 25 bp, Saccharomyces pastorianus
aaatttccaagtagagtatgccgtc

SEQ ID NO: 164856 - DNA, 25 bp, Saccharomyces pastorianus
gtggtcgtgaagaagccgccagctt

SEQ ID NO: 164857 - DNA, 25 bp, Saccharomyces pastorianus
gaaggtctcatcgtcgttttctgat

SEQ ID NO: 164858 - DNA, 25 bp, Saccharomyces pastorianus
aggcagaactatcgagccagctgga

SEQ ID NO: 164859 - DNA, 25 bp, Saccharomyces pastorianus
gattcaaatttcacttcccaagttg

SEQ ID NO: 164860 - DNA, 25 bp, Saccharomyces pastorianus
tggtggcgctgttggtactgcaaac

SEQ ID NO: 164861 - DNA, 25 bp, Saccharomyces pastorianus
aattcaccacgaaagctacgctcga

SEQ ID NO: 164862 - DNA, 25 bp, Saccharomyces pastorianus
ggaacctgcaatatccgattctgtc

SEQ ID NO: 164863 - DNA, 25 bp, Saccharomyces pastorianus
aaactactactatgcagacccatga

SEQ ID NO: 164864 - DNA, 25 bp, Saccharomyces pastorianus
gaaagtgccgtcaggtttttcaggc

SEQ ID NO: 164865 - DNA, 25 bp, Saccharomyces pastorianus
gcacaactgctacatctcatcaaga

SEQ ID NO: 164866 - DNA, 25 bp, Saccharomyces pastorianus
gaagcagtacttccctggtattggt

SEQ ID NO: 164867 - DNA, 25 bp, Saccharomyces pastorianus
gttcctgaatcggatctcattgtga

SEQ ID NO: 164868 - DNA, 25 bp, Saccharomyces pastorianus
tcgatagtgctccttctgtttttta

SEQ ID NO: 164869 - DNA, 25 bp, Saccharomyces pastorianus
agatgacctgacatgcaccaacaag

SEQ ID NO: 164870 - DNA, 25 bp, Saccharomyces pastorianus
atcgctgatttggtcgttggtttaa

SEQ ID NO: 164871 - DNA, 25 bp, Saccharomyces pastorianus
atgtgcgaatactctgttgctgaaa

SEQ ID NO: 164872 - DNA, 25 bp, Saccharomyces pastorianus
aaatacccaatcatttccctggaag

SEQ ID NO: 164873 - DNA, 25 bp, Saccharomyces pastorianus
caggatcgcccgtgctatagaggag

SEQ ID NO: 164874 - DNA, 25 bp, Saccharomyces pastorianus
gccaatcaggctttcgatgctggat

SEQ ID NO: 164875 - DNA, 25 bp, Saccharomyces pastorianus
aatcgggcgctttgtcgagatcaga

SEQ ID NO: 164876 - DNA, 25 bp, Saccharomyces pastorianus
ctgactgagtctattgaagccgcca

SEQ ID NO: 164877 - DNA, 25 bp, Saccharomyces pastorianus
cgaagatgattggtcctcgtggtct

SEQ ID NO: 164878 - DNA, 25 bp, Saccharomyces pastorianus
accgaagatccgtttatcgctgatt

SEQ ID NO: 164879 - DNA, 25 bp, Saccharomyces pastorianus
gagacagaatctactacgataccaa

SEQ ID NO: 164880 - DNA, 25 bp, Saccharomyces pastorianus
agtaacctgcatgtcattccagaag

SEQ ID NO: 164881 - DNA, 25 bp, Saccharomyces pastorianus
gactcggatagatctggttcactga

SEQ ID NO: 164882 - DNA, 25 bp, Saccharomyces pastorianus
cagccgctttgctaatcggtttttt

SEQ ID NO: 164883 - DNA, 25 bp, Saccharomyces pastorianus
aatggaaactagcttctcagcccta

SEQ ID NO: 164884 - DNA, 25 bp, Saccharomyces pastorianus
gggactgttcattggtttaggttat

SEQ ID NO: 164885 - DNA, 25 bp, Saccharomyces pastorianus
tctgtgtcgttcagagtgccgcaga

SEQ ID NO: 164886 - DNA, 25 bp, Saccharomyces pastorianus
taggttattctttggcatctgggcc

SEQ ID NO: 164887 - DNA, 25 bp, Saccharomyces pastorianus
ggtacttcaatgttctgtgtcgttc

SEQ ID NO: 164888 - DNA, 25 bp, Saccharomyces pastorianus
ccatgattgccataggtggtacttt

SEQ ID NO: 164889 - DNA, 25 bp, Saccharomyces pastorianus
gagccaaaggcacttgaccatgatt

SEQ ID NO: 164890 - DNA, 25 bp, Saccharomyces pastorianus
agatgtgctgcgatgttcgatattc

SEQ ID NO: 164891 - DNA, 25 bp, Saccharomyces pastorianus
tggtttcgccctcacagacttcgta

SEQ ID NO: 164892 - DNA, 25 bp, Saccharomyces pastorianus
ttcgatattctagctgtgtgtccag

SEQ ID NO: 164893 - DNA, 25 bp, Saccharomyces pastorianus
gagtaacaattattcacgcatatgg

SEQ ID NO: 164894 - DNA, 25 bp, Saccharomyces pastorianus
gtttcggttttttcaaatggccatg

SEQ ID NO: 164895 - DNA, 25 bp, Saccharomyces pastorianus
aaagttatcttcagttcttcgcctg

SEQ ID NO: 164896 - DNA, 25 bp, Saccharomyces pastorianus
tgggagccatccttcagaataaaag

SEQ ID NO: 164897 - DNA, 25 bp, Saccharomyces pastorianus
tgtgtccagcccgagtaacaattat

SEQ ID NO: 164898 - DNA, 25 bp, Saccharomyces pastorianus
atgtccaggatggtttcgccctcac

SEQ ID NO: 164899 - DNA, 25 bp, Saccharomyces pastorianus
acttcgtacgtcttctgggagccat

SEQ ID NO: 164900 - DNA, 25 bp, Saccharomyces pastorianus
tcagttcttcgcctggtttcggttt

SEQ ID NO: 164901 - DNA, 25 bp, Saccharomyces pastorianus
gcaaggctcttacaagttttcacaa

SEQ ID NO: 164902 - DNA, 25 bp, Saccharomyces pastorianus
tcattgggcttgaatagggacctcc

SEQ ID NO: 164903 - DNA, 25 bp, Saccharomyces pastorianus
aattgtccctgctttatggtcgatc

SEQ ID NO: 164904 - DNA, 25 bp, Saccharomyces pastorianus
gtcgatccattcagctttctcagaa

SEQ ID NO: 164905 - DNA, 25 bp, Saccharomyces pastorianus
aagacgccgaatttggtggtctgtc

SEQ ID NO: 164906 - DNA, 25 bp, Saccharomyces pastorianus
tttctcagaatacaatctccttccc

SEQ ID NO: 164907 - DNA, 25 bp, Saccharomyces pastorianus
aggaggtttcgagacaggcaccaaa

SEQ ID NO: 164908 - DNA, 25 bp, Saccharomyces pastorianus
gtctgtctactcttgggagatccaa

SEQ ID NO: 164909 - DNA, 25 bp, Saccharomyces pastorianus
tcttctgtcgacgatgtgcagcgta

SEQ ID NO: 164910 - DNA, 25 bp, Saccharomyces pastorianus
atgtgcagcgtaccacaacaggtcc

SEQ ID NO: 164911 - DNA, 25 bp, Saccharomyces pastorianus
gttgaaggaacacccttggctatcc

SEQ ID NO: 164912 - DNA, 25 bp, Saccharomyces pastorianus
tcctgtggttatgagtggtatctta

SEQ ID NO: 164913 - DNA, 25 bp, Saccharomyces pastorianus
ctctgtgtgggatttgcctgtttga

SEQ ID NO: 164914 - DNA, 25 bp, Saccharomyces pastorianus
tgccattggtacagctaagtcaggt

SEQ ID NO: 164915 - DNA, 25 bp, Saccharomyces pastorianus
atctcctaccgaagactatactctc

SEQ ID NO: 164916 - DNA, 25 bp, Saccharomyces pastorianus
gtatcgccggtataggtactttcaa

SEQ ID NO: 164917 - DNA, 25 bp, Saccharomyces pastorianus
catgaagtcattgattcctgtggtt

SEQ ID NO: 164918 - DNA, 25 bp, Saccharomyces pastorianus
tgcacttgagttgtgggctctgtgt

SEQ ID NO: 164919 - DNA, 25 bp, Saccharomyces pastorianus
gtcaggtattggtatcgccggtata

SEQ ID NO: 164920 - DNA, 25 bp, Saccharomyces pastorianus
tcctgtttgggagctgccattggta

SEQ ID NO: 164921 - DNA, 25 bp, Saccharomyces pastorianus
gccattgtatggtcggtgacgttga

SEQ ID NO: 164922 - DNA, 25 bp, Saccharomyces pastorianus
caatgggttcatgcacttgagttgt

SEQ ID NO: 164923 - DNA, 25 bp, Saccharomyces pastorianus
ttaaggcactccctggacaacttcg

SEQ ID NO: 164924 - DNA, 25 bp, Saccharomyces pastorianus
atttttgaagcttatccaggactac

SEQ ID NO: 164925 - DNA, 25 bp, Saccharomyces pastorianus
gaagtccaggcaaggcaccaagagt

SEQ ID NO: 164926 - DNA, 25 bp, Saccharomyces pastorianus
gaagacgctcaactcgacgtagaac

SEQ ID NO: 164927 - DNA, 25 bp, Saccharomyces pastorianus
agtacgaccataccatcgaccaggt

SEQ ID NO: 164928 - DNA, 25 bp, Saccharomyces pastorianus
gcataagaggctactgaccgaagtt

SEQ ID NO: 164929 - DNA, 25 bp, Saccharomyces pastorianus
atccatggcagaacttactcaattg

SEQ ID NO: 164930 - DNA, 25 bp, Saccharomyces pastorianus
gagcaggcaagccacttaaggcact

SEQ ID NO: 164931 - DNA, 25 bp, Saccharomyces pastorianus
gcagatcttctcacaagcattgttg

SEQ ID NO: 164932 - DNA, 25 bp, Saccharomyces pastorianus
cgaccaggtcgattctttgcataag

SEQ ID NO: 164933 - DNA, 25 bp, Saccharomyces pastorianus
aagccacagacttgcagttcaaact

SEQ ID NO: 164934 - DNA, 25 bp, Saccharomyces pastorianus
taaatccaccagtttcttcacaatg

SEQ ID NO: 164935 - DNA, 25 bp, Saccharomyces pastorianus
gtgttttcactgagcttgatgccca

SEQ ID NO: 164936 - DNA, 25 bp, Saccharomyces pastorianus
aacgcctaatattgatgcatctttg

SEQ ID NO: 164937 - DNA, 25 bp, Saccharomyces pastorianus
gtgttattattgatgcgaaaggccc

SEQ ID NO: 164938 - DNA, 25 bp, Saccharomyces pastorianus
tacaggactgggtttatgctacaat

SEQ ID NO: 164939 - DNA, 25 bp, Saccharomyces pastorianus
caattgctcctgaactaagatcctt

SEQ ID NO: 164940 - DNA, 25 bp, Saccharomyces pastorianus
gagaaaagacatgtagcccagctac

SEQ ID NO: 164941 - DNA, 25 bp, Saccharomyces pastorianus
ttgatgcccatctaacgcctaatat

SEQ ID NO: 164942 - DNA, 25 bp, Saccharomyces pastorianus
tgaatgaaatatctgcgtcttccaa

SEQ ID NO: 164943 - DNA, 25 bp, Saccharomyces pastorianus
ctatagagtcggactatccacgcaa

SEQ ID NO: 164944 - DNA, 25 bp, Saccharomyces pastorianus
gtcttccaagcccagtaagtacaag

SEQ ID NO: 164945 - DNA, 25 bp, Saccharomyces pastorianus
aactgcttgatgtacggtttccata

SEQ ID NO: 164946 - DNA, 25 bp, Saccharomyces pastorianus
tcatcttcggcatcaggtctatcaa

SEQ ID NO: 164947 - DNA, 25 bp, Saccharomyces pastorianus
atggtaaataccgaagccgtcataa

SEQ ID NO: 164948 - DNA, 25 bp, Saccharomyces pastorianus
ttgccgatgctgatggtgctagtaa

SEQ ID NO: 164949 - DNA, 25 bp, Saccharomyces pastorianus
gtggcgcagtgagacaaggtttttt

SEQ ID NO: 164950 - DNA, 25 bp, Saccharomyces pastorianus
gatggctctaagatggctttagcta

SEQ ID NO: 164951 - DNA, 25 bp, Saccharomyces pastorianus
gtaagtatggtctttttgccgatgc

SEQ ID NO: 164952 - DNA, 25 bp, Saccharomyces pastorianus
aattgttcaacagagccgctatatt

SEQ ID NO: 164953 - DNA, 25 bp, Saccharomyces pastorianus
ggtttccataccttagttttcatct

SEQ ID NO: 164954 - DNA, 25 bp, Saccharomyces pastorianus
gacgttgaaattttgatcttagcca

SEQ ID NO: 164955 - DNA, 25 bp, Saccharomyces pastorianus
cagcagtagcaattggttccagagc

SEQ ID NO: 164956 - DNA, 25 bp, Saccharomyces pastorianus
ttgaccaatctataccacctactga

SEQ ID NO: 164957 - DNA, 25 bp, Saccharomyces pastorianus
gttgatgtaacctctgactctaaag

SEQ ID NO: 164958 - DNA, 25 bp, Saccharomyces pastorianus
gatttggagcactctcatgacacta

SEQ ID NO: 164959 - DNA, 25 bp, Saccharomyces pastorianus
ttcgtgccaccacaactttggaagt

SEQ ID NO: 164960 - DNA, 25 bp, Saccharomyces pastorianus
cgttggtcgctatcacatctagtta

SEQ ID NO: 164961 - DNA, 25 bp, Saccharomyces pastorianus
ctactgatccgcgttatctagaaat

SEQ ID NO: 164962 - DNA, 25 bp, Saccharomyces pastorianus
ggacaaggtatcttatcctcactga

SEQ ID NO: 164963 - DNA, 25 bp, Saccharomyces pastorianus
tgccagtattacattcaggtcagga

SEQ ID NO: 164964 - DNA, 25 bp, Saccharomyces pastorianus
gactccttgacatcgttggtagcgt

SEQ ID NO: 164965 - DNA, 25 bp, Saccharomyces pastorianus
gcatcatcgtgttgactccttgaca

SEQ ID NO: 164966 - DNA, 25 bp, Saccharomyces pastorianus
gagaccttactatattagcttccgg

SEQ ID NO: 164967 - DNA, 25 bp, Saccharomyces pastorianus
aagtactagtgacgctctggtgtct

SEQ ID NO: 164968 - DNA, 25 bp, Saccharomyces pastorianus
gacgctctggtgtctaatatgcaca

SEQ ID NO: 164969 - DNA, 25 bp, Saccharomyces pastorianus
agtgacgctctggtgtctaatatgc

SEQ ID NO: 164970 - DNA, 25 bp, Saccharomyces pastorianus
gctctggtgtctaatatgcacatgc

SEQ ID NO: 164971 - DNA, 25 bp, Saccharomyces pastorianus
ctagtgacgctctggtgtctaatat

SEQ ID NO: 164972 - DNA, 25 bp, Saccharomyces pastorianus
gtgacgctctggtgtctaatatgca

SEQ ID NO: 164973 - DNA, 25 bp, Saccharomyces pastorianus
gtactagtgacgctctggtgtctaa

SEQ ID NO: 164974 - DNA, 25 bp, Saccharomyces pastorianus
atgcaagtactagtgacgctctggt

SEQ ID NO: 164975 - DNA, 25 bp, Saccharomyces pastorianus
actagtgacgctctggtgtctaata

SEQ ID NO: 164976 - DNA, 25 bp, Saccharomyces pastorianus
gcaagtactagtgacgctctggtgt

SEQ ID NO: 164977 - DNA, 25 bp, Saccharomyces pastorianus
acgctctggtgtctaatatgcacat

SEQ ID NO: 164978 - DNA, 25 bp, Saccharomyces pastorianus
ggacctggaatatcggtaagctgat

SEQ ID NO: 164979 - DNA, 25 bp, Saccharomyces pastorianus
gtttgttccatatttcgacaccttc

SEQ ID NO: 164980 - DNA, 25 bp, Saccharomyces pastorianus
gttttcctgggaaagaacagcggca

SEQ ID NO: 164981 - DNA, 25 bp, Saccharomyces pastorianus
gcagggtgccgaaaaattagctttg

SEQ ID NO: 164982 - DNA, 25 bp, Saccharomyces pastorianus
ggcaataaagaccatgcagttgatt

SEQ ID NO: 164983 - DNA, 25 bp, Saccharomyces pastorianus
aatcaaagagcgattcctcggcgca

SEQ ID NO: 164984 - DNA, 25 bp, Saccharomyces pastorianus
taagctgatatacatggacaacatt

SEQ ID NO: 164985 - DNA, 25 bp, Saccharomyces pastorianus
cctcggcgcaggcattttaggtaat

SEQ ID NO: 164986 - DNA, 25 bp, Saccharomyces pastorianus
gaactatacggcgattttgaagatc

SEQ ID NO: 164987 - DNA, 25 bp, Saccharomyces pastorianus
ataataccggtgagcagggtgccga

SEQ ID NO: 164988 - DNA, 25 bp, Saccharomyces pastorianus
gatggaaacccttctgaacaagcag

SEQ ID NO: 164989 - DNA, 25 bp, Saccharomyces pastorianus
gaggcaaggctaacggagaaattac

SEQ ID NO: 164990 - DNA, 25 bp, Saccharomyces pastorianus
aacggagaaattacaactgcctcta

SEQ ID NO: 164991 - DNA, 25 bp, Saccharomyces pastorianus
acaactgcctctacgacgagaagac

SEQ ID NO: 164992 - DNA, 25 bp, Saccharomyces pastorianus
aattacaactgcctctacgacgaga

SEQ ID NO: 164993 - DNA, 25 bp, Saccharomyces pastorianus
gaaattacaactgcctctacgacga

SEQ ID NO: 164994 - DNA, 25 bp, Saccharomyces pastorianus
gagaaattacaactgcctctacgac

SEQ ID NO: 164995 - DNA, 25 bp, Saccharomyces pastorianus
ggagaaattacaactgcctctacga

SEQ ID NO: 164996 - DNA, 25 bp, Saccharomyces pastorianus
ttacaactgcctctacgacgagaag

SEQ ID NO: 164997 - DNA, 25 bp, Saccharomyces pastorianus
acgagaagacgtaaaaggttagatg

SEQ ID NO: 164998 - DNA, 25 bp, Saccharomyces pastorianus
gctaacggagaaattacaactgcct

SEQ ID NO: 164999 - DNA, 25 bp, Saccharomyces pastorianus
aagaggcaaggctaacggagaaatt

SEQ ID NO: 165000 - DNA, 25 bp, Saccharomyces pastorianus
gttggtgatttctcagtagcacaaa

SEQ ID NO: 165001 - DNA, 25 bp, Saccharomyces pastorianus
tgctccgggcactagggtgcatatt

SEQ ID NO: 165002 - DNA, 25 bp, Saccharomyces pastorianus
gattgccgacttggttcttttacta

SEQ ID NO: 165003 - DNA, 25 bp, Saccharomyces pastorianus
ccgcaaagtcgctatctatggttat

SEQ ID NO: 165004 - DNA, 25 bp, Saccharomyces pastorianus
gccctgcggacgatctgaatgcgat

SEQ ID NO: 165005 - DNA, 25 bp, Saccharomyces pastorianus
gaacatccctatatgttggctgaca

SEQ ID NO: 165006 - DNA, 25 bp, Saccharomyces pastorianus
gattcacagatttaactcatccgga

SEQ ID NO: 165007 - DNA, 25 bp, Saccharomyces pastorianus
acttttttggagtgccctgcggacg

SEQ ID NO: 165008 - DNA, 25 bp, Saccharomyces pastorianus
atctatggttatttgcacggtactc

SEQ ID NO: 165009 - DNA, 25 bp, Saccharomyces pastorianus
gagagattttaaacctttcacgatt

SEQ ID NO: 165010 - DNA, 25 bp, Saccharomyces pastorianus
tgctcaacatcacggtatgccaaga

SEQ ID NO: 165011 - DNA, 25 bp, Saccharomyces pastorianus
agacaacttgtacatccaacggcca

SEQ ID NO: 165012 - DNA, 25 bp, Saccharomyces pastorianus
caacggccaacatttttccaacatg

SEQ ID NO: 165013 - DNA, 25 bp, Saccharomyces pastorianus
aaagacgtagctcaccttggagaat

SEQ ID NO: 165014 - DNA, 25 bp, Saccharomyces pastorianus
ctactctctcatcatcaatgggctt

SEQ ID NO: 165015 - DNA, 25 bp, Saccharomyces pastorianus
gaaactccagaaaagctcctactct

SEQ ID NO: 165016 - DNA, 25 bp, Saccharomyces pastorianus
atatttaggtcgacagacgggtctt

SEQ ID NO: 165017 - DNA, 25 bp, Saccharomyces pastorianus
aacggtatcttaatgaggccaacta

SEQ ID NO: 165018 - DNA, 25 bp, Saccharomyces pastorianus
aggccaactattccggcattcatag

SEQ ID NO: 165019 - DNA, 25 bp, Saccharomyces pastorianus
acgggtcttactatcaaactgctca

SEQ ID NO: 165020 - DNA, 25 bp, Saccharomyces pastorianus
aacgagttcacgtttcctgaactga

SEQ ID NO: 165021 - DNA, 25 bp, Saccharomyces pastorianus
catcaatgggctttcttcaacgata

SEQ ID NO: 165022 - DNA, 25 bp, Saccharomyces pastorianus
gatgtgccattagggttcggtgtca

SEQ ID NO: 165023 - DNA, 25 bp, Saccharomyces pastorianus
tgttttcgaaaaactcgccggctat

SEQ ID NO: 165024 - DNA, 25 bp, Saccharomyces pastorianus
attacgtacccgatcatgttgcaaa

SEQ ID NO: 165025 - DNA, 25 bp, Saccharomyces pastorianus
aggttacatattacttctttgacag

SEQ ID NO: 165026 - DNA, 25 bp, Saccharomyces pastorianus
cacgccggtgttattgtgtttgcaa

SEQ ID NO: 165027 - DNA, 25 bp, Saccharomyces pastorianus
aactcgccggctatattggtagaaa

SEQ ID NO: 165028 - DNA, 25 bp, Saccharomyces pastorianus
taaagaacttcctcatgtcttcaga

SEQ ID NO: 165029 - DNA, 25 bp, Saccharomyces pastorianus
cggtgtcagtgcgaaaagtacttct

SEQ ID NO: 165030 - DNA, 25 bp, Saccharomyces pastorianus
gggagatgccattcttatacggtaa

SEQ ID NO: 165031 - DNA, 25 bp, Saccharomyces pastorianus
cctaacttgatgtctctgggtattt

SEQ ID NO: 165032 - DNA, 25 bp, Saccharomyces pastorianus
agaaacatgcaacccactggtatag

SEQ ID NO: 165033 - DNA, 25 bp, Saccharomyces pastorianus
agagaagctcgatttgaacaaacaa

SEQ ID NO: 165034 - DNA, 25 bp, Saccharomyces pastorianus
ggatgctgttcctcaaaggtggaaa

SEQ ID NO: 165035 - DNA, 25 bp, Saccharomyces pastorianus
gaggttttcgatagcgctggtcatt

SEQ ID NO: 165036 - DNA, 25 bp, Saccharomyces pastorianus
agcgctggtcattatagtaggttat

SEQ ID NO: 165037 - DNA, 25 bp, Saccharomyces pastorianus
gtgcgttaaccgctgcatatttata

SEQ ID NO: 165038 - DNA, 25 bp, Saccharomyces pastorianus
aaactggcggatgttgttctgataa

SEQ ID NO: 165039 - DNA, 25 bp, Saccharomyces pastorianus
ttttcgtgtagctggtgcgttagta

SEQ ID NO: 165040 - DNA, 25 bp, Saccharomyces pastorianus
gttagtagttggtgcgttaaccgct

SEQ ID NO: 165041 - DNA, 25 bp, Saccharomyces pastorianus
ccagcggtggtagtcaagatagtca

SEQ ID NO: 165042 - DNA, 25 bp, Saccharomyces pastorianus
aaaaagccatgttgcagtgataaga

SEQ ID NO: 165043 - DNA, 25 bp, Saccharomyces pastorianus
tttattgcaatgaagccagcggtgg

SEQ ID NO: 165044 - DNA, 25 bp, Saccharomyces pastorianus
gctcttcaatatcgcgtccagtaga

SEQ ID NO: 165045 - DNA, 25 bp, Saccharomyces pastorianus
ggtggcaggagaattttccccttag

SEQ ID NO: 165046 - DNA, 25 bp, Saccharomyces pastorianus
tgccctctagattatttcttacaaa

SEQ ID NO: 165047 - DNA, 25 bp, Saccharomyces pastorianus
aagggccgatcactggatttctcgt

SEQ ID NO: 165048 - DNA, 25 bp, Saccharomyces pastorianus
ggacatcattgttagcagagacttt

SEQ ID NO: 165049 - DNA, 25 bp, Saccharomyces pastorianus
gacagtccaacgtacaagaacttga

SEQ ID NO: 165050 - DNA, 25 bp, Saccharomyces pastorianus
agagtagatagtttcccattacgaa

SEQ ID NO: 165051 - DNA, 25 bp, Saccharomyces pastorianus
tattggttcccattcaggcgttaag

SEQ ID NO: 165052 - DNA, 25 bp, Saccharomyces pastorianus
aattggttggctacacagttttggg

SEQ ID NO: 165053 - DNA, 25 bp, Saccharomyces pastorianus
gcgttaagatctgccgatggactaa

SEQ ID NO: 165054 - DNA, 25 bp, Saccharomyces pastorianus
tttccccttaggcaaagtttgtatg

SEQ ID NO: 165055 - DNA, 25 bp, Saccharomyces pastorianus
cacgtttagtggctcatctgatggg

SEQ ID NO: 165056 - DNA, 25 bp, Saccharomyces pastorianus
gaatggtaatcctttgacaatgcag

SEQ ID NO: 165057 - DNA, 25 bp, Saccharomyces pastorianus
cattgaagttaaaggcgccacgttt

SEQ ID NO: 165058 - DNA, 25 bp, Saccharomyces pastorianus
agatctggtccaacgtggtttacca

SEQ ID NO: 165059 - DNA, 25 bp, Saccharomyces pastorianus
ttacattacgacttggctgccgaac

SEQ ID NO: 165060 - DNA, 25 bp, Saccharomyces pastorianus
tttttcgtattgctaaactcgggca

SEQ ID NO: 165061 - DNA, 25 bp, Saccharomyces pastorianus
gaacatgcgcattccaactgtttat

SEQ ID NO: 165062 - DNA, 25 bp, Saccharomyces pastorianus
aaagacacccgaatgggcattgttt

SEQ ID NO: 165063 - DNA, 25 bp, Saccharomyces pastorianus
cagtgcatatgcagatctggtccaa

SEQ ID NO: 165064 - DNA, 25 bp, Saccharomyces pastorianus
ttgtgaaggcgtttaccacggaatt

SEQ ID NO: 165065 - DNA, 25 bp, Saccharomyces pastorianus
ggcaaagacttcacgtacatggact

SEQ ID NO: 165066 - DNA, 25 bp, Saccharomyces pastorianus
gtttttctgcaatatccagaggctt

SEQ ID NO: 165067 - DNA, 25 bp, Saccharomyces pastorianus
gctgatgatttgttcactatgctaa

SEQ ID NO: 165068 - DNA, 25 bp, Saccharomyces pastorianus
gatattcggcaaaggttacgtcctt

SEQ ID NO: 165069 - DNA, 25 bp, Saccharomyces pastorianus
gggtatttggctgcatcacaatctt

SEQ ID NO: 165070 - DNA, 25 bp, Saccharomyces pastorianus
tacggttttgacatggcttggtgca

SEQ ID NO: 165071 - DNA, 25 bp, Saccharomyces pastorianus
ggcattgctttaagtggtctttcca

SEQ ID NO: 165072 - DNA, 25 bp, Saccharomyces pastorianus
gattctgacattttgatgcttgcaa

SEQ ID NO: 165073 - DNA, 25 bp, Saccharomyces pastorianus
gtctttccactataattacaccctc

SEQ ID NO: 165074 - DNA, 25 bp, Saccharomyces pastorianus
agaaggccattaccgcactatttaa

SEQ ID NO: 165075 - DNA, 25 bp, Saccharomyces pastorianus
gaccaatgccgttcttaaattgacc

SEQ ID NO: 165076 - DNA, 25 bp, Saccharomyces pastorianus
gctaaacagcacaagaccgtacata

SEQ ID NO: 165077 - DNA, 25 bp, Saccharomyces pastorianus
caaactggaagcatcgtatacgaaa

SEQ ID NO: 165078 - DNA, 25 bp, Saccharomyces pastorianus
tattagctgcatattgttttacaag

SEQ ID NO: 165079 - DNA, 25 bp, Saccharomyces pastorianus
tatatcgatttgttcagctgacaac

SEQ ID NO: 165080 - DNA, 25 bp, Saccharomyces pastorianus
ttactctccgatgtcgacgtttcta

SEQ ID NO: 165081 - DNA, 25 bp, Saccharomyces pastorianus
aaggcaattgtccaaacattgatga

SEQ ID NO: 165082 - DNA, 25 bp, Saccharomyces pastorianus
ttgaaacagcaatggcatgcctgga

SEQ ID NO: 165083 - DNA, 25 bp, Saccharomyces pastorianus
gatgtcgacgtttctattagatcaa

SEQ ID NO: 165084 - DNA, 25 bp, Saccharomyces pastorianus
gatgtggttatcctacaaactggaa

SEQ ID NO: 165085 - DNA, 25 bp, Saccharomyces pastorianus
actgattatacgcttactctccgat

SEQ ID NO: 165086 - DNA, 25 bp, Saccharomyces pastorianus
atggtgaacgtcattatatcgattt

SEQ ID NO: 165087 - DNA, 25 bp, Saccharomyces pastorianus
aatggcatgcctggaaagattgcac

SEQ ID NO: 165088 - DNA, 25 bp, Saccharomyces pastorianus
aagtgaggccctcagtgatttactg

SEQ ID NO: 165089 - DNA, 25 bp, Saccharomyces pastorianus
tgcgcgtgggactcaattgaagcta

SEQ ID NO: 165090 - DNA, 25 bp, Saccharomyces pastorianus
gtctcggagaattttctaccctagt

SEQ ID NO: 165091 - DNA, 25 bp, Saccharomyces pastorianus
gaatgcatttggtgtctcggagaat

SEQ ID NO: 165092 - DNA, 25 bp, Saccharomyces pastorianus
gaactcgcaccaattgcgcgtggga

SEQ ID NO: 165093 - DNA, 25 bp, Saccharomyces pastorianus
tactgagcgaagtcctgcctagttt

SEQ ID NO: 165094 - DNA, 25 bp, Saccharomyces pastorianus
aacagttgcctaccgtattgagaga

SEQ ID NO: 165095 - DNA, 25 bp, Saccharomyces pastorianus
aggcagctgatgaactcttagatga

SEQ ID NO: 165096 - DNA, 25 bp, Saccharomyces pastorianus
gaaggtctaccaatgctactgagcg

SEQ ID NO: 165097 - DNA, 25 bp, Saccharomyces pastorianus
ttttaacgcctatgaactcgcacca

SEQ ID NO: 165098 - DNA, 25 bp, Saccharomyces pastorianus
gatctagaaactccatttttgacaa

SEQ ID NO: 165099 - DNA, 25 bp, Saccharomyces pastorianus
actcaagcgcagacgatggaatcga

SEQ ID NO: 165100 - DNA, 25 bp, Saccharomyces pastorianus
gtccgtcgatagtaactctaacgag

SEQ ID NO: 165101 - DNA, 25 bp, Saccharomyces pastorianus
tcacctgaactgtccgtcgatagta

SEQ ID NO: 165102 - DNA, 25 bp, Saccharomyces pastorianus
gatgaataactcaagcgcagacgat

SEQ ID NO: 165103 - DNA, 25 bp, Saccharomyces pastorianus
acaacagttcggtaggctcagatag

SEQ ID NO: 165104 - DNA, 25 bp, Saccharomyces pastorianus
ggaatcgaatttgacgccccagagg

SEQ ID NO: 165105 - DNA, 25 bp, Saccharomyces pastorianus
ggtaggctcagatagttccgctgaa

SEQ ID NO: 165106 - DNA, 25 bp, Saccharomyces pastorianus
gatgttcaagatattccttcacctg

SEQ ID NO: 165107 - DNA, 25 bp, Saccharomyces pastorianus
agatattccttcacctgaactgtcc

SEQ ID NO: 165108 - DNA, 25 bp, Saccharomyces pastorianus
gatgaaaaccataacagtgatgttc

SEQ ID NO: 165109 - DNA, 25 bp, Saccharomyces pastorianus
acgaactggaagatgtgaacgatga

SEQ ID NO: 165110 - DNA, 25 bp, Saccharomyces pastorianus
tatgcagcctatttgcacggtgaaa

SEQ ID NO: 165111 - DNA, 25 bp, Saccharomyces pastorianus
aaattctgacacagctctttccgta

SEQ ID NO: 165112 - DNA, 25 bp, Saccharomyces pastorianus
gacgtatgagatttcctagggcgga

SEQ ID NO: 165113 - DNA, 25 bp, Saccharomyces pastorianus
acatgctaaatttgcctcagtttca

SEQ ID NO: 165114 - DNA, 25 bp, Saccharomyces pastorianus
tttccgtacctcctcatgatagtac

SEQ ID NO: 165115 - DNA, 25 bp, Saccharomyces pastorianus
agaaaacctccattgtcagatgccc

SEQ ID NO: 165116 - DNA, 25 bp, Saccharomyces pastorianus
ggatttatctaagccgattaccgaa

SEQ ID NO: 165117 - DNA, 25 bp, Saccharomyces pastorianus
gatgcacaatattcctccgaagtca

SEQ ID NO: 165118 - DNA, 25 bp, Saccharomyces pastorianus
agaacacgaccgttatgcagcctat

SEQ ID NO: 165119 - DNA, 25 bp, Saccharomyces pastorianus
gcctcagtttcaacatttacctcaa

SEQ ID NO: 165120 - DNA, 25 bp, Saccharomyces pastorianus
tactatctcaacaacagctagcgcc

SEQ ID NO: 165121 - DNA, 25 bp, Saccharomyces pastorianus
gtcttccgccggatgatcaaataca

SEQ ID NO: 165122 - DNA, 25 bp, Saccharomyces pastorianus
atcactgccaaatttttatcccatt

SEQ ID NO: 165123 - DNA, 25 bp, Saccharomyces pastorianus
aattggtaaactccccagcgatctt

SEQ ID NO: 165124 - DNA, 25 bp, Saccharomyces pastorianus
tttatcccattttcacatagttccc

SEQ ID NO: 165125 - DNA, 25 bp, Saccharomyces pastorianus
ggtgaccattatttagttgctttgc

SEQ ID NO: 165126 - DNA, 25 bp, Saccharomyces pastorianus
gttgctttgcctatcttaatgttac

SEQ ID NO: 165127 - DNA, 25 bp, Saccharomyces pastorianus
agcgatcttcaactctggaaagtct

SEQ ID NO: 165128 - DNA, 25 bp, Saccharomyces pastorianus
aactctggaaagtcttccgccggat

SEQ ID NO: 165129 - DNA, 25 bp, Saccharomyces pastorianus
ttatctgtatgtacaccgtattggt

SEQ ID NO: 165130 - DNA, 25 bp, Saccharomyces pastorianus
ccgtattggtggaacatcactgcca

SEQ ID NO: 165131 - DNA, 25 bp, Saccharomyces pastorianus
gtatctttaaccctttacactgtgg

SEQ ID NO: 165132 - DNA, 25 bp, Saccharomyces pastorianus
tgtatcaacagtccagttcttctgg

SEQ ID NO: 165133 - DNA, 25 bp, Saccharomyces pastorianus
gagcctaatgattcgttcttttacg

SEQ ID NO: 165134 - DNA, 25 bp, Saccharomyces pastorianus
tgatggcatgtcacccactattatg

SEQ ID NO: 165135 - DNA, 25 bp, Saccharomyces pastorianus
atccgactttacacgagagcctaat

SEQ ID NO: 165136 - DNA, 25 bp, Saccharomyces pastorianus
tttccttcttccgatgactttgcaa

SEQ ID NO: 165137 - DNA, 25 bp, Saccharomyces pastorianus
gaaacttatgcgagtggccctcaaa

SEQ ID NO: 165138 - DNA, 25 bp, Saccharomyces pastorianus
ggtcatctaatgaagtctctccttt

SEQ ID NO: 165139 - DNA, 25 bp, Saccharomyces pastorianus
cagcgtattcaacagcaaccaactc

SEQ ID NO: 165140 - DNA, 25 bp, Saccharomyces pastorianus
tcttctggcccttaccaagaaactt

SEQ ID NO: 165141 - DNA, 25 bp, Saccharomyces pastorianus
aactttggcgatgctgtgtatccta

SEQ ID NO: 165142 - DNA, 25 bp, Saccharomyces pastorianus
gagtggccctcaaaactttggcgat

SEQ ID NO: 165143 - DNA, 25 bp, Saccharomyces pastorianus
aatgatagctgtaacctccgggaat

SEQ ID NO: 165144 - DNA, 25 bp, Saccharomyces pastorianus
cttcaactgaagagacacggcgatg

SEQ ID NO: 165145 - DNA, 25 bp, Saccharomyces pastorianus
ttacaatccccaaatcctcgagaga

SEQ ID NO: 165146 - DNA, 25 bp, Saccharomyces pastorianus
gtaattgctatcacttcattgggta

SEQ ID NO: 165147 - DNA, 25 bp, Saccharomyces pastorianus
gtgacatccttcttatcaaatttag

SEQ ID NO: 165148 - DNA, 25 bp, Saccharomyces pastorianus
gatagcgctgacataattgagaccg

SEQ ID NO: 165149 - DNA, 25 bp, Saccharomyces pastorianus
aaatatcgctgtcttttccaataat

SEQ ID NO: 165150 - DNA, 25 bp, Saccharomyces pastorianus
aatggttttcattcggtgtaattgc

SEQ ID NO: 165151 - DNA, 25 bp, Saccharomyces pastorianus
tgactccttcctattgactttacaa

SEQ ID NO: 165152 - DNA, 25 bp, Saccharomyces pastorianus
aagctgattgatcttcttcaactga

SEQ ID NO: 165153 - DNA, 25 bp, Saccharomyces pastorianus
gaatacgatgatgactccttcctat

SEQ ID NO: 165154 - DNA, 25 bp, Saccharomyces pastorianus
gcgtcaacagtatcacaccagtcaa

SEQ ID NO: 165155 - DNA, 25 bp, Saccharomyces pastorianus
aaagccatttagacagttttcgact

SEQ ID NO: 165156 - DNA, 25 bp, Saccharomyces pastorianus
aatagccgagcatgttatgcctgaa

SEQ ID NO: 165157 - DNA, 25 bp, Saccharomyces pastorianus
aagatcagcatcctttcatagtccg

SEQ ID NO: 165158 - DNA, 25 bp, Saccharomyces pastorianus
gttctgagtcttcgagatgcgcaag

SEQ ID NO: 165159 - DNA, 25 bp, Saccharomyces pastorianus
aaagtacccaatctgttctgagtct

SEQ ID NO: 165160 - DNA, 25 bp, Saccharomyces pastorianus
ataagcacaacgtttctcagaaatg

SEQ ID NO: 165161 - DNA, 25 bp, Saccharomyces pastorianus
gtgcataatacgctgctcagtccaa

SEQ ID NO: 165162 - DNA, 25 bp, Saccharomyces pastorianus
aacacatgatggcacgctggataat

SEQ ID NO: 165163 - DNA, 25 bp, Saccharomyces pastorianus
gaactgctggtttcggcctgaaacc

SEQ ID NO: 165164 - DNA, 25 bp, Saccharomyces pastorianus
gtaacatctcttaatgcgtcaacag

SEQ ID NO: 165165 - DNA, 25 bp, Saccharomyces pastorianus
tcgcatgggaaccttcggtctagta

SEQ ID NO: 165166 - DNA, 25 bp, Saccharomyces pastorianus
ctccatagaaaaacggagtatgtcc

SEQ ID NO: 165167 - DNA, 25 bp, Saccharomyces pastorianus
ggaacagtaagaatgttgacaatca

SEQ ID NO: 165168 - DNA, 25 bp, Saccharomyces pastorianus
tgggaaccttcggtctagtaccgag

SEQ ID NO: 165169 - DNA, 25 bp, Saccharomyces pastorianus
gtccgagttggcattttcgaacata

SEQ ID NO: 165170 - DNA, 25 bp, Saccharomyces pastorianus
cggagtatgtccgagttggcatttt

SEQ ID NO: 165171 - DNA, 25 bp, Saccharomyces pastorianus
gaatactcgcatgggaaccttcggt

SEQ ID NO: 165172 - DNA, 25 bp, Saccharomyces pastorianus
gttgacaatcaagtcagtctacccc

SEQ ID NO: 165173 - DNA, 25 bp, Saccharomyces pastorianus
tctaccccctatccaagttctattt

SEQ ID NO: 165174 - DNA, 25 bp, Saccharomyces pastorianus
tagtaccgaggaacaaaactatcct

SEQ ID NO: 165175 - DNA, 25 bp, Saccharomyces pastorianus
ttcgaacatagaatactcgcatggg

SEQ ID NO: 165176 - DNA, 25 bp, Saccharomyces pastorianus
aagggattccagttgcgatcgtttc

SEQ ID NO: 165177 - DNA, 25 bp, Saccharomyces pastorianus
ttatcttcgggccaaaactctgggt

SEQ ID NO: 165178 - DNA, 25 bp, Saccharomyces pastorianus
gttggtcatggaactacctactttc

SEQ ID NO: 165179 - DNA, 25 bp, Saccharomyces pastorianus
gagctcattgacgatccattcatcc

SEQ ID NO: 165180 - DNA, 25 bp, Saccharomyces pastorianus
cgatcgtttcatctccaggagtcat

SEQ ID NO: 165181 - DNA, 25 bp, Saccharomyces pastorianus
gaacccactatcattgccattaatc

SEQ ID NO: 165182 - DNA, 25 bp, Saccharomyces pastorianus
gactggacgccatatctagcgcaag

SEQ ID NO: 165183 - DNA, 25 bp, Saccharomyces pastorianus
tccctaataggcgttacccaatgtt

SEQ ID NO: 165184 - DNA, 25 bp, Saccharomyces pastorianus
gagaacatccgatctacacagtaga

SEQ ID NO: 165185 - DNA, 25 bp, Saccharomyces pastorianus
tgacgaagtctttttgggcacaaca

SEQ ID NO: 165186 - DNA, 25 bp, Saccharomyces pastorianus
gataatgttcaccagttcggcgact

SEQ ID NO: 165187 - DNA, 25 bp, Saccharomyces pastorianus
atgcaggtgttcaagttgacacaaa

SEQ ID NO: 165188 - DNA, 25 bp, Saccharomyces pastorianus
gttcaagttgacacaaatatgcaga

SEQ ID NO: 165189 - DNA, 25 bp, Saccharomyces pastorianus
taagcttacaggacacagttctagt

SEQ ID NO: 165190 - DNA, 25 bp, Saccharomyces pastorianus
acagttctagtcaacgagatgaagg

SEQ ID NO: 165191 - DNA, 25 bp, Saccharomyces pastorianus
cgcaatgcaggtgttcaagttgaca

SEQ ID NO: 165192 - DNA, 25 bp, Saccharomyces pastorianus
atgcgcaatgcaggtgttcaagttg

SEQ ID NO: 165193 - DNA, 25 bp, Saccharomyces pastorianus
acaggacacagttctagtcaacgag

SEQ ID NO: 165194 - DNA, 25 bp, Saccharomyces pastorianus
gcttacaggacacagttctagtcaa

SEQ ID NO: 165195 - DNA, 25 bp, Saccharomyces pastorianus
gacacagttctagtcaacgagatga

SEQ ID NO: 165196 - DNA, 25 bp, Saccharomyces pastorianus
gggaaactcaatttgcaaaaggcat

SEQ ID NO: 165197 - DNA, 25 bp, Saccharomyces pastorianus
tatgcagaatataagcttacaggac

SEQ ID NO: 165198 - DNA, 25 bp, Saccharomyces pastorianus
ataactatatttcctgagcaaccca

SEQ ID NO: 165199 - DNA, 25 bp, Saccharomyces pastorianus
aaaccgtttgaagaatatggagctc

SEQ ID NO: 165200 - DNA, 25 bp, Saccharomyces pastorianus
ttcgactcaaagaagtactggtcca

SEQ ID NO: 165201 - DNA, 25 bp, Saccharomyces pastorianus
gagggcaatttttcaaactcgttat

SEQ ID NO: 165202 - DNA, 25 bp, Saccharomyces pastorianus
gtcctctatcttaacgacacttttt

SEQ ID NO: 165203 - DNA, 25 bp, Saccharomyces pastorianus
gagcaacccagtcaacaaacaagtg

SEQ ID NO: 165204 - DNA, 25 bp, Saccharomyces pastorianus
tgcactgtttttgcgacaagattac

SEQ ID NO: 165205 - DNA, 25 bp, Saccharomyces pastorianus
aaactcgttattaagcgatcgcttg

SEQ ID NO: 165206 - DNA, 25 bp, Saccharomyces pastorianus
gattacaaacgtatttcttctttga

SEQ ID NO: 165207 - DNA, 25 bp, Saccharomyces pastorianus
ataaccctgtcctctatcttaacga

SEQ ID NO: 165208 - DNA, 25 bp, Saccharomyces pastorianus
gacacttttttcagatgcactgttt

SEQ ID NO: 165209 - DNA, 25 bp, Saccharomyces pastorianus
gaaggcagcacaagctttgaaaatt

SEQ ID NO: 165210 - DNA, 25 bp, Saccharomyces pastorianus
aagagagttacaattcagcgaaatc

SEQ ID NO: 165211 - DNA, 25 bp, Saccharomyces pastorianus
atgttaagaaggcagcacaagcttt

SEQ ID NO: 165212 - DNA, 25 bp, Saccharomyces pastorianus
aaggctgctgcaaggaatgttaaga

SEQ ID NO: 165213 - DNA, 25 bp, Saccharomyces pastorianus
atactgtcaaggctgctgcaaggaa

SEQ ID NO: 165214 - DNA, 25 bp, Saccharomyces pastorianus
gagttacaattcagcgaaatcgata

SEQ ID NO: 165215 - DNA, 25 bp, Saccharomyces pastorianus
ccatatggcgccaaaccggtaagga

SEQ ID NO: 165216 - DNA, 25 bp, Saccharomyces pastorianus
gaaaagccagaggatgtgtttgaaa

SEQ ID NO: 165217 - DNA, 25 bp, Saccharomyces pastorianus
gcgccaaaccggtaaggatatcttt

SEQ ID NO: 165218 - DNA, 25 bp, Saccharomyces pastorianus
gaaatcgatactgtcaaggctgctg

SEQ ID NO: 165219 - DNA, 25 bp, Saccharomyces pastorianus
atcgatactgtcaaggctgctgcaa

SEQ ID NO: 165220 - DNA, 25 bp, Saccharomyces pastorianus
gaaggcagcacaagctttgaaaatt

SEQ ID NO: 165221 - DNA, 25 bp, Saccharomyces pastorianus
gagagttacaattcagcgaaatcga

SEQ ID NO: 165222 - DNA, 25 bp, Saccharomyces pastorianus
atgttaagaaggcagcacaagcttt

SEQ ID NO: 165223 - DNA, 25 bp, Saccharomyces pastorianus
aaggctgctgcaaggaatgttaaga

SEQ ID NO: 165224 - DNA, 25 bp, Saccharomyces pastorianus
atactgtcaaggctgctgcaaggaa

SEQ ID NO: 165225 - DNA, 25 bp, Saccharomyces pastorianus
ttagcgcaatttctttcccatatgg

SEQ ID NO: 165226 - DNA, 25 bp, Saccharomyces pastorianus
gcgaaatcgatactgtcaaggctgc

SEQ ID NO: 165227 - DNA, 25 bp, Saccharomyces pastorianus
gaaaagccagaggatgtgtttgaaa

SEQ ID NO: 165228 - DNA, 25 bp, Saccharomyces pastorianus
ccatatggcgccaaaccggtaagga

SEQ ID NO: 165229 - DNA, 25 bp, Saccharomyces pastorianus
gcgccaaaccggtaaggatatcttt

SEQ ID NO: 165230 - DNA, 25 bp, Saccharomyces pastorianus
atcgatactgtcaaggctgctgcaa

SEQ ID NO: 165231 - DNA, 25 bp, Saccharomyces pastorianus
tgctgatgcagctcgtattgcgttt

SEQ ID NO: 165232 - DNA, 25 bp, Saccharomyces pastorianus
atttctttgatatcgcgtttgaaca

SEQ ID NO: 165233 - DNA, 25 bp, Saccharomyces pastorianus
ttgaaaagttcggtgctgatgcagc

SEQ ID NO: 165234 - DNA, 25 bp, Saccharomyces pastorianus
ttgccgatgcgggagatactgttga

SEQ ID NO: 165235 - DNA, 25 bp, Saccharomyces pastorianus
aattgcgcctcatttcgctgagtat

SEQ ID NO: 165236 - DNA, 25 bp, Saccharomyces pastorianus
ttgacgaatctaacgctaatgctgc

SEQ ID NO: 165237 - DNA, 25 bp, Saccharomyces pastorianus
aagctgctagggattactatcgtga

SEQ ID NO: 165238 - DNA, 25 bp, Saccharomyces pastorianus
acgctaatgctgctattctgagatt

SEQ ID NO: 165239 - DNA, 25 bp, Saccharomyces pastorianus
ctggctgctttggattacttgagaa

SEQ ID NO: 165240 - DNA, 25 bp, Saccharomyces pastorianus
tagataagggtgttctggctgcttt

SEQ ID NO: 165241 - DNA, 25 bp, Saccharomyces pastorianus
ttccacgtgcatccaaaccagtaga

SEQ ID NO: 165242 - DNA, 25 bp, Saccharomyces pastorianus
aatccacgcaggctactcaaaggtt

SEQ ID NO: 165243 - DNA, 25 bp, Saccharomyces pastorianus
agcaatccacgcaggctactcaaag

SEQ ID NO: 165244 - DNA, 25 bp, Saccharomyces pastorianus
gcaggctactcaaaggtttttgatt

SEQ ID NO: 165245 - DNA, 25 bp, Saccharomyces pastorianus
acagatcggcgaaaacattgtgtgc

SEQ ID NO: 165246 - DNA, 25 bp, Saccharomyces pastorianus
cacgggtcaaattcccatccgagat

SEQ ID NO: 165247 - DNA, 25 bp, Saccharomyces pastorianus
tccacgcaggctactcaaaggtttt

SEQ ID NO: 165248 - DNA, 25 bp, Saccharomyces pastorianus
tgtaccacgggtcaaattcccatcc

SEQ ID NO: 165249 - DNA, 25 bp, Saccharomyces pastorianus
aaacattgtgtgcagggtcatttgt

SEQ ID NO: 165250 - DNA, 25 bp, Saccharomyces pastorianus
ttttctcaagaacagatcggcgaaa

SEQ ID NO: 165251 - DNA, 25 bp, Saccharomyces pastorianus
cacgcaggctactcaaaggtttttg

SEQ ID NO: 165252 - DNA, 25 bp, Saccharomyces pastorianus
gcgaaaacattgtgtgcagggtcat

SEQ ID NO: 165253 - DNA, 25 bp, Saccharomyces pastorianus
agcaatccacgcaggctactcaaag

SEQ ID NO: 165254 - DNA, 25 bp, Saccharomyces pastorianus
aaaatattacacaacccacacagca

SEQ ID NO: 165255 - DNA, 25 bp, Saccharomyces pastorianus
gcaggctactcaaaggtttttgatt

SEQ ID NO: 165256 - DNA, 25 bp, Saccharomyces pastorianus
acagatcggcgaaaacattgtgtgc

SEQ ID NO: 165257 - DNA, 25 bp, Saccharomyces pastorianus
cacgggtcaaattcccatccgagat

SEQ ID NO: 165258 - DNA, 25 bp, Saccharomyces pastorianus
tccacgcaggctactcaaaggtttt

SEQ ID NO: 165259 - DNA, 25 bp, Saccharomyces pastorianus
tgtaccacgggtcaaattcccatcc

SEQ ID NO: 165260 - DNA, 25 bp, Saccharomyces pastorianus
aaaacattgtgtgcagggtcatttg

SEQ ID NO: 165261 - DNA, 25 bp, Saccharomyces pastorianus
cagggtcatttgtaccacgggtcaa

SEQ ID NO: 165262 - DNA, 25 bp, Saccharomyces pastorianus
ttttctcaagaacagatcggcgaaa

SEQ ID NO: 165263 - DNA, 25 bp, Saccharomyces pastorianus
cacgcaggctactcaaaggtttttg

SEQ ID NO: 165264 - DNA, 25 bp, Saccharomyces pastorianus
gatatctagatcaaacgctgctcat

SEQ ID NO: 165265 - DNA, 25 bp, Saccharomyces pastorianus
agtggaatcagtcgaccgccagagt

SEQ ID NO: 165266 - DNA, 25 bp, Saccharomyces pastorianus
gaagggcccagattttattggtatc

SEQ ID NO: 165267 - DNA, 25 bp, Saccharomyces pastorianus
tacacgttaacgatgtcacacctaa

SEQ ID NO: 165268 - DNA, 25 bp, Saccharomyces pastorianus
aaacgctgctcatcctaagctaaga

SEQ ID NO: 165269 - DNA, 25 bp, Saccharomyces pastorianus
gccagagtcccgatgacaacaaatt

SEQ ID NO: 165270 - DNA, 25 bp, Saccharomyces pastorianus
ttattggtatcgcttttcctatctg

SEQ ID NO: 165271 - DNA, 25 bp, Saccharomyces pastorianus
gccaagattcgcagtattctactca

SEQ ID NO: 165272 - DNA, 25 bp, Saccharomyces pastorianus
atactcactgtattgggctacacgt

SEQ ID NO: 165273 - DNA, 25 bp, Saccharomyces pastorianus
ttttcctatctggtgtcacactttt

SEQ ID NO: 165274 - DNA, 25 bp, Saccharomyces pastorianus
tattgatacggcatcttctacagat

SEQ ID NO: 165275 - DNA, 25 bp, Saccharomyces pastorianus
ttaccttccggtatcaaacttgatg

SEQ ID NO: 165276 - DNA, 25 bp, Saccharomyces pastorianus
gaaagaatcgccttggaaaagtaca

SEQ ID NO: 165277 - DNA, 25 bp, Saccharomyces pastorianus
gaggaagagtcttcatcaaacgaag

SEQ ID NO: 165278 - DNA, 25 bp, Saccharomyces pastorianus
gtctattgcttcagtcagaccaagt

SEQ ID NO: 165279 - DNA, 25 bp, Saccharomyces pastorianus
tagaattgccaaagacggtctagtt

SEQ ID NO: 165280 - DNA, 25 bp, Saccharomyces pastorianus
ctggcagagtacacggcgaatcgaa

SEQ ID NO: 165281 - DNA, 25 bp, Saccharomyces pastorianus
gtactttagatatagagccaattgc

SEQ ID NO: 165282 - DNA, 25 bp, Saccharomyces pastorianus
atccacgacaagttggtctattgct

SEQ ID NO: 165283 - DNA, 25 bp, Saccharomyces pastorianus
aattcacagaaattccacatgctgg

SEQ ID NO: 165284 - DNA, 25 bp, Saccharomyces pastorianus
gtacgcaatgtagtggatctgataa

SEQ ID NO: 165285 - DNA, 25 bp, Saccharomyces pastorianus
ggtaaatcctacaatcccaacaata

SEQ ID NO: 165286 - DNA, 25 bp, Saccharomyces pastorianus
caggtagaggctacttttctggtaa

SEQ ID NO: 165287 - DNA, 25 bp, Saccharomyces pastorianus
tcgcttctccctttgttgaattgga

SEQ ID NO: 165288 - DNA, 25 bp, Saccharomyces pastorianus
gacaggtctactttgtgttattgaa

SEQ ID NO: 165289 - DNA, 25 bp, Saccharomyces pastorianus
cccatttctaggtgagttgttcgtt

SEQ ID NO: 165290 - DNA, 25 bp, Saccharomyces pastorianus
tatgctggccgttactaaatggttc

SEQ ID NO: 165291 - DNA, 25 bp, Saccharomyces pastorianus
attgaccctgaagtcgagtcacccg

SEQ ID NO: 165292 - DNA, 25 bp, Saccharomyces pastorianus
gatgagagttatttggttaccccac

SEQ ID NO: 165293 - DNA, 25 bp, Saccharomyces pastorianus
ttgaaggtattcttgtcgcttctcc

SEQ ID NO: 165294 - DNA, 25 bp, Saccharomyces pastorianus
atatccaatcttcgacaggtctact

SEQ ID NO: 165295 - DNA, 25 bp, Saccharomyces pastorianus
taccccacctccattgcatattgaa

SEQ ID NO: 165296 - DNA, 25 bp, Saccharomyces pastorianus
gagtcacccgaattggcccgtatgc

SEQ ID NO: 165297 - DNA, 25 bp, Saccharomyces pastorianus
aaacaacttgttttgctgcatcacc

SEQ ID NO: 165298 - DNA, 25 bp, Saccharomyces pastorianus
aatattcgccacttgttctgatgac

SEQ ID NO: 165299 - DNA, 25 bp, Saccharomyces pastorianus
tcgcccgtttacacaatgatggagc

SEQ ID NO: 165300 - DNA, 25 bp, Saccharomyces pastorianus
atgatggagccatccacttctctaa

SEQ ID NO: 165301 - DNA, 25 bp, Saccharomyces pastorianus
ttctctaagttcagcatcgtccgga

SEQ ID NO: 165302 - DNA, 25 bp, Saccharomyces pastorianus
gctgcatcaccgtttgttgatacat

SEQ ID NO: 165303 - DNA, 25 bp, Saccharomyces pastorianus
atatacgtgcagttatcgctttagg

SEQ ID NO: 165304 - DNA, 25 bp, Saccharomyces pastorianus
gcccctttggattctaaacgattct

SEQ ID NO: 165305 - DNA, 25 bp, Saccharomyces pastorianus
gagaaggtgtcaaatcgcccgttta

SEQ ID NO: 165306 - DNA, 25 bp, Saccharomyces pastorianus
agttcatcacttttatagcgagcaa

SEQ ID NO: 165307 - DNA, 25 bp, Saccharomyces pastorianus
gtacaatacctgttcctggcataaa

SEQ ID NO: 165308 - DNA, 25 bp, Saccharomyces pastorianus
gaagatgtcaaattcaagactttag

SEQ ID NO: 165309 - DNA, 25 bp, Saccharomyces pastorianus
gcctcctcttcatatatgactgaat

SEQ ID NO: 165310 - DNA, 25 bp, Saccharomyces pastorianus
gactctactggcgttattgaagatg

SEQ ID NO: 165311 - DNA, 25 bp, Saccharomyces pastorianus
ttaggatgtggctccgccattgcct

SEQ ID NO: 165312 - DNA, 25 bp, Saccharomyces pastorianus
catatatgactgaattggtacaggg

SEQ ID NO: 165313 - DNA, 25 bp, Saccharomyces pastorianus
gactttaggatgtggctccgccatt

SEQ ID NO: 165314 - DNA, 25 bp, Saccharomyces pastorianus
gtcaacgactctactggcgttattg

SEQ ID NO: 165315 - DNA, 25 bp, Saccharomyces pastorianus
aagactttaggatgtggctccgcca

SEQ ID NO: 165316 - DNA, 25 bp, Saccharomyces pastorianus
tcaaagtcaacgactctactggcgt

SEQ ID NO: 165317 - DNA, 25 bp, Saccharomyces pastorianus
attgcctcctcttcatatatgactg

SEQ ID NO: 165318 - DNA, 25 bp, Saccharomyces pastorianus
tctactggcgttattgaagatgtca

SEQ ID NO: 165319 - DNA, 25 bp, Saccharomyces pastorianus
taacgagatttgcaaggcctgctct

SEQ ID NO: 165320 - DNA, 25 bp, Saccharomyces pastorianus
atttgcaaggcctgctctgatggcc

SEQ ID NO: 165321 - DNA, 25 bp, Saccharomyces pastorianus
aaggcctgctctgatggccatcaga

SEQ ID NO: 165322 - DNA, 25 bp, Saccharomyces pastorianus
tgctctgatggccatcagacctgtg

SEQ ID NO: 165323 - DNA, 25 bp, Saccharomyces pastorianus
acgagatttgcaaggcctgctctga

SEQ ID NO: 165324 - DNA, 25 bp, Saccharomyces pastorianus
ctgttataacgagatttgcaaggcc

SEQ ID NO: 165325 - DNA, 25 bp, Saccharomyces pastorianus
ggccatcagacctgtgaatgccatg

SEQ ID NO: 165326 - DNA, 25 bp, Saccharomyces pastorianus
gatggccatcagacctgtgaatgcc

SEQ ID NO: 165327 - DNA, 25 bp, Saccharomyces pastorianus
ttgcaaggcctgctctgatggccat

SEQ ID NO: 165328 - DNA, 25 bp, Saccharomyces pastorianus
ttataacgagatttgcaaggcctgc

SEQ ID NO: 165329 - DNA, 25 bp, Saccharomyces pastorianus
ccatcagacctgtgaatgccatggg

SEQ ID NO: 165330 - DNA, 25 bp, Saccharomyces pastorianus
tggtgatgtcgtcttagctgctgct

SEQ ID NO: 165331 - DNA, 25 bp, Saccharomyces pastorianus
agctgatgacattgatgctgactct

SEQ ID NO: 165332 - DNA, 25 bp, Saccharomyces pastorianus
cagagttttcggtgctctaaagggt

SEQ ID NO: 165333 - DNA, 25 bp, Saccharomyces pastorianus
gtattacccacggtttgaccaactg

SEQ ID NO: 165334 - DNA, 25 bp, Saccharomyces pastorianus
gtgccagagttttcggtgctctaaa

SEQ ID NO: 165335 - DNA, 25 bp, Saccharomyces pastorianus
atctcttctaccatcactggtgatg

SEQ ID NO: 165336 - DNA, 25 bp, Saccharomyces pastorianus
atcactggtgatgtcgtcttagctg

SEQ ID NO: 165337 - DNA, 25 bp, Saccharomyces pastorianus
tgtcaaatcatctcttctaccatca

SEQ ID NO: 165338 - DNA, 25 bp, Saccharomyces pastorianus
acccacggtttgaccaactgggctg

SEQ ID NO: 165339 - DNA, 25 bp, Saccharomyces pastorianus
caagggttacctagctgatgacatt

SEQ ID NO: 165340 - DNA, 25 bp, Saccharomyces pastorianus
aaagaaccaccactggtgccagagt

SEQ ID NO: 165341 - DNA, 25 bp, Saccharomyces pastorianus
gaacgtaagggatccagtcgtccgg

SEQ ID NO: 165342 - DNA, 25 bp, Saccharomyces pastorianus
agtcgtccggcactcaagaagttta

SEQ ID NO: 165343 - DNA, 25 bp, Saccharomyces pastorianus
aggccggcgattttgaacagccaaa

SEQ ID NO: 165344 - DNA, 25 bp, Saccharomyces pastorianus
agaaatcaacttccaaggccgctat

SEQ ID NO: 165345 - DNA, 25 bp, Saccharomyces pastorianus
ttgatcattgaagggctcacggctt

SEQ ID NO: 165346 - DNA, 25 bp, Saccharomyces pastorianus
agggcaagaagcctgcagccagcaa

SEQ ID NO: 165347 - DNA, 25 bp, Saccharomyces pastorianus
acttctgtgagtgcaaccgcatcaa

SEQ ID NO: 165348 - DNA, 25 bp, Saccharomyces pastorianus
ggaagcttcctccaagagttacagg

SEQ ID NO: 165349 - DNA, 25 bp, Saccharomyces pastorianus
aaagggacccgctggtgctgtgaaa

SEQ ID NO: 165350 - DNA, 25 bp, Saccharomyces pastorianus
gcatccacgaagctagcgccaaaga

SEQ ID NO: 165351 - DNA, 25 bp, Saccharomyces pastorianus
gtcggatccgcaagcaactttgatt

SEQ ID NO: 165352 - DNA, 25 bp, Saccharomyces pastorianus
aatgggagactcaagcgggatttca

SEQ ID NO: 165353 - DNA, 25 bp, Saccharomyces pastorianus
ggagatccactagaattaacgctat

SEQ ID NO: 165354 - DNA, 25 bp, Saccharomyces pastorianus
aagcctcgataagaggtcgtctttt

SEQ ID NO: 165355 - DNA, 25 bp, Saccharomyces pastorianus
gtaacccacaacatattaggtcaga

SEQ ID NO: 165356 - DNA, 25 bp, Saccharomyces pastorianus
agcgggatttcattacttattacag

SEQ ID NO: 165357 - DNA, 25 bp, Saccharomyces pastorianus
gcaaggctagattttcccgtagagt

SEQ ID NO: 165358 - DNA, 25 bp, Saccharomyces pastorianus
gtggccaaccttatttgaggatcta

SEQ ID NO: 165359 - DNA, 25 bp, Saccharomyces pastorianus
atggcctcgtctcttaacgagttaa

SEQ ID NO: 165360 - DNA, 25 bp, Saccharomyces pastorianus
tgtattcagaatgcccaagcttccg

SEQ ID NO: 165361 - DNA, 25 bp, Saccharomyces pastorianus
aagcttccgcaaggattgcaaggct

SEQ ID NO: 165362 - DNA, 25 bp, Saccharomyces pastorianus
gattttcccgtagagtggccaacct

SEQ ID NO: 165363 - DNA, 25 bp, Saccharomyces pastorianus
gttacttgacccacggtacttcagt

SEQ ID NO: 165364 - DNA, 25 bp, Saccharomyces pastorianus
tatcaagttccctttattctgttgc

SEQ ID NO: 165365 - DNA, 25 bp, Saccharomyces pastorianus
attgactctttcacgttacttgacc

SEQ ID NO: 165366 - DNA, 25 bp, Saccharomyces pastorianus
gaattgactctttcacgttacttga

SEQ ID NO: 165367 - DNA, 25 bp, Saccharomyces pastorianus
gtcgatgaattgactctttcacgtt

SEQ ID NO: 165368 - DNA, 25 bp, Saccharomyces pastorianus
gtacttcagtattatcaagttccct

SEQ ID NO: 165369 - DNA, 25 bp, Saccharomyces pastorianus
tctttcacgttacttgacccacggt

SEQ ID NO: 165370 - DNA, 25 bp, Saccharomyces pastorianus
atgcatccattagtcgatgaattga

SEQ ID NO: 165371 - DNA, 25 bp, Saccharomyces pastorianus
caagttccctttattctgttgcttt

SEQ ID NO: 165372 - DNA, 25 bp, Saccharomyces pastorianus
gacccacggtacttcagtattatca

SEQ ID NO: 165373 - DNA, 25 bp, Saccharomyces pastorianus
cttgacccacggtacttcagtatta

SEQ ID NO: 165374 - DNA, 25 bp, Saccharomyces pastorianus
ggaagccctttgtttttatagagag

SEQ ID NO: 165375 - DNA, 25 bp, Saccharomyces pastorianus
atagagagggaaaaatacggaatat

SEQ ID NO: 165376 - DNA, 25 bp, Saccharomyces pastorianus
tggatattttggaagccctttgttt

SEQ ID NO: 165377 - DNA, 25 bp, Saccharomyces pastorianus
tagagagggaaaaatacggaatatt

SEQ ID NO: 165378 - DNA, 25 bp, Saccharomyces pastorianus
gaagccctttgtttttatagagagg

SEQ ID NO: 165379 - DNA, 25 bp, Saccharomyces pastorianus
tatagagagggaaaaatacggaata

SEQ ID NO: 165380 - DNA, 25 bp, Saccharomyces pastorianus
ttggaagccctttgtttttatagag

SEQ ID NO: 165381 - DNA, 25 bp, Saccharomyces pastorianus
ttatagagagggaaaaatacggaat

SEQ ID NO: 165382 - DNA, 25 bp, Saccharomyces pastorianus
atggatattttggaagccctttgtt

SEQ ID NO: 165383 - DNA, 25 bp, Saccharomyces pastorianus
tggaagccctttgtttttatagaga

SEQ ID NO: 165384 - DNA, 25 bp, Saccharomyces pastorianus
gagcagctgaaacccaaattccgtt

SEQ ID NO: 165385 - DNA, 25 bp, Saccharomyces pastorianus
gcaccaacgccgtctacaaggtaat

SEQ ID NO: 165386 - DNA, 25 bp, Saccharomyces pastorianus
tgcaaaccggcttggaaaccctata

SEQ ID NO: 165387 - DNA, 25 bp, Saccharomyces pastorianus
catccacgtcgacaattgctcaaag

SEQ ID NO: 165388 - DNA, 25 bp, Saccharomyces pastorianus
acaaaactttcaatcgcacggtgga

SEQ ID NO: 165389 - DNA, 25 bp, Saccharomyces pastorianus
agacgcagttaacagcgcaccttct

SEQ ID NO: 165390 - DNA, 25 bp, Saccharomyces pastorianus
cgcaccttctaattctctactaaag

SEQ ID NO: 165391 - DNA, 25 bp, Saccharomyces pastorianus
gataccaaggtcaagcagctctcgt

SEQ ID NO: 165392 - DNA, 25 bp, Saccharomyces pastorianus
gaagcaacgcttccccagaaaaaga

SEQ ID NO: 165393 - DNA, 25 bp, Saccharomyces pastorianus
ggtcaagcagctctcgtcaaataat

SEQ ID NO: 165394 - DNA, 25 bp, Saccharomyces pastorianus
taaaggctactgtcgaaccagcatc

SEQ ID NO: 165395 - DNA, 25 bp, Saccharomyces pastorianus
acttatccaaatggacaaccgaaga

SEQ ID NO: 165396 - DNA, 25 bp, Saccharomyces pastorianus
ggacaaccgaagaagaattcaatgt

SEQ ID NO: 165397 - DNA, 25 bp, Saccharomyces pastorianus
gaatattcacttatccaaatggaca

SEQ ID NO: 165398 - DNA, 25 bp, Saccharomyces pastorianus
ccaaatggacaaccgaagaagaatt

SEQ ID NO: 165399 - DNA, 25 bp, Saccharomyces pastorianus
gaattcaatgtattatacaggacaa

SEQ ID NO: 165400 - DNA, 25 bp, Saccharomyces pastorianus
atacaggacaaaatatagactttat

SEQ ID NO: 165401 - DNA, 25 bp, Saccharomyces pastorianus
caaccgaagaagaattcaatgtatt

SEQ ID NO: 165402 - DNA, 25 bp, Saccharomyces pastorianus
tatccaaatggacaaccgaagaaga

SEQ ID NO: 165403 - DNA, 25 bp, Saccharomyces pastorianus
ggaatattcacttatccaaatggac

SEQ ID NO: 165404 - DNA, 25 bp, Saccharomyces pastorianus
attcacttatccaaatggacaaccg

SEQ ID NO: 165405 - DNA, 25 bp, Saccharomyces pastorianus
tcacttatccaaatggacaaccgaa

SEQ ID NO: 165406 - DNA, 25 bp, Saccharomyces pastorianus
ttcaccttgaaatcctcgcatcaaa

SEQ ID NO: 165407 - DNA, 25 bp, Saccharomyces pastorianus
ttttgttgctatacggcctcctggt

SEQ ID NO: 165408 - DNA, 25 bp, Saccharomyces pastorianus
ctggtcatcattgccactatggtac

SEQ ID NO: 165409 - DNA, 25 bp, Saccharomyces pastorianus
caccatccggcttttgtctgttaaa

SEQ ID NO: 165410 - DNA, 25 bp, Saccharomyces pastorianus
tgatttcgatctacaccacggtgat

SEQ ID NO: 165411 - DNA, 25 bp, Saccharomyces pastorianus
gattacaatgtatccatcccttttc

SEQ ID NO: 165412 - DNA, 25 bp, Saccharomyces pastorianus
gaagtcccagatacttggaactcag

SEQ ID NO: 165413 - DNA, 25 bp, Saccharomyces pastorianus
acgcatgttgtcgtgcttgatttcg

SEQ ID NO: 165414 - DNA, 25 bp, Saccharomyces pastorianus
atgatacttacaacgtcacgcatgt

SEQ ID NO: 165415 - DNA, 25 bp, Saccharomyces pastorianus
ggcacctcatgtgcttaaggttcat

SEQ ID NO: 165416 - DNA, 25 bp, Saccharomyces pastorianus
agctggccggctgagttaattgaac

SEQ ID NO: 165417 - DNA, 25 bp, Saccharomyces pastorianus
tcggctgtgactttattgacggtaa

SEQ ID NO: 165418 - DNA, 25 bp, Saccharomyces pastorianus
gttacagatagttaccacggtcagg

SEQ ID NO: 165419 - DNA, 25 bp, Saccharomyces pastorianus
atcttcctgaatatcgcaaactggc

SEQ ID NO: 165420 - DNA, 25 bp, Saccharomyces pastorianus
aataaacggcttttggctcactgag

SEQ ID NO: 165421 - DNA, 25 bp, Saccharomyces pastorianus
ggctcactgaggagtttttcactgt

SEQ ID NO: 165422 - DNA, 25 bp, Saccharomyces pastorianus
cacaatgggaagtcgccagtcatct

SEQ ID NO: 165423 - DNA, 25 bp, Saccharomyces pastorianus
cactgtgttaggaaacccttcgagt

SEQ ID NO: 165424 - DNA, 25 bp, Saccharomyces pastorianus
aagttatccttgtaccatgggtcgg

SEQ ID NO: 165425 - DNA, 25 bp, Saccharomyces pastorianus
gatgtaacttattctgccaaaccaa

SEQ ID NO: 165426 - DNA, 25 bp, Saccharomyces pastorianus
gttatattgaattcttccccgcatc

SEQ ID NO: 165427 - DNA, 25 bp, Saccharomyces pastorianus
catgctgctgaccatgtcacagaat

SEQ ID NO: 165428 - DNA, 25 bp, Saccharomyces pastorianus
gttccacttgttgcaccaactttat

SEQ ID NO: 165429 - DNA, 25 bp, Saccharomyces pastorianus
gatctaataaaaccacttcttccca

SEQ ID NO: 165430 - DNA, 25 bp, Saccharomyces pastorianus
gaggttattttactccaactttgca

SEQ ID NO: 165431 - DNA, 25 bp, Saccharomyces pastorianus
aaagatatctgcatataccgcccct

SEQ ID NO: 165432 - DNA, 25 bp, Saccharomyces pastorianus
atttgatacctgttgctgatgtgca

SEQ ID NO: 165433 - DNA, 25 bp, Saccharomyces pastorianus
gaagaaatccttggccttaaatttg

SEQ ID NO: 165434 - DNA, 25 bp, Saccharomyces pastorianus
aacatctcctgagccatttggtgta

SEQ ID NO: 165435 - DNA, 25 bp, Saccharomyces pastorianus
gagctttgaatgctgttccacttgt

SEQ ID NO: 165436 - DNA, 25 bp, Saccharomyces pastorianus
ttgacggccgtcatatcacaaaggt

SEQ ID NO: 165437 - DNA, 25 bp, Saccharomyces pastorianus
attatcaagacccttttgtcgcctt

SEQ ID NO: 165438 - DNA, 25 bp, Saccharomyces pastorianus
gagaaggttccttcccacgaggaag

SEQ ID NO: 165439 - DNA, 25 bp, Saccharomyces pastorianus
ggtaatcccatactttttcatgctg

SEQ ID NO: 165440 - DNA, 25 bp, Saccharomyces pastorianus
agcggagagtatttcttagagccaa

SEQ ID NO: 165441 - DNA, 25 bp, Saccharomyces pastorianus
atgcactggtctgggagatcgctct

SEQ ID NO: 165442 - DNA, 25 bp, Saccharomyces pastorianus
gaacaagtctctatggtgctccttt

SEQ ID NO: 165443 - DNA, 25 bp, Saccharomyces pastorianus
tcattcttgtatcccataatcaccc

SEQ ID NO: 165444 - DNA, 25 bp, Saccharomyces pastorianus
tcagtattgccctgagtggcaccaa

SEQ ID NO: 165445 - DNA, 25 bp, Saccharomyces pastorianus
caccccgatcacctggatttagaaa

SEQ ID NO: 165446 - DNA, 25 bp, Saccharomyces pastorianus
gctcctttttattaacacaccatgg

SEQ ID NO: 165447 - DNA, 25 bp, Saccharomyces pastorianus
agtggcaaagactctcccttatgga

SEQ ID NO: 165448 - DNA, 25 bp, Saccharomyces pastorianus
atataccacatatcggctactcctg

SEQ ID NO: 165449 - DNA, 25 bp, Saccharomyces pastorianus
gtttaaagaccgctgctactgtcca

SEQ ID NO: 165450 - DNA, 25 bp, Saccharomyces pastorianus
gaaatacctctctcgaaaccaagaa

SEQ ID NO: 165451 - DNA, 25 bp, Saccharomyces pastorianus
actgcttgctactgcctcagataag

SEQ ID NO: 165452 - DNA, 25 bp, Saccharomyces pastorianus
tatgtcttcaaggtcactgtttaaa

SEQ ID NO: 165453 - DNA, 25 bp, Saccharomyces pastorianus
aagtcacgatggtaaactgcttgct

SEQ ID NO: 165454 - DNA, 25 bp, Saccharomyces pastorianus
atgtgacgccagttaattacttgaa

SEQ ID NO: 165455 - DNA, 25 bp, Saccharomyces pastorianus
acttgatgacgcctctaatagcctc

SEQ ID NO: 165456 - DNA, 25 bp, Saccharomyces pastorianus
gcctccctggagataattctagcaa

SEQ ID NO: 165457 - DNA, 25 bp, Saccharomyces pastorianus
ggtagattcggactatatgtcttca

SEQ ID NO: 165458 - DNA, 25 bp, Saccharomyces pastorianus
gttttactgcgtatagctcgcccaa

SEQ ID NO: 165459 - DNA, 25 bp, Saccharomyces pastorianus
gataattctagcaatggccactgga

SEQ ID NO: 165460 - DNA, 25 bp, Saccharomyces pastorianus
acctgagccgtaactttgcctatat

SEQ ID NO: 165461 - DNA, 25 bp, Saccharomyces pastorianus
tgtgacatccatctcgcagcaatta

SEQ ID NO: 165462 - DNA, 25 bp, Saccharomyces pastorianus
gctctcactgaagatgtaccttccg

SEQ ID NO: 165463 - DNA, 25 bp, Saccharomyces pastorianus
tttgccatttggtatcactgtgccc

SEQ ID NO: 165464 - DNA, 25 bp, Saccharomyces pastorianus
gggattcaatttcttcgaggcttca

SEQ ID NO: 165465 - DNA, 25 bp, Saccharomyces pastorianus
tagctgattttggtaggcacattcg

SEQ ID NO: 165466 - DNA, 25 bp, Saccharomyces pastorianus
ataacagcgggtatcgatctcatca

SEQ ID NO: 165467 - DNA, 25 bp, Saccharomyces pastorianus
tgctgtttttattgacccctcaatc

SEQ ID NO: 165468 - DNA, 25 bp, Saccharomyces pastorianus
gacccctcaatcaatacggcgtatg

SEQ ID NO: 165469 - DNA, 25 bp, Saccharomyces pastorianus
gcccttgttgacgacggctacagga

SEQ ID NO: 165470 - DNA, 25 bp, Saccharomyces pastorianus
ggcacattcgggtacaatctatgtt

SEQ ID NO: 165471 - DNA, 25 bp, Saccharomyces pastorianus
tacagaaaccgatgtgctctcactg

SEQ ID NO: 165472 - DNA, 25 bp, Saccharomyces pastorianus
agatgaagttgttatccccgaccgc

SEQ ID NO: 165473 - DNA, 25 bp, Saccharomyces pastorianus
tacctagctttcaaaactcttcctt

SEQ ID NO: 165474 - DNA, 25 bp, Saccharomyces pastorianus
taaacgtcatcctgagaacgcgctg

SEQ ID NO: 165475 - DNA, 25 bp, Saccharomyces pastorianus
aaactcttccttgaatggtcgtcct

SEQ ID NO: 165476 - DNA, 25 bp, Saccharomyces pastorianus
gtgaaagatccttccgattatggag

SEQ ID NO: 165477 - DNA, 25 bp, Saccharomyces pastorianus
acctactcaggtcgtctatgtcaaa

SEQ ID NO: 165478 - DNA, 25 bp, Saccharomyces pastorianus
gaggacgacgatgatcatggcaatt

SEQ ID NO: 165479 - DNA, 25 bp, Saccharomyces pastorianus
gcatgtacaatcttaaccagccttc

SEQ ID NO: 165480 - DNA, 25 bp, Saccharomyces pastorianus
gctgccgcctttacaacatttgaaa

SEQ ID NO: 165481 - DNA, 25 bp, Saccharomyces pastorianus
gaaaccggatcctttgcaaataagt

SEQ ID NO: 165482 - DNA, 25 bp, Saccharomyces pastorianus
ccgaccgcactcatttcaaagatgg

SEQ ID NO: 165483 - DNA, 25 bp, Saccharomyces pastorianus
gtaattctccaaatgtttcttctat

SEQ ID NO: 165484 - DNA, 25 bp, Saccharomyces pastorianus
tttttccggccctgaaaccagcaat

SEQ ID NO: 165485 - DNA, 25 bp, Saccharomyces pastorianus
cacaaacaatcctggtactttccct

SEQ ID NO: 165486 - DNA, 25 bp, Saccharomyces pastorianus
gggtcttcacctcttttttctgcaa

SEQ ID NO: 165487 - DNA, 25 bp, Saccharomyces pastorianus
tatcctttcggaagtgggtcttcac

SEQ ID NO: 165488 - DNA, 25 bp, Saccharomyces pastorianus
atcgaatattcctggcggacctttc

SEQ ID NO: 165489 - DNA, 25 bp, Saccharomyces pastorianus
gcaaatgcgcctaacggttctaaca

SEQ ID NO: 165490 - DNA, 25 bp, Saccharomyces pastorianus
ctatatcgatatttccagactggtc

SEQ ID NO: 165491 - DNA, 25 bp, Saccharomyces pastorianus
ttttctgcaacacagccatacattg

SEQ ID NO: 165492 - DNA, 25 bp, Saccharomyces pastorianus
actcccttgcaaccatcgaatattc

SEQ ID NO: 165493 - DNA, 25 bp, Saccharomyces pastorianus
aatgggacccaacagtgccaagccg

SEQ ID NO: 165494 - DNA, 25 bp, Saccharomyces pastorianus
gaaactgcttcattcgaattatctg

SEQ ID NO: 165495 - DNA, 25 bp, Saccharomyces pastorianus
ggaaggcttcaactaaccaatacag

SEQ ID NO: 165496 - DNA, 25 bp, Saccharomyces pastorianus
gtgtataaggccaagctaggtcata

SEQ ID NO: 165497 - DNA, 25 bp, Saccharomyces pastorianus
tgcatccaatccatcacaatacttt

SEQ ID NO: 165498 - DNA, 25 bp, Saccharomyces pastorianus
attatcgaaagttcggcaccaccac

SEQ ID NO: 165499 - DNA, 25 bp, Saccharomyces pastorianus
aagacacttttcaacctactattag

SEQ ID NO: 165500 - DNA, 25 bp, Saccharomyces pastorianus
gaatcaacatcccaggcacaaagta

SEQ ID NO: 165501 - DNA, 25 bp, Saccharomyces pastorianus
cacctcctccaatcgtgaaacgtaa

SEQ ID NO: 165502 - DNA, 25 bp, Saccharomyces pastorianus
gacaatatgtctactgatgaggcaa

SEQ ID NO: 165503 - DNA, 25 bp, Saccharomyces pastorianus
tgaaacgtaaagatggcggcccaaa

SEQ ID NO: 165504 - DNA, 25 bp, Saccharomyces pastorianus
atcacaatactttcctttggtcaac

SEQ ID NO: 165505 - DNA, 25 bp, Saccharomyces pastorianus
aacgtaccactttctaatgagccag

SEQ ID NO: 165506 - DNA, 25 bp, Saccharomyces pastorianus
gagtatatattctcgtatgacccta

SEQ ID NO: 165507 - DNA, 25 bp, Saccharomyces pastorianus
gagttcggtatattcctcaccaaaa

SEQ ID NO: 165508 - DNA, 25 bp, Saccharomyces pastorianus
ttacctcagttcctcagttcgaaaa

SEQ ID NO: 165509 - DNA, 25 bp, Saccharomyces pastorianus
aggattttcatctattttgccccag

SEQ ID NO: 165510 - DNA, 25 bp, Saccharomyces pastorianus
aagagtatcgttgcagctgttctga

SEQ ID NO: 165511 - DNA, 25 bp, Saccharomyces pastorianus
tggctagtaggctttccgagtctaa

SEQ ID NO: 165512 - DNA, 25 bp, Saccharomyces pastorianus
gaagatccactacttataccacctg

SEQ ID NO: 165513 - DNA, 25 bp, Saccharomyces pastorianus
cagccgcagctagtacattatttat

SEQ ID NO: 165514 - DNA, 25 bp, Saccharomyces pastorianus
cacctgttgtcctcgaatttttgat

SEQ ID NO: 165515 - DNA, 25 bp, Saccharomyces pastorianus
atataccatgcatctcttttacaag

SEQ ID NO: 165516 - DNA, 25 bp, Saccharomyces pastorianus
caagccgaggatttgtttacgcaga

SEQ ID NO: 165517 - DNA, 25 bp, Saccharomyces pastorianus
gaggtcgtactctgaagaaacttca

SEQ ID NO: 165518 - DNA, 25 bp, Saccharomyces pastorianus
tgatactcaagaatcggcaccgaac

SEQ ID NO: 165519 - DNA, 25 bp, Saccharomyces pastorianus
gaaagttgtacagccgcggacgaga

SEQ ID NO: 165520 - DNA, 25 bp, Saccharomyces pastorianus
ataagttaccgttgtctgccgaagc

SEQ ID NO: 165521 - DNA, 25 bp, Saccharomyces pastorianus
atttatttgctgcttctggaaacga

SEQ ID NO: 165522 - DNA, 25 bp, Saccharomyces pastorianus
gaagatatctttcacggacacgaca

SEQ ID NO: 165523 - DNA, 25 bp, Saccharomyces pastorianus
gttttgccatgggaatctgctgata

SEQ ID NO: 165524 - DNA, 25 bp, Saccharomyces pastorianus
gaagctgacattatagaacctggta

SEQ ID NO: 165525 - DNA, 25 bp, Saccharomyces pastorianus
gtttctgacggtgaagtctcatcgg

SEQ ID NO: 165526 - DNA, 25 bp, Saccharomyces pastorianus
ggaaaacagcatgcaggccagtact

SEQ ID NO: 165527 - DNA, 25 bp, Saccharomyces pastorianus
agtgctcctggcgtcgagtatgaat

SEQ ID NO: 165528 - DNA, 25 bp, Saccharomyces pastorianus
gctaagaatactcccaaacatcctg

SEQ ID NO: 165529 - DNA, 25 bp, Saccharomyces pastorianus
atcacctcagttctctatctgattg

SEQ ID NO: 165530 - DNA, 25 bp, Saccharomyces pastorianus
ggagatcactgaacaagccgatgaa

SEQ ID NO: 165531 - DNA, 25 bp, Saccharomyces pastorianus
acaatgttcttggtaaggctgacga

SEQ ID NO: 165532 - DNA, 25 bp, Saccharomyces pastorianus
cacgaaattgttgctggcctagttt

SEQ ID NO: 165533 - DNA, 25 bp, Saccharomyces pastorianus
acatctatgctaaatgcgtctgata

SEQ ID NO: 165534 - DNA, 25 bp, Saccharomyces pastorianus
atatgaccaattctgctgcatcgct

SEQ ID NO: 165535 - DNA, 25 bp, Saccharomyces pastorianus
ttctcccaccagtaaccagctaaat

SEQ ID NO: 165536 - DNA, 25 bp, Saccharomyces pastorianus
atctcttacaggaggaccatcacct

SEQ ID NO: 165537 - DNA, 25 bp, Saccharomyces pastorianus
gaatccacagtaaggccattgctag

SEQ ID NO: 165538 - DNA, 25 bp, Saccharomyces pastorianus
acagttttgctcctcgtggttacaa

SEQ ID NO: 165539 - DNA, 25 bp, Saccharomyces pastorianus
ggttcgttgtttagagctgccattc

SEQ ID NO: 165540 - DNA, 25 bp, Saccharomyces pastorianus
ctacccaacgtagcaattgtggttc

SEQ ID NO: 165541 - DNA, 25 bp, Saccharomyces pastorianus
aactccacgtatgttggcaggcatt

SEQ ID NO: 165542 - DNA, 25 bp, Saccharomyces pastorianus
acagattctgacattccgataccaa

SEQ ID NO: 165543 - DNA, 25 bp, Saccharomyces pastorianus
aatgtttcaagattccacgcttcaa

SEQ ID NO: 165544 - DNA, 25 bp, Saccharomyces pastorianus
cggtccacatgcgtttggtgttgaa

SEQ ID NO: 165545 - DNA, 25 bp, Saccharomyces pastorianus
ggcaggcattattgtttcacagttt

SEQ ID NO: 165546 - DNA, 25 bp, Saccharomyces pastorianus
aagcctactggctacctttgtggat

SEQ ID NO: 165547 - DNA, 25 bp, Saccharomyces pastorianus
aaggcatttgctttgacattgtcaa

SEQ ID NO: 165548 - DNA, 25 bp, Saccharomyces pastorianus
ttacctcagtacaaactacccaacg

SEQ ID NO: 165549 - DNA, 25 bp, Saccharomyces pastorianus
tacacgatattatcaacgctccaaa

SEQ ID NO: 165550 - DNA, 25 bp, Saccharomyces pastorianus
tgtttaaaaagtatatgccctccgt

SEQ ID NO: 165551 - DNA, 25 bp, Saccharomyces pastorianus
gctgatggcaagcaacatattttcc

SEQ ID NO: 165552 - DNA, 25 bp, Saccharomyces pastorianus
aaatcacccgcaattagcgcaagta

SEQ ID NO: 165553 - DNA, 25 bp, Saccharomyces pastorianus
gcaagccaagatcagaattttccta

SEQ ID NO: 165554 - DNA, 25 bp, Saccharomyces pastorianus
aactgagcgcattgagaacattact

SEQ ID NO: 165555 - DNA, 25 bp, Saccharomyces pastorianus
tgtcatatcacaacacagagccctg

SEQ ID NO: 165556 - DNA, 25 bp, Saccharomyces pastorianus
agagccctgattttctgccaactaa

SEQ ID NO: 165557 - DNA, 25 bp, Saccharomyces pastorianus
ggtgtactggctttggaggcactac

SEQ ID NO: 165558 - DNA, 25 bp, Saccharomyces pastorianus
atatgccctccgtaacctatatgag

SEQ ID NO: 165559 - DNA, 25 bp, Saccharomyces pastorianus
ggcactacataagcaagttctacct

SEQ ID NO: 165560 - DNA, 25 bp, Saccharomyces pastorianus
tattctagaaatccctgcaatgtca

SEQ ID NO: 165561 - DNA, 25 bp, Saccharomyces pastorianus
ttatgccactaaagccccaattaac

SEQ ID NO: 165562 - DNA, 25 bp, Saccharomyces pastorianus
atttcaaggactgtaccccggatga

SEQ ID NO: 165563 - DNA, 25 bp, Saccharomyces pastorianus
gtcaagcgttactcaaagggcaatt

SEQ ID NO: 165564 - DNA, 25 bp, Saccharomyces pastorianus
gtttccatttgagggcgagacttcc

SEQ ID NO: 165565 - DNA, 25 bp, Saccharomyces pastorianus
tgtagtagtacaactgccagacata

SEQ ID NO: 165566 - DNA, 25 bp, Saccharomyces pastorianus
acttccaagtttctagtatgcctta

SEQ ID NO: 165567 - DNA, 25 bp, Saccharomyces pastorianus
agacgactattcatgcctgatctgc

SEQ ID NO: 165568 - DNA, 25 bp, Saccharomyces pastorianus
ataccaacagactttcatccgcgaa

SEQ ID NO: 165569 - DNA, 25 bp, Saccharomyces pastorianus
taattgttcacttatcgagatccac

SEQ ID NO: 165570 - DNA, 25 bp, Saccharomyces pastorianus
gggtctatcagaaccatcataccaa

SEQ ID NO: 165571 - DNA, 25 bp, Saccharomyces pastorianus
gaagttcgtctcaattatccatgga

SEQ ID NO: 165572 - DNA, 25 bp, Saccharomyces pastorianus
gatcgaattcgtatgatggcttcag

SEQ ID NO: 165573 - DNA, 25 bp, Saccharomyces pastorianus
agggatggctcacgatcaacttcat

SEQ ID NO: 165574 - DNA, 25 bp, Saccharomyces pastorianus
gtgactcctactatccaaaggccag

SEQ ID NO: 165575 - DNA, 25 bp, Saccharomyces pastorianus
gtaacctaggtgacatcgtgactcc

SEQ ID NO: 165576 - DNA, 25 bp, Saccharomyces pastorianus
ggtcgaaacagaatcctttgcatta

SEQ ID NO: 165577 - DNA, 25 bp, Saccharomyces pastorianus
cagtagagtctcattgccatcaaaa

SEQ ID NO: 165578 - DNA, 25 bp, Saccharomyces pastorianus
atctttagagcacggaaatcgcgaa

SEQ ID NO: 165579 - DNA, 25 bp, Saccharomyces pastorianus
tcaacttcatcatcttcacgatctt

SEQ ID NO: 165580 - DNA, 25 bp, Saccharomyces pastorianus
gatttgacagtaaccgctagcatta

SEQ ID NO: 165581 - DNA, 25 bp, Saccharomyces pastorianus
atggcttcaggaccgtttttgattc

SEQ ID NO: 165582 - DNA, 25 bp, Saccharomyces pastorianus
aatttcgaaatgttaaggctgccca

SEQ ID NO: 165583 - DNA, 25 bp, Saccharomyces pastorianus
gactctcgccggcttgaaaaatttc

SEQ ID NO: 165584 - DNA, 25 bp, Saccharomyces pastorianus
gtaccatccattattgtccctaaga

SEQ ID NO: 165585 - DNA, 25 bp, Saccharomyces pastorianus
aataatacctaagcctctgcagcgc

SEQ ID NO: 165586 - DNA, 25 bp, Saccharomyces pastorianus
agatatacataagccgactctcgcc

SEQ ID NO: 165587 - DNA, 25 bp, Saccharomyces pastorianus
ggttaatccagctattcgagccaca

SEQ ID NO: 165588 - DNA, 25 bp, Saccharomyces pastorianus
gagaaatcagacgtccgatcctcct

SEQ ID NO: 165589 - DNA, 25 bp, Saccharomyces pastorianus
acaacactgggcacctcaaatataa

SEQ ID NO: 165590 - DNA, 25 bp, Saccharomyces pastorianus
atcttcacctgatgatgatcccgaa

SEQ ID NO: 165591 - DNA, 25 bp, Saccharomyces pastorianus
aaggctgcccaatgatctaaaactc

SEQ ID NO: 165592 - DNA, 25 bp, Saccharomyces pastorianus
taaattccacaatagcgccagccta

SEQ ID NO: 165593 - DNA, 25 bp, Saccharomyces pastorianus
caagttgatcaagtcatctccatga

SEQ ID NO: 165594 - DNA, 25 bp, Saccharomyces pastorianus
gagaatccctgtgtttctatgaata

SEQ ID NO: 165595 - DNA, 25 bp, Saccharomyces pastorianus
agatcttctgagtcgagttgtcccg

SEQ ID NO: 165596 - DNA, 25 bp, Saccharomyces pastorianus
aactccctcttcgaatgactttgat

SEQ ID NO: 165597 - DNA, 25 bp, Saccharomyces pastorianus
cttcaccgtcatatttcaggccaat

SEQ ID NO: 165598 - DNA, 25 bp, Saccharomyces pastorianus
gaaactctccatatcaatcaggctg

SEQ ID NO: 165599 - DNA, 25 bp, Saccharomyces pastorianus
aatcaggctgaacccatttcggaac

SEQ ID NO: 165600 - DNA, 25 bp, Saccharomyces pastorianus
aggtatacatacctaccttcaccgt

SEQ ID NO: 165601 - DNA, 25 bp, Saccharomyces pastorianus
aaaatcgacgacattcctctgcaat

SEQ ID NO: 165602 - DNA, 25 bp, Saccharomyces pastorianus
atgactttgatgtgtccacgccgac

SEQ ID NO: 165603 - DNA, 25 bp, Saccharomyces pastorianus
atcacttctcccgatcaaaagttct

SEQ ID NO: 165604 - DNA, 25 bp, Saccharomyces pastorianus
agttcccgctcgatttgattcatga

SEQ ID NO: 165605 - DNA, 25 bp, Saccharomyces pastorianus
gttagaccaatcttgaacagctttg

SEQ ID NO: 165606 - DNA, 25 bp, Saccharomyces pastorianus
tcataaatctggtggcaactgggca

SEQ ID NO: 165607 - DNA, 25 bp, Saccharomyces pastorianus
aatgggcgggcaaacatttacgctg

SEQ ID NO: 165608 - DNA, 25 bp, Saccharomyces pastorianus
aaggtaacttgccttcgccagaaga

SEQ ID NO: 165609 - DNA, 25 bp, Saccharomyces pastorianus
ggcaatgacggcactaggtctcgga

SEQ ID NO: 165610 - DNA, 25 bp, Saccharomyces pastorianus
tgtaaaccctcttctcatgtatcta

SEQ ID NO: 165611 - DNA, 25 bp, Saccharomyces pastorianus
aatgctattccaatggagccatgga

SEQ ID NO: 165612 - DNA, 25 bp, Saccharomyces pastorianus
taggtctcggaaattccctgggcgg

SEQ ID NO: 165613 - DNA, 25 bp, Saccharomyces pastorianus
atttttggagtaccttgccactcaa

SEQ ID NO: 165614 - DNA, 25 bp, Saccharomyces pastorianus
ttgccactcaacaaaccaaggatgt

SEQ ID NO: 165615 - DNA, 25 bp, Saccharomyces pastorianus
cgtcgccgtggctgatgaggtctcc

SEQ ID NO: 165616 - DNA, 25 bp, Saccharomyces pastorianus
atagtagaagcaaccagcacgtcgc

SEQ ID NO: 165617 - DNA, 25 bp, Saccharomyces pastorianus
cgccgtggctgatgaggtctcctct

SEQ ID NO: 165618 - DNA, 25 bp, Saccharomyces pastorianus
agataccatagtagaagcaaccagc

SEQ ID NO: 165619 - DNA, 25 bp, Saccharomyces pastorianus
cctcttgcccgggccgcagaaaaga

SEQ ID NO: 165620 - DNA, 25 bp, Saccharomyces pastorianus
tcgccgtggctgatgaggtctcctc

SEQ ID NO: 165621 - DNA, 25 bp, Saccharomyces pastorianus
gaagataccatagtagaagcaacca

SEQ ID NO: 165622 - DNA, 25 bp, Saccharomyces pastorianus
gtagaagcaaccagcacgtcgccgt

SEQ ID NO: 165623 - DNA, 25 bp, Saccharomyces pastorianus
agtagaagcaaccagcacgtcgccg

SEQ ID NO: 165624 - DNA, 25 bp, Saccharomyces pastorianus
tagtagaagcaaccagcacgtcgcc

SEQ ID NO: 165625 - DNA, 25 bp, Saccharomyces pastorianus
gtcgccgtggctgatgaggtctcct

SEQ ID NO: 165626 - DNA, 25 bp, Saccharomyces pastorianus
cctacgtggttcaagcattggttac

SEQ ID NO: 165627 - DNA, 25 bp, Saccharomyces pastorianus
agctcaattcagtggacgcgcatct

SEQ ID NO: 165628 - DNA, 25 bp, Saccharomyces pastorianus
aaaggtcgtttgtaatcctcatgaa

SEQ ID NO: 165629 - DNA, 25 bp, Saccharomyces pastorianus
catcatggacccaccaagcggaaaa

SEQ ID NO: 165630 - DNA, 25 bp, Saccharomyces pastorianus
ttgtcacgtatggtctatggatcct

SEQ ID NO: 165631 - DNA, 25 bp, Saccharomyces pastorianus
ttggtaaatccaactgccaccgaaa

SEQ ID NO: 165632 - DNA, 25 bp, Saccharomyces pastorianus
tttggtccacactttgtcagtttat

SEQ ID NO: 165633 - DNA, 25 bp, Saccharomyces pastorianus
ctatggatcctgtacatgtctcctg

SEQ ID NO: 165634 - DNA, 25 bp, Saccharomyces pastorianus
aatgtatcaccatttacctacgtgg

SEQ ID NO: 165635 - DNA, 25 bp, Saccharomyces pastorianus
gtcaatattgcccatacactgttca

SEQ ID NO: 165636 - DNA, 25 bp, Saccharomyces pastorianus
tgttccctcagcttctatgattaat

SEQ ID NO: 165637 - DNA, 25 bp, Saccharomyces pastorianus
gttaactctgattggcacgacttat

SEQ ID NO: 165638 - DNA, 25 bp, Saccharomyces pastorianus
aaccctctgctaccttgtttgaaca

SEQ ID NO: 165639 - DNA, 25 bp, Saccharomyces pastorianus
gacttatggcttgcttccacagaat

SEQ ID NO: 165640 - DNA, 25 bp, Saccharomyces pastorianus
ttgtgtacgattcatcaaccctctg

SEQ ID NO: 165641 - DNA, 25 bp, Saccharomyces pastorianus
attgtttttggatgagcctacctct

SEQ ID NO: 165642 - DNA, 25 bp, Saccharomyces pastorianus
actctcagtctgcttggtcaattgt

SEQ ID NO: 165643 - DNA, 25 bp, Saccharomyces pastorianus
agacagcaaagttccgttccgttag

SEQ ID NO: 165644 - DNA, 25 bp, Saccharomyces pastorianus
agagcattagctgattctggtcaat

SEQ ID NO: 165645 - DNA, 25 bp, Saccharomyces pastorianus
ttccacagaatgtgccgctgcaggg

SEQ ID NO: 165646 - DNA, 25 bp, Saccharomyces pastorianus
gtggtgtttctgaaaatccagctga

SEQ ID NO: 165647 - DNA, 25 bp, Saccharomyces pastorianus
gaatccctgagatttgcagccgagt

SEQ ID NO: 165648 - DNA, 25 bp, Saccharomyces pastorianus
ggtttatcccttacatgactattat

SEQ ID NO: 165649 - DNA, 25 bp, Saccharomyces pastorianus
atcgatttagatgacggctgcgaaa

SEQ ID NO: 165650 - DNA, 25 bp, Saccharomyces pastorianus
ggccttcttaagaaagacttcacct

SEQ ID NO: 165651 - DNA, 25 bp, Saccharomyces pastorianus
tctactggtccgttgtttttaagtg

SEQ ID NO: 165652 - DNA, 25 bp, Saccharomyces pastorianus
gggcatacctaagaacgggacagta

SEQ ID NO: 165653 - DNA, 25 bp, Saccharomyces pastorianus
aaacgatgtcatgggttctgtgcct

SEQ ID NO: 165654 - DNA, 25 bp, Saccharomyces pastorianus
gggacagtaagaatcctacaacctg

SEQ ID NO: 165655 - DNA, 25 bp, Saccharomyces pastorianus
gcctagacatcccttctttttaaag

SEQ ID NO: 165656 - DNA, 25 bp, Saccharomyces pastorianus
tcacctttaggtgtctcaaacgatg

SEQ ID NO: 165657 - DNA, 25 bp, Saccharomyces pastorianus
actagatcctttgttagctttcccg

SEQ ID NO: 165658 - DNA, 25 bp, Saccharomyces pastorianus
ctatgacaagtactggtttatccct

SEQ ID NO: 165659 - DNA, 25 bp, Saccharomyces pastorianus
ggtgcttttttgttctcacgtccac

SEQ ID NO: 165660 - DNA, 25 bp, Saccharomyces pastorianus
ttacctcgctattatcgcctttcta

SEQ ID NO: 165661 - DNA, 25 bp, Saccharomyces pastorianus
tttgctaagccatctttttcttttt

SEQ ID NO: 165662 - DNA, 25 bp, Saccharomyces pastorianus
tttcagcggtgcttttttgttctca

SEQ ID NO: 165663 - DNA, 25 bp, Saccharomyces pastorianus
ttgttctcacgtccactgccaattt

SEQ ID NO: 165664 - DNA, 25 bp, Saccharomyces pastorianus
tttttctttcttcttacctcgctat

SEQ ID NO: 165665 - DNA, 25 bp, Saccharomyces pastorianus
attatcgcctttctaaacttccttg

SEQ ID NO: 165666 - DNA, 25 bp, Saccharomyces pastorianus
ttggccaagcctttcagcggtgctt

SEQ ID NO: 165667 - DNA, 25 bp, Saccharomyces pastorianus
tttctaaacttccttggccaagcct

SEQ ID NO: 165668 - DNA, 25 bp, Saccharomyces pastorianus
ttctttcttcttacctcgctattat

SEQ ID NO: 165669 - DNA, 25 bp, Saccharomyces pastorianus
caatcttttgctaagccatcttttt

SEQ ID NO: 165670 - DNA, 25 bp, Saccharomyces pastorianus
aaatcgtactgtcggcaatcaactg

SEQ ID NO: 165671 - DNA, 25 bp, Saccharomyces pastorianus
tgtctgtatcaaatcatccgggcgg

SEQ ID NO: 165672 - DNA, 25 bp, Saccharomyces pastorianus
gtcaaaaaatcgtactgtcggcaat

SEQ ID NO: 165673 - DNA, 25 bp, Saccharomyces pastorianus
aaaaatcgtactgtcggcaatcaac

SEQ ID NO: 165674 - DNA, 25 bp, Saccharomyces pastorianus
atgcttttgagaatatgtctgtatc

SEQ ID NO: 165675 - DNA, 25 bp, Saccharomyces pastorianus
atggatgcttttgagaatatgtctg

SEQ ID NO: 165676 - DNA, 25 bp, Saccharomyces pastorianus
tcgtactgtcggcaatcaactgcct

SEQ ID NO: 165677 - DNA, 25 bp, Saccharomyces pastorianus
atttgtcaaaaaatcgtactgtcgg

SEQ ID NO: 165678 - DNA, 25 bp, Saccharomyces pastorianus
tactgtcggcaatcaactgcctttc

SEQ ID NO: 165679 - DNA, 25 bp, Saccharomyces pastorianus
gtctgtatcaaatcatccgggcggt

SEQ ID NO: 165680 - DNA, 25 bp, Saccharomyces pastorianus
gtactgtcggcaatcaactgccttt

SEQ ID NO: 165681 - DNA, 25 bp, Saccharomyces pastorianus
gatattgatcatgacctttttaggt

SEQ ID NO: 165682 - DNA, 25 bp, Saccharomyces pastorianus
gattcgtcaagccataactgattct

SEQ ID NO: 165683 - DNA, 25 bp, Saccharomyces pastorianus
gcagaatcgctaatttcattggcaa

SEQ ID NO: 165684 - DNA, 25 bp, Saccharomyces pastorianus
aatttgctgaaattcctgcagacga

SEQ ID NO: 165685 - DNA, 25 bp, Saccharomyces pastorianus
gaagaaggcggtattttctactgga

SEQ ID NO: 165686 - DNA, 25 bp, Saccharomyces pastorianus
gaacttttatagatcgccagcttac

SEQ ID NO: 165687 - DNA, 25 bp, Saccharomyces pastorianus
gatcgccagcttacaggaaattttt

SEQ ID NO: 165688 - DNA, 25 bp, Saccharomyces pastorianus
gtactggagagtagaccctggtatt

SEQ ID NO: 165689 - DNA, 25 bp, Saccharomyces pastorianus
tcctgcagacgaatgggtataccct

SEQ ID NO: 165690 - DNA, 25 bp, Saccharomyces pastorianus
taccggatggtgattctagagctgt

SEQ ID NO: 165691 - DNA, 25 bp, Saccharomyces pastorianus
tttttggaggcatccagttctggat

SEQ ID NO: 165692 - DNA, 25 bp, Saccharomyces pastorianus
tcatatcgggaaatttagatccagt

SEQ ID NO: 165693 - DNA, 25 bp, Saccharomyces pastorianus
gtcatgaatcttttcttcaggccct

SEQ ID NO: 165694 - DNA, 25 bp, Saccharomyces pastorianus
tcaacccaaattagattcatatcgg

SEQ ID NO: 165695 - DNA, 25 bp, Saccharomyces pastorianus
gtttatgaacaccaggcccggcgga

SEQ ID NO: 165696 - DNA, 25 bp, Saccharomyces pastorianus
ttcaggccctgtcaactgcagatgg

SEQ ID NO: 165697 - DNA, 25 bp, Saccharomyces pastorianus
tcaactgcagatgggctctggaccg

SEQ ID NO: 165698 - DNA, 25 bp, Saccharomyces pastorianus
tctggaccgttggagctcatgctta

SEQ ID NO: 165699 - DNA, 25 bp, Saccharomyces pastorianus
ggagctcatgcttaaaaggccaacg

SEQ ID NO: 165700 - DNA, 25 bp, Saccharomyces pastorianus
attgaccacgtttatgaacaccagg

SEQ ID NO: 165701 - DNA, 25 bp, Saccharomyces pastorianus
gcccggcggatcaacccaaattaga

SEQ ID NO: 165702 - DNA, 25 bp, Saccharomyces pastorianus
aaggccaacgcaattgaccacgttt

SEQ ID NO: 165703 - DNA, 25 bp, Saccharomyces pastorianus
ggactgggaaacaccatacctaaca

SEQ ID NO: 165704 - DNA, 25 bp, Saccharomyces pastorianus
ataccaaaatcttcgcagttagttt

SEQ ID NO: 165705 - DNA, 25 bp, Saccharomyces pastorianus
taagcgcacaacagatcgagtcaat

SEQ ID NO: 165706 - DNA, 25 bp, Saccharomyces pastorianus
atcttacatgatggaccgccctatg

SEQ ID NO: 165707 - DNA, 25 bp, Saccharomyces pastorianus
gtacattttttataagcctggctgg

SEQ ID NO: 165708 - DNA, 25 bp, Saccharomyces pastorianus
aggagcagctatgtgatttcttcga

SEQ ID NO: 165709 - DNA, 25 bp, Saccharomyces pastorianus
ttgcccaagaccaaattccctaata

SEQ ID NO: 165710 - DNA, 25 bp, Saccharomyces pastorianus
tccatctcggtcatgctctaaataa

SEQ ID NO: 165711 - DNA, 25 bp, Saccharomyces pastorianus
gggaaactttccaacattttgccat

SEQ ID NO: 165712 - DNA, 25 bp, Saccharomyces pastorianus
ggactacccatcgagattaaagctt

SEQ ID NO: 165713 - DNA, 25 bp, Saccharomyces pastorianus
gcctggctgggattgtcatggacta

SEQ ID NO: 165714 - DNA, 25 bp, Saccharomyces pastorianus
tgttcatcattcaagggtcattttt

SEQ ID NO: 165715 - DNA, 25 bp, Saccharomyces pastorianus
ttgtcgttttgttcatcattcaagg

SEQ ID NO: 165716 - DNA, 25 bp, Saccharomyces pastorianus
tggtttgtcgttttgttcatcattc

SEQ ID NO: 165717 - DNA, 25 bp, Saccharomyces pastorianus
gtcgttttgttcatcattcaagggt

SEQ ID NO: 165718 - DNA, 25 bp, Saccharomyces pastorianus
ggtttgtcgttttgttcatcattca

SEQ ID NO: 165719 - DNA, 25 bp, Saccharomyces pastorianus
ttcatcattcaagggtcatttttat

SEQ ID NO: 165720 - DNA, 25 bp, Saccharomyces pastorianus
cgttttgttcatcattcaagggtca

SEQ ID NO: 165721 - DNA, 25 bp, Saccharomyces pastorianus
tttgttcatcattcaagggtcattt

SEQ ID NO: 165722 - DNA, 25 bp, Saccharomyces pastorianus
gtttgtcgttttgttcatcattcaa

SEQ ID NO: 165723 - DNA, 25 bp, Saccharomyces pastorianus
gttcatcattcaagggtcattttta

SEQ ID NO: 165724 - DNA, 25 bp, Saccharomyces pastorianus
gttttgttcatcattcaagggtcat

SEQ ID NO: 165725 - DNA, 25 bp, Saccharomyces pastorianus
ataatgtgtatttacaggattcatc

SEQ ID NO: 165726 - DNA, 25 bp, Saccharomyces pastorianus
attgcgactgtttgtgtccatcaag

SEQ ID NO: 165727 - DNA, 25 bp, Saccharomyces pastorianus
gattgtgaaaagacctaaattccta

SEQ ID NO: 165728 - DNA, 25 bp, Saccharomyces pastorianus
cgagccgcatagcatcgatctattt

SEQ ID NO: 165729 - DNA, 25 bp, Saccharomyces pastorianus
taattttaacaagtccgaaagcaat

SEQ ID NO: 165730 - DNA, 25 bp, Saccharomyces pastorianus
gcatattaccacagcgagccgcata

SEQ ID NO: 165731 - DNA, 25 bp, Saccharomyces pastorianus
gaaagcatattaccacagcgagccg

SEQ ID NO: 165732 - DNA, 25 bp, Saccharomyces pastorianus
gcatcgatctatttcatgataagga

SEQ ID NO: 165733 - DNA, 25 bp, Saccharomyces pastorianus
caagtccgaaagcaataatgtgtat

SEQ ID NO: 165734 - DNA, 25 bp, Saccharomyces pastorianus
actccgaccattgcgactgtttgtg

SEQ ID NO: 165735 - DNA, 25 bp, Saccharomyces pastorianus
gtttgtgtccatcaagaaagcatat

SEQ ID NO: 165736 - DNA, 25 bp, Saccharomyces pastorianus
tacccctaatacagtggcgtttaat

SEQ ID NO: 165737 - DNA, 25 bp, Saccharomyces pastorianus
aaatctacccctaatacagtggcgt

SEQ ID NO: 165738 - DNA, 25 bp, Saccharomyces pastorianus
tcgtttttctataccaatttatcag

SEQ ID NO: 165739 - DNA, 25 bp, Saccharomyces pastorianus
gacactggcttaaaaaagtctataa

SEQ ID NO: 165740 - DNA, 25 bp, Saccharomyces pastorianus
agtacaaaaagctttggcatctaga

SEQ ID NO: 165741 - DNA, 25 bp, Saccharomyces pastorianus
gaacaacaagaacagactacagaca

SEQ ID NO: 165742 - DNA, 25 bp, Saccharomyces pastorianus
ggccaagaagaaacttgttcctgaa

SEQ ID NO: 165743 - DNA, 25 bp, Saccharomyces pastorianus
taacagtacgtgattttaagacctt

SEQ ID NO: 165744 - DNA, 25 bp, Saccharomyces pastorianus
gattttaagaccttggcaccacgaa

SEQ ID NO: 165745 - DNA, 25 bp, Saccharomyces pastorianus
gaccttggcaccacgaagatggcta

SEQ ID NO: 165746 - DNA, 25 bp, Saccharomyces pastorianus
gaagatggctaaatgacactatcat

SEQ ID NO: 165747 - DNA, 25 bp, Saccharomyces pastorianus
tctgaaatgcttagagttccctccc

SEQ ID NO: 165748 - DNA, 25 bp, Saccharomyces pastorianus
aaaacacgtgcagcgatcctacgat

SEQ ID NO: 165749 - DNA, 25 bp, Saccharomyces pastorianus
acacgttgaactggtattccttaca

SEQ ID NO: 165750 - DNA, 25 bp, Saccharomyces pastorianus
aagacggctatctttctcgtaacac

SEQ ID NO: 165751 - DNA, 25 bp, Saccharomyces pastorianus
gcgatcctacgataactccgtttga

SEQ ID NO: 165752 - DNA, 25 bp, Saccharomyces pastorianus
ttccgtttccgatttcgctcagaat

SEQ ID NO: 165753 - DNA, 25 bp, Saccharomyces pastorianus
acaaaccctccctcaggaatattga

SEQ ID NO: 165754 - DNA, 25 bp, Saccharomyces pastorianus
gaatgtaagctctactaccagcctg

SEQ ID NO: 165755 - DNA, 25 bp, Saccharomyces pastorianus
cagtttgtcggccttctattagaag

SEQ ID NO: 165756 - DNA, 25 bp, Saccharomyces pastorianus
ggctcgtcccagtatatttcagaat

SEQ ID NO: 165757 - DNA, 25 bp, Saccharomyces pastorianus
agatattaccgatccaatcccctta

SEQ ID NO: 165758 - DNA, 25 bp, Saccharomyces pastorianus
ggtggatgtcatgaccgatctctat

SEQ ID NO: 165759 - DNA, 25 bp, Saccharomyces pastorianus
gatcaggacgatacaattgctttac

SEQ ID NO: 165760 - DNA, 25 bp, Saccharomyces pastorianus
tctactacgcatatctattctccaa

SEQ ID NO: 165761 - DNA, 25 bp, Saccharomyces pastorianus
aggtcagttctatcgctcaggcaag

SEQ ID NO: 165762 - DNA, 25 bp, Saccharomyces pastorianus
gaccgatctctatgcaaaattcttg

SEQ ID NO: 165763 - DNA, 25 bp, Saccharomyces pastorianus
ctggctctggaaaatctaggtattg

SEQ ID NO: 165764 - DNA, 25 bp, Saccharomyces pastorianus
atgacttctattttgctctactacg

SEQ ID NO: 165765 - DNA, 25 bp, Saccharomyces pastorianus
gatgtctatgatgaaaactccgaat

SEQ ID NO: 165766 - DNA, 25 bp, Saccharomyces pastorianus
gtattgttaagcctacgaacgttct

SEQ ID NO: 165767 - DNA, 25 bp, Saccharomyces pastorianus
gtttgttagcatcagaggtcagttc

SEQ ID NO: 165768 - DNA, 25 bp, Saccharomyces pastorianus
gcctacgaacgttctggatgtctat

SEQ ID NO: 165769 - DNA, 25 bp, Saccharomyces pastorianus
tcttctgctctgtgtcgacaagtta

SEQ ID NO: 165770 - DNA, 25 bp, Saccharomyces pastorianus
accactagacggttcttcaactgac

SEQ ID NO: 165771 - DNA, 25 bp, Saccharomyces pastorianus
aggatgaaactgaacgtctcttgcg

SEQ ID NO: 165772 - DNA, 25 bp, Saccharomyces pastorianus
gactacaggctttaaaattcaccaa

SEQ ID NO: 165773 - DNA, 25 bp, Saccharomyces pastorianus
ggaacaggacttggttcttctgctc

SEQ ID NO: 165774 - DNA, 25 bp, Saccharomyces pastorianus
tttggaggccttgggtactttgaag

SEQ ID NO: 165775 - DNA, 25 bp, Saccharomyces pastorianus
cctggcctgcgcttttgaaatataa

SEQ ID NO: 165776 - DNA, 25 bp, Saccharomyces pastorianus
tgaacgtctcttgcgtttggaggcc

SEQ ID NO: 165777 - DNA, 25 bp, Saccharomyces pastorianus
aatcgctgggcagaaatccaccaag

SEQ ID NO: 165778 - DNA, 25 bp, Saccharomyces pastorianus
gaaatacgccgaccaggatgaaact

SEQ ID NO: 165779 - DNA, 25 bp, Saccharomyces pastorianus
gaacggtggtaactcttcgaagaag

SEQ ID NO: 165780 - DNA, 25 bp, Saccharomyces pastorianus
gaaggctaccgattgagtaatatat

SEQ ID NO: 165781 - DNA, 25 bp, Saccharomyces pastorianus
tagtgccctagatttactgctgttg

SEQ ID NO: 165782 - DNA, 25 bp, Saccharomyces pastorianus
gatttggaaggctaccgattgagta

SEQ ID NO: 165783 - DNA, 25 bp, Saccharomyces pastorianus
aacgttgttgtcgattgtggcttaa

SEQ ID NO: 165784 - DNA, 25 bp, Saccharomyces pastorianus
accagattctaaactcaacgttgtt

SEQ ID NO: 165785 - DNA, 25 bp, Saccharomyces pastorianus
actgctgttggctagagagctgaaa

SEQ ID NO: 165786 - DNA, 25 bp, Saccharomyces pastorianus
tatatataacattgccgattcctca

SEQ ID NO: 165787 - DNA, 25 bp, Saccharomyces pastorianus
ttgccgattcctcaaaacaattttt

SEQ ID NO: 165788 - DNA, 25 bp, Saccharomyces pastorianus
gccctagatttactgctgttggcta

SEQ ID NO: 165789 - DNA, 25 bp, Saccharomyces pastorianus
gaattagtgccctagatttactgct

SEQ ID NO: 165790 - DNA, 25 bp, Saccharomyces pastorianus
ctgaaacaggatttggaaggctacc

SEQ ID NO: 165791 - DNA, 25 bp, Saccharomyces pastorianus
aaatttacaaccaatcgctgcccaa

SEQ ID NO: 165792 - DNA, 25 bp, Saccharomyces pastorianus
ggaagccttatatgaatacgctata

SEQ ID NO: 165793 - DNA, 25 bp, Saccharomyces pastorianus
atcgctgcccaaacttccagaaaat

SEQ ID NO: 165794 - DNA, 25 bp, Saccharomyces pastorianus
atcgataaaccgtcaattttgtcat

SEQ ID NO: 165795 - DNA, 25 bp, Saccharomyces pastorianus
ggatttccaatcatacctcaatgca

SEQ ID NO: 165796 - DNA, 25 bp, Saccharomyces pastorianus
atacttggacaatttctgaacgtgc

SEQ ID NO: 165797 - DNA, 25 bp, Saccharomyces pastorianus
gaatagttttgatttagcttgcgta

SEQ ID NO: 165798 - DNA, 25 bp, Saccharomyces pastorianus
aacgtgctgttggattagcgtggta

SEQ ID NO: 165799 - DNA, 25 bp, Saccharomyces pastorianus
atggtaatttccctattagtctgga

SEQ ID NO: 165800 - DNA, 25 bp, Saccharomyces pastorianus
agcttgcgtattatctatagcggca

SEQ ID NO: 165801 - DNA, 25 bp, Saccharomyces pastorianus
gaagcgccaatttacaacggcacgt

SEQ ID NO: 165802 - DNA, 25 bp, Saccharomyces pastorianus
ttttcaatgacactttctgcttcct

SEQ ID NO: 165803 - DNA, 25 bp, Saccharomyces pastorianus
atattatcgcgccttacttagagaa

SEQ ID NO: 165804 - DNA, 25 bp, Saccharomyces pastorianus
gacggtgagcttcaattctttagca

SEQ ID NO: 165805 - DNA, 25 bp, Saccharomyces pastorianus
gtggttttaacttgtcccggatatg

SEQ ID NO: 165806 - DNA, 25 bp, Saccharomyces pastorianus
atacacggaatatctctctctccag

SEQ ID NO: 165807 - DNA, 25 bp, Saccharomyces pastorianus
ggctcaaaagactgggtcactcata

SEQ ID NO: 165808 - DNA, 25 bp, Saccharomyces pastorianus
gacgaacttcatgtgacggctgata

SEQ ID NO: 165809 - DNA, 25 bp, Saccharomyces pastorianus
aagacgttcttgtagcggcgctttc

SEQ ID NO: 165810 - DNA, 25 bp, Saccharomyces pastorianus
gaaacaactcttgtcatacacggaa

SEQ ID NO: 165811 - DNA, 25 bp, Saccharomyces pastorianus
tctcatcaacccgtttctagaatga

SEQ ID NO: 165812 - DNA, 25 bp, Saccharomyces pastorianus
tagcttgaaaacaggatctctcgaa

SEQ ID NO: 165813 - DNA, 25 bp, Saccharomyces pastorianus
gcaatctgtcgaactaagggaccaa

SEQ ID NO: 165814 - DNA, 25 bp, Saccharomyces pastorianus
atagcgagcttcaagcttcacctga

SEQ ID NO: 165815 - DNA, 25 bp, Saccharomyces pastorianus
gaaacagtttggactggcagccttt

SEQ ID NO: 165816 - DNA, 25 bp, Saccharomyces pastorianus
gactggcagcctttgacgagttgaa

SEQ ID NO: 165817 - DNA, 25 bp, Saccharomyces pastorianus
ttgccaagaaacacaatagcgagct

SEQ ID NO: 165818 - DNA, 25 bp, Saccharomyces pastorianus
aatggtattccaagaacgactggta

SEQ ID NO: 165819 - DNA, 25 bp, Saccharomyces pastorianus
tccgctcaaaattcatgcatatgtg

SEQ ID NO: 165820 - DNA, 25 bp, Saccharomyces pastorianus
ggattgatcccctatctttatttga

SEQ ID NO: 165821 - DNA, 25 bp, Saccharomyces pastorianus
gaacgactggtagaatttgccaaga

SEQ ID NO: 165822 - DNA, 25 bp, Saccharomyces pastorianus
gtgctcatctattgggattgatccc

SEQ ID NO: 165823 - DNA, 25 bp, Saccharomyces pastorianus
cttcacctgaattccgctcaaaatt

SEQ ID NO: 165824 - DNA, 25 bp, Saccharomyces pastorianus
gcatattatattatcatccatcttc

SEQ ID NO: 165825 - DNA, 25 bp, Saccharomyces pastorianus
ctcaactacgcattttcctttgcat

SEQ ID NO: 165826 - DNA, 25 bp, Saccharomyces pastorianus
agtacctcaactacgcattttcctt

SEQ ID NO: 165827 - DNA, 25 bp, Saccharomyces pastorianus
gtacctcaactacgcattttccttt

SEQ ID NO: 165828 - DNA, 25 bp, Saccharomyces pastorianus
ttatattatcatccatcttctttgc

SEQ ID NO: 165829 - DNA, 25 bp, Saccharomyces pastorianus
caactacgcattttcctttgcatat

SEQ ID NO: 165830 - DNA, 25 bp, Saccharomyces pastorianus
atggaactttcccagtacctcaact

SEQ ID NO: 165831 - DNA, 25 bp, Saccharomyces pastorianus
gaactttcccagtacctcaactacg

SEQ ID NO: 165832 - DNA, 25 bp, Saccharomyces pastorianus
ttcccagtacctcaactacgcattt

SEQ ID NO: 165833 - DNA, 25 bp, Saccharomyces pastorianus
acgcattttcctttgcatattatat

SEQ ID NO: 165834 - DNA, 25 bp, Saccharomyces pastorianus
actacgcattttcctttgcatatta

SEQ ID NO: 165835 - DNA, 25 bp, Saccharomyces pastorianus
ttggttacagtctagaagattacct

SEQ ID NO: 165836 - DNA, 25 bp, Saccharomyces pastorianus
tacctagaggacataaaattaaacg

SEQ ID NO: 165837 - DNA, 25 bp, Saccharomyces pastorianus
gttgacgttttacagcaaatgactt

SEQ ID NO: 165838 - DNA, 25 bp, Saccharomyces pastorianus
agtagtgacgacttattgaattggt

SEQ ID NO: 165839 - DNA, 25 bp, Saccharomyces pastorianus
acgtaaagctgttgacgttttacag

SEQ ID NO: 165840 - DNA, 25 bp, Saccharomyces pastorianus
atagatgatgaattactgaacagta

SEQ ID NO: 165841 - DNA, 25 bp, Saccharomyces pastorianus
aaagtggagctggaaggtagcaaaa

SEQ ID NO: 165842 - DNA, 25 bp, Saccharomyces pastorianus
gtctagaagattacctagaggacat

SEQ ID NO: 165843 - DNA, 25 bp, Saccharomyces pastorianus
gaaactaacaaaagtggagctggaa

SEQ ID NO: 165844 - DNA, 25 bp, Saccharomyces pastorianus
cttattgaattggttacagtctaga

SEQ ID NO: 165845 - DNA, 25 bp, Saccharomyces pastorianus
gacgttttacagcaaatgactttga

SEQ ID NO: 165846 - DNA, 25 bp, Saccharomyces pastorianus
atttgtaggcccattgataccaaca

SEQ ID NO: 165847 - DNA, 25 bp, Saccharomyces pastorianus
gcacaagttccgcacaaatatataa

SEQ ID NO: 165848 - DNA, 25 bp, Saccharomyces pastorianus
cggaacctattctatggactttact

SEQ ID NO: 165849 - DNA, 25 bp, Saccharomyces pastorianus
aacagtgatttggatggcctaccct

SEQ ID NO: 165850 - DNA, 25 bp, Saccharomyces pastorianus
atggcctaccctgcgccaagagaaa

SEQ ID NO: 165851 - DNA, 25 bp, Saccharomyces pastorianus
gaaaacagacgatgagctccaatct

SEQ ID NO: 165852 - DNA, 25 bp, Saccharomyces pastorianus
tttgccaccaaacgatcccttttct

SEQ ID NO: 165853 - DNA, 25 bp, Saccharomyces pastorianus
ctatggactttactttgccaccaaa

SEQ ID NO: 165854 - DNA, 25 bp, Saccharomyces pastorianus
acgattctgacgttgaatgggttaa

SEQ ID NO: 165855 - DNA, 25 bp, Saccharomyces pastorianus
tagacctccgtttatcggaacctat

SEQ ID NO: 165856 - DNA, 25 bp, Saccharomyces pastorianus
gagctccaatctttacttgcacaag

SEQ ID NO: 165857 - DNA, 25 bp, Saccharomyces pastorianus
cacctgccgctacaaaatctgttag

SEQ ID NO: 165858 - DNA, 25 bp, Saccharomyces pastorianus
ttggcgagaagacagctctgccttt

SEQ ID NO: 165859 - DNA, 25 bp, Saccharomyces pastorianus
aacggtgacatcaacttctactgca

SEQ ID NO: 165860 - DNA, 25 bp, Saccharomyces pastorianus
aggcttggcccagcagatttgttat

SEQ ID NO: 165861 - DNA, 25 bp, Saccharomyces pastorianus
gttttcattaatcatcgagcttatc

SEQ ID NO: 165862 - DNA, 25 bp, Saccharomyces pastorianus
acaacatttgaacctctagacctat

SEQ ID NO: 165863 - DNA, 25 bp, Saccharomyces pastorianus
ggccaatatgatatcctgtgggcta

SEQ ID NO: 165864 - DNA, 25 bp, Saccharomyces pastorianus
ctgtaggtgaaaatccggccaatat

SEQ ID NO: 165865 - DNA, 25 bp, Saccharomyces pastorianus
aaatacgtcgagctaccttcgaatt

SEQ ID NO: 165866 - DNA, 25 bp, Saccharomyces pastorianus
atggtttcatgtttttctgtaggtg

SEQ ID NO: 165867 - DNA, 25 bp, Saccharomyces pastorianus
aaaggcgcttcaaatgagttcacaa

SEQ ID NO: 165868 - DNA, 25 bp, Saccharomyces pastorianus
gtcattcaatatgtactcacggtgt

SEQ ID NO: 165869 - DNA, 25 bp, Saccharomyces pastorianus
tactcacggtgtacttttaggtgtt

SEQ ID NO: 165870 - DNA, 25 bp, Saccharomyces pastorianus
attaggctttttgagctcccctgaa

SEQ ID NO: 165871 - DNA, 25 bp, Saccharomyces pastorianus
gtctccattatctttacttttgcgt

SEQ ID NO: 165872 - DNA, 25 bp, Saccharomyces pastorianus
gagctcccctgaattagccagagat

SEQ ID NO: 165873 - DNA, 25 bp, Saccharomyces pastorianus
ggccgcaactttattgttggacgaa

SEQ ID NO: 165874 - DNA, 25 bp, Saccharomyces pastorianus
gacatcttgtctccattatctttac

SEQ ID NO: 165875 - DNA, 25 bp, Saccharomyces pastorianus
caacgatttgcatcatcccaacaaa

SEQ ID NO: 165876 - DNA, 25 bp, Saccharomyces pastorianus
gtgtcacttgcactaacctcattag

SEQ ID NO: 165877 - DNA, 25 bp, Saccharomyces pastorianus
atactttcaagttggtgagctctta

SEQ ID NO: 165878 - DNA, 25 bp, Saccharomyces pastorianus
gatttattgacactcttaacgaaca

SEQ ID NO: 165879 - DNA, 25 bp, Saccharomyces pastorianus
cgacagacgactattctcacttgtt

SEQ ID NO: 165880 - DNA, 25 bp, Saccharomyces pastorianus
gcagacaacagccactatcataaat

SEQ ID NO: 165881 - DNA, 25 bp, Saccharomyces pastorianus
gagctgcttattaataggtctttta

SEQ ID NO: 165882 - DNA, 25 bp, Saccharomyces pastorianus
tgaatatagcactgcacctacccag

SEQ ID NO: 165883 - DNA, 25 bp, Saccharomyces pastorianus
gctgttgattctactaccttatggt

SEQ ID NO: 165884 - DNA, 25 bp, Saccharomyces pastorianus
aatggaagattcctcccgatcagct

SEQ ID NO: 165885 - DNA, 25 bp, Saccharomyces pastorianus
ttccaacgacttgacagagactctg

SEQ ID NO: 165886 - DNA, 25 bp, Saccharomyces pastorianus
gaatgttgattttttcgtttccctg

SEQ ID NO: 165887 - DNA, 25 bp, Saccharomyces pastorianus
tagtaaaccgacaccaacaaatctt

SEQ ID NO: 165888 - DNA, 25 bp, Saccharomyces pastorianus
ggattctaatcccatgaactcccct

SEQ ID NO: 165889 - DNA, 25 bp, Saccharomyces pastorianus
gtcatatatctcaataccaaggtag

SEQ ID NO: 165890 - DNA, 25 bp, Saccharomyces pastorianus
caaacattttgcagccaacgtcttc

SEQ ID NO: 165891 - DNA, 25 bp, Saccharomyces pastorianus
gctattcagtgccatagggctattt

SEQ ID NO: 165892 - DNA, 25 bp, Saccharomyces pastorianus
gaatgacaaccattttggcctaccc

SEQ ID NO: 165893 - DNA, 25 bp, Saccharomyces pastorianus
ggattttctgtctcctcaaacatgg

SEQ ID NO: 165894 - DNA, 25 bp, Saccharomyces pastorianus
gcaaagccagctttcaagttcaata

SEQ ID NO: 165895 - DNA, 25 bp, Saccharomyces pastorianus
ttggcctacccgtacaggatatact

SEQ ID NO: 165896 - DNA, 25 bp, Saccharomyces pastorianus
atgaccctgaattgatatccagcaa

SEQ ID NO: 165897 - DNA, 25 bp, Saccharomyces pastorianus
ggacaattcttctgtaaagggtcaa

SEQ ID NO: 165898 - DNA, 25 bp, Saccharomyces pastorianus
gaagcacccttctctgcttaaaatg

SEQ ID NO: 165899 - DNA, 25 bp, Saccharomyces pastorianus
gaatcaatacgttcgaagcaccctt

SEQ ID NO: 165900 - DNA, 25 bp, Saccharomyces pastorianus
atattgcctggattttctgtctcct

SEQ ID NO: 165901 - DNA, 25 bp, Saccharomyces pastorianus
aaacagtctttcggagactcagcaa

SEQ ID NO: 165902 - DNA, 25 bp, Saccharomyces pastorianus
actaatcccttagaactagcgctcg

SEQ ID NO: 165903 - DNA, 25 bp, Saccharomyces pastorianus
aatcccttagaactagcgctcgcat

SEQ ID NO: 165904 - DNA, 25 bp, Saccharomyces pastorianus
agcgctcgcatttttggatgataca

SEQ ID NO: 165905 - DNA, 25 bp, Saccharomyces pastorianus
ggaccatcttcagaatgacttaaac

SEQ ID NO: 165906 - DNA, 25 bp, Saccharomyces pastorianus
gttccctggaccatcttcagaatga

SEQ ID NO: 165907 - DNA, 25 bp, Saccharomyces pastorianus
gaatagttccctggaccatcttcag

SEQ ID NO: 165908 - DNA, 25 bp, Saccharomyces pastorianus
tactgtcggataacactaatccctt

SEQ ID NO: 165909 - DNA, 25 bp, Saccharomyces pastorianus
aaacaggataaatcttcaatggaat

SEQ ID NO: 165910 - DNA, 25 bp, Saccharomyces pastorianus
tcaatggaatagaatactgtcggat

SEQ ID NO: 165911 - DNA, 25 bp, Saccharomyces pastorianus
actagcgctcgcatttttggatgat

SEQ ID NO: 165912 - DNA, 25 bp, Saccharomyces pastorianus
ggtctttccataaacagtctttcgg

SEQ ID NO: 165913 - DNA, 25 bp, Saccharomyces pastorianus
agcgctcgcatttttggatgataca

SEQ ID NO: 165914 - DNA, 25 bp, Saccharomyces pastorianus
ggaccatcttcagaatgacttaaac

SEQ ID NO: 165915 - DNA, 25 bp, Saccharomyces pastorianus
gaagacgtggtctttccataaacag

SEQ ID NO: 165916 - DNA, 25 bp, Saccharomyces pastorianus
gttccctggaccatcttcagaatga

SEQ ID NO: 165917 - DNA, 25 bp, Saccharomyces pastorianus
taatcccttagaactagcgctcgca

SEQ ID NO: 165918 - DNA, 25 bp, Saccharomyces pastorianus
gaatagttccctggaccatcttcag

SEQ ID NO: 165919 - DNA, 25 bp, Saccharomyces pastorianus
actgtcggataacactaatccctta

SEQ ID NO: 165920 - DNA, 25 bp, Saccharomyces pastorianus
tcaatggaatagaatactgtcggat

SEQ ID NO: 165921 - DNA, 25 bp, Saccharomyces pastorianus
tttcggagactcagcaatctgctat

SEQ ID NO: 165922 - DNA, 25 bp, Saccharomyces pastorianus
actagcgctcgcatttttggatgat

SEQ ID NO: 165923 - DNA, 25 bp, Saccharomyces pastorianus
taattctacccttggtacaccaact

SEQ ID NO: 165924 - DNA, 25 bp, Saccharomyces pastorianus
aaaccattatctttgcctcaaccaa

SEQ ID NO: 165925 - DNA, 25 bp, Saccharomyces pastorianus
gagcaacaactaaatttcccaccgg

SEQ ID NO: 165926 - DNA, 25 bp, Saccharomyces pastorianus
agattctctagatgccgattcgcca

SEQ ID NO: 165927 - DNA, 25 bp, Saccharomyces pastorianus
aacttctttatctagcattcgctca

SEQ ID NO: 165928 - DNA, 25 bp, Saccharomyces pastorianus
gattcgccatgtctatacaccaaac

SEQ ID NO: 165929 - DNA, 25 bp, Saccharomyces pastorianus
gaatgcagcttttcaaaatccctta

SEQ ID NO: 165930 - DNA, 25 bp, Saccharomyces pastorianus
tcgcaatctatatcttctacgccaa

SEQ ID NO: 165931 - DNA, 25 bp, Saccharomyces pastorianus
ttctatatcagacagggcgacgact

SEQ ID NO: 165932 - DNA, 25 bp, Saccharomyces pastorianus
aggtgtagaatcagcctcgcaatct

SEQ ID NO: 165933 - DNA, 25 bp, Saccharomyces pastorianus
acctgtgtcaactgatacgccattg

SEQ ID NO: 165934 - DNA, 25 bp, Saccharomyces pastorianus
aaaacggctctatgtgcccgaacgg

SEQ ID NO: 165935 - DNA, 25 bp, Saccharomyces pastorianus
ggcataagactacggtcatccccat

SEQ ID NO: 165936 - DNA, 25 bp, Saccharomyces pastorianus
agtcggcggctctactgccaagaaa

SEQ ID NO: 165937 - DNA, 25 bp, Saccharomyces pastorianus
cggtatcttcgctatattcttttta

SEQ ID NO: 165938 - DNA, 25 bp, Saccharomyces pastorianus
gagttacacgacatatcgccatctt

SEQ ID NO: 165939 - DNA, 25 bp, Saccharomyces pastorianus
ggaaacctacacaattgctcgtatt

SEQ ID NO: 165940 - DNA, 25 bp, Saccharomyces pastorianus
gagacttcagtacaaggcctgcgtt

SEQ ID NO: 165941 - DNA, 25 bp, Saccharomyces pastorianus
tttgggtatcttcatcggtatcttc

SEQ ID NO: 165942 - DNA, 25 bp, Saccharomyces pastorianus
gtccagccttgccaacagggagttc

SEQ ID NO: 165943 - DNA, 25 bp, Saccharomyces pastorianus
tgctcgtatttcttcgaagtccgca

SEQ ID NO: 165944 - DNA, 25 bp, Saccharomyces pastorianus
gacgggtctcgctggagtaaatttt

SEQ ID NO: 165945 - DNA, 25 bp, Saccharomyces pastorianus
catgccaaacatgccgggtatgcca

SEQ ID NO: 165946 - DNA, 25 bp, Saccharomyces pastorianus
gtagctaaaggttcaggtacttctg

SEQ ID NO: 165947 - DNA, 25 bp, Saccharomyces pastorianus
caggtacttctgtgttcgaggtaga

SEQ ID NO: 165948 - DNA, 25 bp, Saccharomyces pastorianus
cgggtatgccaaacatgcctggtat

SEQ ID NO: 165949 - DNA, 25 bp, Saccharomyces pastorianus
agctgaagcaaaatccaggtctaat

SEQ ID NO: 165950 - DNA, 25 bp, Saccharomyces pastorianus
gaatgttcattgaagagcctacaag

SEQ ID NO: 165951 - DNA, 25 bp, Saccharomyces pastorianus
aaacatgcctggtatgcccaatatg

SEQ ID NO: 165952 - DNA, 25 bp, Saccharomyces pastorianus
ggtatgccaaaagtgactccacaaa

SEQ ID NO: 165953 - DNA, 25 bp, Saccharomyces pastorianus
tgctaggatgcctggcatgccaaac

SEQ ID NO: 165954 - DNA, 25 bp, Saccharomyces pastorianus
caagaatggttcgtgtagctaaagg

SEQ ID NO: 165955 - DNA, 25 bp, Saccharomyces pastorianus
aagaatggcacaaaccgcaacccag

SEQ ID NO: 165956 - DNA, 25 bp, Saccharomyces pastorianus
gtcattcatatctaaactgttgggt

SEQ ID NO: 165957 - DNA, 25 bp, Saccharomyces pastorianus
aaccaagatggacggccacgctaga

SEQ ID NO: 165958 - DNA, 25 bp, Saccharomyces pastorianus
tggttttagatgcttccattggtca

SEQ ID NO: 165959 - DNA, 25 bp, Saccharomyces pastorianus
aatttcggccgttgcagccacaaac

SEQ ID NO: 165960 - DNA, 25 bp, Saccharomyces pastorianus
aaggctttcaaagaatcgtccgatt

SEQ ID NO: 165961 - DNA, 25 bp, Saccharomyces pastorianus
aggtgagcacattcatgatttggaa

SEQ ID NO: 165962 - DNA, 25 bp, Saccharomyces pastorianus
gtattggtgatatagagagtctctt

SEQ ID NO: 165963 - DNA, 25 bp, Saccharomyces pastorianus
ttccattggtcaagctgcagagcaa

SEQ ID NO: 165964 - DNA, 25 bp, Saccharomyces pastorianus
gttctcgcctaagtcattcatatct

SEQ ID NO: 165965 - DNA, 25 bp, Saccharomyces pastorianus
tatctttattggtacaggtgagcac

SEQ ID NO: 165966 - DNA, 25 bp, Saccharomyces pastorianus
ttggaaaagttctcgcctaagtcat

SEQ ID NO: 165967 - DNA, 25 bp, Saccharomyces pastorianus
tcacgctcaggagaaactcgcgctg

SEQ ID NO: 165968 - DNA, 25 bp, Saccharomyces pastorianus
aaattgatctgcgacgaggaccgtg

SEQ ID NO: 165969 - DNA, 25 bp, Saccharomyces pastorianus
gataaatccgtcacaggcgttgcct

SEQ ID NO: 165970 - DNA, 25 bp, Saccharomyces pastorianus
actcgcgctggtaaaatcaactttg

SEQ ID NO: 165971 - DNA, 25 bp, Saccharomyces pastorianus
gcgattcctgggtacaactagtcaa

SEQ ID NO: 165972 - DNA, 25 bp, Saccharomyces pastorianus
tttgatcgtgcagactacattgagt

SEQ ID NO: 165973 - DNA, 25 bp, Saccharomyces pastorianus
ctacatgataatccttctggtgcaa

SEQ ID NO: 165974 - DNA, 25 bp, Saccharomyces pastorianus
tagatttgaatcttgtcgacgacat

SEQ ID NO: 165975 - DNA, 25 bp, Saccharomyces pastorianus
ggtggacaaaccagtaggctcctct

SEQ ID NO: 165976 - DNA, 25 bp, Saccharomyces pastorianus
gtaggttacacacctttgatgtgga

SEQ ID NO: 165977 - DNA, 25 bp, Saccharomyces pastorianus
aggcgttgccttgattcattatatc

SEQ ID NO: 165978 - DNA, 25 bp, Saccharomyces pastorianus
aactcgggtacctcagattttactg

SEQ ID NO: 165979 - DNA, 25 bp, Saccharomyces pastorianus
gaaattcacgatgtcaacttcaaac

SEQ ID NO: 165980 - DNA, 25 bp, Saccharomyces pastorianus
ggactaactcgggtacctcagattt

SEQ ID NO: 165981 - DNA, 25 bp, Saccharomyces pastorianus
gatatctcggactaactcgggtacc

SEQ ID NO: 165982 - DNA, 25 bp, Saccharomyces pastorianus
aagacgatgtttatgaaattcacga

SEQ ID NO: 165983 - DNA, 25 bp, Saccharomyces pastorianus
caggcagtatccaagacgatgttta

SEQ ID NO: 165984 - DNA, 25 bp, Saccharomyces pastorianus
ccgtttttaccaggcagtatccaag

SEQ ID NO: 165985 - DNA, 25 bp, Saccharomyces pastorianus
tttaccaggcagtatccaagacgat

SEQ ID NO: 165986 - DNA, 25 bp, Saccharomyces pastorianus
tcacgatgtcaacttcaaacaaaga

SEQ ID NO: 165987 - DNA, 25 bp, Saccharomyces pastorianus
cgggtacctcagattttactggaga

SEQ ID NO: 165988 - DNA, 25 bp, Saccharomyces pastorianus
aatgaaccacagatatctcggacta

SEQ ID NO: 165989 - DNA, 25 bp, Saccharomyces pastorianus
gattttccaacaacaatgtctctct

SEQ ID NO: 165990 - DNA, 25 bp, Saccharomyces pastorianus
tggtttgccacgaccttattcaata

SEQ ID NO: 165991 - DNA, 25 bp, Saccharomyces pastorianus
gcaggccaagcttttattgaaggaa

SEQ ID NO: 165992 - DNA, 25 bp, Saccharomyces pastorianus
aaaccgatgcttattgatgacttca

SEQ ID NO: 165993 - DNA, 25 bp, Saccharomyces pastorianus
atcaggttcaatctttcaactctag

SEQ ID NO: 165994 - DNA, 25 bp, Saccharomyces pastorianus
atgtctctctatttcagttaactgg

SEQ ID NO: 165995 - DNA, 25 bp, Saccharomyces pastorianus
acatcaaacgcatccgattttccaa

SEQ ID NO: 165996 - DNA, 25 bp, Saccharomyces pastorianus
atatttggtgccttgtcttacgttc

SEQ ID NO: 165997 - DNA, 25 bp, Saccharomyces pastorianus
agatgaaaccctctccactaaagat

SEQ ID NO: 165998 - DNA, 25 bp, Saccharomyces pastorianus
agacatttatatcctccatcattcg

SEQ ID NO: 165999 - DNA, 25 bp, Saccharomyces pastorianus
gagcccatgctattcaaatcaggtt

SEQ ID NO: 166000 - DNA, 25 bp, Saccharomyces pastorianus
ggtcttttaatgctacttttctctt

SEQ ID NO: 166001 - DNA, 25 bp, Saccharomyces pastorianus
aataccttcaagctagccattatgg

SEQ ID NO: 166002 - DNA, 25 bp, Saccharomyces pastorianus
tgttctgctcttcgatgtgttcaaa

SEQ ID NO: 166003 - DNA, 25 bp, Saccharomyces pastorianus
gtgataccgccaagcaagtaaactg

SEQ ID NO: 166004 - DNA, 25 bp, Saccharomyces pastorianus
gcaaaaatgtgataccgccaagcaa

SEQ ID NO: 166005 - DNA, 25 bp, Saccharomyces pastorianus
aatgctacttttctcttgctgttct

SEQ ID NO: 166006 - DNA, 25 bp, Saccharomyces pastorianus
gtaaactgcgagaaataccttcaag

SEQ ID NO: 166007 - DNA, 25 bp, Saccharomyces pastorianus
ccctttctcctggttattatacaag

SEQ ID NO: 166008 - DNA, 25 bp, Saccharomyces pastorianus
atgtgttcaaaaccctttctcctgg

SEQ ID NO: 166009 - DNA, 25 bp, Saccharomyces pastorianus
aaatgtgccataccaattaggtgca

SEQ ID NO: 166010 - DNA, 25 bp, Saccharomyces pastorianus
caagctagccattatggtcttttaa

SEQ ID NO: 166011 - DNA, 25 bp, Saccharomyces pastorianus
gcatctgtcagtgggctaaccaatt

SEQ ID NO: 166012 - DNA, 25 bp, Saccharomyces pastorianus
actatcttctttggtggttgcatct

SEQ ID NO: 166013 - DNA, 25 bp, Saccharomyces pastorianus
ttctttggtggttgcatctgtcagt

SEQ ID NO: 166014 - DNA, 25 bp, Saccharomyces pastorianus
gtggttgcatctgtcagtgggctaa

SEQ ID NO: 166015 - DNA, 25 bp, Saccharomyces pastorianus
ttaccgctccaattgccttgacaac

SEQ ID NO: 166016 - DNA, 25 bp, Saccharomyces pastorianus
gacaacaggaccactatcttctttg

SEQ ID NO: 166017 - DNA, 25 bp, Saccharomyces pastorianus
aattgccttgacaacaggaccacta

SEQ ID NO: 166018 - DNA, 25 bp, Saccharomyces pastorianus
gtcagtgggctaaccaatttgtttt

SEQ ID NO: 166019 - DNA, 25 bp, Saccharomyces pastorianus
aatttgttttggctgttgccctgga

SEQ ID NO: 166020 - DNA, 25 bp, Saccharomyces pastorianus
tgttgccctggacccataaagttaa

SEQ ID NO: 166021 - DNA, 25 bp, Saccharomyces pastorianus
ttggctgttgccctggacccataaa

SEQ ID NO: 166022 - DNA, 25 bp, Saccharomyces pastorianus
gtgccgttctggacatggttaccga

SEQ ID NO: 166023 - DNA, 25 bp, Saccharomyces pastorianus
gtgcagtatccccaatggtgcgttt

SEQ ID NO: 166024 - DNA, 25 bp, Saccharomyces pastorianus
gtgagtccagattgtacacctgtac

SEQ ID NO: 166025 - DNA, 25 bp, Saccharomyces pastorianus
gagacgtactgttcactatctgtgc

SEQ ID NO: 166026 - DNA, 25 bp, Saccharomyces pastorianus
atgtgtttcctttgtgtgcagtatc

SEQ ID NO: 166027 - DNA, 25 bp, Saccharomyces pastorianus
ggattgtacttgcagttgttctcaa

SEQ ID NO: 166028 - DNA, 25 bp, Saccharomyces pastorianus
gctgggcttggatattactagtcac

SEQ ID NO: 166029 - DNA, 25 bp, Saccharomyces pastorianus
atggttaccgacagatccagcaccg

SEQ ID NO: 166030 - DNA, 25 bp, Saccharomyces pastorianus
tactggatgcgctagacggaaccat

SEQ ID NO: 166031 - DNA, 25 bp, Saccharomyces pastorianus
agcaccgctggcttgatgtgtttcc

SEQ ID NO: 166032 - DNA, 25 bp, Saccharomyces pastorianus
acaatcaggtttccagtctgggtgc

SEQ ID NO: 166033 - DNA, 25 bp, Saccharomyces pastorianus
aatcgtgttttactcatttgtgaca

SEQ ID NO: 166034 - DNA, 25 bp, Saccharomyces pastorianus
gttggaccttcttcgataaatcgtg

SEQ ID NO: 166035 - DNA, 25 bp, Saccharomyces pastorianus
gaagttgattcctctacatttataa

SEQ ID NO: 166036 - DNA, 25 bp, Saccharomyces pastorianus
gaattcagcctccattgtacaagac

SEQ ID NO: 166037 - DNA, 25 bp, Saccharomyces pastorianus
gtgataccgaatgttggaccttctt

SEQ ID NO: 166038 - DNA, 25 bp, Saccharomyces pastorianus
cagtctgtctttaaccttggtatct

SEQ ID NO: 166039 - DNA, 25 bp, Saccharomyces pastorianus
gggctaccaattacacagtctgtct

SEQ ID NO: 166040 - DNA, 25 bp, Saccharomyces pastorianus
gaaagtggtaccatcaactggcaaa

SEQ ID NO: 166041 - DNA, 25 bp, Saccharomyces pastorianus
atggttcccaatctcggtattgcaa

SEQ ID NO: 166042 - DNA, 25 bp, Saccharomyces pastorianus
acaagacaacttggcggctgcgacg

SEQ ID NO: 166043 - DNA, 25 bp, Saccharomyces pastorianus
taggcttttagcttctccaatgaga

SEQ ID NO: 166044 - DNA, 25 bp, Saccharomyces pastorianus
gagccagagactttagattcttcca

SEQ ID NO: 166045 - DNA, 25 bp, Saccharomyces pastorianus
tggtaaggtccaaattttttctctg

SEQ ID NO: 166046 - DNA, 25 bp, Saccharomyces pastorianus
ttggcatccgaagggtctgcatttt

SEQ ID NO: 166047 - DNA, 25 bp, Saccharomyces pastorianus
cttccaaattggtctcgtctataaa

SEQ ID NO: 166048 - DNA, 25 bp, Saccharomyces pastorianus
aaactcgtactttctgatgactaca

SEQ ID NO: 166049 - DNA, 25 bp, Saccharomyces pastorianus
atgtggctgacccagaattctgtgc

SEQ ID NO: 166050 - DNA, 25 bp, Saccharomyces pastorianus
ttttctctgacatctactattccaa

SEQ ID NO: 166051 - DNA, 25 bp, Saccharomyces pastorianus
gcaaggtgatgctcttaggtataac

SEQ ID NO: 166052 - DNA, 25 bp, Saccharomyces pastorianus
tagatttgctttacccctacgtgac

SEQ ID NO: 166053 - DNA, 25 bp, Saccharomyces pastorianus
tttgcacgagagtggcttggcatcc

SEQ ID NO: 166054 - DNA, 25 bp, Saccharomyces pastorianus
acgtgactgctgtgttattcattca

SEQ ID NO: 166055 - DNA, 25 bp, Saccharomyces pastorianus
tggttactcctggatcgacggatta

SEQ ID NO: 166056 - DNA, 25 bp, Saccharomyces pastorianus
acaggagaaccagatgctaagccat

SEQ ID NO: 166057 - DNA, 25 bp, Saccharomyces pastorianus
gggtagtgacattccaaccaccaaa

SEQ ID NO: 166058 - DNA, 25 bp, Saccharomyces pastorianus
gatgctaagccatatttaccagaag

SEQ ID NO: 166059 - DNA, 25 bp, Saccharomyces pastorianus
aaagaagctttctggtacagactaa

SEQ ID NO: 166060 - DNA, 25 bp, Saccharomyces pastorianus
gaccgtggctgacaccgttatgaga

SEQ ID NO: 166061 - DNA, 25 bp, Saccharomyces pastorianus
ggattaaaagatactgccgaagcag

SEQ ID NO: 166062 - DNA, 25 bp, Saccharomyces pastorianus
aaaattcgatgctttgttccctcaa

SEQ ID NO: 166063 - DNA, 25 bp, Saccharomyces pastorianus
gaaggcattcgacaccacaggagaa

SEQ ID NO: 166064 - DNA, 25 bp, Saccharomyces pastorianus
ttgttccctcaaaagaccgtggctg

SEQ ID NO: 166065 - DNA, 25 bp, Saccharomyces pastorianus
aatgtttgccagtccaaaggccgaa

SEQ ID NO: 166066 - DNA, 25 bp, Saccharomyces pastorianus
tgcaaaggccactaacgatgtcgaa

SEQ ID NO: 166067 - DNA, 25 bp, Saccharomyces pastorianus
attgctgcccgtgaaactgcaaagg

SEQ ID NO: 166068 - DNA, 25 bp, Saccharomyces pastorianus
tacggtgttctattgtcgggtggtt

SEQ ID NO: 166069 - DNA, 25 bp, Saccharomyces pastorianus
gcaagacatctagcaggtatcgacg

SEQ ID NO: 166070 - DNA, 25 bp, Saccharomyces pastorianus
accgggccacgtatacgattctaag

SEQ ID NO: 166071 - DNA, 25 bp, Saccharomyces pastorianus
ttaatggccgaagtcccatacggtg

SEQ ID NO: 166072 - DNA, 25 bp, Saccharomyces pastorianus
ttgccaaattcatcggctctattca

SEQ ID NO: 166073 - DNA, 25 bp, Saccharomyces pastorianus
gacggtaagctacacactgctggtt

SEQ ID NO: 166074 - DNA, 25 bp, Saccharomyces pastorianus
acatggcaattagacactccttaga

SEQ ID NO: 166075 - DNA, 25 bp, Saccharomyces pastorianus
gtttgactgacgactgtgacactat

SEQ ID NO: 166076 - DNA, 25 bp, Saccharomyces pastorianus
ggtttggactcctctttaatcgctt

SEQ ID NO: 166077 - DNA, 25 bp, Saccharomyces pastorianus
tagtgtttttataccaactctcaat

SEQ ID NO: 166078 - DNA, 25 bp, Saccharomyces pastorianus
aactctcaattctgggtgactgctc

SEQ ID NO: 166079 - DNA, 25 bp, Saccharomyces pastorianus
atgcaatggcttcgatgagggtaat

SEQ ID NO: 166080 - DNA, 25 bp, Saccharomyces pastorianus
tatctacaaacggaagtgaggcatc

SEQ ID NO: 166081 - DNA, 25 bp, Saccharomyces pastorianus
gcaagtttgaatgcaatggcttcga

SEQ ID NO: 166082 - DNA, 25 bp, Saccharomyces pastorianus
aattgttctcgcatataattgcatt

SEQ ID NO: 166083 - DNA, 25 bp, Saccharomyces pastorianus
gaccttataatctcacaaattgttc

SEQ ID NO: 166084 - DNA, 25 bp, Saccharomyces pastorianus
tgagtacactggaaagctgcctttt

SEQ ID NO: 166085 - DNA, 25 bp, Saccharomyces pastorianus
gaggcatcgattgcttctcgtatga

SEQ ID NO: 166086 - DNA, 25 bp, Saccharomyces pastorianus
caattgacagtttacgagaccttat

SEQ ID NO: 166087 - DNA, 25 bp, Saccharomyces pastorianus
ctgggtgactgctcaacaattgaca

SEQ ID NO: 166088 - DNA, 25 bp, Saccharomyces pastorianus
gatacaggccagtaatgtacccagt

SEQ ID NO: 166089 - DNA, 25 bp, Saccharomyces pastorianus
ggcactgcaaatgcggttgacacac

SEQ ID NO: 166090 - DNA, 25 bp, Saccharomyces pastorianus
agctcacccgcgatattctgtatag

SEQ ID NO: 166091 - DNA, 25 bp, Saccharomyces pastorianus
aaagaaggactcacagcagactggt

SEQ ID NO: 166092 - DNA, 25 bp, Saccharomyces pastorianus
ggaaaacccgctattcagagataag

SEQ ID NO: 166093 - DNA, 25 bp, Saccharomyces pastorianus
gccattcaattggtggtctacgtcc

SEQ ID NO: 166094 - DNA, 25 bp, Saccharomyces pastorianus
gtacccaatgagctgttgccattca

SEQ ID NO: 166095 - DNA, 25 bp, Saccharomyces pastorianus
ggtgaaccccataaggcagcaacat

SEQ ID NO: 166096 - DNA, 25 bp, Saccharomyces pastorianus
aagccgtttgacaaggcactgcaaa

SEQ ID NO: 166097 - DNA, 25 bp, Saccharomyces pastorianus
ctatgactttagatcgctgcccaaa

SEQ ID NO: 166098 - DNA, 25 bp, Saccharomyces pastorianus
gagaaagtccttgcaaacgttatta

SEQ ID NO: 166099 - DNA, 25 bp, Saccharomyces pastorianus
gccagtccagcttccttggaatatg

SEQ ID NO: 166100 - DNA, 25 bp, Saccharomyces pastorianus
tcatcttatcaacagcagccatttc

SEQ ID NO: 166101 - DNA, 25 bp, Saccharomyces pastorianus
tgaagccagctttctctgggtctaa

SEQ ID NO: 166102 - DNA, 25 bp, Saccharomyces pastorianus
agcttgccggcaaaatgggatcctg

SEQ ID NO: 166103 - DNA, 25 bp, Saccharomyces pastorianus
aatagtgccgcatcatcttatcaac

SEQ ID NO: 166104 - DNA, 25 bp, Saccharomyces pastorianus
ctccaccttccacaaattattatca

SEQ ID NO: 166105 - DNA, 25 bp, Saccharomyces pastorianus
acaagggtagctgtaatggccgtac

SEQ ID NO: 166106 - DNA, 25 bp, Saccharomyces pastorianus
attacaacaaatccccacgcaaaat

SEQ ID NO: 166107 - DNA, 25 bp, Saccharomyces pastorianus
tgggtctaacggtccatccaatctt

SEQ ID NO: 166108 - DNA, 25 bp, Saccharomyces pastorianus
gtcgaagctctttatcaatttgatc

SEQ ID NO: 166109 - DNA, 25 bp, Saccharomyces pastorianus
taccggtattttcccagcaaactat

SEQ ID NO: 166110 - DNA, 25 bp, Saccharomyces pastorianus
gtagaacttctactgcgatttcccg

SEQ ID NO: 166111 - DNA, 25 bp, Saccharomyces pastorianus
actggcctgcatggatccgttggag

SEQ ID NO: 166112 - DNA, 25 bp, Saccharomyces pastorianus
gttacctttgtgactggcgatccag

SEQ ID NO: 166113 - DNA, 25 bp, Saccharomyces pastorianus
agaaggcgactctagtggtgcgaat

SEQ ID NO: 166114 - DNA, 25 bp, Saccharomyces pastorianus
gtgcgaatgacgaagctccagatct

SEQ ID NO: 166115 - DNA, 25 bp, Saccharomyces pastorianus
gtcgccactctacattccataggta

SEQ ID NO: 166116 - DNA, 25 bp, Saccharomyces pastorianus
aatcttagttatttgtgtcgcctac

SEQ ID NO: 166117 - DNA, 25 bp, Saccharomyces pastorianus
tagacagatcgatggcgcttcttcg

SEQ ID NO: 166118 - DNA, 25 bp, Saccharomyces pastorianus
gagttacactgtcctactgtcaatc

SEQ ID NO: 166119 - DNA, 25 bp, Saccharomyces pastorianus
tgcgatttcccgtacgagaactaga

SEQ ID NO: 166120 - DNA, 25 bp, Saccharomyces pastorianus
gcttcttcgccttcttctaatgaag

SEQ ID NO: 166121 - DNA, 25 bp, Saccharomyces pastorianus
actttagccatcgttgaattacaga

SEQ ID NO: 166122 - DNA, 25 bp, Saccharomyces pastorianus
acactgttatgcaagaggccctgga

SEQ ID NO: 166123 - DNA, 25 bp, Saccharomyces pastorianus
gaggccatggactgaatttcctgac

SEQ ID NO: 166124 - DNA, 25 bp, Saccharomyces pastorianus
agattggcacgaggcttgggacatc

SEQ ID NO: 166125 - DNA, 25 bp, Saccharomyces pastorianus
tttggccatttgctacccagacatt

SEQ ID NO: 166126 - DNA, 25 bp, Saccharomyces pastorianus
gaatttcctgaccaagtggctattc

SEQ ID NO: 166127 - DNA, 25 bp, Saccharomyces pastorianus
gggacatcgtgaccaagacttttgc

SEQ ID NO: 166128 - DNA, 25 bp, Saccharomyces pastorianus
cagagagttttggtcgatctagaaa

SEQ ID NO: 166129 - DNA, 25 bp, Saccharomyces pastorianus
gaaaaatggcccgtcggcctctttg

SEQ ID NO: 166130 - DNA, 25 bp, Saccharomyces pastorianus
gatgtggccaaaaaattccccaagg

SEQ ID NO: 166131 - DNA, 25 bp, Saccharomyces pastorianus
atgatatcaactggttcttcttgca

SEQ ID NO: 166132 - DNA, 25 bp, Saccharomyces pastorianus
gttgccaaccatgacgttgcactga

SEQ ID NO: 166133 - DNA, 25 bp, Saccharomyces pastorianus
tcgctttccctatgtttggctagaa

SEQ ID NO: 166134 - DNA, 25 bp, Saccharomyces pastorianus
gctagcgctatgactcctggtaagg

SEQ ID NO: 166135 - DNA, 25 bp, Saccharomyces pastorianus
gccttgtgtttgaccgttttgatga

SEQ ID NO: 166136 - DNA, 25 bp, Saccharomyces pastorianus
ggttctcgcaaatcattgccgggat

SEQ ID NO: 166137 - DNA, 25 bp, Saccharomyces pastorianus
ctattcattgtccatgttgccttga

SEQ ID NO: 166138 - DNA, 25 bp, Saccharomyces pastorianus
ttttcgccaattctttaggcctggg

SEQ ID NO: 166139 - DNA, 25 bp, Saccharomyces pastorianus
ggctgctccagatctagaggcttgt

SEQ ID NO: 166140 - DNA, 25 bp, Saccharomyces pastorianus
ggttctccgttatgttttccatctg

SEQ ID NO: 166141 - DNA, 25 bp, Saccharomyces pastorianus
ttcccatcggtatttctctattcat

SEQ ID NO: 166142 - DNA, 25 bp, Saccharomyces pastorianus
gattgccattggtttcgggttctcc

SEQ ID NO: 166143 - DNA, 25 bp, Saccharomyces pastorianus
tgattgccatcggtttcggattttc

SEQ ID NO: 166144 - DNA, 25 bp, Saccharomyces pastorianus
tcggattttccgtcatgttttctat

SEQ ID NO: 166145 - DNA, 25 bp, Saccharomyces pastorianus
caagcgccatgacacctggtgaagt

SEQ ID NO: 166146 - DNA, 25 bp, Saccharomyces pastorianus
tgtttatcgcacacgtcgctttgac

SEQ ID NO: 166147 - DNA, 25 bp, Saccharomyces pastorianus
gcttacgttatctgcaatgtcgcta

SEQ ID NO: 166148 - DNA, 25 bp, Saccharomyces pastorianus
gaaaccaactttatggccgcgctgc

SEQ ID NO: 166149 - DNA, 25 bp, Saccharomyces pastorianus
gaagtcctctttgccaattctttgg

SEQ ID NO: 166150 - DNA, 25 bp, Saccharomyces pastorianus
gcaccgctatcctatgtttaacagt

SEQ ID NO: 166151 - DNA, 25 bp, Saccharomyces pastorianus
taaccatgatgtcgcactcgttgca

SEQ ID NO: 166152 - DNA, 25 bp, Saccharomyces pastorianus
gtctctcctacaagatgtgtcgtta

SEQ ID NO: 166153 - DNA, 25 bp, Saccharomyces pastorianus
ttcctggagatgttcggcaccgcta

SEQ ID NO: 166154 - DNA, 473 bp, Saccharomyces pastorianus
attatgtattatcaatgggtgctattttctcattatttgcaggatactattattgaagtcctcaaattttaggtttaaattataacgaaaaattagctcaaattcaattctgattaatcttcatcggggctaatgttatcttcttccctatgcatttcttaggtattaatggtatgcccagaagaattccagattaccctgatgctttcgctggttgaaattatgtagcttctattggttcatttattgcacttatctcattattcttattcatctatattttatatgatcaattagttaatggtttaaataataaagttactaataaatcagttgtttactctaaagcacccgattttgttgaatctaatatgatcttcaatttaaatacagttaaatcttcatctattgaattcttattaacttctccaccagctgtacattcattcaatacaccagctgtacaatcttaa

SEQ ID NO: 166155 - DNA, 2565 bp, Saccharomyces pastorianus
atggtacaaagatgattatattcaacaaatgcaaaagatattgcagtattatattttatgttagctatttttagtggtatggcaggaacagcaatgtctttaatcattagattagaattagctgcacctggttcacaatatttacaaggaaatgctcagttatttaatgttttagtagttggtcatgctgtattaatgattttctgtgcgccattttgcttaatttatcactgtattgaagtgttaattgataaacatatctctgtttattcaataaatgaaaactttaccgtatcattttggttctgattcttagtagtaacatacatagaatttagatacgtaaaccatatggcttactcagttggggccaactcaacggggacaatagcatgccataaaagcgctggagtaaaacagccagtgcaaggtaagaactgttcgatggctaggttaacgaactccttacaagaatgtttagggttctcattaactccttcccactcggggattgtggttcatgcttgtgtattggaagaagaggtacacgagttaaccaaatatgaatcattaactttaagtaaaagttgacattcggagagctgtacgagttcaaatggtaaattaagaaatatgggattgtccgaaaggggaaactctggggataacggagtcttcatagtacccaaatttaatttaaataaagtgagatattttagtactttatctagattaaatgtaaggaaggaagacagtttaacgtatttaacaaagataaatactacggatttttccgagttaaataaattaatagaaaataattataataatcctgaaaacattaatactagaattttaaaattaatgtcagatattagattgttattaattgcttataataaaattaaaagtaagaaaggtaacatatctaaaggttctaataatattaccttagatggaattaatatttcatatttaaataaattatctaaagatattaatactaatatgtttaaattttctcctgttagaagagttgaaattcctaaaacatctggaggatttagacctttaagtgttggtaatcctagagaaaaaattgtacaagaaagtatgagaataattttagaaattatttataataatagtttttctaattattcacatgggtttagaccaaacttatcttgtttaacagctattattcattgtaaaaattatatgcaacactgtaattgatttattaaggtagacttaaataaatgttttgatacaattccacataatatgttaattaatgtattaaatgagagaatcaaagataaaggtttcattgatttattatataaattattaagagctggatatgttgataaacataataattatcatcatacaactttaggaattcttcaaggtagtgttgtcagtcctattttatgtaatattttcttagataaattagataaatatttagaaaataagtttgagaatgaattcaatattggatctatgtctaatagaagtagaaatccaatttataatgatttatcatctaaaattagaagatgtaaattattatctgataaattaaaattgattagattaagagaccattaccaaagaaatttgggatctgataaaagctttaaaagagcttattttgttagatatgctgatgatattatcattggtgtaatgggttctcatgatgattgtaaaaatattttaaacgatataaataatttcttaacagaaaatttaggtatgtctattaatatagataaatccattattaaacattctaaagaaggagttagttttttagggtatgatgtaaaagttacaccttgagaaataagaccttatagaatgattaaaaaaggtgataaatttattagggttagacatcatactagtttagttgttaatgcccctatcagaagtattgtaataaaattaaataaaaatggttattgttctcatggaatagttggaaaacccataggggttggaagattaattcatgaagaaatgaaaaccattttaatgcattatttagctgttggtagaggtattataaattattatagattagctaccaattttactacattaagaggtagaattacatacattttattttattcatgttgtttaacgttagcaagaaaatttaaattaaatactgttaagaaagttattttaaaattcggtaaagtattgaccgatcctaattcaaaagtaagttttggtattgatgattttaaaattagacataaaataaataaaactgattctaattatactcctgatgaaattttagatagatttaaatatatgttacctagatctttatcattatttagtggtatttgtcaagtttgtggttctaaacaaaatttagaagtacatcatgtgaaaatattaaataatgctgccaataaaatcaaaaatgattatttattaggtagaatgattaagataaatagaaaacaaattactatctgtaaaacatgtcattataaaattcatcaaggtaaatataatggtccaggtttataa

SEQ ID NO: 166156 - DNA, 652 bp, Saccharomyces pastorianus
ctctgtatcaaatcctctaatccaaagattctttgcattacattacttagtaccttttgttattgcagcaatggttattatgcatatgatggcattacatattcatggttcatctaatccattaggtattacaggtaatttagatagaattccaatgcattcatatttcgtatttaaagatttagtaactgtatttttatttatgttagtattagcattatttgtattttattcaccaaatactttaggtcatcctgataattatattccaggtaatcctttagtaacaccagcgtctatcgtacctgaatgatacttattaccattctatgctattttaagatctattcctgataaattattaggtgttattcttatgtttgcagctattttagtgttattagttttaccatttactgatagaagtgttgttagaggtaatactttcaaagtattctctaaattcttcttctttatctttgtattcaatttcgtattattaggacaaattggagcatgtcatgtagaagtaccttatgtcttaatgggacaaattgctacatttatctacttcgcatatttcttaattattgtacctgttatctctactattgaaaatgttttattctatatcggtagagttaataaataa

SEQ ID NO: 166157 - DNA, 147 bp, Saccharomyces pastorianus
atgccacaattagttccattttattttatgaatcaattaacttatggtttcttattaataattctattattaattttattctcacaattatttttacctatgatcttaagattatacgtatctagattatttatttctaaattataa

SEQ ID NO: 166158 - DNA, 780 bp, Saccharomyces pastorianus
atgtttaatttattaaatacatatattacatcaccattagatcaatttgagattagactattattaggtttacaatcatcatttattgatttaagttgtttaaatttaacaacattttcattatatactattattgtattattagttattttatgtttatatctattaactaataataataataaaattattggttctagatgattaatttcacaagaagctatttatgatactattataaatatggttaaaggacaaatcggaggtaaaaattgaggtttatatttccctatgatctttactttctttatgtttatttttattgctaatttaattagtatgattccttattcattcgctttatcagctcatttagtatttattatttctttaagtattattatttgattaggtaatactattttaggtttatataaacatggatgactattcttctcattatttgttcctactggtacacctttaccattagttcctttattagttattattgaaactttatcttatattgctagatctatttctttaggtttaagattaggttctaatattttagctggtcatttattaatgattattttagctggtttactatttaactttatgttaattaacttatttactttagtattcggttttgtacctttagctataatcttagctattatgatcttagaattcgctatcggtattatccaaagttatgtttgatgtatcttaactgcttcttatttaaaagatgccgtatatttacactaa

SEQ ID NO: 166159 - DNA, 231 bp, Saccharomyces pastorianus
atgcaattagtattagcagctaaatatattggagcaggtatctcaacaattggtttattaggagcaggtattggtattgctatcgtattcgcagctttaattaatggtgtttcaagaaacccttctattaaagatctagtattccctatggctattttaggtttcgcattatcagaagctacaggtttattctgtttaatggtttcattcttattattattcggtgtttaa

SEQ ID NO: 166160 - DNA, 1134 bp, Saccharomyces pastorianus
atgaaattaaaattattaaaaataattactcctagtggggtcccgggtccgtccggccccggggctaaagataatttaaataataaaaaattaatattaaagaatattttattagaaataaatattaaaagaataaataatataaaaacaatatataataataataatatagtctgttccgcccaccagggagggacgggcaccgtaggagatattaataataaaaataataaattacaacatttaaataatataaatacttgaaatctacaaatttataattataataagaatatagagattaataatactataaatgataaattaattactaaattattatataagataataacattaagattaaataataataaaacaaataagattattattagtaaacctattaatcaacatagtttaaataaattaaatattaaattctattattatataaataataataataataataatgatataaataataataataattattatataactataattaataaattaataaatattataaataataatataaataatagtttaagtaatattttaagttattattataataaaagagtaacaattgaacctattaaattatcatatatttatataaatagtgatatttttagtaaatatattagtttaaatgatatagataaatataataatggaattataacaaattatcaacgtatattaaataatattatacctaaattaaatgatcataatatttctataaattatattaataatataaataatattaataatattaaatataataatattattacaccttatggaattaataataatataaataaattatataataatataaatattgataatattcctatagatattttaatatttaaatatttagtaggttgatctattaaattaaaaggtagattaagtaataatattggtagaactagtactcttattttattaaatggtacttttaataataaaaaatatttatgaagtaatattaataataattataaattaaattatatctcttctaatcataatttatataataattctaatattaataaaaatggaaaatataatattaaagttaaattaaactttatctaa

SEQ ID NO: 166161 - DNA, 810 bp, Saccharomyces pastorianus
atgacacatttagaaagaagtagacatcaacaacatccatttcatatggtaatgccatcaccatgacctattgtagtatcatttgcattattatcattagcattatcactagctttaacaatgcatggttatattggtaatataaatatggtatatttagcattatttgtattattaacaagttcaattttatgatttagagatattgtatcagaagcaacatatttaggtgaacatactattgcagtaagaaaaggtattaatttaggttttttaatgtttgtattatctgaagtattaatcttcgctggtttattttgagcatatttccattcagctatgagtcctgatgttctattaggttcatgttgaccacctgtaggtattgaagctgtacaaccaacagaattacctttattaaatactattattttattatcatctggtgctactgtaacttatagtcatcatgctttaattgctggtaatagaaataaagctttatcaggtttattaattacattctgattaattgttatttttgtatcttgtcaatatatcgaatatactaatgctgcatttactatctctgatggtatctatggttcagtattctatgccggaactggtttacatttcttacatatggttatgttagctgctatgttaggtgttaactattgaagattaagaaattatcatttaactgctggacatcacgtaggatatgaaactactattatttatctacatgttttagacgttatctgattattcttatacgtagtatattattgatgaggtgtttaa

SEQ ID NO: 166162 - DNA, 676 bp, Saccharomyces pastorianus
taaataaaaaggatatgcagttttaaaatatcatttaatgcataaaataccttatatataataaatattatatataattattaaacatacttaatatatatatatatattaataataatatattaagttataatgtttaataatataggttaatatgcaaatatttataatattaataaatatttcagagactaaatatgatataatatattaatatattaattatctttttataaaaaaaaactattctcattgtaccgaccgttagatacgacgatcgacactattaaatatgatatttataattaataattattttctttataaaatcaatttgatgaataatataattagatttaattacatttatgaaatatttataaatataatttaattaatatataattttttcccgtggatcaaccctattaacaactgggttgtaatttgggggtaataaatattattatattatttttttattataaaaataaagtatataaatactttatattactataataatttttttatatatttataatataattaatttatattaatatattaaagacatagtccgaacaatatagtaatatattgagatatagatattatatatatatttatataaacaattataataattaaatattatttaattattaatttatga

SEQ ID NO: 166163 - DNA, 1392 bp, Saccharomyces pastorianus
tatgaaagctcaagtgtcgttatatatggtaacgtatatattattatttaactgtatgccggaaactttatactattttaataataataataatattattaaaataactaaaataatagtccgcttattattaatatatttggaaaaatctattattttatttagatattttataactaataataaacaatcggcaagtaacttttatttttcttctataaaaattaataagaataaaaaaacaattcttaaaaatcatttaaatgatataaatgaaataaaaatctcagaacataaacctttatataaaaaattaaaagatgatgaaatattaggttattatttagcaggtttaattgaaggagatggtcatatcggtgctaaatatattactattgctattaattataaagatattaaaaatgcttattatttaaaaaaattaattggttatggtaatattagaaaatactctaatacttataaagctgtaagtttaaatttggattctaaagcagctatattaagagtatttaatttaattaatggtaaattattaggcccttataagcataaacaattaattgatcaaaaatacgatattaaatttaatactttaattaaacctatcgctaattttaatttatgagataacccctgattaactggttttactgacgctgatggtagttttggagtatatgtttataaatcaaaaactataaaaataggatataatgtaaaaattatatttagaattatacaaagacatgttgatttattaaaacatgttcaaaaagctttagatggtagtatttctttatttaaaagaaaatcagtagttggaggttataattattcagctcttaattttaattctattaaaaattgaattaaatattttagtttatatccaccattacataatagtaaatatattcattttattaaatgatataaagtttgttatttatttgataataaattacatttaactaaagaaggattagataaaattatatctattaaaaggaacttcagagactagtgcgttaaatatcctatatataaaaattaagcatttaatcctttattatatatagtatatatatataatataaaataattatcttatttatttttaattataaataagttttataggataaagatacagtccacagttaataaggtttgtttatataatataatatataaaaatatatatatataaaataaaatagaatataatacttgttattggtcgaaaataatatctcactttaattagaattataattaaaattttaaggtatatatattataaaaaaattataaaacttattcatccttatttaatattattatatatttataataatatttaagtga

SEQ ID NO: 166164 - DNA, 820 bp, Saccharomyces pastorianus
cagataggtattcctaaaggagaatgtattaattatatttttatcaatataagtctatctacatatgtattaaaatggttacataaatatgttaaactgtagtgacaaaagtagccatattcttgacagtttatatattatttattaatatattaaagatgaaggagctttgactgatttaatatgctcaacgaaagtaaatcaaatgttttaaaattacttaaccacttattgaaaatctgtctgataattcaataattattttaattatatatatttatattaaaataataatgattgatgttatgtgttggaaattagcatacgataaatcatataatcattagtaatatagtttgagagctaagttaaatatttacgtattattagttaaacaaggtaagccctataaattgttattatattaaataataataccattattataaaatatatattatatattatatatatataaaatcttggattaagaaatataatattatttatagaaattttcttatatatttatagggtaaaagattatataaaaagctaatgacatattgtaatgatatgtataagaattattattctaagatgaaaatctgctaacttatattaaaggtgatatgcctatttttattatatattataatattaataggaggtttatattaataaactgataaatatttaaatatattttttatatatatatattaaatattgaatagatattgcgtgagccgtatgctatgaaagtcgcatgtacggttcttaccgggggaaaacttgtaaaggtctacctatcggaata

SEQ ID NO: 166165 - DNA, 1564 bp, Saccharomyces pastorianus
ttaacaacaacaatagcctaaaatcatataattattaatattatatggtagtctataaaaatatatctataatagataactgttattaggaatattatattaaaatataggcaatattagtgaaaacgatcaaagattaatacagttgagatcgtcggttaaataaagagtcgcgacagactggttcactgatagatatctgaaatgatgtttaatgcacagtcgattaatgtatttaaataaaaataataataaaataaataaattcaataagaataataataatctgtataataaaaataataataaaatgatttcttatgtgtaattatattataaaaaattccatataataaaaaaattaaatagttttaaaatattagttagaaattataatacttcttctaaattagaatataatataaataaaaaaaaatactaagtgtagaagaattataaaaaaaaatcataaaattaaatctataaaatattgagtaaatttagaatgtccaaataaaaaagaagaaattataaattatttaataaaaaaacaaggtatttattatattggtaatataatgacaaataaattttatattggttcagcaggatataataatatatatgatagatttaataatcatttatatagattacgtggtagttctaatattgcattagatgtaaaaaaatatggtttaaatacttttgtatatgatataaaaaaaatatatgataatgaaagtattgatagatatattttatatagtattgaacaaatttatttatacctaaaattacctacatataatagtggtaatttaaagaatttttctttatctaaatttgatactttagatcttattactaataaattaaaatatgctattactaataatatttatggtatttatttagataaatatatagctatagataaatctaatataataaaatatataaataaacataataatatttattataataatttaaataatgattataaactattataaaaaataggtaaagagaaaattattaaaggagctagtttatctgtcgctttatataatataaatgatgaattagtttgtgtttttcaatctagattcttaacttctcatttattatgttgtaatgaaaaaaactattagaagagctattaaagaaagaggctatatttatattcctaatatttttataccttatttaaaaggtttttttaatgtttatagtaaaccatttattgaaaattttaaaccttttgaattagaatatgtctctactaaaaaaaaatgttctattagttaaagcttccgattataaattaaataatactactaaattcttaattaaaaactatctacataaattttaatatattctttattattaaattttattagatctcctattttttttatttatatttaccctttaataattacttaatatttaatatttagtatttaaatgagtaattattattcttaaatgaatcttattatttttatttttattttgtattgttgtgtttatgggcagatatcacattgaggtg

SEQ ID NO: 166166 - DNA, 1086 bp, Saccharomyces pastorianus
aatctagaatatggttttaaattaatatatggtttccatttacataaagatgatttacaatgtttagaaaatattaaaaataatttaaacatacttaataatattagtattagagaactatcagttcaattaacagtatctaataaacaatgaatatatgataatttattaccaatttttgataaatatccttgtataactattaaatattatagttatataaaatgaagagaagtattaatcaaaagtataaataatgtatcaagtaaagaattaattaaaaataaactattaattaataattatgaaattattgataatatagaaattccatataataatataaatgatcattgaattttaggttttttagaagctaagggttcatttatgattaataatataagaaattcttgtagattatttatttcacaacatgaacaaagtaataaaacattagaagtaattaaagattatattttaactaattgaaaacctattgatagtacacctatatttattaaataagatttattaaataattgagataatataattcagttatctaaacttaataaatgtaatgttattaatttagcaataagtaatctatattttttatattatgttattattcctaaatttaataatataaattgatatactattaaatataatagttttataaattgacagtctattattaatatttatattaaaggtttacataaaattaataataataatgttattcaagaatatattgaacatcttataaatttaaataaaaaaggtgctaataaaattaattataatattgaattatataataaaattattaataataataaaccattatataatatgaatttatcatataaacttaatagtttaaattataaaactaataagtttattggtgtaggagtatatgtatatgatttaaataatctatttattataagattctctggacttattaatgtcggtttacattttaattgctcaaaacacatgattgctaaatatgttaaaaacggtaatgtatttataaataaatatattttactaaatatttataaagat

SEQ ID NO: 166167 - DNA, 600 bp, Saccharomyces pastorianus
taaggtaaataatctaaagggaaacagcccagattaagatataaagttcctaataaataataagtgaaataaatattaaaatattataatataatcagttaatgggtttgacaataaccactttttaatgaacatgtaacaatgcactgatttataataaaaaaaataatatttaaaatcaaatatatgtatataatatatttatatttgttaatagataatatacggatcttaataataagaattatttaactgaatatctaaatattattattaatctaaataataataataatatggtaatagaacatttaatgaaaaaatatattagttattaattaatatatataataattagatagagaatgctgacatgagtaacgaaaaaaaggtataaaccttttcacctaaaacataaggtttaactataaaagtacggcccctaataaaaatatgaataaaaatatattaaagatgggttaatctatattaataaaataatatcttaaaatataaatattaaaacatttataattataaaaatatatatattaatatatatataattatataaactaataaagatcaggaaaagtgtta

SEQ ID NO: 166168 - DNA, 2476 bp, Saccharomyces pastorianus
actacgtaataagtcataataataaatattatttattattatttttttatatttgatatttattgataataactttaactttatcatttaatttattttttataattaaagacatatttttaacactttgtaataatattaattcttttaatattataagataattaataaatctatgtaattttatagattttaataagtaagcaatatttaataataaatattgtttatatcttctaagacttaaaggttgatatttattaaaatattcaataaaaggttttatagctttataagattgagttttataaatataagctgtagctcctgattaaaaatcttttttaataatactaccaagtttaaaatattttaagacaatatcttaaatatatttatctttttgtgataattctaaatgaaattttaatcattgactaagtttataatattgaaaacgaagataaaaataaccatctgcatcattaaaacctgttaaccaaggatttaatagtacatcaaattctttaggatgttttaataaaatatttaatagattattaaaattatatttataatattgattatatcttttataaataatttaccattaatataatttataaaaacttcttgatcttttctttttataatatttcattcaacagctgttaattcttttttattattatatctagctgtaatatgtccaattttaaaataaagacataaataatcagctaaaataacatcttctaaagaaaaaataatagtaaaacatcttgtataaatattaccatctccttcaaataatcctgataaataataacctttttcatactcagtataattatctaaaaattttaatttattaattttattttctttatcaatattaataaaatatctatctattacattagtatatttatttataattgattcatatgtttttttttttttataaatattatctattaataataaatataatataatatgataatttaaagtgagggactcgcccacccagataggtgggcggaccgaacccctcgttatatataaaaatatataataagtcaaaataatattattatttttattaacttatattcacatataagattggactatctcttaattttaatataatatattaaaatcattcacgtttagtctctacaatactttaatatatcattatataaaaaaattataattatgaatatataaaaattatcacgggattgtcttacttttttatataatatatatatatatatataagagtttccccgttagctattatataaatattattattataaatataataaccaataatatttaataatataattattatttattatttttgtgaattttatacacgacacttatttttaataaataaatatatttatatcgtggaatgctacatctaatgaggcgttagctaaggcaacaccagttaaaccacccatagtgaataagaataagaatgcaattgcatataacataggtagtgctaatctaattgaaccaccatagaccgttgctaatcatgaaaagattttaattcctgtaggaatagcaatgatcatagttgcggaaagaaaataggctctagtcacttaaatattattataaatatataataatattaaataaggatgaataagttttataatttttttataatatatataccttaaaattttaattataattctaattaaagtgagatattattttcgaccaataacaagtattatattctattttattttatatatatatatttttatatattatattatataaacaaaccttattaactgtggactgtatctttatcctataaaacttatttataattaaaaataaataagataattattttatattatatatatatactatatataataaaggattaaatgcttaatttttatatataggatatttaacgcactagtctctgaagttccttttaatagatataattttatctaatccttctttagttaaatgtaatttattatcaaataaataacaaactttatatcatttaataaaatgaatatatttactattatgtaatggtggatataaactaaaatatttaattcaatttttaatagaattaaaattaagagctgaataattataacctccaactactgattttcttttaaataaagaaatactaccatctaaagctttttgaacatgttttaataaatcaacatgtctttgtataattctaaatataatttttacattatatcctatttttatagtttttgatttataaacatatactccaaaactaccatcagcgtcagtaaaaccagttaatcaggggttatctcataaattaaaattagcgataggtttaattaaagtattaaatttaatatcgtatttttgatcaattaattgtttatgcttataagggcctaataattta

SEQ ID NO: 166169 - DNA, 1505 bp, Saccharomyces pastorianus
tattactaattcatatatatatatttatttagtatataatccttaaaatatattatatatttctattaatacttttttggtaagttatactttattaatatattccccgcgggcacgaacccagctactattagctgggttcgtccctattgcgggtttattattttataatcaaaattaatgtttttatatattatttattatattcatttataacatataaatatataatacctaatacctaatacctaattatatttatttaagccccaattaaattaaattaaattgggccccccggacccaattgggaccccgcaaggtgtttattaatattttatttaatcttattaatattttattttatcttattaatatttttattaatattattaatgattatattaattattatatcataataaaagtatttatattatcttaatatattatatattattattatatatattagtttttattatatatttttatgattattattatattattagcaaggataaagagactcgaactcctaatgattgatttgaaatcaactgttttaccattaaactatatccttattatttatatttatttatattatatcaataaatattattaatttataaagttattactcctccggcgtccggtccgacgggccggaccagacttatttatatttatatatatatttattacttatttatatttatatatatatttattatattattccttataagatttattatattattataaagtgagggacccgccctccccacttcggggagggcgggaccgaacccctagtatataagttgggtttattatatattataaaaatagtgagggacccgccctcccatatccatatggagggcgggaccgaacccctagtatatttattatataattattataagagctatgaagtacatccctaggatggttattatttattatgtattatattatattatattataaaatatcattataaaatatattattatatatatttatataaaacatatcttatttattataaaagtatacatatattatattaacactgataagagtattttattattattacaattttatatatatttagatatatatttaataaataccttattaatataaaatagattattatcataataaagtatataaagatatatagtaataaataagtattaaatatcatattaatcttattattatattattataacgaggggttcggtcccgccctatatataaatatataaatatataaatatataaatatataaatatataaataggggcggtgaaccagacttattattaaattaataaaatattatatacataagtattattataaattattatattagtattgtttttattattatttacataagtatttatattaattattatattagtattatttttattattatattaatgtatatatattatacatattatatatatat

SEQ ID NO: 166170 - DNA, 600 bp, Saccharomyces pastorianus
gttaaagaagtgagggacccgcccctccccctgatggagggagggggggggaccgaacccctagtatatatataataataatattttaaaggtatattattataagtaataaataataataattttatataataataataataatatgtatatataatatatatatatatatatttaatattatataataaggataaataaaataaataagaatatgatgttggttcagattaagcgctaaataaggacatgacacatgcgaatcatacgtttattattaataagataataaaaatgtggtgtaaacgtgagtaatttattaggaattaatgaactatagattaagctaaatacttaataaaaaatataaaaaagtatatataataatataaagaatattaataatattaatatttatctatagtcaagccaataatggtttaggtagtaggtttaataaaagtgaacctagccaacgatccataatcgataatgaaagttagaacgatcacgttgactctgaaatatagtcaatatctatatgatacagcagtgaggaatattggacaatgatcgaaagattgatccagttacttatta

SEQ ID NO: 166171 - DNA, 600 bp, Saccharomyces pastorianus
tataataatatatactacttataaaatattcttagtccgaataagaaatatataatatataataataatcatattataataaataataataaaataatcaggagtattggaatcttaatagaccctatatatatatcctatgagtagtaataaattaattgaatgataatatttaatatataataatataaatgttaaataatataatatttctatttaggctactatataaatattataataatataaatgtatataatatattataataattaaataattaattttattaattaaggagattagcttaattggtatagcattcgttttacacacgaaagattataggttcgaaccctatatttcctaaacctagatatatatatatatatataaaataaatattattaataatatatcaggtaattataaatggtttatattaaataatactcttataaggaaacttaatataaataataaataatatatataatataataaatatcctttaaatatttttaattacataattataataatataatcttaatattataaattatttataaactcctagtgggatcccaatcgggtccg

SEQ ID NO: 166172 - DNA, 600 bp, Saccharomyces pastorianus
agaagagctattaaagaaagaggctatatttatattcctaatatttttataccttatttaaaaggtttttttaatgtttatagtaaaccatttattgaaaattttaaaccttttgaattagaatatgtctctactaaaaaaaaatgttctattagttaaagcttccgattataaattaaataatactactaaattcttaattaaaaactatctacataaattttaatatattctttattattaaattttattagatctcctattttttttatttatatttaccctttaataattacttaatatttaatatttagtatttaaatgagtaattattattcttaaatgaatcttattatttttatttttattttgtattgttgtgtttatgggcagatatcacattgaggtgcactagttattactaatttattttcagcaattccatttgtaggtaatgacattgtagcttgattatgaggaggattaaatagagaggatccacattatagtaatataatgttaaataaatctgttttatgctggaacgtcttcatttgaataatgaactactatattattaaatgatccgcaaacattata

SEQ ID NO: 166173 - DNA, 600 bp, Saccharomyces pastorianus
tatagattaagctaaatacttaataaaaaatataaaaaagtatatataataatataaagaatattaataatattaatatttatctatagtcaagccaataatggtttaggtagtaggtttaataaaagtgaacctagccaacgatccataatcgataatgaaagttagaacgatcacgttgactctgaaatatagtcaatatctatatgatacagcagtgaggaatattggacaatgatcgaaagattgatccagttacttattaggatgatatataaataattataaaatttattataaatattataaaaaataatatatataaattgattaaaaataaaatccataaataattaaaataatgatattaattactatatataatatatatagatatataccccgcggcacaaacccagcttagctgggtttgtgaccgcgggtacgatataataaatataataatatgtaaaaataatattatataattatgttgtagtatattttaatagtcctgacaaatatttgtgccagcagtcgcggtaacacaaagagggcgagcgttaatcacaatggtttaaaggatccgtagaatgaatt

SEQ ID NO: 166174 - DNA, 1035 bp, Saccharomyces pastorianus
gagcatagcgggcggacaccgtaggaaaatatataagattaaatatataaaatataatatatttaatacaatagatagatcttatataatatataataggaatcttatatgagattatataataataataaataataataataatatataataaataataataataatatataataaataattatagtccggcccgcccccgcggggggggggcggacgccgaaggagaaatataaagatatgtccttattttatattttaataaatttaataagttatgacaatatataatatatttaatatagataatatatctaataatattaattaattataaagtttcataaaatattttataataataataatttaactcctagcggggtaccaattgggcccccccggggggcccgggactcctagcggggctaaagaatatatatataaaatctcactccatgtataccattaggagaatataatatatatgaataaagaatatttatatttgatttaattttattttttttttattatcagataggatagactcgaactaactaggtctttctcccaaagaaagcgcctgaccttttggcttctatctgtattaatatataatatatactatatataataataataatacatatatatatatttatataaagtctatttattaattaattaattaattatatggatattatattataattaagcatatttctgtataataatataacttttatatatcttttatatataacgaggggttcggtcccgcccttgggagggcgggtccctcactccttcggcgtccggcccgcggggcggacccgactataaataagattaatatattataaaatatatcttaatttttataaagatataaagtataatatttctaataatctattaataataattataaagtgattaaaaatatataataatatatttattaagttttattttcattttatttatttatactaattactttattaatattgtatataataataataa

SEQ ID NO: 166175 - DNA, 3303 bp, Saccharomyces pastorianus
gagcatagcgggcggacaccgtaggaaaatatataagattaaatatataaaatataatatatttaatacaatagatagatcttatataatatataataggaatcttatatgagattatataataataataaataataataataatatataataaataataataataatatataataaataattatagtccggcccgcccccgcggggggggggcggacgccgaaggagaaatataaagatatgtccttattttatattttaataaatttaataagttatgacaatatataatatatttaatatagataatatatctaataatattaattaattataaagtttcataaaatattttataataataataatttaactcctagcggggtaccaattgggcccccccggggggcccgggactcctagcggggctaaagaatatatatataaaatctcactccatgtataccattaggagaatataatatatatgaataaagaatatttatatttgatttaattttattttttttttattatcagataggatagactcgaactaactaggtctttctcccaaagaaagcgcctgaccttttggcttctatctgtattaatatataatatatactatatataataataataatacatatatatatatttatataaagtctatttattaattaattaattaattatatggatattatattataattaagcatatttctgtataataatataacttttatatatcttttatatataacgaggggttcggtcccgcccttgggagggcgggtccctcactccttcggcgtccggcccgcggggcggacccgactataaataagattaatatattataaaatatatcttaatttttataaagatataaagtataatatttctaataatctattaataataattataaagtgattaaaaatatataataatatatttattaagttttattttcattttatttatttatactaattactttattaatattgtatataataataataattatcctgttatattttttatattattaaacaattaataatatatataatgaataatatatataattatacaatataatttatatatttatgactttcctattaataatataatattttatataaaaactaggggttcggtcccgccatccatatggatatgggagggcggatacctcacttttatatataaatatgattataatatatattaatatagttccaatagatataccattagaataatattatatattaattattagcaataatacgatttgaacgtatataattaggtcatgaccctaaaatgttaaccaattacatcatattgcatttatatatttattatatcctttgagactttatattatattacttataaaatatatataataagaatatatgaatattctaaattatttaatactataaagaaattataacattaatattaatgaattattgatattctcctacaattggtgtccgtccgcggagcggagcgtagcggagcgtagcggagcgtagcggagcgtagcggagcgtagcgggcgggacttaataaatatataaaaaaaaagatcctatagttcgtatttaattattattttaaataattaataatttatattaatacctaataaataaaaaaaaataaaatgaataataaaaaaaaaaatagtcatgtggagtataaagtttataattaataaagggtaaataaaagaatattattaaattatattattaataaagatattaataataattatgatttttattttttttatttatcaatagtaaacaataataattatttattaactctaccgatatagaataaaacattttcaatagtagagataacaggtacaataattaagaaatatgcgaagtagataaatgtagcaatttgtcccattaagacataaggtacttctacatgacatgctccaatttgtcctaataatacgaaattgaatacaaagataaagaagaagaatttagagaatactttgaaagtattacctctaacaacacttctatcagtaaatggtaaaactaataacactaaaatagctgcaaacataagaataacacctaataatttatcaggaatagatcttaaaatagcatagaatggtaataagtatcattcaggtacgatagacgctggtgttactaaaggattacctggaatataattatcaggatgacctaaagtatttggtgaataaaatacaaataatgctaatactaacataaataaaaatacagttactaaatctttaaatacgaaatatgaatgcattggaattctatctaaattacctgtaatacctaatggattagatgaaccatgaatatgtaatgccatcatatgcataataaccattgctgcaataacaaaaggtactaagtaatgtaatgcaaagaatctttggattagaggatttgatacagagcaaaaaaaaaagaatgttgatagttacatataatattaaatatattatcctccttcatgatacaacattgcaatgttatattggtggggattgataaataacgtaatagttaataagtaatattatattcttactatactcaatatatcattatattgttcggactatatcttaatcctttatgcttataattatttattataatacccttcgagaatatagcttagcaatattaatcggcgggtcatatatttattgattgattgattgattgattgataaaataaatttatcgataaatattataatatattaataattttgaggaatatttaaattattattatatttagaaattagacgtaattcttttaaaaataataaatattgtaatcttttatatcctaataattttataggatttttatttataaattttacaatattttcaatacctctaatactttttagagtaattcttgaattattatctttattagtatatacattttgactaatttttaaataaattttaatagcttcaataatttttaaattattagtttgagatacttcaaaactagctagtttaatattatttttaagagtataaatattaaaataaccttcagcttcaataaaaccaattaatcaataagaaaaataatttttatttaaaatattttctaggttgtataatgattttataggacgtttatatttaggtaaatcattataatatttaatatcttttaataaattatctttaaaaaataaataatcataatatttatttgtta

SEQ ID NO: 166176 - DNA, 600 bp, Saccharomyces pastorianus
tggagtacagaatatattttaattatttaattaattaagatattaaactattaatagaattaggttactaataaattaataacaattaattttaaaacctaaaggtaaaccttatattaataatatatattatattatatgttattaataaataagaactaagtgaactgaaacatctaagtaacttaaggaaaataaatcaacagagatattataagtattggtgagagaaagtaatatagtctaaataagtattatgtaataaatatgtaagaaaataggataacaaattctaagactaaatactattaataagtataaaaagtaccgtaagggaaagtataaaaatgattattttataagcaatcataaatatattaattatattaatgatgtaccttttgtataatgggtcagcaagtaattaatattagtaaaactaataagttataaataaatagataaaaataatatatatataaaaatatataaataatacatataaaaaaaaataatatgtaatatttaattaatattaattgacccgaaagcaaacgatctaactatgataagatgggtaaacgatcgaacaggttgatg

SEQ ID NO: 166177 - DNA, 600 bp, Saccharomyces pastorianus
tatattaaagatgggttaatctatattaataaaataatatcttaaaatataaatattaaaacatttataattataaaaatatatatattaatatatatataattatataaactaataaagatcaggaaaagtgttagtgtataccgtaatgtagaccgactcaggtatgtaagtagagaatatgaaggtgaattagataattaaagggaaggaactcggcaaaaacagctctaaagttagtcaataaagagtaataagaacaaagttgtacaactgtttactaaaaacaccgcactttgcagaaacgataagtttaagtataaggtgtgaactctgctccatgcttaatatataaattatatggtttaacgattatataattaaatttaggtaaatagcagccttattatgagggttataatgtagcgaaattccttggcctataattgaggtcccgcatgaatgacgtaatgatacaacaactgtctcccctttaagctaagtgaaattgaaatcgtagtgaagatgctatgtaccttcagcaagacggaaagaccctatgcagctttactgtaattagatagatcgaattattgttta

SEQ ID NO: 166178 - DNA, 600 bp, Saccharomyces pastorianus
attaattaattattgttattatataaattatataataaatatatggcatttagaaaatcaaatgtatatttaagtttagtgaacagttatgttattgattcaccacaaccatcatcaattagttattgatgaaatataggttcattattaggtttatgtttagttattcaaattttaacaggtatttttatggctatgcattattcatctaatattgagttagcattttcatcagtagaacatattatgagagatactcataatggttatattttaagatatttacatgctaatggtgcatcattcttctttttagttatgtatatgcatatggctaaaggtatgtattatggttcatatagatctccaagagtactattatgaaatgtaggtgttatcattttcgtattaacaattgctacagctttcttaggttaacaacaacaatagcctaaaatcatataattattaatattatatggtagtctataaaaatatatctataatagataactgttattaggaatattatattaaaatataggcaatattagtgaaaacgatcaaagattaatacagttgagatcgtcggttaaataa

SEQ ID NO: 166179 - DNA, 8391 bp, Saccharomyces pastorianus
atttatatgcaataggattattagaatatgttctaacaattgtatataacattcaagatactaaacctaaaataacaaataaataaaacataatattatcatgtaattctaaaataccttcttgatttggtgttgctgaatcctgaaaataacatgcatatggtgttggtacgtcatttataatgactgttgttaattgtaatcttaataaatctaacataaatcttttttaacctttagactttattgtctatttttaatatgttaattctacttataaaaataaaaaaaaaatattaatacttaaacctaaaatattaatatcatattaagatttatctcttaatatattacataaatatcatattaataatttaatctaacttaatatatttataatacctaatattattataattattatattattattatattataactatattattatatcttattttttatatactctttttttatatatctttaaaaatatattattagtatatttataagcctatttattagtatatttataaatatattattagtatatttattagtttattttataagtatatttattagtatatttattagtctatttataagtatatttattagttatagaagaagattattctattttattaaatatttatttatatattttattatatattctattaactatttattatttaattattaaatatttattatatattctattatatatttagaagaatattattagtatcgggtcctaaggacccgaatacaaaaagtagattattaatatatcttatatattatctattaataacaatattatttatatataacaatattatttatttataacaatattatttattattttatttatattatatttattatatttatttatattacttgtagaaggaattgaaccttacattatttatttatgagacaaatgttttaaccaattaaactatacaagctattatatctatatattattaataatttatatcttcttaaaatattttaatatattattatatttaaatagccccacaaggagtcccgggccccccgggggggcccaattggtaccccgctaggagttaattattattatatattgtattatatattgtattatattatatatagatattatcgtccccaataggaattgaacccatctattctcattaacagtgagatgctttaaccgataagctataaggacatatattattaaataaagttatattaatataaaatctaagaattattatatatatattattttattatattattttagcctcggtcccccacccctggggatcgggaccccgtaagagtaattattatttattatattttattaatttatgaagggaataggaattgaacctatgaagatctaaatcattgagtttacagctcaactccaactaccaacattgaaaatccctcctatataaatatattatatattatatattatatatattatatattatttattaaatatatatataacttcttaattattattatgatatatttatcatttaaatatattgttattattagaatatactttaagatatattaaaatataaaataaggacatatcatatatatttatattttaatatattatatattactattattattataaattattaaatatacattatattatatataaattatatatattatctctctctattaataaatattaaatattgtattatattatattaaattatataactattaataaatattgtattagatatctattaataatattgtattagatatctattaataatattgtataaaattatattatattagattatattattataatattgtaattattgaatatatattattataatattgtaattattgaatatatattattatatttaatgaaactaacagggattgaacctatatttgtaccttatcaaaatactattctaaccaattgaattatagtttctattatatctacatatgtatatattatattaatattaatatattatattatattaatatttatattatctttataattatatttatatatattattggagttaatgagacttgaactcatattaaatgcatgcaacgcagtcgttctaccaaattgaactataacccctaatacttaaattatataatcttatttattattattaaatatattattaattaataaatttaattaaataaagaagaatgtatattatatattattagatattatttagaataatattaacactatacattattacttataataactctctttaatagattattataacattattaaaatattaatagtataatatctcctacaattggcgtccgccccccccctatttatatataataaattagtccgtaggagaaataatcagaaataataatttacttaatggggggcgggccggactatatatttatatataatattattaaaacattaatagtataatatctatatattttttataaaacattaatatttctttatttctttattattatatataataatttattatattttattgtatatatatgaataaattattatatattatattgtattattatatatgaataattattaagtatagtatatatgattatatatataatatcctataggatttgaacctatataattagattcgtattctaatattttaccattaaattaaggatataaacggaaaatatgagattcgaactcataagaatttacaattcaattacttagcaaataatctactttacctatagttaattttcctaattaatatatatattaatatataaaaaatatatatttataaattattatataaatatatgatcttatcttatcttatcttatcttatttatcttatcttatttatcttattttatcttagccccgggcccggacgggcccgggaccccgcaaggagtttattctattaatataaaaaggtataatagatttcattaattattattattattaatatgatatatattatcatattatatatatgaattaaataatattataaaagatattaaatatagaattaaataattaaaaatattgattatattagtttattataaaatatttatatatgtttattataattagagtattaaagagaatattatactatattataattatattaaaaatattaattcgttaatattattaaagtatttataaggatatatatatatatacaatatattaaatatataacatatagaataaatgtattaatgattaatattatttaaatcaatgtattaattattaacgaatctaatcagatttgcactgacatcctccattatgacaaaatggtactttactattaagctacagatcctttataataatatttatattaaataaatatatattattttatagatagcgagaatcgaactcgcattcaatgtttggaagacatccagtttaccaattaacttatatctattatttattattatatatttattactctctccatgatttgaacatggaatattaatattagaagtattatgctttaaccattaagctaagagagcttatttaattaatattatattatattatttatgaattatgagaatagctggagttgaaccaagcatgggttacttaaaagataactgttttaccattaaacaatattctctatatatacctttatatataaatatctatttaatatataaatatactttatagccccattaaaaggtattatattatttattatacatattgttatatctttatatatatatattcattattaattaattaattaatattcattaataaagtcttatattgttaattatttatttttaagtataagtattattattattatatataattttttataaaatatttattattatgataaacttatattatatatatatatatgtaatttaatatattttatgatattatattatattatagccccgtaaggagccccggacccccctaagtaaattattattttatgattatttatcatttattatatataaatagttaattattattttatgattatttatcatttattatatataaataggggggcccaattgaattgggaccccgcaaggagtattcattatatatattatatgactctatattatttatattagtctataacttaataagtatattaataaagataaattatttattagccccggggccgaatggccccaatttaattgggaccccgaaggagtattaataaattatattaatcatttattatgattaaatatatattaattaatcaatcatatatttaattattaattattaattattattatcatttatattgaatcggtttgattcgaacaaacaaactccaaactcaaattttggtaacttacctattagtctacgactcattaatatatatatattatttattattatatatattattgctatttaaaggacttgaaccttcatactgtaaagtaatacatcttaagagtatcgtgtctaccaattccaccaaaatagcttattatttagtattacatatctttaataaattaaattaactccttgcggtgtcccgggcctcccggggcccggggctataattaaatatttattaaatatattatatatatatttttattatatttttatacttataagattatatatattattacttataatacatttttatataaatctatatacaaacttaattaaaattatctaaatttattaaaaagaagattattaatttataatatatagaataaatgaatgaatgaatgaataaatgaatgaatgaatgatattattaatattattttttatataaaaactaggagtatattatattattttatatatattttttataatcccactaggagatattcatatttatattatttatagggtgaatactgagaatcgaactcagatttaacgcaccacaagcgtattttctaccattgaaatatattcacctttatttattaattaattaattaattaatatacatattattatatttttatattatttatatatttataaagagatgaagagaatcgaactcttaataagtagatttgcaatctaatagtttaaccttaaaacaacacctccttcttatgtattcaataaaatataacctaactttatttatatattatttataatctcttataatatattaattaatatgatcttattatattcttttattaaatatattatattgttaattatttatttatattatattatattatattgttaattatttatttatattatattatttaattctttatattttattaagaatatataaagatgttttatataaatattatatatattttagatatagttttaattgaatatatatatttaaaggaggaatatattattaagatttaatattttatattattatatatataatgatatagattattaattaataaatcatattatacatttattatcattatttattattatttgttgttatattagggatttgaaccccaaacctttcgattacaaaacgaatgctctaccaattgagctaatataactatataattaatcctcctctcgggatcccggtcccgtcaataaattattatttatgataatttattatttattattaataaataggaattagggctaaataaaaattctattaatattattacatattaattaatatatataaatatatctttaaattatttaatctcatatataaattattatatatttattatatagaatgtatattatattataaataatattataattattaaattaaaagataaaatactcatgaaggatatatatttattattttataagattttatatattataataatatattaaaatactcattatattatattatataattaaagtaaagaattaatattaaaaagacatataaattatttattataactccttgtggggtcccaattcaattgggcccccctaagtaaattattattttatgattatttatcatttattatatataaatagttaattattattttatgattatttatcatttattatatataaatagggggcccaatttaatttaatttaatttaatttaattggggctaaatattaaaaatatatatagattatatactataaatcatattatatgattatataaataagaatttatgaatatattaatataattatattattaaataattagtagtaaaaagggtggggggggtatagaataatagattagatattatatagataactgataaattagtattttattaatattatatattaaatatataaataatatataaaacctattaattaaacaaatatatagaatatctctgactaatctacacatgctagtattaaattatcagataattatcttattaaaacaacttcatatttaatatgtattcaatatttatttattatcaacctagcttatctactatgacaattaattataatataaactaatatagataatatatatagaaattaattaattaattaagatatatattatagaattatcaatagatacaccatgggttgattcattatggtccttgcgtactaataatgagatttaatttgataatatttccttcagcagataggaaccatactgattcacatcgtatttaacccaactcacgtaacattttaattgacgaacagtcaaacccttcttagcttttacaaccaagaggaaatgttgagtcgacatcgaggtggcaaacataacttacaatatctactctttcgttatattaccctgttatccctagcgtaacttttattcgttatcaataacctttacaattagtgttatttgttcattatgccatacttacgtacttgtttcacttgtttgtgttacaattatcgcacagttataccattatattatttaattgattttctatattataatagaatttattattgttttccttacaattttactgtacatatttttatctattacttaaatatattcaatttataattaaattattaatataaatatatttaaatttataattaatatatataatatatatcattcttttattcaataattttatatattcatttatggacttattcagatacttttgctgataatgacgccccatcaaaactaccaattagagattgtctcttatttatattataatatataaattaatatatatatataatatattacttaagaattatatatctattaagtttaatataataattatattatattatttttattttttataagattagaattatcattaaattataataagtatctcattaatatctaaacgattacttataaatatattttttattatatatttataggattacttaatatgctgaatataataaacaataattcgatctatctaattacagtaaagctgcatagggtctttccgtcttgctgaaggtacatagcatcttcactacgatttcaatttcacttagcttaaaggggagacagttgttgtatcattacgtcattcatgcgggacctcaattataggccaaggaatttcgctacattataaccctcataataaggctgctatttacctaaatttaattatataatcgttaaaccatataatttatatattaagcatggagcagagttcacaccttatacttaaacttatcgtttctgcaaagtgcggtgtttttagtaaacagttgtacaactttgttcttattactctttattgactaactttagagctgtttttgccgagttccttccctttaattatctaattcaccttcatattctctacttacatacctgagtcggtctacattacggtatacactaacacttttcctgatctttattagtttatataattatatatatattaatatatatatttttataattataaatgttttaatatttatattttaagatattattttattaatatagattaacccatctttaatatatttttattcatatttttattaggggccgtacttttatagttaaaccttatgttttaggtgaaaaggtttatacctttttttcgttactcatgtcagcattctctatctaattattatatatattaattaataactaatatattttttcattaaatgttctattaccatattattattattatttagattaataataatatttagatattcagttaaata

SEQ ID NO: 166180 - DNA, 5026 bp, Saccharomyces pastorianus
gagcatagcgggcggacaccgtaggaaaatatataagattaaatatataaaatataatatatttaatacaatagatagatcttatataatatataataggaatcttatatgagattatataataataataaataataataataatatataataaataataataataatatataataaataattatagtccggcccgcccccgcggggggggggcggacgccgaaggagaaatataaagatatgtccttattttatattttaataaatttaataagttatgacaatatataatatatttaatatagataatatatctaataatattaattaattataaagtttcataaaatattttataataataataatttaactcctagcggggtaccaattgggcccccccggggggcccgggactcctagcggggctaaagaatatatatataaaatctcactccatgtataccattaggagaatataatatatatgaataaagaatatttatatttgatttaattttattttttttttattatcagataggatagactcgaactaactaggtctttctcccaaagaaagcgcctgaccttttggcttctatctgtattaatatataatatatactatatataataataataatacatatatatatatttatataaagtctatttattaattaattaattaattatatggatattatattataattaagcatatttctgtataataatataacttttatatatcttttatatataacgaggggttcggtcccgcccttgggagggcgggtccctcactccttcggcgtccggcccgcggggcggacccgactataaataagattaatatattataaaatatatcttaatttttataaagatataaagtataatatttctaataatctattaataataattataaagtgattaaaaatatataataatatatttattaagttttattttcattttatttatttatactaattactttattaatattgtatataataataataattatcctgttatattttttatattattaaacaattaataatatatataatgaataatatatataattatacaatataatttatatatttatgactttcctattaataatataatattttatataaaaactaggggttcggtcccgccatccatatggatatgggagggcggatacctcacttttatatataaatatgattataatatatattaatatagttccaatagatataccattagaataatattatatattaattattagcaataatacgatttgaacgtatataattaggtcatgaccctaaaatgttaaccaattacatcatattgcatttatatatttattatatcctttgagactttatattatattacttataaaatatatataataagaatatatgaatattctaaattatttaatactataaagaaattataacattaatattaatgaattattgatattctcctacaattggtgtccgtccgcggagcggagcgtagcggagcgtagcggagcgtagcggagcgtagcggagcgtagcgggcgggacttaataaatatataaaaaaaaagatcctatagttcgtatttaattattattttaaataattaataatttatattaatacctaataaataaaaaaaaataaaatgaataataaaaaaaaaaatagtcatgtggagtataaagtttataattaataaagggtaaataaaagaatattattaaattatattattaataaagatattaataataattatgatttttattttttttatttatcaatagtaaacaataataattatttattaactctaccgatatagaataaaacattttcaatagtagagataacaggtacaataattaagaaatatgcgaagtagataaatgtagcaatttgtcccattaagacataaggtacttctacatgacatgctccaatttgtcctaataatacgaaattgaatacaaagataaagaagaagaatttagagaatactttgaaagtattacctctaacaacacttctatcagtaaatggtaaaactaataacactaaaatagctgcaaacataagaataacacctaataatttatcaggaatagatcttaaaatagcatagaatggtaataagtatcattcaggtacgatagacgctggtgttactaaaggattacctggaatataattatcaggatgacctaaagtatttggtgaataaaatacaaataatgctaatactaacataaataaaaatacagttactaaatctttaaatacgaaatatgaatgcattggaattctatctaaattacctgtaatacctaatggattagatgaaccatgaatatgtaatgccatcatatgcataataaccattgctgcaataacaaaaggtactaagtaatgtaatgcaaagaatctttggattagaggatttgatacagagcaaaaaaaaaagaatgttgatagttacatataatattaaatatattatcctccttcatgatacaacattgcaatgttatattggtggggattgataaataacgtaatagttaataagtaatattatattcttactatactcaatatatcattatattgttcggactatatcttaatcctttatgcttataattatttattataatacccttcgagaatatagcttagcaatattaatcggcgggtcatatatttattgattgattgattgattgattgataaaataaatttatcgataaatattataatatattaataattttgaggaatatttaaattattattatatttagaaattagacgtaattcttttaaaaataataaatattgtaatcttttatatcctaataattttataggatttttatttataaattttacaatattttcaatacctctaatactttttagagtaattcttgaattattatctttattagtatatacattttgactaatttttaaataaattttaatagcttcaataatttttaaattattagtttgagatacttcaaaactagctagtttaatattatttttaagagtataaatattaaaataaccttcagcttcaataaaaccaattaatcaataagaaaaataatttttatttaaaatattttctaggttgtataatgattttataggacgtttatatttaggtaaatcattataatatttaatatcttttaataaattatctttaaaaaataaataatcataatatttatttgttaatataggatatttatcaaaaatagggataataatatttattaaatgatttttatttcttacattatatttacatatttctttaatagtaccatctttattttttatttttttaatagaaattttaccaactccaataatatttttaattttatataataatttaatatctctaatatttatttctattcctaattcatataataaatatttaccttttttagaaatagtaattcaaccatctccttcaaataaaccaacaatataagcataaataggattatctgtatttaattcatgattcttatcatgaataattatagtatttaaataactactatttagtctctgagtaattaatatttttattctaataaaatacaaatttaaaatatttattactgctgattttcttcttataataaacatttttactttattatttttatttcaaataccccctcaaaacattataattataattataatgtttgcggatcatttaataatatagtagttcattattcaaatgaagacgttccagcataaaacagatttatttaacattatattactataatgtggatcctctctatttaatcctcctcataatcaagctacaatgtcattacctacaaatggaattgctgaaaataaattagtaataactagtgcacctcaatgtgatatctgcccataaacacaacaatacaaaataaaaataaaaataataagattcatttaagaataataattactcatttaaatactaaatattaaatattaagtaattattaaagggtaaatataaataaaaaaaataggagatctaataaaatttaataataaagaatatattaaaatttatgtagatagtttttaattaagaatttagtagtattatttaatttataatcggaagctttaactaatagaacatttttttttagtagagacatattctaattcaaaaggtttaaaattttcaataaatggtttactataaacattaaaaaaaccttttaaataaggtataaaaatattaggaatataaatatagcctctttctttaatagctcttctaatagtttttttcattacaacataataaatgagaagttaagaatctagattgaaaaacacaaactaattcatcatttatattatataaagcgacagataaactagctcctttaataattttctctttacctattttttataatagtttataatcattatttaaattattataataaatattattatgtttatttatatattttattatattagatttatctatagctatatatttatctaaataaataccataaatattattagtaatagcatattttaatttattagtaataagatctaaagtatcaaatttagataaagaaaaattctttaaattaccactattatatgtaggtaattttaggtataaataaatttgttcaatactatataaaatatatctatcaatactttcattatcatatattttttttatatcatatacaaaagtatttaaaccatatttttttacatctaatgcaatattagaactaccacgtaatctatataaatgattattaaatctatcatatatattattatatcctgctgaaccaatataaaatttatttgtcattatattaccaatataataaataccttgtttttttattaaataatttataatttcttcttttttat

SEQ ID NO: 166181 - DNA, 600 bp, Saccharomyces pastorianus
cgccgattaatattgctaagctatattctcgaagggtattataataaataattataagcataaaggattaagatatagtccgaacaatataatgatatattgagtatagtaagaatataatattacttattaactattacgttatttatcaatccccaccaatataacattgcaatgttgtatcatgaaggaggataatatatttaatattatatgtaactatcaacattcttttttttttgctctgtatcaaatcctctaatccaaagattctttgcattacattacttagtaccttttgttattgcagcaatggttattatgcatatgatggcattacatattcatggttcatctaatccattaggtattacaggtaatttagatagaattccaatgcattcatatttcgtatttaaagatttagtaactgtatttttatttatgttagtattagcattatttgtattttattcaccaaatactttaggtcatcctgataattatattccaggtaatcctttagtaacaccagcgtctatcgtacctgaatgatacttattaccattctatgctattttaagatctattcctgataaa

SEQ ID NO: 166182 - DNA, 25 bp, Saccharomyces pastorianus
ggctaatgttatcttcttccctatg

SEQ ID NO: 166183 - DNA, 25 bp, Saccharomyces pastorianus
ggtatgcccagaagaattccagatt

SEQ ID NO: 166184 - DNA, 25 bp, Saccharomyces pastorianus
aattatgtagcttctattggttcat

SEQ ID NO: 166185 - DNA, 25 bp, Saccharomyces pastorianus
gaattccagattaccctgatgcttt

SEQ ID NO: 166186 - DNA, 25 bp, Saccharomyces pastorianus
ggttcatttattgcacttatctcat

SEQ ID NO: 166187 - DNA, 25 bp, Saccharomyces pastorianus
gtttactctaaagcacccgattttg

SEQ ID NO: 166188 - DNA, 25 bp, Saccharomyces pastorianus
aattcttattaacttctccaccagc

SEQ ID NO: 166189 - DNA, 25 bp, Saccharomyces pastorianus
accctgatgctttcgctggttgaaa

SEQ ID NO: 166190 - DNA, 25 bp, Saccharomyces pastorianus
attatcaatgggtgctattttctca

SEQ ID NO: 166191 - DNA, 25 bp, Saccharomyces pastorianus
tatcttcttccctatgcatttctta

SEQ ID NO: 166192 - DNA, 25 bp, Saccharomyces pastorianus
tcaattctgattaatcttcatcggg

SEQ ID NO: 166193 - DNA, 25 bp, Saccharomyces pastorianus
ttctcatggaatagttggaaaaccc

SEQ ID NO: 166194 - DNA, 25 bp, Saccharomyces pastorianus
gtaaagtattgaccgatcctaattc

SEQ ID NO: 166195 - DNA, 25 bp, Saccharomyces pastorianus
aaaatggttattgttctcatggaat

SEQ ID NO: 166196 - DNA, 25 bp, Saccharomyces pastorianus
gattagctaccaattttactacatt

SEQ ID NO: 166197 - DNA, 25 bp, Saccharomyces pastorianus
ctgattctaattatactcctgatga

SEQ ID NO: 166198 - DNA, 25 bp, Saccharomyces pastorianus
atcattatttagtggtatttgtcaa

SEQ ID NO: 166199 - DNA, 25 bp, Saccharomyces pastorianus
attcatgttgtttaacgttagcaag

SEQ ID NO: 166200 - DNA, 25 bp, Saccharomyces pastorianus
gtatttgtcaagtttgtggttctaa

SEQ ID NO: 166201 - DNA, 25 bp, Saccharomyces pastorianus
aatgcattatttagctgttggtaga

SEQ ID NO: 166202 - DNA, 25 bp, Saccharomyces pastorianus
gaccgatcctaattcaaaagtaagt

SEQ ID NO: 166203 - DNA, 25 bp, Saccharomyces pastorianus
atatatgttacctagatctttatca

SEQ ID NO: 166204 - DNA, 25 bp, Saccharomyces pastorianus
ggtgttattcttatgtttgcagcta

SEQ ID NO: 166205 - DNA, 25 bp, Saccharomyces pastorianus
gagcatgtcatgtagaagtacctta

SEQ ID NO: 166206 - DNA, 25 bp, Saccharomyces pastorianus
gtacctgttatctctactattgaaa

SEQ ID NO: 166207 - DNA, 25 bp, Saccharomyces pastorianus
gtgttattagttttaccatttactg

SEQ ID NO: 166208 - DNA, 25 bp, Saccharomyces pastorianus
attcttcttctttatctttgtattc

SEQ ID NO: 166209 - DNA, 25 bp, Saccharomyces pastorianus
gggacaaattgctacatttatctac

SEQ ID NO: 166210 - DNA, 25 bp, Saccharomyces pastorianus
gtttgcagctattttagtgttatta

SEQ ID NO: 166211 - DNA, 25 bp, Saccharomyces pastorianus
gaagtaccttatgtcttaatgggac

SEQ ID NO: 166212 - DNA, 25 bp, Saccharomyces pastorianus
gtattcaatttcgtattattaggac

SEQ ID NO: 166213 - DNA, 25 bp, Saccharomyces pastorianus
gcatatttcttaattattgtacctg

SEQ ID NO: 166214 - DNA, 25 bp, Saccharomyces pastorianus
atttatctacttcgcatatttctta

SEQ ID NO: 166215 - DNA, 25 bp, Saccharomyces pastorianus
agttccattttattttatgaatcaa

SEQ ID NO: 166216 - DNA, 25 bp, Saccharomyces pastorianus
tcaattaacttatggtttcttatta

SEQ ID NO: 166217 - DNA, 25 bp, Saccharomyces pastorianus
ttctcacaattatttttacctatga

SEQ ID NO: 166218 - DNA, 25 bp, Saccharomyces pastorianus
cttatggtttcttattaataattct

SEQ ID NO: 166219 - DNA, 25 bp, Saccharomyces pastorianus
attatttttacctatgatcttaaga

SEQ ID NO: 166220 - DNA, 25 bp, Saccharomyces pastorianus
ttattctcacaattatttttaccta

SEQ ID NO: 166221 - DNA, 25 bp, Saccharomyces pastorianus
atttttacctatgatcttaagatta

SEQ ID NO: 166222 - DNA, 25 bp, Saccharomyces pastorianus
tttacctatgatcttaagattatac

SEQ ID NO: 166223 - DNA, 25 bp, Saccharomyces pastorianus
gaatcaattaacttatggtttctta

SEQ ID NO: 166224 - DNA, 25 bp, Saccharomyces pastorianus
acaattatttttacctatgatctta

SEQ ID NO: 166225 - DNA, 25 bp, Saccharomyces pastorianus
cacaattatttttacctatgatctt

SEQ ID NO: 166226 - DNA, 25 bp, Saccharomyces pastorianus
ggttttgtacctttagctataatct

SEQ ID NO: 166227 - DNA, 25 bp, Saccharomyces pastorianus
attccttattcattcgctttatcag

SEQ ID NO: 166228 - DNA, 25 bp, Saccharomyces pastorianus
tggtacacctttaccattagttcct

SEQ ID NO: 166229 - DNA, 25 bp, Saccharomyces pastorianus
ccctatgatctttactttctttatg

SEQ ID NO: 166230 - DNA, 25 bp, Saccharomyces pastorianus
aacatggatgactattcttctcatt

SEQ ID NO: 166231 - DNA, 25 bp, Saccharomyces pastorianus
aggtttatatttccctatgatcttt

SEQ ID NO: 166232 - DNA, 25 bp, Saccharomyces pastorianus
tatttgttcctactggtacaccttt

SEQ ID NO: 166233 - DNA, 25 bp, Saccharomyces pastorianus
tcttctcattatttgttcctactgg

SEQ ID NO: 166234 - DNA, 25 bp, Saccharomyces pastorianus
agaattcgctatcggtattatccaa

SEQ ID NO: 166235 - DNA, 25 bp, Saccharomyces pastorianus
tgtttgatgtatcttaactgcttct

SEQ ID NO: 166236 - DNA, 25 bp, Saccharomyces pastorianus
gctagatctatttctttaggtttaa

SEQ ID NO: 166237 - DNA, 25 bp, Saccharomyces pastorianus
ggagcaggtatctcaacaattggtt

SEQ ID NO: 166238 - DNA, 25 bp, Saccharomyces pastorianus
tggtgtttcaagaaacccttctatt

SEQ ID NO: 166239 - DNA, 25 bp, Saccharomyces pastorianus
attgctatcgtattcgcagctttaa

SEQ ID NO: 166240 - DNA, 25 bp, Saccharomyces pastorianus
cgcagctttaattaatggtgtttca

SEQ ID NO: 166241 - DNA, 25 bp, Saccharomyces pastorianus
ggctattttaggtttcgcattatca

SEQ ID NO: 166242 - DNA, 25 bp, Saccharomyces pastorianus
acaattggtttattaggagcaggta

SEQ ID NO: 166243 - DNA, 25 bp, Saccharomyces pastorianus
aaagatctagtattccctatggcta

SEQ ID NO: 166244 - DNA, 25 bp, Saccharomyces pastorianus
tcgcattatcagaagctacaggttt

SEQ ID NO: 166245 - DNA, 25 bp, Saccharomyces pastorianus
ctagtattccctatggctattttag

SEQ ID NO: 166246 - DNA, 25 bp, Saccharomyces pastorianus
gaaacccttctattaaagatctagt

SEQ ID NO: 166247 - DNA, 25 bp, Saccharomyces pastorianus
ggtattggtattgctatcgtattcg

SEQ ID NO: 166248 - DNA, 25 bp, Saccharomyces pastorianus
ggtagaactagtactcttattttat

SEQ ID NO: 166249 - DNA, 25 bp, Saccharomyces pastorianus
attggtagaactagtactcttattt

SEQ ID NO: 166250 - DNA, 25 bp, Saccharomyces pastorianus
aatatttagtaggttgatctattaa

SEQ ID NO: 166251 - DNA, 25 bp, Saccharomyces pastorianus
agagtaacaattgaacctattaaat

SEQ ID NO: 166252 - DNA, 25 bp, Saccharomyces pastorianus
gtagaactagtactcttattttatt

SEQ ID NO: 166253 - DNA, 25 bp, Saccharomyces pastorianus
taaattatatctcttctaatcataa

SEQ ID NO: 166254 - DNA, 25 bp, Saccharomyces pastorianus
ctagtactcttattttattaaatgg

SEQ ID NO: 166255 - DNA, 25 bp, Saccharomyces pastorianus
attacaccttatggaattaataata

SEQ ID NO: 166256 - DNA, 25 bp, Saccharomyces pastorianus
atatctcttctaatcataatttata

SEQ ID NO: 166257 - DNA, 25 bp, Saccharomyces pastorianus
ggaattataacaaattatcaacgta

SEQ ID NO: 166258 - DNA, 25 bp, Saccharomyces pastorianus
aatattggtagaactagtactctta

SEQ ID NO: 166259 - DNA, 25 bp, Saccharomyces pastorianus
ttaactgctggacatcacgtaggat

SEQ ID NO: 166260 - DNA, 25 bp, Saccharomyces pastorianus
atgccggaactggtttacatttctt

SEQ ID NO: 166261 - DNA, 25 bp, Saccharomyces pastorianus
tatcatctggtgctactgtaactta

SEQ ID NO: 166262 - DNA, 25 bp, Saccharomyces pastorianus
ctatggttcagtattctatgccgga

SEQ ID NO: 166263 - DNA, 25 bp, Saccharomyces pastorianus
ggttcatgttgaccacctgtaggta

SEQ ID NO: 166264 - DNA, 25 bp, Saccharomyces pastorianus
gagcatatttccattcagctatgag

SEQ ID NO: 166265 - DNA, 25 bp, Saccharomyces pastorianus
ctatctctgatggtatctatggttc

SEQ ID NO: 166266 - DNA, 25 bp, Saccharomyces pastorianus
agctatgagtcctgatgttctatta

SEQ ID NO: 166267 - DNA, 25 bp, Saccharomyces pastorianus
gtcatcatgctttaattgctggtaa

SEQ ID NO: 166268 - DNA, 25 bp, Saccharomyces pastorianus
ctaatgctgcatttactatctctga

SEQ ID NO: 166269 - DNA, 25 bp, Saccharomyces pastorianus
aatcttcgctggtttattttgagca

SEQ ID NO: 166270 - DNA, 25 bp, Saccharomyces pastorianus
tcattgtaccgaccgttagatacga

SEQ ID NO: 166271 - DNA, 25 bp, Saccharomyces pastorianus
gttagatacgacgatcgacactatt

SEQ ID NO: 166272 - DNA, 25 bp, Saccharomyces pastorianus
ttcccgtggatcaaccctattaaca

SEQ ID NO: 166273 - DNA, 25 bp, Saccharomyces pastorianus
gtaccgaccgttagatacgacgatc

SEQ ID NO: 166274 - DNA, 25 bp, Saccharomyces pastorianus
attctcattgtaccgaccgttagat

SEQ ID NO: 166275 - DNA, 25 bp, Saccharomyces pastorianus
tacgacgatcgacactattaaatat

SEQ ID NO: 166276 - DNA, 25 bp, Saccharomyces pastorianus
tatataattttttcccgtggatcaa

SEQ ID NO: 166277 - DNA, 25 bp, Saccharomyces pastorianus
aaaactattctcattgtaccgaccg

SEQ ID NO: 166278 - DNA, 25 bp, Saccharomyces pastorianus
actattctcattgtaccgaccgtta

SEQ ID NO: 166279 - DNA, 25 bp, Saccharomyces pastorianus
gtggatcaaccctattaacaactgg

SEQ ID NO: 166280 - DNA, 25 bp, Saccharomyces pastorianus
tattaaagacatagtccgaacaata

SEQ ID NO: 166281 - DNA, 25 bp, Saccharomyces pastorianus
gtttatatccaccattacataatag

SEQ ID NO: 166282 - DNA, 25 bp, Saccharomyces pastorianus
attttagtttatatccaccattaca

SEQ ID NO: 166283 - DNA, 25 bp, Saccharomyces pastorianus
gagactagtgcgttaaatatcctat

SEQ ID NO: 166284 - DNA, 25 bp, Saccharomyces pastorianus
aggaacttcagagactagtgcgtta

SEQ ID NO: 166285 - DNA, 25 bp, Saccharomyces pastorianus
gaggttataattattcagctcttaa

SEQ ID NO: 166286 - DNA, 25 bp, Saccharomyces pastorianus
gaaaatcagtagttggaggttataa

SEQ ID NO: 166287 - DNA, 25 bp, Saccharomyces pastorianus
atataatacttgttattggtcgaaa

SEQ ID NO: 166288 - DNA, 25 bp, Saccharomyces pastorianus
gtcgaaaataatatctcactttaat

SEQ ID NO: 166289 - DNA, 25 bp, Saccharomyces pastorianus
aaagctttagatggtagtatttctt

SEQ ID NO: 166290 - DNA, 25 bp, Saccharomyces pastorianus
tacagtccacagttaataaggtttg

SEQ ID NO: 166291 - DNA, 25 bp, Saccharomyces pastorianus
aggataaagatacagtccacagtta

SEQ ID NO: 166292 - DNA, 25 bp, Saccharomyces pastorianus
caaggtaagccctataaattgttat

SEQ ID NO: 166293 - DNA, 25 bp, Saccharomyces pastorianus
aaccacttattgaaaatctgtctga

SEQ ID NO: 166294 - DNA, 25 bp, Saccharomyces pastorianus
gatgaaaatctgctaacttatatta

SEQ ID NO: 166295 - DNA, 25 bp, Saccharomyces pastorianus
gagccgtatgctatgaaagtcgcat

SEQ ID NO: 166296 - DNA, 25 bp, Saccharomyces pastorianus
atagatattgcgtgagccgtatgct

SEQ ID NO: 166297 - DNA, 25 bp, Saccharomyces pastorianus
aaggtgatatgcctatttttattat

SEQ ID NO: 166298 - DNA, 25 bp, Saccharomyces pastorianus
gtgttggaaattagcatacgataaa

SEQ ID NO: 166299 - DNA, 25 bp, Saccharomyces pastorianus
gaaaatctgtctgataattcaataa

SEQ ID NO: 166300 - DNA, 25 bp, Saccharomyces pastorianus
aatgattgatgttatgtgttggaaa

SEQ ID NO: 166301 - DNA, 25 bp, Saccharomyces pastorianus
aaagtcgcatgtacggttcttaccg

SEQ ID NO: 166302 - DNA, 25 bp, Saccharomyces pastorianus
attgcgtgagccgtatgctatgaaa

SEQ ID NO: 166303 - DNA, 25 bp, Saccharomyces pastorianus
ggagctagtttatctgtcgctttat

SEQ ID NO: 166304 - DNA, 25 bp, Saccharomyces pastorianus
gtttatctgtcgctttatataatat

SEQ ID NO: 166305 - DNA, 25 bp, Saccharomyces pastorianus
taacttctcatttattatgttgtaa

SEQ ID NO: 166306 - DNA, 25 bp, Saccharomyces pastorianus
taaaggagctagtttatctgtcgct

SEQ ID NO: 166307 - DNA, 25 bp, Saccharomyces pastorianus
gattcttaacttctcatttattatg

SEQ ID NO: 166308 - DNA, 25 bp, Saccharomyces pastorianus
gtttgtgtttttcaatctagattct

SEQ ID NO: 166309 - DNA, 25 bp, Saccharomyces pastorianus
gtgtttttcaatctagattcttaac

SEQ ID NO: 166310 - DNA, 25 bp, Saccharomyces pastorianus
gctagtttatctgtcgctttatata

SEQ ID NO: 166311 - DNA, 25 bp, Saccharomyces pastorianus
caatctagattcttaacttctcatt

SEQ ID NO: 166312 - DNA, 25 bp, Saccharomyces pastorianus
gaattagtttgtgtttttcaatcta

SEQ ID NO: 166313 - DNA, 25 bp, Saccharomyces pastorianus
aaggagctagtttatctgtcgcttt

SEQ ID NO: 166314 - DNA, 25 bp, Saccharomyces pastorianus
gtcggtttacattttaattgctcaa

SEQ ID NO: 166315 - DNA, 25 bp, Saccharomyces pastorianus
ctatttattataagattctctggac

SEQ ID NO: 166316 - DNA, 25 bp, Saccharomyces pastorianus
ctggacttattaatgtcggtttaca

SEQ ID NO: 166317 - DNA, 25 bp, Saccharomyces pastorianus
tttacattttaattgctcaaaacac

SEQ ID NO: 166318 - DNA, 25 bp, Saccharomyces pastorianus
gattctctggacttattaatgtcgg

SEQ ID NO: 166319 - DNA, 25 bp, Saccharomyces pastorianus
taatagttttataaattgacagtct

SEQ ID NO: 166320 - DNA, 25 bp, Saccharomyces pastorianus
gaaaacctattgatagtacacctat

SEQ ID NO: 166321 - DNA, 25 bp, Saccharomyces pastorianus
tctctggacttattaatgtcggttt

SEQ ID NO: 166322 - DNA, 25 bp, Saccharomyces pastorianus
taactaattgaaaacctattgatag

SEQ ID NO: 166323 - DNA, 25 bp, Saccharomyces pastorianus
acctattgatagtacacctatattt

SEQ ID NO: 166324 - DNA, 25 bp, Saccharomyces pastorianus
taagtttattggtgtaggagtatat

SEQ ID NO: 166325 - DNA, 25 bp, Saccharomyces pastorianus
gatagagaatgctgacatgagtaac

SEQ ID NO: 166326 - DNA, 25 bp, Saccharomyces pastorianus
gaatgctgacatgagtaacgaaaaa

SEQ ID NO: 166327 - DNA, 25 bp, Saccharomyces pastorianus
gaacatgtaacaatgcactgattta

SEQ ID NO: 166328 - DNA, 25 bp, Saccharomyces pastorianus
gcccagattaagatataaagttcct

SEQ ID NO: 166329 - DNA, 25 bp, Saccharomyces pastorianus
gtaacaatgcactgatttataataa

SEQ ID NO: 166330 - DNA, 25 bp, Saccharomyces pastorianus
gataatatacggatcttaataataa

SEQ ID NO: 166331 - DNA, 25 bp, Saccharomyces pastorianus
tataatcagttaatgggtttgacaa

SEQ ID NO: 166332 - DNA, 25 bp, Saccharomyces pastorianus
gggaaacagcccagattaagatata

SEQ ID NO: 166333 - DNA, 25 bp, Saccharomyces pastorianus
ataaccactttttaatgaacatgta

SEQ ID NO: 166334 - DNA, 25 bp, Saccharomyces pastorianus
tacggcccctaataaaaatatgaat

SEQ ID NO: 166335 - DNA, 25 bp, Saccharomyces pastorianus
gaaacagcccagattaagatataaa

SEQ ID NO: 166336 - DNA, 25 bp, Saccharomyces pastorianus
gaaatactaccatctaaagcttttt

SEQ ID NO: 166337 - DNA, 25 bp, Saccharomyces pastorianus
tatactccaaaactaccatcagcgt

SEQ ID NO: 166338 - DNA, 25 bp, Saccharomyces pastorianus
aacgcactagtctctgaagttcctt

SEQ ID NO: 166339 - DNA, 25 bp, Saccharomyces pastorianus
taattttatctaatccttctttagt

SEQ ID NO: 166340 - DNA, 25 bp, Saccharomyces pastorianus
taacctccaactactgattttcttt

SEQ ID NO: 166341 - DNA, 25 bp, Saccharomyces pastorianus
gtctctgaagttccttttaatagat

SEQ ID NO: 166342 - DNA, 25 bp, Saccharomyces pastorianus
ccatcagcgtcagtaaaaccagtta

SEQ ID NO: 166343 - DNA, 25 bp, Saccharomyces pastorianus
atcaacatgtctttgtataattcta

SEQ ID NO: 166344 - DNA, 25 bp, Saccharomyces pastorianus
gaataattataacctccaactactg

SEQ ID NO: 166345 - DNA, 25 bp, Saccharomyces pastorianus
actaccatctaaagctttttgaaca

SEQ ID NO: 166346 - DNA, 25 bp, Saccharomyces pastorianus
ggatatttaacgcactagtctctga

SEQ ID NO: 166347 - DNA, 25 bp, Saccharomyces pastorianus
tcggtcccgccctatatataaatat

SEQ ID NO: 166348 - DNA, 25 bp, Saccharomyces pastorianus
cggtcccgccctatatataaatata

SEQ ID NO: 166349 - DNA, 25 bp, Saccharomyces pastorianus
atccctaggatggttattatttatt

SEQ ID NO: 166350 - DNA, 25 bp, Saccharomyces pastorianus
ccctaggatggttattatttattat

SEQ ID NO: 166351 - DNA, 25 bp, Saccharomyces pastorianus
gaagtacatccctaggatggttatt

SEQ ID NO: 166352 - DNA, 25 bp, Saccharomyces pastorianus
aagagctatgaagtacatccctagg

SEQ ID NO: 166353 - DNA, 25 bp, Saccharomyces pastorianus
ataagagctatgaagtacatcccta

SEQ ID NO: 166354 - DNA, 25 bp, Saccharomyces pastorianus
gctatgaagtacatccctaggatgg

SEQ ID NO: 166355 - DNA, 25 bp, Saccharomyces pastorianus
gagctatgaagtacatccctaggat

SEQ ID NO: 166356 - DNA, 25 bp, Saccharomyces pastorianus
ttcggtcccgccctatatataaata

SEQ ID NO: 166357 - DNA, 25 bp, Saccharomyces pastorianus
aggggcggtgaaccagacttattat

SEQ ID NO: 166358 - DNA, 25 bp, Saccharomyces pastorianus
aggacatgacacatgcgaatcatac

SEQ ID NO: 166359 - DNA, 25 bp, Saccharomyces pastorianus
gacacatgcgaatcatacgtttatt

SEQ ID NO: 166360 - DNA, 25 bp, Saccharomyces pastorianus
catgcgaatcatacgtttattatta

SEQ ID NO: 166361 - DNA, 25 bp, Saccharomyces pastorianus
gacatgacacatgcgaatcatacgt

SEQ ID NO: 166362 - DNA, 25 bp, Saccharomyces pastorianus
gcgctaaataaggacatgacacatg

SEQ ID NO: 166363 - DNA, 25 bp, Saccharomyces pastorianus
gttggttcagattaagcgctaaata

SEQ ID NO: 166364 - DNA, 25 bp, Saccharomyces pastorianus
gatgttggttcagattaagcgctaa

SEQ ID NO: 166365 - DNA, 25 bp, Saccharomyces pastorianus
ggttcagattaagcgctaaataagg

SEQ ID NO: 166366 - DNA, 25 bp, Saccharomyces pastorianus
gcgaatcatacgtttattattaata

SEQ ID NO: 166367 - DNA, 25 bp, Saccharomyces pastorianus
tatgatgttggttcagattaagcgc

SEQ ID NO: 166368 - DNA, 25 bp, Saccharomyces pastorianus
aaatgtggtgtaaacgtgagtaatt

SEQ ID NO: 166369 - DNA, 25 bp, Saccharomyces pastorianus
aatatttctatttaggctactatat

SEQ ID NO: 166370 - DNA, 25 bp, Saccharomyces pastorianus
taatcaggagtattggaatcttaat

SEQ ID NO: 166371 - DNA, 25 bp, Saccharomyces pastorianus
ccctatatttcctaaacctagatat

SEQ ID NO: 166372 - DNA, 25 bp, Saccharomyces pastorianus
aggagattagcttaattggtatagc

SEQ ID NO: 166373 - DNA, 25 bp, Saccharomyces pastorianus
ggtatagcattcgttttacacacga

SEQ ID NO: 166374 - DNA, 25 bp, Saccharomyces pastorianus
agaccctatatatatatcctatgag

SEQ ID NO: 166375 - DNA, 25 bp, Saccharomyces pastorianus
cgttttacacacgaaagattatagg

SEQ ID NO: 166376 - DNA, 25 bp, Saccharomyces pastorianus
gcttaattggtatagcattcgtttt

SEQ ID NO: 166377 - DNA, 25 bp, Saccharomyces pastorianus
tataggttcgaaccctatatttcct

SEQ ID NO: 166378 - DNA, 25 bp, Saccharomyces pastorianus
gtattggaatcttaatagaccctat

SEQ ID NO: 166379 - DNA, 25 bp, Saccharomyces pastorianus
gaaagattataggttcgaaccctat

SEQ ID NO: 166380 - DNA, 25 bp, Saccharomyces pastorianus
gattaaatagagaggatccacatta

SEQ ID NO: 166381 - DNA, 25 bp, Saccharomyces pastorianus
gcaattccatttgtaggtaatgaca

SEQ ID NO: 166382 - DNA, 25 bp, Saccharomyces pastorianus
gagaggatccacattatagtaatat

SEQ ID NO: 166383 - DNA, 25 bp, Saccharomyces pastorianus
cacattgaggtgcactagttattac

SEQ ID NO: 166384 - DNA, 25 bp, Saccharomyces pastorianus
ggtaatgacattgtagcttgattat

SEQ ID NO: 166385 - DNA, 25 bp, Saccharomyces pastorianus
ttgtagcttgattatgaggaggatt

SEQ ID NO: 166386 - DNA, 25 bp, Saccharomyces pastorianus
gaggtgcactagttattactaattt

SEQ ID NO: 166387 - DNA, 25 bp, Saccharomyces pastorianus
gttttatgctggaacgtcttcattt

SEQ ID NO: 166388 - DNA, 25 bp, Saccharomyces pastorianus
tgctggaacgtcttcatttgaataa

SEQ ID NO: 166389 - DNA, 25 bp, Saccharomyces pastorianus
tattttcagcaattccatttgtagg

SEQ ID NO: 166390 - DNA, 25 bp, Saccharomyces pastorianus
aaatctgttttatgctggaacgtct

SEQ ID NO: 166391 - DNA, 25 bp, Saccharomyces pastorianus
ccgcggcacaaacccagcttagctg

SEQ ID NO: 166392 - DNA, 25 bp, Saccharomyces pastorianus
ccagcagtcgcggtaacacaaagag

SEQ ID NO: 166393 - DNA, 25 bp, Saccharomyces pastorianus
ttgtgaccgcgggtacgatataata

SEQ ID NO: 166394 - DNA, 25 bp, Saccharomyces pastorianus
tagtcctgacaaatatttgtgccag

SEQ ID NO: 166395 - DNA, 25 bp, Saccharomyces pastorianus
ccagttacttattaggatgatatat

SEQ ID NO: 166396 - DNA, 25 bp, Saccharomyces pastorianus
accgcgggtacgatataataaatat

SEQ ID NO: 166397 - DNA, 25 bp, Saccharomyces pastorianus
atttgtgccagcagtcgcggtaaca

SEQ ID NO: 166398 - DNA, 25 bp, Saccharomyces pastorianus
aatatttgtgccagcagtcgcggta

SEQ ID NO: 166399 - DNA, 25 bp, Saccharomyces pastorianus
tatagatatataccccgcggcacaa

SEQ ID NO: 166400 - DNA, 25 bp, Saccharomyces pastorianus
gtagtatattttaatagtcctgaca

SEQ ID NO: 166401 - DNA, 25 bp, Saccharomyces pastorianus
cggtaacacaaagagggcgagcgtt

SEQ ID NO: 166402 - DNA, 25 bp, Saccharomyces pastorianus
tgaccttttggcttctatctgtatt

SEQ ID NO: 166403 - DNA, 25 bp, Saccharomyces pastorianus
ccttttggcttctatctgtattaat

SEQ ID NO: 166404 - DNA, 25 bp, Saccharomyces pastorianus
tttctcccaaagaaagcgcctgacc

SEQ ID NO: 166405 - DNA, 25 bp, Saccharomyces pastorianus
atctcactccatgtataccattagg

SEQ ID NO: 166406 - DNA, 25 bp, Saccharomyces pastorianus
tcgaactaactaggtctttctccca

SEQ ID NO: 166407 - DNA, 25 bp, Saccharomyces pastorianus
gggcggacccgactataaataagat

SEQ ID NO: 166408 - DNA, 25 bp, Saccharomyces pastorianus
tcagataggatagactcgaactaac

SEQ ID NO: 166409 - DNA, 25 bp, Saccharomyces pastorianus
atatatataaaatctcactccatgt

SEQ ID NO: 166410 - DNA, 25 bp, Saccharomyces pastorianus
aaagaaagcgcctgaccttttggct

SEQ ID NO: 166411 - DNA, 25 bp, Saccharomyces pastorianus
aaagcgcctgaccttttggcttcta

SEQ ID NO: 166412 - DNA, 25 bp, Saccharomyces pastorianus
tggcttctatctgtattaatatata

SEQ ID NO: 166413 - DNA, 25 bp, Saccharomyces pastorianus
aatattgtaatcttttatatcctaa

SEQ ID NO: 166414 - DNA, 25 bp, Saccharomyces pastorianus
aatcggcgggtcatatatttattga

SEQ ID NO: 166415 - DNA, 25 bp, Saccharomyces pastorianus
agcttagcaatattaatcggcgggt

SEQ ID NO: 166416 - DNA, 25 bp, Saccharomyces pastorianus
tattttcaatacctctaatactttt

SEQ ID NO: 166417 - DNA, 25 bp, Saccharomyces pastorianus
atttattataatacccttcgagaat

SEQ ID NO: 166418 - DNA, 25 bp, Saccharomyces pastorianus
taaccttcagcttcaataaaaccaa

SEQ ID NO: 166419 - DNA, 25 bp, Saccharomyces pastorianus
cttaatcctttatgcttataattat

SEQ ID NO: 166420 - DNA, 25 bp, Saccharomyces pastorianus
tagcaatattaatcggcgggtcata

SEQ ID NO: 166421 - DNA, 25 bp, Saccharomyces pastorianus
tgagatacttcaaaactagctagtt

SEQ ID NO: 166422 - DNA, 25 bp, Saccharomyces pastorianus
aatattaaaataaccttcagcttca

SEQ ID NO: 166423 - DNA, 25 bp, Saccharomyces pastorianus
acccttcgagaatatagcttagcaa

SEQ ID NO: 166424 - DNA, 25 bp, Saccharomyces pastorianus
aattgacccgaaagcaaacgatcta

SEQ ID NO: 166425 - DNA, 25 bp, Saccharomyces pastorianus
ccttttgtataatgggtcagcaagt

SEQ ID NO: 166426 - DNA, 25 bp, Saccharomyces pastorianus
gtgaactgaaacatctaagtaactt

SEQ ID NO: 166427 - DNA, 25 bp, Saccharomyces pastorianus
gaactaagtgaactgaaacatctaa

SEQ ID NO: 166428 - DNA, 25 bp, Saccharomyces pastorianus
gacccgaaagcaaacgatctaacta

SEQ ID NO: 166429 - DNA, 25 bp, Saccharomyces pastorianus
aggataacaaattctaagactaaat

SEQ ID NO: 166430 - DNA, 25 bp, Saccharomyces pastorianus
atgggtcagcaagtaattaatatta

SEQ ID NO: 166431 - DNA, 25 bp, Saccharomyces pastorianus
attaatattaattgacccgaaagca

SEQ ID NO: 166432 - DNA, 25 bp, Saccharomyces pastorianus
ttatattaatgatgtaccttttgta

SEQ ID NO: 166433 - DNA, 25 bp, Saccharomyces pastorianus
gtaccttttgtataatgggtcagca

SEQ ID NO: 166434 - DNA, 25 bp, Saccharomyces pastorianus
cgaaagcaaacgatctaactatgat

SEQ ID NO: 166435 - DNA, 25 bp, Saccharomyces pastorianus
tgaggtcccgcatgaatgacgtaat

SEQ ID NO: 166436 - DNA, 25 bp, Saccharomyces pastorianus
gacggaaagaccctatgcagcttta

SEQ ID NO: 166437 - DNA, 25 bp, Saccharomyces pastorianus
aaacaccgcactttgcagaaacgat

SEQ ID NO: 166438 - DNA, 25 bp, Saccharomyces pastorianus
actgtctcccctttaagctaagtga

SEQ ID NO: 166439 - DNA, 25 bp, Saccharomyces pastorianus
ttggcctataattgaggtcccgcat

SEQ ID NO: 166440 - DNA, 25 bp, Saccharomyces pastorianus
gaagatgctatgtaccttcagcaag

SEQ ID NO: 166441 - DNA, 25 bp, Saccharomyces pastorianus
ataaggtgtgaactctgctccatgc

SEQ ID NO: 166442 - DNA, 25 bp, Saccharomyces pastorianus
ggaactcggcaaaaacagctctaaa

SEQ ID NO: 166443 - DNA, 25 bp, Saccharomyces pastorianus
gtataccgtaatgtagaccgactca

SEQ ID NO: 166444 - DNA, 25 bp, Saccharomyces pastorianus
atgtagcgaaattccttggcctata

SEQ ID NO: 166445 - DNA, 25 bp, Saccharomyces pastorianus
aatgatacaacaactgtctcccctt

SEQ ID NO: 166446 - DNA, 25 bp, Saccharomyces pastorianus
atggctatgcattattcatctaata

SEQ ID NO: 166447 - DNA, 25 bp, Saccharomyces pastorianus
aacaggtatttttatggctatgcat

SEQ ID NO: 166448 - DNA, 25 bp, Saccharomyces pastorianus
atgctaatggtgcatcattcttctt

SEQ ID NO: 166449 - DNA, 25 bp, Saccharomyces pastorianus
aacagttatgttattgattcaccac

SEQ ID NO: 166450 - DNA, 25 bp, Saccharomyces pastorianus
aatgtaggtgttatcattttcgtat

SEQ ID NO: 166451 - DNA, 25 bp, Saccharomyces pastorianus
ggttcatatagatctccaagagtac

SEQ ID NO: 166452 - DNA, 25 bp, Saccharomyces pastorianus
gctacagctttcttaggttaacaac

SEQ ID NO: 166453 - DNA, 25 bp, Saccharomyces pastorianus
ggtgcatcattcttctttttagtta

SEQ ID NO: 166454 - DNA, 25 bp, Saccharomyces pastorianus
gagttagcattttcatcagtagaac

SEQ ID NO: 166455 - DNA, 25 bp, Saccharomyces pastorianus
attcaccacaaccatcatcaattag

SEQ ID NO: 166456 - DNA, 25 bp, Saccharomyces pastorianus
ttcgtattaacaattgctacagctt

SEQ ID NO: 166457 - DNA, 25 bp, Saccharomyces pastorianus
ggtatacactaacacttttcctgat

SEQ ID NO: 166458 - DNA, 25 bp, Saccharomyces pastorianus
tttagagctgtttttgccgagttcc

SEQ ID NO: 166459 - DNA, 25 bp, Saccharomyces pastorianus
gagtcggtctacattacggtataca

SEQ ID NO: 166460 - DNA, 25 bp, Saccharomyces pastorianus
agcatggagcagagttcacacctta

SEQ ID NO: 166461 - DNA, 25 bp, Saccharomyces pastorianus
ttcaccttcatattctctacttaca

SEQ ID NO: 166462 - DNA, 25 bp, Saccharomyces pastorianus
atcgtttctgcaaagtgcggtgttt

SEQ ID NO: 166463 - DNA, 25 bp, Saccharomyces pastorianus
ttttttcgttactcatgtcagcatt

SEQ ID NO: 166464 - DNA, 25 bp, Saccharomyces pastorianus
atgtcagcattctctatctaattat

SEQ ID NO: 166465 - DNA, 25 bp, Saccharomyces pastorianus
ataaggctgctatttacctaaattt

SEQ ID NO: 166466 - DNA, 25 bp, Saccharomyces pastorianus
gttcttattactctttattgactaa

SEQ ID NO: 166467 - DNA, 25 bp, Saccharomyces pastorianus
tctacttacatacctgagtcggtct

SEQ ID NO: 166468 - DNA, 25 bp, Saccharomyces pastorianus
atatctatcaatactttcattatca

SEQ ID NO: 166469 - DNA, 25 bp, Saccharomyces pastorianus
aaccatatttttttacatctaatgc

SEQ ID NO: 166470 - DNA, 25 bp, Saccharomyces pastorianus
tatattattatatcctgctgaacca

SEQ ID NO: 166471 - DNA, 25 bp, Saccharomyces pastorianus
ttattatatcctgctgaaccaatat

SEQ ID NO: 166472 - DNA, 25 bp, Saccharomyces pastorianus
gcaatattagaactaccacgtaatc

SEQ ID NO: 166473 - DNA, 25 bp, Saccharomyces pastorianus
aatgcaatattagaactaccacgta

SEQ ID NO: 166474 - DNA, 25 bp, Saccharomyces pastorianus
tattattatatcctgctgaaccaat

SEQ ID NO: 166475 - DNA, 25 bp, Saccharomyces pastorianus
agaactaccacgtaatctatataaa

SEQ ID NO: 166476 - DNA, 25 bp, Saccharomyces pastorianus
aaatttatttgtcattatattacca

SEQ ID NO: 166477 - DNA, 25 bp, Saccharomyces pastorianus
actaccacgtaatctatataaatga

SEQ ID NO: 166478 - DNA, 25 bp, Saccharomyces pastorianus
tatcctgctgaaccaatataaaatt

SEQ ID NO: 166479 - DNA, 25 bp, Saccharomyces pastorianus
gcaatgttgtatcatgaaggaggat

SEQ ID NO: 166480 - DNA, 25 bp, Saccharomyces pastorianus
gctaagctatattctcgaagggtat

SEQ ID NO: 166481 - DNA, 25 bp, Saccharomyces pastorianus
acattgcaatgttgtatcatgaagg

SEQ ID NO: 166482 - DNA, 25 bp, Saccharomyces pastorianus
tatgtaactatcaacattctttttt

SEQ ID NO: 166483 - DNA, 25 bp, Saccharomyces pastorianus
cgttatttatcaatccccaccaata

SEQ ID NO: 166484 - DNA, 25 bp, Saccharomyces pastorianus
gctatattctcgaagggtattataa

SEQ ID NO: 166485 - DNA, 25 bp, Saccharomyces pastorianus
cgccgattaatattgctaagctata

SEQ ID NO: 166486 - DNA, 25 bp, Saccharomyces pastorianus
aatccccaccaatataacattgcaa

SEQ ID NO: 166487 - DNA, 25 bp, Saccharomyces pastorianus
tatcaatccccaccaatataacatt

SEQ ID NO: 166488 - DNA, 25 bp, Saccharomyces pastorianus
aggattaagatatagtccgaacaat

SEQ ID NO: 166489 - DNA, 25 bp, Saccharomyces pastorianus
tattgctaagctatattctcgaagg

SEQ ID NO: 166490 - DNA, 258 bp, Saccharomyces pastorianus
gtgccactgatattgcttatcttacttttttctaaattttcaacatttctgcgccctgtaaatcacgtgctcgttacaaaatacactgccatagtaaatacaaaatggcaaacaacgcccagcatcattgatgttacatatactatgcacgttttttatatgacgataatacttattttggtcaggaagcaaatgcagtccatacatgcgtttctgggtagtttatgcttaccctcccacgtgctagattttcgattg

SEQ ID NO: 166491 - DNA, 510 bp, Saccharomyces pastorianus
acatcttcaagttcagcatctacatccctaagttctacatctacctcatcaagttcgacatccacatctccaagctctacatctacctcatcaagttcaacatctacatctccaagttctaaatctacctcatcaagttcgacatctacatccccaagttcgacatccacatcttcaagttctacatctacctccctaagttctacatctatctcatcaagttcaacatctacctcatcaagttctaaatctacctcatcaagttcgacatctacatctccaatttcgacatccacatccccaagtttgacttcttcatctccaactttggcttccacttctccaagttcaacatctattagctctacttttactgattcaacttcatcccttggctcctctatggcatcttcatcaacgtctgtgtcattatacagcccatccacacctgtttactccgtcccttcgacttcgtccaatgttgcaactccttctacgacttcttcaact

SEQ ID NO: 166492 - DNA, 663 bp, Saccharomyces pastorianus
accagtactggcaaaaatggtacctatagttctaccgcatatactaaatccgctcaagccactgaacatagtagtttgatctcggtcattagaactaaagggcttaaagtgtctacttccacagataaaagtgtggtagttggctatagtacatctgtcggtgatgctcaatatgccgaacatactagcttagttccagtttccactataaagggatccgaaacctctacttccacagataaaagcgtggtagttggctacagcacgtctgtcggtgatgctcaatatgctgaacacactagcttagttccagtttccactataaagggatccgaaacctctacttccacaggtaaaagtgtagtgtctggctatagtacatctattgctaatgctcaatatgccgaacatactagcttagtaccagttggaactttgaagagtgttaccacattccaacaaactgcagctactgaagtttgtaccacatgtactgccacttcttccacttattccacagctgttgatgctgccgtcactgcttcaagcccaacaagttcccaagcaaccctatctacagttactacgtggtattcatcctcaacagccaagccacctacgatttcaatttactcagctgctgccaaccaattaacctttagt

SEQ ID NO: 166493 - DNA, 375 bp, Saccharomyces pastorianus
aacagccgttgggccgaaaacaactataagaagagattattgggtactgccttcaagtcttctccattcggtggttcttctcacgccaagggtattgtcttggaaaagttgggtatcgaatccaagcaacctaactccgctatcagaaagtgtgttagagttcaattaatcaagaacggtaagaaggttactgctttcgttccaaacgatggttgtttgaactttgtcgatgaaaatgacgaagtcttgctagccggtttcggtagaaagggtaaggctaagggtgatattccaggtgttagattcaaggtcgttaaggtctctggtgtctccttgttggctttgtggaaggaaaagaaggaaaagccaagatct

SEQ ID NO: 166494 - DNA, 876 bp, Saccharomyces pastorianus
aggtctattcagaagtctcttaagaagaatgcagttacatatttgaaggaatcggatattgaatggtctaacgctagcacatatcaatgtcctgactgtctaatcggcaaaagcacgaaacatagacatgtcaaaggatcacgactaaagtaccaagaatcatatgagccttttcagtacttgcacaccgatatatttggtcctgtacatcacttaccgaaaagtgcaccttcttactttatatcgtttacagatgagaaaaccagattccaatgggtgtacccattacacgaccgtcgtgaagaatctatcctcaatgtttttacatcgatattagcatttattaagaaccaattcaatgctcgcgttctagttatccagatggatcgtggctccgagtacactaacaaaactcttcataagttctttacgaacagaggtattactgcatgctatacaaccacggcagattctagagcacacggtgtcgctgaacgattaaatcgtactttattaaacgattgtcgcacactgcttcattgcagtggtctaccaaatcatctatggttctcagcagtcgaattttctactataatcagaaattcattagtctcaccaaaaaacgataaatctgcaagacaacatgcaggtttagctggactggacattactactatactacctttcggtcaaccggttatagttaacaaccataatcctgactcgaaaatacatcctcgtggcattccaggttacgccttcatccgtcacgaaatcttatggatatattactaatctccatcattaaaaagacggaaaataacatacgttattccagacagcatccaatggccaatccatagaaactcctttgat

SEQ ID NO: 166495 - DNA, 318 bp, Saccharomyces pastorianus
ttagttaacgttccaaagaccagaaagacctactgtaagggtaagacctgtcgtaagcacactcaacacaaggttactcaatacaaagctggtaaggcttccttgtttgcccaaggtaagagacgttatgaccgtaaacaatctggtttcggtggtcaaaccaagcctgttttccacaagaaagctaagactaccaagaaggttgttttgagattggaatgtgtcaaatgtaagaccagagcccaattgaccttgaagagatgcaagcacttcgaattgggtggtgaaaagaagcaaaagggtcaagctttgcaattc

SEQ ID NO: 166496 - DNA, 195 bp, Saccharomyces pastorianus
cagaggtaccaacaagaacaggaagacgtccaagtgcagcaacaactgtcccaagcacagcaaccaaattcccggcaacaacagcaacaacttcaataccagcagcagcaactacaacatccacaacaacatatgcaaatacaacaacaacaacagcagcaacaacagcagcagcaatcacaatctcccgttcag

SEQ ID NO: 166497 - DNA, 84 bp, Saccharomyces pastorianus
ctcgaagactaaaagatgtctacggcatcgaaaagacgtataaatgcatctgagagggaacaacttgcgtcgatagaggaggct

SEQ ID NO: 166498 - DNA, 123 bp, Saccharomyces pastorianus
ttaggttgtatctctaacaaaaagattcctttcccaaaggtgcgtttttgtagcgggaagggtgcttctaaaaagacaaagcacccctactgcaacagttctggatgtgtaacaaggaaaaag

SEQ ID NO: 166499 - DNA, 126 bp, Saccharomyces pastorianus
acggcagtgccagcttgcatgcctgcaggtctttgagattctgtatataaatattgcaaacaaaaggatagagcacaaatgacagaccttatagtaaaaattgttcgttttaatcatgcgtcagtg

SEQ ID NO: 166500 - DNA, 627 bp, Saccharomyces pastorianus
gctaacaaggaaaagagagccattattttggaaagaaacgccgcttaccaaaaggaatacgaaactgctgaaagaaacatcattcaagctaagcgtgatgccaaggctgctggttcctactacgtcgaagctcaacacaagttggtcttcgttgtcagaatcaagggtattaacaagatcccacctaagccaagaaaggttctacaattgctaagattgacaagaatcaactctggtacattcgtcaaagttaccaaggctactttggaactattgaagttgattgaaccatacgttgcttacggttacccatcctactctactattagacaattggtctacaagagaggtttcggtaagatcaacaagcaaagagttccattgtccgacaatgctatcatcgaagccaacttgggtaagtatggtatcttgtccattgacgatttgattcacgaaatcatcactgttggtccacacttcaagcaagctaacaactttttgtggccattcaagttgtccaacccatctggtggttggggtgtcccaagaaagttcaagcactttatccaaggtggttctttcggtaaccgtgaagaattcatcaacaaattggttaagtccatgaac

SEQ ID NO: 166501 - DNA, 81 bp, Saccharomyces pastorianus
atggccgcgcaaaatccattggcagatattcaggtatataaacgttacaaagccaagaggagaatggaaggccaacaaaaa

SEQ ID NO: 166502 - DNA, 384 bp, Saccharomyces pastorianus
ctgatcactttccttgctgcttctgtgtatttcttcaagagcttcagtccaattatttacggtacaccatggactcaagaattgtgtcaaaaatcgcagtggttgtctggttgggactacaattgtaacacatacttttcttcattagaagagtacaaaaaccaaaccttgactaaacgtgaatctcaacctgccgccactagtacagttgaagaaatcactatagaaggggacggtccatcgtatgaagatctcatgaacgaggatggcaagaaaatctttaaagacacagaaggtaatgaactagatccagaagttgtcaaaaaaatgttggaagaggagggagctaacattttaaaagtagaaaaaagggctgttttggaa

SEQ ID NO: 166503 - DNA, 717 bp, Saccharomyces pastorianus
tttaattttggggtcccaaactcttccaaaaacgaaacttcaaaaccggtattttcgtttggtgcagcaacaccatcggccaaagaagctagtcaggaagatgacaacaacaacgttgaaaaaccttcctctaagcctgccttcaatttaatatctaacgctggtaccgagaaagagaaggaaagtaaaaaggactcaaagccagctttttcatttggcatatcaaacggaagtgaaagcaaagactctgacaaaccctctttaccctctgcggttgatggtgaaaatgacaagaaagaagcaacaaaacctgttttttcgtttggaataaatacaaatactactaaaaccgcggatactaaagctccaacttttacatttggctcctctgcactcgctgacaataaagaggatgttaagaaacctttttcattcggtacctcccagcctaataatactccatccttctcattcggaaaaacaacagcaaacttgcctgctaattcttcaacatctcctgctccctctataccatcgacggggttcaaattttctttgccatttgaacaaaaaggtagtcaaacaactacaaatgatagcaaggaagaatcaacaacagaagcaactggaaatgagtcgcaagatgcaaccaaagtagatgctaccccagaagaatcaaagccaataaacttgcaaaacggtgaggaagacgaagtg

SEQ ID NO: 166504 - DNA, 552 bp, Saccharomyces pastorianus
atcgccatcaggtataagaaccagttgttctttgaggcaacggactatgtaaagacaacgaaaccggaatattattcttctgataagagggaaaggcaagactattaccagttagaggattcatatcttgctatctttcaaaatggtaagtacctaggcaaagcatttgaaaatttaaagccgtttttaccaccgttcagtgagttacaatacaatgaaaagttctatcttggatattggcaacatggtgaagctcgtgatgagtccaatgataaaaacacaaccagtgccaaaaagaaaaagcagcaacaaaagaaaaagaagggattgatactcagaaacaaatacgtaaataataacaaactgggttactatccaacaatcagctgttttaacggtggaacagcgaggataattagtgaagaagataaattggagtacctcgatgaaatccgatcagcttactgtgttgacgggaattcaaaagttaacacactggatacattgtacaaagaacagatagctgaagacatagtatgggatataatcgac

SEQ ID NO: 166505 - DNA, 177 bp, Saccharomyces pastorianus
ttgcctttggagacattaaagttactggagttgacaatcagtgagccatactgtgagcacatagattataggagctcaggacagcttgtaaaccccagtttgtcgagtttgtttgaagacgatattgagaagggttactatggtgggatattcaaagcaagatacgataagaggcag

SEQ ID NO: 166506 - DNA, 864 bp, Saccharomyces pastorianus
gtgaacactaaatcgcttcacgtttatgaaccgtacgaaattgatggtcagaaatacattaatatggcaaaaaaagaagatcttggagtgtgagaacctggtttaacgcaggatacattcacagccgcagatgaaactaactacaatgacatcatagaaaagctggggaaatatggagtttgcgtaatcaaaaacttcatagaaccatccaagtgcgataaaatattgaattaaattgatccgcattactataggcacaagtcgtggcaggggccactatttccgaaggaaacaacggttgtaacaagatcattattataccctccttccatcttgaagaacattgtgagcgaccgtatgttctgtgacatgggagaaaactttctgaatgaacagaattatttattggctggaaacgtgatcaaaaaatgctctagcgattttcaactgaactccagcattatctagagggctggtcctggtgccggtgaccagggatacttgcgggaagatcatacccatcacacaattcatccagcatgtgagataaactaaaatgtcaaagaaacattaataaaggttagggcggctttcacggtgatgaataaagaaaacgagtctactcgaatgattattaattcacacttgtggggtcctcaagattcttgtgggactttcgaaaagaagatggaatatcatgcgaatgctgctaaaagtgatgcggttatattcttggacagcctctatcatgcagccagtgcaaatcatgatatagaagatagaatcaatgggtaattctttatgtcaaagggctattttaaaccagaggagcatctttacttgagaacagatttgaatctgttc

SEQ ID NO: 166507 - DNA, 315 bp, Saccharomyces pastorianus
atcacgatccacgggattagccgcccacggcaacccggtgcaacgggtagcacgcacccccgtgtttcgcgatatgcaacggccaatcaacggcgagctccgggcgcgtgccgggtgggcccctcgccggccaagcagcgcagggatattccactcttcgagccgtaagctataacacttataaagaacgccttttttttgcaatatgctctcttatattacgaaatatacattttttggtttgtagttttaaacttttcttaactccccaggacaggccaattggataaactttgcaaagatcaaacagtaaca

SEQ ID NO: 166508 - DNA, 264 bp, Saccharomyces pastorianus
gcatcatagctcaattctactgacctcgacacatatatccattgctcaacatgctggggcacaagcgactatacacttaacatctctgttatagatgctactaccgagagattggttgacactaaattgttaacaacgctcgagaatgcaactgcctggattaattcaaattctatcgatgaggacgaggatggtatgcctcacgctactgatgtatcagaccgactctatgaggtatcgcttagctagcgcacgtttgccatc

SEQ ID NO: 166509 - DNA, 246 bp, Saccharomyces pastorianus
accaccaattgtcgtttctgctcttggagcccatcttctttcctaacaaagcatccgaccacgtccagcggaccgtccacctcactaactataatgtcaccagccattgctatacgaggcctcctaccaccctgcgaagccacacacacaattccttcattgctctttctttgcactgtttctcttagcttatcctgctactgcccaattaccctgactctcgttcctgagccatatcagagcatc

SEQ ID NO: 166510 - DNA, 294 bp, Saccharomyces pastorianus
aatgctcttctatatgtcttaagcctggctttgctaatatggacaggatcggtagttactcttctcttggtacttttcttttgcctcttcctcttggtcttctcactccactttttttgttttacccgtgaacacgtacactatacgctcccacccaaatgccactcacttaaattccaattcgattcgattccgagttcgtcgttgtctttgtctccttttcctttcctttttttcccacgacttcgtgcagttgcatttgcctctcccactctgtcttttttttttcccatt

SEQ ID NO: 166511 - DNA, 177 bp, Saccharomyces pastorianus
ttgttaaacgcgcagaatattgcatttgcttcaaattatgggatagtgaagttagaccccgaatgccaattacaaaactctgataactctgaagaagaggaagtggacattgatatggataaattgaacagtgtgctaatagcagacctagatacaaaagcggaagaaacaagtata

SEQ ID NO: 166512 - DNA, 135 bp, Saccharomyces pastorianus
tatctttttttcccttcacctctgtgctcttttttagccacagctgtgcattacgcttgctttgcttgttttgttctctttcgccatgccatattactacttttctacttactggcacgaggccgcgcgagccag

SEQ ID NO: 166513 - DNA, 396 bp, Saccharomyces pastorianus
ccgttgttgtcatcaaatatatctaaatcccttgccgtacaaccacaacacgacatcgtggagtcttagtactgcgcaacttacatgctttcaagccatgctcgtccgctctgtgtgtcgaccttcttttcgccacgtaaacttgcttggatagctcatctacgtgtagtaaccatatttccttatggtgctttcccttacaataggtgccggcgaaagtaccaatcctagagctctcgttcggcctgcccctcgcatttcgtaacaacccattatagtatcctaatcctttctattgaatttcaaactatgcacttgaaacaacgtgtacaccatcacgtggtttgtttgaaggcatcggtccgccctggaaatctggttcgtcttcaacaaacc

SEQ ID NO: 166514 - DNA, 99 bp, Saccharomyces pastorianus
cgtgggcatagatcacgcttcacccgctctgtgtcgactttcttttcgccagttaacttgcttggtatgcagaaaaaatcgatagctcatctacgtgta

SEQ ID NO: 166515 - DNA, 318 bp, Saccharomyces pastorianus
gacgttacccgtttaatggttccatttttcgccggtttttttctatttctgagctatataaagcagctcaaagctgttttgattaatcttctctatactttcttctctttaaattttaattatagtttgttttaaaatagcaacgcaaatttaacagccattcgcagcacgtacagtatctcatcgaggttgaacccctccggggcgttcttgacccatgaagaatgtggatttgtgttgcagtatgtttactactggcttggactggagaacaaagatatcgatcttgggtgcaacaatctttctgtcgtctgtttt

SEQ ID NO: 166516 - DNA, 627 bp, Saccharomyces pastorianus
gccaacaaggaaaagagagccatcattttggaaagaaacgccgcttaccaaaaggaatacgaaactgctgaaagagacattattcaagccaagcgtgatgctaaggctgctggttcttactacgttgaagctcaacgtaagttagtcttcgttgttagaatcaagggtatcaacaagatcccacctaagccaagaaaggttctacaattgctaagattgactagaatcaactccggtaccttcgtcaaggtcaccaaggccactttggaattgttgaagttgattgaaccatacgttgcttacggttacccatcctactccaccatcagacaattagtctacaagagaggtttcggtaagatcaacaagcaaagagtcccattgtccgacaacgctatcattgaagctaacttgggtaagtacggaatcttgtctattgacgatttgattcacgaaatcatcactgttggcccacacttcaagcaagccaacaactttttgtggccattcaagttgtccaacccatctggtggttggggtgtcccaagaaagttcaagcactttgtccaaggtggttctttcggtaaccgtgaagaattcatcaacaagttgatcaagtccatgaac

SEQ ID NO: 166517 - DNA, 105 bp, Saccharomyces pastorianus
gatgggggtcgaacccataatcttctgattagaagtcagacgcgttgccattacgccacgcaagcttaatgttgttggaagttttcctcacgcagtagagttata

SEQ ID NO: 166518 - DNA, 348 bp, Saccharomyces pastorianus
aacggttactaccacagttaggtcacaaatcttttagtggcagatgctccttgaactactaatgacccaggtcacccagagaggtcagagactttgtacgggtacctatatgaggtctttttactgtattacaaaaaaaatcttactccattcgctattatgttgtgtggaaacatgcctcaaaatgttttcaccgcaaaaagtatgcttgttgtatttgccaagttaacgaagcatgagaaagtttgctcccccccgagttgaaacaaagttatctcttctaatatgatggttgtttgtgcggccacgctaataacgagctcaaatattccctttatagtaacaact

SEQ ID NO: 166519 - DNA, 1161 bp, Saccharomyces pastorianus
tgttttgctttaattcaatccaggaatcctacgttgtggaagagggcactttcaagaaagaaaggagatgtcgaagatgtaggtgctctcaagagtgaaaaaaatttaaaaataaatcctcgggaaaactcaaaacatatatacaaatgggttgcgcctttcgaaaatggatttttgaataataaatcactgtttgctcatctggaacctatatacaatttcctttgccagaataagtacaaaagcttcgaagatgcagttggtttaaaggagctgcaatcatttagcaaagatgtatcaactgctgatataaacaactggtttttaccgagatataaaattctgctaaaaatcctgagcttaaaaacaaaagaaattgactttagagggttatcgcaagtgtttcaaacactccaagtcttgttagtttctcattattcgcatcgcatagattctgattcttcttttaagaggacactgatagacgttcatgttttcaatttcatcgccaagtttctgtttaatagaattttattgaagaagaaccaaaacgatccaaaatggcttcaaaacttttacgaccagggagatggcaaacatttatgtgataaagttgactacaagcgcttgtgttcgttgcattttacccttatttactctattattaacattcaactcatcaaaatcaagacaaaccaaacatttgtaccgcagatattaaaatacgtatctgttctgaaattaattgaacacatacttatcatcatcgaaagtctgatacatgtacttattagatttgtatcgaagcataaactaatatgcatcaaccggaaaaaggcgtactgtcgagtatacctcgaaagagaattgagtttgaagaaaacctacttaaagaacttttacagtgtaataagcggtgtcccagaaaaagagttagggggtctattgaaaatactcaagatagttattctatcattgctcgagacatttgaaagcattgaatggcagcacttaaaacctttcctggaaaaatttccggctcatgaaatatcgcttcagaagaaaaggaaatatatacaggcggccttattaattactgccgaaagaaatttgatagcgcgctttcgattgtcaagatggttcaatgagacagaaaacatt

SEQ ID NO: 166520 - DNA, 174 bp, Saccharomyces pastorianus
gaatctgcaattctacacaattctataaatattattatcatcattttatatgttaatattcattgatcctattacattatcaatccttgcgtttcagcttccactaatttagatgactatttctcatcatttacgtcatcttctaacaccgtatatgataatatactagtaacg

SEQ ID NO: 166521 - DNA, 453 bp, Saccharomyces pastorianus
tttttttttttccatttttgtcgttattgttatttcccatttttttttttgtttttttcggagcgacaaacctttcgaaacacgtgtcctgaaaattatcctgggctgcacgtgatactatgttaccctgtcgggcggcgcctctttttcccttttctctcactagtctctttttccaatttgccaccgtgtagcattttgttgtgctgttacaaccacaacaaaacgaaaaacccgtatggacatacatatatatatatatatatattttgttacgcgtgcattttcttgttgcaagcagcatgtctaattggtaattctaaagctgccaagctctacataaagaaaaacatacatctatcccgttatgaagttttctgctggtgccgtcctgtcatggtcctccctgctgctcgcctcctctgttttcgcccaacaagaggctgtggcccc

SEQ ID NO: 166522 - DNA, 156 bp, Saccharomyces pastorianus
tttttcgcgccgggcggggttagcagcacgcaggatggaagagaagagaaaggatgctacaaacttgtggttcattctatacaaagtacttatatgtatatatacatactcgatcagcatttcactccacacaccctgcgtgtgatagtaaaaagc

SEQ ID NO: 166523 - DNA, 171 bp, Saccharomyces pastorianus
ttaccacgtattttttcctttcaatttattataagcttagagatacgatttcaaggcgcagctcttctgttagcagttttctctacgactttgtatgaggttcatctcattttgttagcttctattcacatacctactataacactaatcctgctatggttcagacccaaa

SEQ ID NO: 166524 - DNA, 159 bp, Saccharomyces pastorianus
tcatctggatttttcatttccgcttttgcctcaggcgcaacaataactatctttgagcatcgtaccaccaatacaaaaggatatgatcgttatcatacaggatttttcatggattttgcatgtttcggtataactttacgtaggtgaattattgaaggg

SEQ ID NO: 166525 - DNA, 171 bp, Saccharomyces pastorianus
gatatcctcctcaaagtcgcaacgttcagggaattcggatcgggcgcgtcctctggatactccaagtcactattcatcgcggcactaactgagtactggtaccgttctactgtttgttgttctggcctctacgttcactccgtatggtctcagtctactattaataatgac

SEQ ID NO: 166526 - DNA, 240 bp, Saccharomyces pastorianus
tacaacaagaacggttcatcggagcctcgactaaagacgcttgacggactcacttccgagcgctggattcagtggttaggccttgaaagcgactaccattgttcattctccagtactcggaatgcggaagacgtagtggcaggtgaggcggcgagttcaaatcatcatcaaaaaatttcaagagtaacgcgaaaaaggccccgagagcccaagagtacaaacgatatcctcgtcgcaggc

SEQ ID NO: 166527 - DNA, 84 bp, Saccharomyces pastorianus
cgctttttttcctcaaaaacgcctgtatcgcatttatcttttaatgttggactatggccatgtattaaagaagtgcatcaggcc

SEQ ID NO: 166528 - DNA, 120 bp, Saccharomyces pastorianus
ataaatttcaaagattacacgtgtgaaaacaagctttaaaacaataggtatttcttttttggcggttcgtgttgctatgagtcgttttcgatatctattctagaaccattttcctgaaaa

SEQ ID NO: 166529 - DNA, 135 bp, Saccharomyces pastorianus
atgatgccatgcggtgtgctggtaaagccctggagttttgatgaggtcgaaacctagcagcacctagacaagagtagcgcggagcaagtagatatcctcaatgactacgcgcacttcgcaatggctcacgggggg

SEQ ID NO: 166530 - DNA, 198 bp, Saccharomyces pastorianus
ctgttcagtttcgtttagaggtacgagaacaagactttgtttgcggccttgaacttcggctccattaaatttggactttacgatttcaaatgagatagctcctcgattaagttgaagtttgaaaacttcccaaaaaaggaagcagatgcctcttccagaattttgaagccatgggagggtagaatatacatctctgag

SEQ ID NO: 166531 - DNA, 381 bp, Saccharomyces pastorianus
agcctgagctggtcctccttcttgaaagtcatcgccttatctgctacgatgcccaagcaactatgcatggacatctgtcgtgaaagggggttcagtgacgtcttgattgaaacaagccggtatgtgaacgcggtgacgaaaatgccgaatgtgtccattgcagtcgatatagtgcatgtgaagaagtgtgctttgctagacaaggtttatgatcttgtcatgcaatttctggaaaacgtaccggaaaagaaggcggtcttctttttcagcaacaaaacccttcttagagagtccctgcataggctcaaagataacgcctctgtcgttggtgtagacgctgacatggaggatgaggctaagttggctgtgtttagagatttt

SEQ ID NO: 166532 - DNA, 123 bp, Saccharomyces pastorianus
atagcacggtgccttaaccaactgggccaagagaccattgtaatctgttttccaccctccctccacactaccaaaccaacgtcacaaatgcgtgccagcaccaccgctcattatctctgtgcc

SEQ ID NO: 166533 - DNA, 327 bp, Saccharomyces pastorianus
tttgcaagatacgcaactgccgatgccgttcaaactgcccatattccaccaaacgtcaatcttgctgaagttgccccaatcttgtgtgcaggtatcacagtttataaggcgttgaaaagagccaatgtgataccaggccaatgggtcactatatccggtgcatgcggtggcttgggttctctggcaatccaatacgcccttgctatgggttacagggtcattggtatcgatggtggtaatgccaagcgaaagttatttgaacaattaggcggagaaatattcatcgatttcacggaagaaaaagacattgttggtgctataataaag

SEQ ID NO: 166534 - DNA, 78 bp, Saccharomyces pastorianus
atgattccctttcctgcacaacacgagatctttcacgcatacatcggaaggatcaccccccactcaagtcgtgcattg

SEQ ID NO: 166535 - DNA, 168 bp, Saccharomyces pastorianus
aaagacattctcctcaagaaatccacaaaaaggaatcaacagttacgcataataatatttcttttccttccttcttcttcatattttgccattctccatccagttgcatctttaagatgctcctgcctctttttatgcctacatagtttaatcctttacatagaacac

SEQ ID NO: 166536 - DNA, 465 bp, Saccharomyces pastorianus
atgatcaggttcattattcctttgatggattgtgcaagactttatgggcgtccagttcaattcaagacagaaagaaccgatataaattcgttaatgtttggattacctaaattgccctcagtggattattttgctgaagaggagattgcccatttgatgacccaggaatttaatcctttgaaagaaaaagatactgacgatactatggctttaactatgtcaagattttctagctacctgcaagaaagaatgacaaaagtctccaagagaaacacagaactcaacttcaggacctttagtgatgtaatgggcatgtataatactacgagggatcactctaaacttaattgcatgagtgacaaggataattctgtgaaggaattttcattgagtgataaaagcaatgttagttctgaaacgactaatatgatgaatcaattgcaagtaaacgcccatgaatacaaa

SEQ ID NO: 166537 - DNA, 213 bp, Saccharomyces pastorianus
gtgccgaggtgccttatgaaacccttttccgtgcctgttaagtttccgttttcggtcaaaaagaatatccgaattttagattaagaccctcgttcagaagcttattgtctaagcccatattcagtctgctctaaacggcttccatggaagtaatatttctatctcttgaaatccgtacaagatattagacgtgtgttgggagtcgtatactgt

SEQ ID NO: 166538 - DNA, 99 bp, Saccharomyces pastorianus
attattctgttcctctttttatatgttgtcattcattgatccttttaaaatatcaatccttgcgcttcagcgctcattaatttcgacgacactttaaat

SEQ ID NO: 166539 - DNA, 192 bp, Saccharomyces pastorianus
ccaatcctgaaaaatgaaatcaaagactacccttattatttgattaatgaacattcaaattgtatgatgatctttgggattccattgtttcttaatgttataatattacgtatatagatcatactagagattctccactcggatttaggaatccacagaaaggaatcaataattttgcattatattataaat

SEQ ID NO: 166540 - DNA, 285 bp, Saccharomyces pastorianus
atgactaccaaagcaatggtccaaaaaagttttaaactggatttaggcgagcactgtaaagaaattattgaaaggctcacagattgctcgcaaaagttatcggaattgtgtacttatggatgcgattccacaaagcttgggaagaaacgattctatcaaaaattagcagatatcctgatggaagtaaccaagcgcaccagggaattggttgaatgtgtgaagatggcgaacaggcagactctttcataggacctctcgtcatttttcaattatagatctgtacag

SEQ ID NO: 166541 - DNA, 228 bp, Saccharomyces pastorianus
tttttttttttttttttttttttttttttcagttttcgaagaaactgcctttttagaattgtaaaagacgaagtgaagtattcaggagtatattattacatacatacaaagcaagacaaagaaacatttttagatctaacattttacttcaattgtttttgtattccttataattagaaagacctgctgtttaatgtgggagtaatccgtcccctactcgatcttcaa

SEQ ID NO: 166542 - DNA, 276 bp, Saccharomyces pastorianus
ttgataattgttggagttttatagttgttaaaggctataataccacgtatttagattatactagaatttctctatgagaagaatccacgaagagattgatattctcgatacaatagcattattgttttccttttcatcttgtgtgactgtcattcatcatcctactaaattatcattcattgcatttcagcttcgattggatttgatgactgtccctcaatctttatgtgatctttttacaccccatgtgataatgtactagtaacatgaatacta

SEQ ID NO: 166543 - DNA, 339 bp, Saccharomyces pastorianus
aaaacaggggaagcttcctcacatggaaaaggcttcttaatatgtcgctacgcctcattcccattgcatacagaaagcaaagtagtgcgttttgcgaacgtcacagatcaaaagtttggccatgcattgtcattctttttttcttacatacactgcaccagacatgtcggttccgccccgctaacggttagtcagccacacattgacgtacactgtgaacagcgtatttctttccatgtatctcagtgcccagcttatgagaactgtcacagcctcccacttgaccctcagagccctctccactccccccctctttcaacatcgccagatagccgccgt

SEQ ID NO: 166544 - DNA, 249 bp, Saccharomyces pastorianus
attgccagagcagggggttcgttaacattcgatgaaaattacaatttactggatacatcaggtgtcgcaaaagtcatcgaaaagtcaccaatcgcagaaataatcaggaaatcaaatgccgagttaggtaggctgggctactccgtctacgaagatgctcaatatataggtcatgccttcaagaaagctggccattttatggtgtacttcactccaaagaacaagaacagagagggcgtagtccctccg

SEQ ID NO: 166545 - DNA, 381 bp, Saccharomyces pastorianus
ctctgcgtatatatatatatatataaatacatagcacacacacacacacacacacacacaactgtactctttctctctctctctctctctctccctctctcactacatgcacacaccttagcacgctatctcgaaggatcgaccgtatgggtgcatccatttgctgtcgtcgcttgaacaagagcacctgcaaacgggtgcacttttgcaaggcttccttgcctattgggcctgcttgggtcagccttgcttggctctgggcggagggagggtctttatcggcgactcagtgcagcgtagggactcactcaccccaggccggacggggtgactcgcacccggaaagggaagtttattttgtcgggcggaaaagactttttt

SEQ ID NO: 166546 - DNA, 795 bp, Saccharomyces pastorianus
gctaccagctcttctgttgcgccatcctcaagtgaagttgccagctcttctgtttcatccacatgcgaagctaccagctcttctgttgcaccatcttcgagtgaaatttccagctcctctgttgcttcttctacaagcgaagctactagttcttctgctgtcacatcttcctccgctgtttcctcttcgaccgagtctgttagctcttcctctgtcagttcttcctcagccgtttcctcttctgaagctgtcagttcctctccagtttcctcagttgtttcatcttcggccggacctgctagctcaagcgttgctccttacaactcaaccattgctagctcttcttccactgcccagacttctatctcgaccattgctccttacaactccacaaccaccaccaccccagctagttctgcttccagcgttattatctcaaccagaaacggtaccactgttactgaaactgacaacactcttgtcaccaaagaaaccactgtctgtgactactcttcaacatctgccgttccagtttccaccaccggttacaacaattctactaaggtttcaaccgctactatctgcagtacatgcaaagaaggtacctctactgcaactgacttctctacactaaagactacagttaccgtatgtgactccgcctgtcaagctaagaagtctgctaccgttgttagcgttcaatctaaaactaccggtatcgttgaacaaaccgaaaacggtgctgccaaggctgttatcggtatgggtgccggtgctttagctgctgttgccgcc

SEQ ID NO: 166547 - DNA, 501 bp, Saccharomyces pastorianus
tccaaaaaatcattcttagcacctgcagtggaccattttgacgattatgcagaaaataattcatcggacgataacgaaggtttcaccgaaacttccacatacgtgccgcctccaactcaagtgaggagtggtgtgttggggtccttattgaagctttaccaaaacgacgaattaaatgcaagctctatttactcagagtcgcaagctccaacagatgatgaaaaaactttgtctgccgctattgagggccagagtcttccggcaattaagcgtactaggttacaagacttaaaaggtaaggctaaaaagggtaagataccaaaattgaaaaagaggttgaagactgaagcaaagataactgtccatatcgcagacattttgcaaagacaccgttttattctgcgcatgtgcagggccctcatgatgtatggtgcccccacacacagactcgaggaatatatgattatgacctcaagagtccttgaaatagacggccagttt

SEQ ID NO: 166548 - DNA, 153 bp, Saccharomyces pastorianus
  modified_base (22)..(22): a, c, g, t, unknown, or other
gaagcagaaactgtcagtaagncggccggcgctattgatcaactctatggctggaagggatttcggagaggttggaacccaaggatcctggcaaacatgcccgctaccgctatatcatggacagcttatgaatgcgcaaagcattttctaatg

SEQ ID NO: 166549 - DNA, 129 bp, Saccharomyces pastorianus
agattctctgatccattttttgcagctgtagtgggatctttgagttactatgtgtacgaaagaaacttaggacgcccacaaggtcaccatctacacgagcttatcacgaagcgttgggacactcgcaaa

SEQ ID NO: 166550 - DNA, 105 bp, Saccharomyces pastorianus
gatgctctaggctgctttctctggaacttctctccttccccacatacctcgttgttgaatccccgcggaggtgatataataaagttgcgtgaaagcgtaaatgcc

SEQ ID NO: 166551 - DNA, 234 bp, Saccharomyces pastorianus
gtgagttttgagataattgttgggattccgttgttgatagaggctacaatattatgtatacagaatatactggaagttcccctcgaggatataggaatcctcaaaatggaatctatatttctacatactaatattgagatttattattcctcattccgttttcatatgtttcgtttctattacactatcaatccttgcatttcagcttccattacatttgatgactgattctca

SEQ ID NO: 166552 - DNA, 306 bp, Saccharomyces pastorianus
attacaaaagactttaaacatagaaatgttcttcgcttagatgttcatcttagttcttctccagtttcttctcttagcgttgtaacggatagtgttgttggttctcaatctgatccattgtggcaatggtctgttttgcttcttagccttagccattttttgcttgattctgaaagacttttgagcctaattaaaagagaaacatatcgtgcacatacgaagtgtacaattgtaaaaaatgttagtaacaatgttcaaactcatcaatgtgatgcattcacggatccaaggcaataccacctgaca

SEQ ID NO: 166553 - DNA, 141 bp, Saccharomyces pastorianus
gttatttgtctgacttttcttaactacccatttcattttattacggcttggtgccatcatgatatactaaataaatatgaattttgccttttcttaattttccttatacgtatagtcattacaattaataaagtaacatta

SEQ ID NO: 166554 - DNA, 114 bp, Saccharomyces pastorianus
ctaggtttgccattttatttcacctgtatgtccatcatggaaggtagatcatttgacgtagctaagttgaaaattaaagagcttggtggcccacttttgactaattgggcagtt

SEQ ID NO: 166555 - DNA, 309 bp, Saccharomyces pastorianus
ttaacaagaaatagtgaaatgaaagcgcatacctcaaaggcatatagttgaagcagctctatttatacccgttcctccatctgtcatcactacttaaacgattcgttaacagacgctcatttagcacctcacatattctccatatctcatctttcacacaatctcattatctctatggagatgctcttgtttctgaacgaatcatacatttttgatagacttcgtatgtggagtactgttttatggcgcttatgtgtattcgtatgcgcagaatgtgggaattcctattataggggtgccgaggtgcct

SEQ ID NO: 166556 - DNA, 441 bp, Saccharomyces pastorianus
aagttttccctgattatcaaacggatttccaattcttattccccactatcgcacctttcttatctgaattgtattcttgagtggcctaattgtaatcttttattttgttttctaattattgaaggcggtttctcgaaacatttcacgatttccaaaattcaagaattgaaattatgaacatagaagacaaaatgccttttttatcaactattatgaattctctagaaagtggttgcaaaggaaataaatatgtatttgctgagaggaaaagtttggaagaacaaaaagtatttctttaatggagctgattatcaagcattctttacggggagctttcgaaattttttatattcaaggacatttatgttgtgtgggttattaaacgtgggactttggaaatacatccaagaagcacaattgagctctaacgatgaaccgtta

SEQ ID NO: 166557 - DNA, 486 bp, Saccharomyces pastorianus
gatttctaccagaatttcaagtttctgttggacgactttaacaaaaatgaaaagtcggacttgctagatttagaactattagtaacccccattagctgaaagcttgagatgaaatcatactttccaaataccttgatatcaggctacttggggttgaacaagtagcattaagagatgcttctgccataaattgggttgtaaaatttaccaacaacttgagaagctagcttattacttttagaaaataactttgttgaatttaatctgtgccgtgttgcgactctcaagacgctcttctttgcatacttaaacagtgcagaaattttctatatcaaaaaaaaaaagaagaaaaaaatatggttaagatatagtaatcaactaatggtcgagacgccgtgattaaacggtgctcgtattatcggtgattgttgttcaaaaggtccaagagacatgcgagtaatttctcctgctgacaaaaagcacagt

SEQ ID NO: 166558 - DNA, 1485 bp, Saccharomyces pastorianus
atgcaagaatcaagagaaaatcagaatacctttgcggcccctcgaagagaatcttcctcatccacacttttagggatagtttcatatgaagggctaaaaaatgggttctctcgggaaaaaagcgatggtatttgtattgaccacgcctgtaatattgaaggccatcttgggtcgagcaaagaaaatcttcaggatgataacgctgctccaccagatctcctgccatcctttgaaatgtatgaaaacttgcacagtaccatacctcaatccagttttgatacttactttcatgaagagccaccttattacaaggacgctgctggcagccgagacccttctttggacgtacaagttcggcctaatcttgaggacattagtgaaaatactgctggctcacaaaattctgagacgggcatcaatacccaacagcttccttctgtttccgtatactctcgatcacctattacttcggcttctaatcatgatggtacaaaaagtataccagttgaaagaatatacgctctgcctagagttaatacttctgtagctatcggactgtacgttacaaagactgctccgaagtttgggcaaactcctaaatacgaaagcatgctaaaagaatttacgtgcggtgacataatttatggatattttacggtagagaataaatcgtcgaaagatgtaaaattcgacatgttttatttaactttagaagatacgataagttcgacgacaaaagcctgtgttggatctcgaaaagcaacgaaaaggtttttaagaatggtagatttggcagcgagttggtcatataatcaggaggatatgaatactgatgaggatctctgcggatactttgatcccactgatcatacaaaatttgggctaactaatgctaggacactaaatccgggcgataaacgtaagaaatttttcacattcaagattccaaaccaattgctagacacaacgtgcaaacacgggcatttctctcattctcttttgcctcccagtttgggctttcaaagaccacccagttctaatggaaatgtcgctgatataaaactttcacgcaatttaggttatggccgttcgtcagaaaagggttcacaacttttactgatggacaattgcggtggtaaccttgtcgattactctatatatggtatgcttgtgggaaaagatgtaggatccggaggaatgtgtttggttggtgagagcaaatatagtatcagaataattccatttggctttgactccaaacccgtcagtgagaagaagtgtgtcaaagatttggaaaatttcgatgccgcagttacaaagagactagaaaaaataaaaaatattctctctaaatcaaaacgaacaattgcgattcatgaggaggatattcggggagcagatgatccggcaacgtctccgagaaggaattatttgtggaatcctgagcctgaaaatgttgagaatgacgcagttgaaaagaaatat

SEQ ID NO: 166559 - DNA, 282 bp, Saccharomyces pastorianus
ttagatgttggatgggtacaagaagattctaacagaagcaccgaaggtcttggctggcaaattgtttctgaaggtggctctaacgacaccagagttaccgtgagttctggtaaccttaccccacataactctaatcttagaacccctgacttccttggaggctctgtagacgtaggcaatacgcttacccaagtaaaattgagcatcttgtggagtagcgacaccttcgatcttgatcaaagagacatttgggttgttgactctcttggatctttggtagga

SEQ ID NO: 166560 - DNA, 1407 bp, Saccharomyces pastorianus
tccagctctactactgaaagctcttctgctccagtaccaactccatcaagctctactactgaaagctcttctgctccagtatccagctctactactgaaagctctgtagcaccagtaccaaccccatcttcctctagcaacatcacttcctccgctccatcttcaactccattcagctctactactgaaagcttttctactggcactactgtcactccatcatcatccaaataccctggcagtcaaacagaaacctctgtttcttctacaaccgaaactaccattgttccaactacaactacgacttctgtcactacatcatcaccaaccactattactactacagtttgctctacaggaacaaactctgccggtgaaactacttctggatgctctccaaagaccattacaactactgttccatgttcaaccagtccaagcgaaaccgcctcggaatcaacaaccacttcacctaccacacctgtaactacagttgtctcaaccaccgtcgttactactgagtattctactagtacaaaaccaggtggtgaaattacaactacatttgtcaccaaaaacattccaaccacttacctaaccacaattgctccaactccatcagtcactacggttaccaatttcaccccaaccactattactactacggtttgctctacaggtacaaactctgccggtgaaactacctctggatgctctccaaagactgtcacaaccactgttccttgttcaactggtactggcgaatacactactgaagctaccacccctgttacaacagctgtcacaaccaccgttgttaccactgaatcctctacgggtactaactccgctggtgagacgacaactggttacacaacaaagtctgtaccaactacctatgtaaccactttggctccaagtgcaccagtaactcctgccactagtgccgtaccaactacaataaccactactgaatgttctgctgctacaaacgctgccggtgaaactacatctgtatgctctgctaagactatcgtaagttctgcaagcgcaggcgaaaacaccacccctgtcacgacagctattccaaccacagttgttaccactgagtcatctgttggtactaactccgctggcgaaacaacaactggttacacaaccaagtccatcccaaccacttacataaccactttgattccaggttcaaatggtgccaagaattacgaaactgtggccacagcaaccaaccctatttcaatcaagactacatcccaactagctacaacagcttctgcttctagcatggctcccgttgtcacatctccatctctaactggtccactacaatctgcttctggttctgcagtcgctacatactctgttccttctatctcgagtacttaccaa

SEQ ID NO: 166561 - DNA, 477 bp, Saccharomyces pastorianus
tccagctctactactgaaagctctgtagcaccagtaccaaccccatcttcctctagcaacatcacttcctctgctccatcttcaactccattcagctctagcactgaaagctcttctgttccagtaccaaccccatcaagctctactactgaaagctcttctgctccagtatccagctccaccactgaaagctctgtagcaccagtaccaaccccatcttcctctagcaacatcacttcctccgctccatcttcaactccattcagctctactactgaaagcttttctactggcactactgtcactccatcatcatccaaataccctggcagtcaaacagaaacctctgtttcttctacaaccgaaactaccattgttccaactacaactacgacttctgtcactacaccatcaacaaccactattactactacggtttgctctacaggaacaaactctgccggtgaaacaacgacc

SEQ ID NO: 166562 - DNA, 225 bp, Saccharomyces pastorianus
tccaaagcgaggaatgtttttccattgatcggaggacgtaaaatcgagcaccttaagcagaacattgaagctttgagtattaagttgacaccagatcagatagaacgtctagaaagcgtcgttccttttgacattggatttccgaccaattttattggacaggacccagctattagtaaacaggttccttcctttacatcaatgtcagccagggttgttttagat

SEQ ID NO: 166563 - DNA, 1137 bp, Saccharomyces pastorianus
atggaagacaccaaactcgaagatgaaaaaagcgtagtctcatatcgtctagatgtgttgagtcccagaaaatcgtattactaaagcacgtctttagaaatttctttacttggttctgatatatgatttacaagtccctcgcgtttcatatccggctgatattgtggttaccgctcggtgcttagtgaagattatacagtgttgacttttacccttttatggatccatgtttatgcttttagggttattttttttactcacactattctaatgataagtcgtgaacgtactttttcaaaacaatatactcggttttgcaaagaaatgattgaaagtgctccaggtactgacaccgaagactgggagtttattgtagcaaacctcaactcatacatgtatgaaaacagactttggaataataagcactttttttttgatggtcagcgttgcaaacaatcatttagactatgcattctaattccgtcctctctaaaaaaagacaatgatgcaaagtacaagtcatttaaggagtcagtgccatacatcgaagaggctttggaggtttactttgcaaaattagatgaacgattgaaccagagctgatcagaaaagacattgagtgctattaacttagaagacattctacttcctaagcaatcctatcgttttgaggctttctggacttttaaaacagctatgaatcgccgttactttttaacggtgatcttactttgcttattctttatttatcgttcgcggatatcaaatattttcggtcatatcctttatcctggttgtattttcctcgtactggcaaaaagtttccaaaactcaagaactgtaccagtgaaaattgaagacaagatgcaatatcttttagttattattagtgagcaagaaataggtgctagcggaggggatgtaatcgcaaaaaaaaacgaatgtgtatttgtttgagcggaaagtgtacagtaacaaagagtttctctttgacaaaattgcttataagaggttctttggctgtaattttgcagtattttatcttcaaagaaatctgtgctacatttgttattaaacgttgaactatggccatatattaggggggcgcaattggcctgtggcgatgagtcttcagcg

SEQ ID NO: 166564 - DNA, 1155 bp, Saccharomyces pastorianus
actaatagtaatgcttcggatcatattcaagaattaacaacggagttaaaaaacttgcggaaaagtaaagaggagctcttttatgaaaattcgcaattgacagaggagatttctgctttgaaggaatattatacaaatataattcgcaagtatgatagagatgaatcctttactataaaacgtgtttttaaggaagataagactgatgctgtaaaggaattacgggaagatgaaaaagaatctaatgaaaacaatataaaatctggaaataaagactcctctgcaattaatggtgataatacatccaaaaaatccgagaaaggtgatgaacttgtgcaggcggaggatgaacgaaaagaagatgctgagaatgaaaaattagaattggatctgaaattttctgatttacgggcagagataaactccttgaggtccactataaaagaccttgaaaatatcagaagggaaaacgaggaagagctcatcaaaacacgttctgaggtatccaatttaaaaaagcaacagatagcagcagcagaccaagacccagatttcaagtcatatgaccatgagtccctgttagcaaaaattcaacatttgactgaacaaaacgcagaattatctgagatcaatagttcctttttatcaaaatttcaagttttagccaaagagaaagaaatatatacgaataaggtccgagaagaattccagaaaagtctcgactccctagtagaaatgaacagttcattggaaaaggacgttgtaagaataagaacggctcgtgatgatttactaagcaaaatcgcaattttggaagctgaaaaatccaagactgaagtgttaagcgatttacaacatgcaattgatattttgaaggagcaatggacaaaaattgatcaaagatcaaatgatacaaaatcctcgtcgactcaagatgtattaataaaggaaattcaagacttagagaagggttttagagagttatccgacttaactcattataagtactctgagattgaatatatcagcgaatctggtgattatccaagcttatccgtatgattaaatctaaggctgtatcagattatagttttgtccgcgtatgtcggtccattagattcaattttaattgaaatcaaactctttctaaaagcc

SEQ ID NO: 166565 - DNA, 288 bp, Saccharomyces pastorianus
gaaatgataacagcagctactactacaccaggtaaggaagatgaaggggagctcagggatgacatcgcatctttgcaaggattgcttgatcgacacgttcaatttggcagaaagctacctctgcaggacgccatacgccacatccactggaattttatcacacattaaccctgcaatccctctccatctgtctctacgaaattattggggttgccagaaggtttctacgggtggaaactcagactgcagctgagattttcgagattagaaaccgcacatgcacagaaa

SEQ ID NO: 166566 - DNA, 1101 bp, Saccharomyces pastorianus
ccttctttccaccctttgttcgaagagtttgaaaaattttatgaacaaaaattatggtttcagttgtctgaatccttagacaaattttttgacgacgccaaatctacaccattgagacttagactgtacgataattttgtctctagattttatgataagataaaccaattatcagtagtaaagttcctgcttgcatctttaaaagattctaaaaattttgatgagtctttaaagtatttgagtgatttgaagactcaattccaagagcttgacactaaaaagcaaagaaatgatggatcaaaagatcacaaagatggaatattgttaatagacatagaaattgcaagaacttacctgttaaagaataacttagttaaagcaagagatttattagatgatttagaaaaaacattggataaaaaggattctttaccactaagaataaccaacagcttttattctacaaattctcaatatttcaagttcaaaaatgatttcaattccttttattatacaagtctattatacctttccacattagaaccatctacaagcatcactttagcggaacgccaacaattagcctatgatttaagtatttcagcattgttgggtgacaagatctacaatttcggtgaactgttacatcatcaagtaatggacaccatagtcgatgattccaattatgactggctattccaattattgaatgcgttgactgttggtgattttgacaaatttgattcattgataaaagttcaaatttccaagattccagtattagcagaacatgaatcctttttacgacaaaagatttgcttaatgacactaattgaaacagtttttgtcaagaatattagaatgttgtcttttgatgatatctccgaggcaacccatttaccaaaggataatgttgaacatttagtcatgagagccataagtttacgcctattaaggggctgtattgatcaggtaaacgagttagtaaccatctcatgggtccaaccaagaattataagtggtgatcaaatcacaaagatgaaaggaagactggtagaatggaatgatcaagtcgagaaacgacctgcaggcatgcaagct

SEQ ID NO: 166567 - DNA, 135 bp, Saccharomyces pastorianus
atggagacttttactggttatctaaaaaatacctaattccttcgcacatttcaaagctaacaataaacaacgtcaacaaaagcaaaagcgtaaataaatatccatatccgttaatacatcgaatgcttggacatg

SEQ ID NO: 166568 - DNA, 573 bp, Saccharomyces pastorianus
attgttagattatttgcaataatttttgcactgcttttgatagcgtactcgttattcccaagcactcttaaaactggctctatacctgaccgcgctaacactgcaccgcgctaacactgctactctagaacgccgggctaggtggtcatttgcgactggattgggactaggaggatttgttattgctgcagccgcttatgctactccttactgggtcgcagcaatatgtgtcgcagccactggcggtatatgtgcacctgtagctcgtgctgctttagtgggtgtgagtacaggcagttaacaaagcgaggattaattaagactattagcgcactgaatcatactataatattcactgaccatatactcaatgaccagacattgtccaatggtactgctagaaattttgttacaatagggttcagcgaatatgcagtacatgacagtatcaagcgtgacggcgctgctgatatcaactttggggggtatactgcggagtatggaacccacgtcagcactagcagcgtgcattatgtaagcaggatcatcaatcaaatcgtagcagcggtacca

SEQ ID NO: 166569 - DNA, 96 bp, Saccharomyces pastorianus
ataaatagggcagtcttggtcagctatatttgagattatgccttcactcttttctttcctactaagctaataccgccactaaaacaacaactcaac

SEQ ID NO: 166570 - DNA, 312 bp, Saccharomyces pastorianus
atgagtttccttgggtcagacgccagtacgactacaagaataaaggatagcggcggccacgaagtgccgtgcttacagcccatcgatgtggtggaatgcacttatgagcacttcagcgactcgcgggacaagctgtctctgagattgggcgatttagtctacgtactcaataaaggcactaatggctggtgggatggtgttctcatacggcattgcgccgacgatagcagccccttgatgttggatagaggctggttcccttgttctttcacacgcactattctacatgacccacgcaagaccttgtctgcc

SEQ ID NO: 166571 - DNA, 756 bp, Saccharomyces pastorianus
atggaacgtgaacaaattgtagaatatattcaggagacgcctattattcccagaagggtcattcaatattcggttccgaggcaaaccatcgcgaagcctagccctcacgtcgaaactttggtggcatctaatactttacaggacttgaatttgtcccatcatccggtcatccatgatcctttgcaaggtaaagagtattcaactcaaaaatactcaggaaagacgaacaaccaaagattaagtttcgaggagcatcaaaatgagcaatgccaaaactctattgggttgattaaaagagtgaacacttttttcaagaagaagtcgtcatcgagaaaaaatagtatcaaatcaactggcggtgtcaagccagatgatgaaattcagattccaaaacaacatgaaaaaaaagctgatccaccaccagcacagcccgctttaaggaacttgcctaaaaaacatgaggaaaatagtaaaagacatggcctgttttcttttgaagagacacctcccgtggaagtgccgaggcaggagtatccaaatgccaagaatttagcgccggatacaacatctcttagaagaaccaaatcgtcatctggcagttttgtctcgttagaactaagtaaagcgaagtttgctactttggagcctgcgccgttcaagaatcccactgaaagacaaaccccgcaacctcgtgaacaaaggaatgattctgcaacgcaaaacccaaatataacctcaataaaggaccaaaaaaaa

SEQ ID NO: 166572 - DNA, 351 bp, Saccharomyces pastorianus
acttccagaaagcaaaagatcaccaagacctttaccgtcgacgtctcttctccaactgaaaacggtgtctttgacccagcttcctacgctaagtacttgatcgaccacatcaaggttgaaggtgctgtcggtaacttgggtaacgctgtcactgtcactgaagatggtaccgttgttactgttgtttccactgctaagttctccggtaagtacttgaaatacttaaccaagaagtacttgaagaagaaccaattgagagactggatcagattcgtctccaccaagaccaacgaatacagattggccttctaccaagtcactccagaagaagaagaagaagaagacgaagaa

SEQ ID NO: 166573 - DNA, 120 bp, Saccharomyces pastorianus
tatatgtttcattcctattacattatcgatctttgcatttcagcttccattatatttgatgtctgttttatgtccccacgttacaccgcatgtgacagtatactagtaacatgagtgcta

SEQ ID NO: 166574 - DNA, 507 bp, Saccharomyces pastorianus
gtggtcaaaatcgtcatcttcggtttcgttggcaatgaaattctcgaagccttgcaagtcttcaaatagcttcacagattcaccgtcctcagtagtaacggtctgtacctttactgtctttttatcctttttcgtcatctagaaattttaaaaactgtcaaatataagtaaatgtcctgttatagatcgatgtaacctaatggggaacttgcccttttgcaaaacaactggaacgaaaaaacttaaaacgtaagaacagttgaagaaaatggtagggtgcttcgtcttttatatgcgtacaaaaacccaattgagcaggaatgaaagagaaagagacttatacatttctattcaacaataccccttgaggaacgctgcccctttcattttctatatttgactatactatacagttccacaagcttttgatacccctgagcgcaagctacttctaatttatggaagccaattgccatgagccgtctccattgtgctggttgcctcgac

SEQ ID NO: 166575 - DNA, 300 bp, Saccharomyces pastorianus
aacacccgttctaacaaaatcaaggttgttaagaccccaggtggtatcttgcgtgcccaacatgttaagaagctagctaccagaccaaagtgtggtgactgtggtagtgctttgcaaggtatctctactttgagaccaagacaatacgctactgtttccaagacccataagactgtttccagagcttacggtggttccagatgtgccaactgtgtcaaggaaagaattgtcagagctttcttgatcgaagaaccaaagattgttaagaaggtcgtcaaggaacaactgaagctgtcaaga

SEQ ID NO: 166576 - DNA, 1305 bp, Saccharomyces pastorianus
aaaatagaacacatggaacaaaaggaaatatcagaagtagactggattatcgtatgcagaaatgttattcctttgatctgtttttttttttctttctttactaacaccaagtgagaggggcaaattaagccaaccctcctataaatatgatagtgctttgcgttcattcagtttaagaatcctgctttatggaagaaaactttccaaagaaaaggagagaaggttaacgtagataacgcctgtacaaatggaaagggattgaagataaatccaagggaaaactccaagcatatatacgaatgggttgctccctttaaagatgggtttttgaataacagatcgttgtttgctcatttggaacctgtatacaattttatctgtgaaagcaaacataagaattttgaagatgcagtcgttttaaaagagctacaatcattcagccaagacatatcaattcctgacttgaacaattggttcttacccaggtacaaaattctcctaaaggtcatgagttcaaagacacagggagccaatcctaagggaatttcgcaagtattccaaacccttcaagcgctgttggtttctcattattcacatcgattagattctgacacttctgtcaaaaagacgctagttgacgtacatgtttataacttcatcgccaaattcttatttaataaaattctattaaagaaaaaccataatgatcccaaatgggttcgaaatttctaccaccaggaaaacaataaccctccaaatgacgatgtggactgcgagattttgtgttcgttgcacttcaccacagtttattctattattaacattcaactgatcaaaatcaagacaaatcaaacacttgaaccccagctttcagaatacatctcgatcttgaaacttattgaacacatgtttgccattatcgaaagcctaattcatgtgcttattagacttatatccaggcatgaacaagtaagcatcaacaggaagagagcttattgtcaagtgtatcttgagagagaattgagtttgaagagaacctatctaaggggcttttacaatacagtaagtgctattccaaaagaagaactgcaaggtctcttaaaaatggtcaagatagttattctatctttactcgaagccttagaaaggattgagtggaaatatttcgcggcttttttggaaaagttccctgcatatgagatatcattacaaaaaaaaagagcgtacatacaggctgctctattggttacggccgaaagaaatttgattgctcgttttcgattgtcatgctgttttaataaaaca

SEQ ID NO: 166577 - DNA, 216 bp, Saccharomyces pastorianus
atgagtaagagcaagcatgaatgggctgactcggtggccaactctgggccggcctcgatcctgtcgtactgcgcgtcgtcgatcctgatgacagtgacgaacaagttcgttgtcaacctggccaacttcaacatgaacttcgtgatgctttttgtgcagtcgctggtatgtacactagcgttgtgcgtgctgcggactgtgggagttgccaagttt

SEQ ID NO: 166578 - DNA, 666 bp, Saccharomyces pastorianus
  modified_base (637)..(637): a, c, g, t, unknown, or other
tttatagacataccagtgacaagagagcaggttgaacactgttcttactcgttttggtcctcactgtatcccaaatatgtgccgaaatccatagtgttaaaatccttaccgaaaaaatttattcaatatttggaacaagacggtatcaagctaccccaagaggaaaactccaggtctgtgtacaccgaggaaataataagaaatgaagataatgactatagtgattgggaggacgatgaggataccgccaccgaatttgtccaagaagttgagccattgatagattttccagaattacaccagaaattaaaggatgctttgaacgaattaggtgcagtggctcccaagttaaactggtctgcaccaagagacgctacctggattttgccgaataacactatgaagtgtaacgaggtaaatgaactttacctattgttgaacgcatccaattacataatgcatgaccttcaaagagcatttaaaggctgcgtggacggggatgatataaaaggattgaaatttgacttggtacttagacaatggtgtgatatgaatccggcactcgaatttagggtcttcgttaagaatgcgcatatcgttggggccacccagcgtgatttaaattattatgactatntagatgagttgtcagataccttcaaggac

SEQ ID NO: 166579 - DNA, 228 bp, Saccharomyces pastorianus
ctatcaagagaatccgaggtgccttaggcatggatcaaaattcggaagaaagtggaatcacagcccggagaagcactgaagcttcttttagccctctttgaaagtgaaccagagtcgaaggccattgtagttgcaagcacaaccaacgaagtggaagaattggcctgctcttggagaaagtattttagggtggtatggatacacgggaagctgggtgctgcagaaaag

SEQ ID NO: 166580 - DNA, 498 bp, Saccharomyces pastorianus
ggttacctcattgtagatgacttgcacgattgggaaacggagttctaccgtcagtcgctatttggggggcatgactaacctcgattttgacgctttcgagtaagcaatctctgtgagcgacacagcacctgaggctgtatctgatgctgcgttgcagcgcattgggcttacgagactgaccaagaaatcgatggacatcaacgagctcaatcggtcggaagatctcagcagaggtttatccagctatccacacagatgttcaatctgataaaggagaaatctgaggtgcctttggggcacgttcataaaatttggaggaaagtcgaatcacctcccgaagaagcactgaagcttcttctagccctgtttgaaattgaaccagagtcgaaggccattgtagttgcaagcacaaccaaccaagtggaagaattggcctgctcttggagggagtatttcagggtggtatggatacacgggaagctgggtgctgcagaaaag

SEQ ID NO: 166581 - DNA, 129 bp, Saccharomyces pastorianus
agttggtcggcaaggaatcgtaagggtgattaccaccgattaaggaaggctgtataaccgatacaggtacgcgagttctatggacttgaatcaaagaaagggataaagggccagcatgttggatgctgt

SEQ ID NO: 166582 - DNA, 234 bp, Saccharomyces pastorianus
gactagacggatgaattgaaagaggatatactggccatcagtaaagatgccctggacaactttcagctagaaagagacattgccggaacggtcaagaagcaattggacgtcaagtacggtaacacatggcatgtgatcgttggtaaaaacttcggcagctacgtgacccacgagaagggccatttcgtatatttttacatcgggccactggcgtttttggtcttcaaaacagca

SEQ ID NO: 166583 - DNA, 594 bp, Saccharomyces pastorianus
gccatttccaagaatttaccaatcttaaagaatcatttcagaaagcactggcaagaacgtgttaaagtgcacttcgaccaagctggtaagaaggtttctagacgtaatgctagagctaccagagccgctaagattgctccaagacctctagatctcttgagacctgttgttagagccccaactgttaagtataacagaaaggtcagagctggcagaggtttcaccttggctgaagttaaggccgctggtttgactgctgcttatgccagaactatcggtatcgccgttgaccacagacgtcaaaacagaaaccaagaaatctttgatgctaacgttcaaagattaaaggaataccaatctaagattattgttttcccaagagacggtaaggccccagaagctgaacaagttttgtctgctgctgctactttcccaattgctcaaccagctaccgatgttgaagctagagctgtccaagacaatggtgaatctgctttcagaaccttgagattagccagatctgagaagaaattcagaggtatcagagaaaagagagttagagaaaagtctgaagctgaagctgaaaagaagaaa

SEQ ID NO: 166584 - DNA, 600 bp, Saccharomyces pastorianus
gctgaacaattaatagaagattacttggtgtcacaatataaaccattttctgtaaatgatatagttcagaatttgcacaataaagtgacaaaaacaacagcaaccaaagcattagaaaatctcgttaacgagaaacgcatagtgtctaaaaccttcggaaagattataatttactcttgtaacgaacaagatacagcattaccaagcaatattgatccttctcagtttgattttgaaactgtattgcaactgagaaatgatttaatagaactagagagagataaatcaatggccaaagacgctcttgactctgtaactaaagaacctgaaaatgaagatctcctaacaatcattgaaaacgaagaaaacgagttgaaaaagattgaatcaaaattacaaagtctacaggatgattgggatccagcaaatgatgagattgtcaagcggataatgtctgaagatacgctgctacaaaaagaaatcacgaagagatcaaagatttgcaaaaacctaattgctacaataaaggactcagtgtgcccgaaaaatatgaatgaatttttggtatgtattttgaacattttcgaaaccttttctttt

SEQ ID NO: 166585 - DNA, 171 bp, Saccharomyces pastorianus
aattccaatttaaattccctcatagcgtgtctcagatctctgtccattaagatcttaatcatttgccatggtttcatcgtattttcttcattggcagaagtcccatctagattaaccaattttttttcgatcatgatattgctaaccttttctaacttttccagaacatta

SEQ ID NO: 166586 - DNA, 762 bp, Saccharomyces pastorianus
aaagaaatcattgagaatgctccaggtacccatatcaaagactgggagtctgttgtattagatttcaactcatatatgtatgaaaacaagttttagaacaataagtattttttttgacggttccagttgctatgagtcatttagaacattcattctagagccattttccctaacaaaagacaacggcgcaaagttcaagtcattcaaggagtcagttctttacattgaagaggccttgcaagtctactttgcaagagtagacgaacaatggaatcagttcagttctgaaaaactattgaatgtaattgacttgcaaggcgttccactcccaagaaactatactattttttttccaaccttatttggcttttcgagatagctattaaaagtttgtcggtgggagctattttgcgtttgtctcttagttgcacttcatctaattgcaacattttccttggcggtgtgtgtctcaatttatgtttactcaagtctattcaacgttttcaacctataatacataaaccaatgaaaatggatgataagatgcaatttttgtagattgttattagtgaacgagaaaacggtgttattcgatgggatgaaatcgcaagaaaaatgaatatttatttgtatgagaggagagtttacgggaatttggcgtatttctttgaagatgacatatgtggtccctcatcttcagagaaacctgtgtctcagttaccattgcattttgaactatggccatatattgaagaagcgcaa

SEQ ID NO: 166587 - DNA, 762 bp, Saccharomyces pastorianus
atggcaaggggacctaataaggttatattggttccatacctggtggattacgtgctaccatttctaatcggattagtgaagcacaaggacgtttgcgctcttgccggtctggaccctatccgattatacgctggcttgggctacatgccaatcagaaaaaatcatgttgccagaatcgtcgaatatgtctgttcttcggatgtagttctatcgtcgaaccaaaccaaactgcaactagcttttatccaacacttcctgtcagcagaattacttcaactaactgaagaagaaaaaaataaaatcttggaatttgttgtgagcaacctgtataacgaacaatttgtggaagtaagagtgcgtgctgcagccatactgtctgatatcgttcacaactggaaggaagaccaagcattgttggacctgatcgacaggtttgcaaaggggcttgacgccaacaaatacacttcgaaggaaaagcaaaagttatcaaagacagatatcaaaatccatggtaacgttttaggtctgggggccattatatcagccttcccatatgttttccctctaccgccatggattcctaagcagctaagcaacttatcctcgtgggccagaaccagtggtatgactgggcaagctgccaagaacaccatcagtgaattcaagaaggtgagggccgacacgtggaagttcgatagagtctctttcaacacggaagagctggaagacctggagggtgtcttatggagaagttactacgct

SEQ ID NO: 166588 - DNA, 114 bp, Saccharomyces pastorianus
atggaaaacatcgaaaacatagagctcaatgctgccataggtcaagatgggatctccgagtctagattttttgtaatttttgaaaaactatcgaaagtcactcgtttcgttttt

SEQ ID NO: 166589 - DNA, 228 bp, Saccharomyces pastorianus
tttgctactccattattgttttatttaaaagagcagcatccaaaagtcaccatcttcggattggcgcgatttggcttgactttagtagcgattccacttatcccaatctgtaaatttttgctatggaaatataggccatccaaaaggcatgatagaggggagccaaaaaaatgttcaaagatagcatgctccatctgtgctgcacgagggcaacatcctaaatggttc

SEQ ID NO: 166590 - DNA, 354 bp, Saccharomyces pastorianus
acttctagaaagcaaaagatcgtcagatcattgaccgttgacgttacatcaccaaccgaaaacggtgtcttcgacccagcttcatactccaagtacttgatcgatcatatcaaggtagacggtgccgtaggaaacttaggcaaagccatcgaggtcaccgaagatggctctatagtcaccgtcgtggccaccgccaaattctccggcaaatacttgaaatacttgaccaagaagtacttgaagaagaaccaattgagagactggatcagattcatctctataaggcagaaccagtacaaattagtcttttaccaagtcactccagaagaagctgacgaagacgaagacgaagaa

SEQ ID NO: 166591 - DNA, 393 bp, Saccharomyces pastorianus
gaacacaacactaaaagggcgttgcacaaggataccggttctttgacatggtctgacacactagcaacatatgcacaaaactacgctgactcctacgattgttcaggcaacctagtccactccggcggtccatacggtgaaaacttggcacttggttacggtacaaccggctctgttgatgcctggtataacgaaattaccagctacgactattccaaccctggttttagtgaaagcgcaggtcacttcacccaagtcgtatggaagggaacttctgaagttggttgtggtttgaaatcttgcggtggcgcatggggcgattacatcatttgttcctacaaagccgctggtaatgtcattggtgagtttgctgacaacgttatgccattagct

SEQ ID NO: 166592 - DNA, 471 bp, Saccharomyces pastorianus
atattcatacgcgtatgcaaccgtcttatttacactccgactaatgtccttctaattactgtggaagacggccgtataagcgtccttctgtggtttagatatgctataccggcggaactttgttacacacggctcgggcgaatccttaggggaaaacattgcgctgactttccccagagttgttgccacaacataagccgctttggagtgttgaacaaatccgtcgttgggtcattcaatcaatggcttggcggtatctcaaaagagcgcaaactaatagcgcgcacattcgacgcatttatccggtggtcatcgactaggggcgaagaggtcacgacctattttttcttgcagaaaaaaagtgtgaccttttccgtagctagacgtctatcagggcgtcagcaatgggaggcacagcggaaaaacaataacaatggtaaccgcaattaccttttgagcgttacattcgta

SEQ ID NO: 166593 - DNA, 258 bp, Saccharomyces pastorianus
ggagttacattgttgttaaaggccgcaatattacgtggaacgaatatgctgcaattctcctcgagaaaaaataggaatctacaaaaagcgaattgatagctctacataataatgttactctatcttcttccttttataccttgtcattctttattttattacattatcaacccttgaatttcagcttccattagatttgatgactatttttcaatgtttatgacatcttcttatattgtatatgataatatattagta

SEQ ID NO: 166594 - DNA, 96 bp, Saccharomyces pastorianus
agaaagactttgttgtgtcggaatgttggaataaaaatccactattttctatcaactaatagttatactatcaatatattatcatatacgttgtta

SEQ ID NO: 166595 - DNA, 294 bp, Saccharomyces pastorianus
  modified_base (5)..(5): a, c, g, t, unknown, or other
ggttnccgttccaaatcaacggccagtacttcacagaccaggcattgttcagttcctttgtgctgggcgcaaactcaggcacttcgatatcatcactcagttcatactttttcgttccaacccaaatactcttcaatttattgtttatttcaccttcgtcgcaaatatactctttcgaacacaacaccacttccaaggtggaggtctcgatgtccttgcggatccttttcaaatgtctcaatgaaatagggtcatttttctgaaaatcgtttcgaattagcctactttactagt

SEQ ID NO: 166596 - DNA, 153 bp, Saccharomyces pastorianus
atttggaattttgagaaaatacaatatccataataagtacgagagattaatttttgttttcagatcaacattcaaacacggttgttaggtggttgttttctgatgtactcacatgagaatcacgtgaattttcagatagttgttgggattcca

SEQ ID NO: 166597 - DNA, 327 bp, Saccharomyces pastorianus
gatttcaacagtaagaatttactatacatttctgcagccgggattgcgtctatttatgtggtcaagaccatagtgaaagctagaagagatgctaaatttataccaaaggcgcggggaaacaatggtgaagtgaatgaaaaaaactattatgataaccttgctcaagtcaaaccagggttccccatacctaaagatggaggagacaacattgattgctctgaggaccatcaattagtaagaaagagtaaatatgaaggtagcgggcttagtgctgtaacaagaaaaagaggtgacaaattaggttttttagataggaggagaaacgag

SEQ ID NO: 166598 - DNA, 255 bp, Saccharomyces pastorianus
ataattgttgaaatttcattgttatcaagagctataatattaggtgtacgaatataccaagtttccctcgagaatagagaaatcctccaagtggagtcggtaaatctacataataatatcacagttatttctccttccgttttatatattttattatcccattacattatcagtccttgcatttcagctttcattagtctgatgactggttctcaatatttatgccatcttcttacactgtatatgataatatac

SEQ ID NO: 166599 - DNA, 162 bp, Saccharomyces pastorianus
aaatcataaaatatcacatctttccttcatattttcaaaaaaaaaaaaattttctttaccatttttgacacaataatcacgataattgttaggtcaggcattccctttccacttttatgttcatttggacgcaataagatatacatattatttaatgtgctc

SEQ ID NO: 166600 - DNA, 300 bp, Saccharomyces pastorianus
cggttcctgtatttcgttctagaaatcttaaaaattagtaacatcttagatttgcacgctgcgtacacagaaaaagtcgagaagtttagaaatggcgatgtgtctgttggctccactttggaaaacatcttccgtaacgataaagcctacacacctttaaccacctccactggaaccaccgcctatgatttaaaccacccaatttccagagccttgatgtgtttaactgttcttggcctttgtttcattgcctacaagggcatgcacgaaaagcctcatacggtttcattaagacacaag

SEQ ID NO: 166601 - DNA, 162 bp, Saccharomyces pastorianus
atcagtattattatatctgaaaatgaagagaaatttagaaacagattcttcggtactaacctgaacatataccacatcgacataaagagaaatgttgctgacataatgacaaaacctcttccattaaaatcatttaagttattaaccaacaaatggattcat

SEQ ID NO: 166602 - DNA, 105 bp, Saccharomyces pastorianus
tctaaacgagtattagatatgacgtatgagttaatccaatacctatgggatactagagataaacaacttatatggcacaaaagcaagcctaagaagcgagaaaac

SEQ ID NO: 166603 - DNA, 189 bp, Saccharomyces pastorianus
ctacaatcacctctagtaggtttaaagcaaagtggtgcaacccggtatgaaactattaagtcatatctaataattcagtgttatatgaaagaagtacgtggatggtcatgtgtgttcaaaaatagtcaagtcacaatctgtttattcgtaaatgacatgatattgttcagcgaagacttaaacgacaat

SEQ ID NO: 166604 - DNA, 576 bp, Saccharomyces pastorianus
gagaatattttcggaaacactaaatttgaaaggtcagaaaatttggtagaaagtgcctcaaggttggaaagtttactgaaatcattaaacgcaataaaaagtaaagacgacagagtgaaggggtcttctgcaagcattcacaacggtaaggagagtgctgttcctatcgagtcaatcaccgaagatgatgaggatgaagatgatgaaaatgacgatggtgtcgatttactaggagaagatgaagacgcggagataagtacaccgaacatagagtcagcaccaggaaaacatcaggcaaagcaagacgaaagtgaagatgaagacgatgacgacgatgacgacgatgacgacgatgacgacgatgacgatgatgatgatgatggagaagaaggcgatgacgatgatgatgaagatgatgatgatgatgaggatgatgatgatgaagaagaagaagacagcgactctgatttggagtatggtggtgatcttgacgcagacagagatattgaaatgaaacgaatgtatgaagagtacgagagaaaactaaaggatgaggaagaaaggaaagcggaagaa

SEQ ID NO: 166605 - DNA, 144 bp, Saccharomyces pastorianus
atgtaacttgtttgtttacctttagaagtgcggaaacataagtattttttttctttatttaccaatttaccaaggaaaatccaaatgggcacagggcgagcgaatttttttccctcttttattggcgaaacggaagattttcgg

SEQ ID NO: 166606 - DNA, 210 bp, Saccharomyces pastorianus
cacactccagcaacaaagattgtcgctggccaagtcgacactgatgaagcgggctacattaaaactgtcccaggcagctcattaacctccgttccaggatttttcgctgctggtgatgtccaggattctaaatacagacaagctattacttctgctggctctggttgtatggccgctttggatgctgagaaatacttaacttccctagaa

SEQ ID NO: 166607 - DNA, 189 bp, Saccharomyces pastorianus
ctttcggcaatcattctagcatgttccgcatgttccttgacgccatggtcatccttgccgtcgcctccggcgtttcccttccccctcagctgccagggcgccgttcacacaacgcaagcacacccggcgccaaaaaaccggggaaagaccacggcgctatggtttcggagtttcccgccaatggcgtta

SEQ ID NO: 166608 - DNA, 81 bp, Saccharomyces pastorianus
gacaagatcaaccagttttggcatgtaggcggtgccacgcaaattaggaatattcagtcgatcaaattgactcaggaccgt

SEQ ID NO: 166609 - DNA, 255 bp, Saccharomyces pastorianus
tgtgaaaaatgtgatggcaaatgtcctatctgcgactcttatgtaaggcccaaaaggaaagttagagtatgtgaaaactgttcgtttggtaaacaagctaaaaattgtataatttgtaatctaaatgttggtgtcaatgacgcattctattgttgggagtgctgccgcttaggtaaagataaagatggctgtcctaggatcttaaaccttggcagcaatagactggatagacatttcgagaaaaagaaaaaggta

SEQ ID NO: 166610 - DNA, 258 bp, Saccharomyces pastorianus
acggaggtctaccggcagtcgcaattgggggcataactaaccttgatttgacgcttttgagaaacaatctttttgagcggcacagcccctgaggctgtagctgatgctgcgttgcagcgtattgggcttacgggactggccaagaaatcgatggacatcaacgagctcaaacggtcggaagatctcagcagaggtctatccagctatccaacacggatgtttaatctaatcaaggagaaatccgaggtgcctttaggg

SEQ ID NO: 166611 - DNA, 450 bp, Saccharomyces pastorianus
cgaaataatattaccattgaagattgtttcagagagttcaccaaatgtgagaacttggaggtggatgagcaatggttgtgcccacattgtgaaaaaaggcagccctccacgaaacaattgacaataacgagattaccgaggaatctgatagtccatttaaagagatttgataatttattaaacaaaaataatgacttcgtcatatacccttttttgttggacttgactccattttgggccaatgattttgacggtgtttttcctccaggtgttaatgacgatgaactaccaataaggggacaaataccaccttttaagtatgaattatatggtgtagcatgccactttggtactttgtatggtggtcattatacagcctatgtgaaaaagggattaaagaagggatggctatattttgatgataccaaatataaacctgtcaaaaacaaa

SEQ ID NO: 166612 - DNA, 1185 bp, Saccharomyces pastorianus
atgaatttaacaaatctgttcagatcagtcctcaagtaccgaaaaacaaatctgagcttacttttgttgatcacctatgttgttattgcagtactctacgttttcgaccatgagtattataaatttaacttgccaaaaaaagatgaacaacccgaatttaatgaactgttagaaacggcatggacagatttacaaactattacagcttctttccatccgtatacgtctagagataatgacaaagttcatgattacttactaagcagagttcaggagattacaaaaaatgtttccttcgcaagcatttccgatgataatgatagtaaaagatcgatactatttcaacagcgggacgttttcaatgcgtcctctgatatctcaagagtgatttattttgaatcttccaacattttagtcaagttagagggacaaaatcccgaccaagaaggattacttctatcagctcatttcgattctgtgcccacaggccacggggctacggatgacggcatgggtgtggcttctttattggcgaacctcgaatatcatatcaggcatagaccggacagaaccttaatcttcaactttaataataatgaagagtttggcctgttgggagcatcggcgtactttaatcatccatggtccgttctaactaaatacgtcataaacttagaaggaactggtgctggtggtaaagcagtgttgttcagaacatccgatacttcaactgcaaagatatatcagcaatcggttagagctaacccatttggtaactctatttatcaacaaggtttttatagtggatatgtcagaagtgaaacggactacaaggtttatgaacaaaatggcatgagaggttgggacattgcattttataagcccagaaatctttatcataccatgagggactccatacagtacacttccaaggcatctttatggcatatgctacatacctctttgcaattaagttcgtacgtggtgtctaattcactagacacggaggatcaaacacctgcttgttatttcgattttatcggacagagtttctttgttatgagttccaagacattattttactggaattgtgtatttttgttaatttcacccattgtcgtaatcggcctgtatctaatttcccgggataggatgacttggaaatcctattcttggctttcgtgg

SEQ ID NO: 166613 - DNA, 150 bp, Saccharomyces pastorianus
gagtccattatgggtaaacgatctgatgcctcagggctgtaggctttgaccggaaggactgcaaaggagagtggtttatatgacgaacatacggcatctactccgtgtcgaaacacagggcctatataatatgctaaatctgtccagtcc

SEQ ID NO: 166614 - DNA, 165 bp, Saccharomyces pastorianus
ccatctttcaaaagtatcgtgacttcagataattacactcttcaaagacacgcaatggttccgacattaaggtgcacacagaacatatgcctagatgatctaactagatcaggcaacctcaatgagatagaaaacatagatactgttttaaagtcatatgatgcg

SEQ ID NO: 166615 - DNA, 156 bp, Saccharomyces pastorianus
gaaggttatgaaaatgattatcgacaaaacactgaaattccagacatgtttactacagaaaaactagctgaaataaaaggcaatgctaactattcatctcctagcgacaatctataagataattagaaatacggcttttttgacgcagaagaatct

SEQ ID NO: 166616 - DNA, 141 bp, Saccharomyces pastorianus
gtgcctccaatcattcaaaacactaatgatactagcgtcgcacgtccaaataaccttaaatcaataccagcagcgtcatcaacagtgacagcaacaacaagaacacctggcgtcagttcaacgtcagttctcaaaccacgc

SEQ ID NO: 166617 - DNA, 513 bp, Saccharomyces pastorianus
ggtcatgaatcaagcggacgggtcaccgaagttgatgacgctgacagaaagacgaaactggtgaccgtgttgctattgaacctgtgttcccagccgctatcctgacgaatccaaggaaagaaaatatataacctttgccaatatatggcgtttccgctacttctccaattgatggtgccttgtgaagttatatttgtccccagaagattttcttgaaattccaagtaaaatacaaagaaagcttgtgtagcaccttcatctgctcagttgcgttctgataggttggctgaggtccactttggaactatggattttactgttattgcggttaggacaggaccgtggggctattaaatgtcgaaatcgcgcgcgtttggtggcggtgacgtcattttagttgatgtatttagcaacaagctacgaaagcaaaaaaaaaaattagtctctactaatacttgcaatcctttcaatttttctgttgatgaggctcgggaattaactgatgaagttgaa

SEQ ID NO: 166618 - DNA, 1167 bp, Saccharomyces pastorianus
gtgctattccaaacatcttccccgcaaaccagttcatcaaatgaaggtggttcctcttcggagccattgggaaagtcctctgtccttgaaactactgcttcatcttctgatacaactgcagtcacatcctccacatttaccacgcttactgacgtttcatcttcaccaaaggtaagttcctcaggatcggctgtcacttcagttggtagtacttccgatgcctcaaaggaagtttttagttcaagcacgtccgatgtttcctccctactatcaagtatttccagccccgcaagctctactatttctgaaaccctaccactttcctctacaattttatccatcatttccagctcagtaagttcagaagctccatcggcaacgtctagctcagtgagttcggaagctccatcggtaatttccagcttagcaagttctagactgtttagctctaaaaatacatcagttacttctactttggttgctacagaagcttcgtcagtaacttctagcctaagaccttctagtgagacattagcaagcaatttaatcattgaaagctctttgtcgacgggttacaattcgaccgtttctaccacaacatccgccgcatctagttcacttgaatctaaggtttcgtcaagtaattccagaatggccacttccaaaacctcatctacttcctccgacttgagtaggtctagtgtaatattcggcaatagttctaccgttacaacctctccatcagcgtctatcagtttaaccgcatctccacttccatcggtctggtctgatatcacctcttcggaagcttcatcaatttcctctaacctggctagctccagtgcgccatctgacaataattccaccattgcaagtgcctcgctaattgtcaccaaaacaaaaaactcagtcgtttcatcaattgtctctagtataacttcttctgaaactacaaacgaatccaatttggccacatctagtacatcgcttttgagtaataaagctactgcccgttctttatcaacatccaacgctacaagtgcttctaacgttccaacaggcacatttagctccatgagctctcatacttcggtgataactcccggcttttccaccagtagtacgccactcgcaattaattcaactgtcgttagctcatcattggca

SEQ ID NO: 166619 - DNA, 105 bp, Saccharomyces pastorianus
atgaccgaaagaaagctattgcagctgctacggcgtcctttcatctccctttctttattcacggccttaagagcttgtccgctttgccccaaaagcctaattgct

SEQ ID NO: 166620 - DNA, 216 bp, Saccharomyces pastorianus
gaaccaagaatttattctgctttaattgatggccattgtgaaattttagacaatggtcgtagacgccccaaatttagaattcaattgtctggtaatccaattcttggtgatggtaaatctgacaaccaaaatcacccgttgattttttacagaggtgaatacattcaactgattgatgctaatcaggacaactacttagaggaatgtttgaagatc

SEQ ID NO: 166621 - DNA, 837 bp, Saccharomyces pastorianus
tggaaattggtggctatgagttttaatttataattatataaagacaaagcttggaatgctgagtactttttcttcaatgctgctcactgcccagaagcgttcagaacaactctactggagccattctgcttgaaggaggataaaaatgccaagatcaagtcttttaaagactctatcccttttcatcggaaaagcactacaagtttattctacagaagtggacaaactgtggaacttgatccatactgagtaagtatggaagactgttaacttggaggatttttctctgctttctaaagaaggttcactgctttacactcacctaggttctcatgagtattgctagctagtgcgagtttgatctatacttcacagacttttaacaccccgttctttaagttttccctgattatcaagcggatttccaattcttattccccactatcgcacctttcttatctgaattgtattcttgagtggcctaattgtaatcttttattttgttttctaattattgaaggcggtttctcgaaacatttcacgatttccaaaattcaagaattgaaattatgaacatagaagacaaaatgccttttttatcaactattatgaattctctagaaagtggttgcaaaggaaataaatatgtatttgctgagaggaaaagtttggaagaacaaaaagtatttctttaatggagctgattatcaagcattctttacggggagctttcgaaattttttatattcaaggacatttatgttgtgtgggttattaaacgtgggactttggaaatacatccaagaagcacaattgagctctaacgatgaaccgtta

SEQ ID NO: 166622 - DNA, 384 bp, Saccharomyces pastorianus
  modified_base (381)..(381): a, c, g, t, unknown, or other
aaggaacatttttttggttcgtttcatcccttcattgaatattctgatagaaaaaggaaatacagccgacagaaagtaagagaggaaactaaagtatctgttgataacggtctgacgtggtcaaacttgaaagttgttgaccgggaaaatgtagattcatttcgttgtgatgtcactaaacccgagagatgttcgcttcacacttatttctatgatctaagaaatttaaggccatctgccggaatcatgatgatatcgggtattgttggcgacggcagtgaatacgattggaatgaagaaaaaacttttatctccagggatagtggtttaacatggaggttagtccataattccactggtttatatactactggtgatctnggg

SEQ ID NO: 166623 - DNA, 234 bp, Saccharomyces pastorianus
aactggtctatattggggtggctttacgcactcactctggcttgggtcattattgatttgcccgagacaactggcagaaccttgagcgaaatcaatgaacttttcagtcaaggtgtccctgctagaaaatttgcatctacagtagttgatccctttggaaagagagggctacaaaatcgtccgcaagttgataacattattgaccggttctcaagcgcgagtcaacaggcgtta

SEQ ID NO: 166624 - DNA, 78 bp, Saccharomyces pastorianus
tttccgagatatacggttttgattatgaccatggaccacaagaggcagttctcgtcgactattataaagaccaagaaa

SEQ ID NO: 166625 - DNA, 285 bp, Saccharomyces pastorianus
atggcggcaacaccagcagcgattgaagttaatttgaccattgtatttgttttgtttgttagtgctgatataagcttactaggaaagaaattaaaaaaggcatatctttaagacatgggacagaagcagctctatttatacccattccctcatgggttgttgctatttaaacgatcgctgactggcaccagttcctcatcagatattctccatatctcatctttcacacaatctcattatctctatggagatgctcttgtttctgaacgaatcatacatatttca

SEQ ID NO: 166626 - DNA, 324 bp, Saccharomyces pastorianus
agaggcggttacgacggccccagaggtggctttggcgccccaagaggtggctacggtggctattctagaggtggctatggtggctactccagaggcggttacggtggctctagaggcggttacgacagtccaagaggtggttacgatagtccaagaggtggctattccagaggtggctacggtggtccaagaaatgattacggtcctccaaggggtagctacggtggttcaagaggtggttatgatggtccaagaggcgattatggccccccaagagatgcgtacagaaccagagatgctccacgtgaaagatctccaaccagg

SEQ ID NO: 166627 - DNA, 438 bp, Saccharomyces pastorianus
atcacttttttaccttgaatgaggaagatttcaaattaagtggccttgttggcgcaatcggtagcgcgtatgactcttaatcataaggttaggggttcgagccccctacagggctaataatatttttatatacatttttttatacttgctctatgcgaaagttacagtagccattacaaataaactagagaaatatatagctttctctgctatcattctcattttttttactcattatatattcaagatcaaaattcgataagatattttttagttccttgtcaatacttttccgatttgctaggcttgttgcgcccatttgactggtccgactgtcgaggctggtctggttcatcttttggttcgtttggatcatcaacaagctcgctacaaactttggtaccgaaatggtgctcaaccatgtgttcgacggcaacg

SEQ ID NO: 166628 - DNA, 264 bp, Saccharomyces pastorianus
gatgatactgatacagctttacaggaacatccatcttcaacagaaagaagactacaagcacatacataggtacatatatatatataaatgtatattagtacgcatcgctgagtgacgggctacgcaagctttgcattgattgctgcatggatcggtcgtgtgcatttccaattaccgatgctctgcggataaaaatcgttgaaaattcgttgaataaacgggcttttccgactgtcggttttaagggcttggaccctaagggtg

SEQ ID NO: 166629 - DNA, 192 bp, Saccharomyces pastorianus
atggaagtcgttgttgtcttgcaacagacggtctcttgatttctccttctagtagcagtaatactcataacttttcactttgactcgattgtgggcagctaataaaaaaacgaatgaacaaaaggggcagataatggaaaacggaatctgaatcactttaatgaaatatcacttgtgcgtgcggatacactt

SEQ ID NO: 166630 - DNA, 270 bp, Saccharomyces pastorianus
aaagaaaaactcgagattttctcgagttctttatatatgggggaaaggagaagaaatccaccgcgatgacacacacagcaccaaatcgcctgtaaataataacgtgaaaaaaaaagcgatgatttttttttcttccctgagctctatttctttttcccacacggatattccgcttgcaaaagaaaagacgtggctcgggacctttgccgtttcggaaatagactttggcgttccacgcccagaagcggccaatcaggccaatcaggaccc

SEQ ID NO: 166631 - DNA, 303 bp, Saccharomyces pastorianus
ttgtatttaattttgtgaaatttcatgattttggctttattgtttgtaatctttcataaaagaggcatttctttttccattttataaattaggttttcttttgggggcatatttagtgctctaggcaacttcaatgagccaatctctgagagacatttcccaataaacttactggaggtaataacacgtaaaccagcggcggggggaagagaatagagagttatcacatataaaatgaatcagtacttgttcggtttatgaaatacttcgtactattcctattgtggttagaactagcatcgt

SEQ ID NO: 166632 - DNA, 180 bp, Saccharomyces pastorianus
ttctataactatccttaggaagatatgcattacaatatagtgatatagaggaaggtttgacttcgccatgataagagcgagagctgctttcagatgatcgaagaccttcttagaaggagtattagggcaatagttagcttgtcgtttgaccataattctagaagctatgaatactaccgg

SEQ ID NO: 166633 - DNA, 291 bp, Saccharomyces pastorianus
cccaggtatatcaacgataaaaatatcagggcaaccattctgaaaatcgttaaccctatcacaaagatccttatggttgccgtttggatctgtcctggtttaccgctaaggtttcctgagttgagtattttgtgtttttctggttccaacagaaacttatattttgacgccgaagagcgtgtattccttatcaaatctaggtacaacaagtcacacaagttcgattcacgaatcttattcttggatgtaccggtttccacagtcttgttctggtacatatacatactgcga

SEQ ID NO: 166634 - DNA, 114 bp, Saccharomyces pastorianus
ataaaaatcaactattctctctcaactagtagtcttactacgagtatattataatatacaatgttagatgatgacataaggtatgagaaactgtcatagaagttagaggaagct

SEQ ID NO: 166635 - DNA, 282 bp, Saccharomyces pastorianus
aataatacatccgcaaatgatttatccactaccgagtctaactctaactcagcagtaggcgctccctctgttaagactgaacacggtgactctaaaaattcccttaacctagatgccaatgagccacctattgacttacctcaaaaacctctctctgcgtataccaccgtcgcaatcctgtgtttgatgattgcatttggcggcttcatctttggttgggataccggtaccatttctggttttgttaacctttctgactttatcagaaggttcggtcaaaaa

SEQ ID NO: 166636 - DNA, 117 bp, Saccharomyces pastorianus
ttcttcactagtaaacaccaaggacagaacccagagacaaagatatcccgttctaccgatgacgtcagtgaaaaaaaagtagtgagaaaactgtccttccacgtctatgaagatgag

SEQ ID NO: 166637 - DNA, 780 bp, Saccharomyces pastorianus
gagctcgaacgagaactctcagagacgagtgactataagaccttgcagaagaagaccataagtcttcgaagtgagctgaatactctgtcacattctttgacatcttatgaaaaagaacacttctccaatgatatagaaaatgtattaaaatctattaatgcaaaattatctgagtcaaagggcaaaaaacgactattctccttcaaacagaaaaattcatcatcagccgttcataagaatgttgaacgtacggagcttgcgaatgcgccggcgtataccactactttgaaaaagcattatgtcttggagaagggtgattcagcttttgaaaatttagagttttgtactgttacatcaacaacagattatagtggcaatagtgccctttctggttctttgtgcttccgcaatattactaaatgtgtcataaacttacaaaggattttcttccaaacagggagtatcttcataactgattgtacggattctataatttttctacggtctccttccgacaaggatttccaaatccgtttacgtgacttgaaaaattgcaaaattttgatagagaaactctcaccaagtatcgattgcaaacaagtggtaatcatagaaaattgtcacaaatgcattttcaacgcaagcactcgggaccacctaattatacaagatttctctaaccccttccaaagcgaagaaactgaggacaattctgcctttgcatttgaagattttgatatttgtaacaaggatacaatgcagttgtttcgcgcttactta

SEQ ID NO: 166638 - DNA, 93 bp, Saccharomyces pastorianus
aaaatcttgactcctgaatctcaattgaaaaaggctaaggcccaacaaaagaccgctgagcaaactgccgccgaaagaactgctcgtaaagct

SEQ ID NO: 166639 - DNA, 147 bp, Saccharomyces pastorianus
ttgccaaccccggacttggtggaccgtttggaaaagggtctgccattgaacaagtacgatagagctactttctacaccatgtccgcagaaggttacattgattacccaacttacggtgaggcagtggagttaggctgggacaaaaac

SEQ ID NO: 166640 - DNA, 423 bp, Saccharomyces pastorianus
atcgtaaagttagaagaagtgctgcaaaattccaggtacataggtatcgttctagaatatgcatgtggaggggaattttataaatacatccaaaaaaaaagaagactaaaagaacccaatgcatgcagattgttttcccaattgataagtggggtacattacatccattcgaagggtcttgttcacagagatctcaaattggaaaacttactattggataaaaatgaaaacttagtcataacagactttggatttgtcaacgaattttgctcacgtaacgaattaatgaaaacgtcatgcggctctccctgctatgcagcaccagagctagtggtaagcacaaaaccgtatgaagctaggaaagcagatatatggtcatgcggtgttatactttatgctatgctagccgggtatttgccgtgg

SEQ ID NO: 166641 - DNA, 228 bp, Saccharomyces pastorianus
accgacaagctgaaagaggatattttaaccatcagtaaagatgctctggacaagtaccagttggaaagagacattgctgggacggtaaagaagcaattggatgtcaaatacggcaatacctggcatgtgattgtcggaaagaactttgggagctacgtgacacacgaaaagggccattttgtttatttctatatcggtccactggcgtttttagttttcaaaacagca

SEQ ID NO: 166642 - DNA, 75 bp, Saccharomyces pastorianus
gtggagagccagcaattgcggaagtacatagcattgtacaacagagaggtcgaggagttccacggtggggcggcg

SEQ ID NO: 166643 - DNA, 2184 bp, Saccharomyces pastorianus
atgttcaatcgctttaataaacttcaagccgctttggctttggtcctttactcccaaagtgcattgggccaatattataccaacagttcctgaatcgctagtaacagctccactgccgtttcgtcaacttcatcaggttctgtttccatcagtagttctattgttgagtcgacctcatctgcttctgatgtctcgagctctctcactgagttaacatcatcctccaccgaagtctcgagcaccattgctccatcaacctcgtcctctgaagtctcgagctctattacttcatcaggctcatcagtctccagcttatcttctattacttcatcaggctcatcagtctccagcttatcttctgccacagaatcaggctcatccgcctccggttcatctacttccattacatcaggctcatcctccgccacagaatcaggctcatccgcctctggttcaacttccgccacaggctcatccgcctctggttcaacttccgccactgaatcaggctcatcagtctccggttcaacttctgccactgaatcaggctcatccgcctctggttcatctacttccattacatcaggctcatcctccgccactgaatcaggctcatccgcctctggttcaacttccgccacaggctcatccgcctctggttcaacttccgccacaggctcatccgcctctggttcaacttccgtcacagaatcaggctcatcagtctccggttcaacttctgccactgaatcaggctcatcagtctccggttcaacttctgccactgaatcaggctcatccgcctccggttcatctacttccattacatcaggctcatcctccgccacagaatcaggctcatccgcctccggttcatcttctgccactgaatcaggctcatcctcatcagcatctgaatcatctatcacacaatctggtaccgcttccggttcatcagcctccagcacgtccggttctgttacacaatctggttcctccgtttccggttcatcagcttcttctgctccaggtatctcgagttcaattcctcaatcaacctcatcggcttccactgcctccggttctatcacctccggtaccttaagttctattacctcttcggcttctagtccaactgcaactgcttccaactctctttcttccagcgatggtactatttatttgccttctacaaccatcagtggtgacattacactcaccggttcagtcattgcaactgaagctgtcgaagtcgctgcaggtggtaagttgaccctacttgatggtgacaaatacgttttttctgctgatttcataatccatggtggcgttttcgtagaaaagtctaagccaacttacccaggtaccgaattcgacatttctggtgaaaactttgatgtatctggtacctttaacgctgaagagcctgctgcttcttccgcatctgcatactccttcactccaggctctttcgataagagtggtgatatttctttgagtctatcagagtccacaaagggccaagtcacattctctccttactctaactctggtgctttctctttctcaaatgctattctcaatggtggttccgtctctggtttgcaacgtagagctgaatcaggttctgtcaacaacggtgagataaatcttgagaatggcagtacctacgtcgttgtcgaaccagtttctggaagtggtacaatcaacatcatctctggcaacctttacttgcactatccagacacctttactggccaaactgttgtattcaagggtgaaggtgttcttgccgttgaccctaccgaaagcaacactactcctatccctgtggttggatacactggtgaaaaccaaatcgccattacagcagatgtcactgctctttcttacgacagtgctactggtgttttaactgcaacacaaggcaactcacaattctccttctctattggtactgggttctccagttctggcttcaacgtctccgaaggaacatttgctggtgcctatgcttattatctaaattacggaggtgttgttgcttccagcgctacaccctcatccacatctaccacatcaggggctaccaactctacttccggttccacttcatttggtgcttccgtaactggttcaaccgcttccacttcattcggtgcttccgtgactggttcaacggct

SEQ ID NO: 166644 - DNA, 306 bp, Saccharomyces pastorianus
cctggtattattaaaactttccctcaaacaatagacaccgccagtgaccaatctgatttagctaaaagagaaaaagataccgaattcggccaggatgatactgagtcaaattcaactttcgacaaatccaataacgaatataaaggtctcatcaccattattccttccaaacctgatttgaatcaggtcattaatgattaccaaattgggttcaggaactgcttcatttgttcaggttctgacagcctaaggtataccgtcggaaattccgtggcaggtttacaggccaaggttttttctaacaaa

SEQ ID NO: 166645 - DNA, 306 bp, Saccharomyces pastorianus
cctctaattggcgtaaagccatataatgccactgaattcaaagccgcaagagagaatgtcgacaccattgtttcgctttacgagaaaaggttaaagaaacagcaataccttgtctgtgatgaccacgaaactcttgctgatttaatctcagcggctgctttttcgctagggtttataagttttttcgatgaaacatggaggtctaagcatccagaggttacgcgctggtttaatcgagtaattaagtcccgcttttttgaaggtgaatttgagagtttcaaaatgtgtgagactgagatgcaaccc

SEQ ID NO: 166646 - DNA, 213 bp, Saccharomyces pastorianus
gacggcaccctttgtcaagagttcgtggttaacgtcgactgcgtttactgattaccgttacagtgaatttctagcaagagtcctctgtagatgccactatttgtcgctctccatgtagtaaggccgtcctagctgaagtgtggggagtaagctgtagttataggtgctggaacaattgatctgctggcgggtgcggtactcagagggtttggt

SEQ ID NO: 166647 - DNA, 264 bp, Saccharomyces pastorianus
gtcaaagtttaagtgaaggctattggaatctgcggattagacattcactactacacggatggccaggtcagcgtaaagtaacctgggaagcccatgactttgggccacgaatccaacggtgctgttcttgaaattgaagtatctcaaactactgtaaagcgggtgatgcagtaagcatatagccctcatacccaaataggtttaccaaagaatttctgtgaggccattatagtttgcagctcaacataccatttgctgcatcac

SEQ ID NO: 166648 - DNA, 1269 bp, Saccharomyces pastorianus
atgttcaatcgttttaacaaattccaagctgctgtagctttggccctactctctcgcggcgctctcggtgactcttacaccaatagcacctcctccgcagacttgagttctatcacttccgtctcgtcagctagtgcaagtgccaccgcctccgactcactttcttccagtgacggtaccgtttatttgccatccacaacaattagcggtgatctcacagttactggtaaagtaattgcaaccgaggccgtggaagtcgctgccggtggtaagttgactttacttgacggtgaaaaatacgtcttctcatctgatctaaaagttcacggtgatttggttgtcgaaaagtctgaagcaagctacgaaggtaccgcgttcgacgtttctggcgagacttttgaagtttccggtaacttcagtgctgaagaaactggcgctgtctccgcatctatctattcattcacacctagctcgttcaagagcagcggtgacatttctttgagtttgtcaaaggccaagaagggtgaagtcaccttttctttgtcaaatgctattctcaacggtggttctgtttccggtttgtaacgtagagacgacgatgaaggctctgtaaataacggtgaaatcaacctagacaatggaagtacctatgttatcgttgaaccagtttctggaaacggtacaatcaacatcgtctctggtaacctatacttgcactaccctgacacctttactggccaaactgttgtattcaagggtgaaggtgttcttgccgttgacccaaccgaaaccaacgccactcctattcctgttgttggctacaccggtaagaaccaaattgccattaccgctgacatcactgctctttcttacgacggtactactggtgtcttaactgcaacccaaggtaacagacaattctcttttgaaattggtactggattctctagttctggcttcagtgtctccgaaggaatcttcgcaggcgcctactcatattacctaaactatgacggtgtcatcgctacaagcgccgcatccacatccgcatccactacctctggtgttgtctctactgccactggttcagtcactttatcctctaacgcttctaccaccgtctcttctacgatctcttctagcgccccagactcaataattccttcatctagcgcctctatctctggtgtctcaaactccactacagcatctggttcaatcgcttctactgcttccatcgcttccactacttctactgcatccgctgca

SEQ ID NO: 166649 - DNA, 147 bp, Saccharomyces pastorianus
aaggagatattatccgaccgactgttttgtgatatggcaaactatttttttaaatgagcaaaattacttcttttggctggaaatgtcattagaaagtgcccaagtgacatttagctaaactcgggtattgtctacaagaccggtgct

SEQ ID NO: 166650 - DNA, 726 bp, Saccharomyces pastorianus
cgagttaaaggtatcgatttccatcctactgagccatgggttttgactaccttgtactctggtcgtgttgagatttggaattacgaaacacaagttgaagttagatccatccaagttacggaaactcctgttagagcaggtaaattcattgcaagaaagaattggataattgttgggagtgatgatttcaggatcagagtcttcaactacaatacaggtgaaaaagttgttgatttcgaagctcatccagactatatccgttccattgctgtacatccaacaaagccttatgttttatccggcagtgatgatttgacagtcaaactatggaattgggaaaataactgggccttagaacaaacttttgaaggccacgaacactttgtcatgtgcgtcgcattcaatccaaaggatcctagtacgtttgcatctgggtgtttggaccgaaccgttaaagtttggtcattgggacaatcgacaccaaatttcacgttaaccacaggacaagaaagaggtgtgaattatgttgattattacccgctacctgacaagccttatatgattactgcatcggacgacttaaccatcaaaatttgggattaccaaacgaagtcatgtgtagccactctagaaggtcacatgtccaatgtttcttttgctgttttccatccaactttacccattataatttctggttccgaagatggcactttaaagatatggaat

SEQ ID NO: 166651 - DNA, 159 bp, Saccharomyces pastorianus
  modified_base (124)..(124): a, c, g, t, unknown, or other
aagggtgaggaagaggatgagtatccagaagataatggtacccgtaagaaaaagacaaaggaacgtagtagctccttatcagcaacgttcaattcctggctatccaaattctctatagcttcangaagaatcacagcaagaaaacaggagcgagacaag

SEQ ID NO: 166652 - DNA, 276 bp, Saccharomyces pastorianus
  modified_base (94)..(94): a, c, g, t, unknown, or other
ccccaaaaccacaccgtttttcggggagcaatttttgggagcaaaaatctttttttttttttttttttttttgcttcccacgaaatcggaactnatctatcagccgaagaaagcgcgttggacagatacttgagcagattttgtggggagagagaatcttgggacaaatgcaaaaaagaaatggtcggaacaaaagggcagtatacagggccggcagtaccttctgttcctaccacaaaccttaacgatatcggtgaccctactaaaactgtgcaa

SEQ ID NO: 166653 - DNA, 348 bp, Saccharomyces pastorianus
ttggaacccaagctagaccattacgggcttcggaaattcagttattacgcggtcgattcatctggttcatttgaaacgaacctagacccgcacagctctagcgttgtaacatggggtgtttttcccaacagtccggtcaaacagactacaatcattgaagaagagtcattcaaggcatggagagatgaagcgtttagtatctggtccgagtgggccaagttatttccaaggaacaccccagccaatattcttctaagactagtgcataaagactactgtcttgtctcaattgttcatcacgacttcaaagaaaccgacgagctatgggaaatgttactcgaccaagcc

SEQ ID NO: 166654 - DNA, 825 bp, Saccharomyces pastorianus
aagtatgacacagagcatagccgaccaacaaaaagctattttccacatagcatatcaagaacaccaaggagaaaatatacttacattctagtcctcacatcactaaatggaacttttgagagcaaacatgtggtgataccatttaaaccagatggtttgaaattgggaaggcctgttgctaatagtaatagcagctccagttcatcgctcaggggcggtaaaagagtggattcacacactttttcccaagtaaggtccgataatggtaatttcgattcaagagtactctccaggaatcatgcattgttaagttgcgacccgctcacgggtaaggtatatatacgagacttaaaatccagtaatggtacgttcattaacggtcaaagaattggctcaaatgacgtagaaatcaaagttggcgatgtgatagacttgggaacagatatagatacgaaaattgagcatcgaaaaataagtgccacagttgaagaactatttgtacaacctttattagaatcaccgatttttgaaaatgaagatagtgatgattgccatacaattacagaaaaagaggaggctgctgccataacaagtcacatatatggtgattccaacaacctagaattggaagaagttatcctgggctctgatacagaaatactgagtggaatttttattaataattgtattggtacgagcccgactttatctaatatcatcaaaaccctggcaatggaaattccattttccaaatgcgataattttaaattacagtcgatggagaatttcttaattaattatacgacacatctagaatacacgaac

SEQ ID NO: 166655 - DNA, 750 bp, Saccharomyces pastorianus
aagggtacaggtctcggaagtgaatcagtatattttgaatatgaaaagaaagtcctaagctttcttttaagtaagtaccccaacagaaaggtcaatggccaaataattaagagggaagaattggaccctgaggtttacctagagccagcatcctacctacagctttcagacgaacatgccaatgaaaagttcactagcaccaaggttatattcgaaggtgatgaatcgttaaaggttggcagagttaatataaacaaaaggattacatctgaaggtcatttccaagacgtgaggcagttcaagtttagtaatgtggacaagattcaagaaaactatgaacccggtgatacagtaaccatatatccttgcaatacagatgaggatgtttcaagattcctagcaaatcaaagccattggttagaaattgcggacaaaccattgaatttcaccagtggagttcctaatgatcttaaggatggtggattagttcgcccgatgactttaaggaacttgttgaaatatcactgtgatttcatgagcattcctagaacaagttttttcttgaagatttggacctttgcaactgatgtaactaagatggaacgtggccaagaacaactgaatgatcaaagagaaaaattgcgccaatttgctactgatcaagatatgcaggacttatatgactactgtaatagacccagaaggtcaattcttgaagtactggaagattttatctccgtaaagttgccc

SEQ ID NO: 166656 - DNA, 1308 bp, Saccharomyces pastorianus
atgatattacttcatgccatatatactctttgggtaattatactacttccgttactcaatgcagagaaatttgtcccaaaagtaacggaggctcctatagaaacatcatttaatctagtgagttttgatgattccaacacttctatcagattagatggttggggggttgtatggataagtttcgacgctggagaaaattgggaaacggtcaaagaaattgaagagcgcattttcagatttactgttgatcctttccatggacaggaaagaggtttcgcttttatatgtgaatcacccaaattctacattaccgacgaccgtggggagtcatggagggctttaactataccctcatcagaagaatatttagatggcgactgttttataactactcatcctagaaacaaagaacttcttattgcgaattgctatagctatatgatagacgcagacgttttatatgacccaagtgaaatttacttgagcaatgatggggaatccttttttaaaattaaaccttccttggaaaagaaaaaagacgacgatataacaacttcaagctgtcatttcattcagtctagcaaggattctgactttactggtaatgatacttcgatactctgtttgttctctaaccgtgaatacgatgaagaatatcgcttaactgctacctacacacagttggctttcagtagtgatggaggcaaaacgtttagagattttgatgaatttaaagataagattgttactcaatacaagatattgaagtcatatgtggtcgttttaacgcaagatgacgggcataacgagatgtcatctacggacatctggatatccaatgatgcatctacttttcaaaaggcacagctgcctactcaattacggcacgtcaaagtgattaaaattcgtgaagattctatcggaaggatcatccttcttatatcgacagaaatcacaaatgaggaaaatgctgatccagatctctcagagattttcatatcagattcgcaagggttgaaattctcacctgttgaatggacaccaaaccatcagtttggaaattttaggctcacttttcctgatttcttgaaagggacaatatttggatcgtttcatccttccattgactattctaatcaccaagtaaactatactgaaaatatagccagaggagaaaccaaaatatccgttgataacggcctcacatggtcaaatttgaaagttgttgatgaagaaaatgccgattcgttcggctgtgatatcactaggcctgagagatgttcgcttcagggttatttttacaatcta

SEQ ID NO: 166657 - DNA, 99 bp, Saccharomyces pastorianus
tcagacgacttacatgaaaacgccaacgaattatccagtttcacgagtcaaggcggtaattttgaaatcgaacaagaagatgctcacacgcctgaacga

SEQ ID NO: 166658 - DNA, 267 bp, Saccharomyces pastorianus
cgagtgccgcccctaaaaacgcttgcgcacccacgcctccgcgtcgttaaattaccgcacccacgcaccctgccgcggccatttctggggctgtccgcgcattgggcagaaattcctgtttggggattgccggaatcggtcgcaatcgggtaaaatgaaaacaattttcgcttttccaacagagtaaaatcaaaacagttttgctgaaggaaaaaagaaaaacaaacaaacagaaaacagaaagcagaaagatgtcaatatagactt

SEQ ID NO: 166659 - DNA, 519 bp, Saccharomyces pastorianus
agtgcgcctttgataacggagaatattattcttccagaagacgtcttcaagtgccgtttttcttatatattatacgaaatggctcactataccctgacggtgatttgtttaatgatacctgtggtccattttattggctctaacctctcactacgatatcgtttgcactagcttttcttttgtgtcatagatattacctgtttaatttgtgcaatggttcccttcactgaaccaatctctaatgaaagtctcaaaataaaacttttactgaaggtaataacacgcaaaccagcagtgaagagaagataatggaggactatcacatatagcatgaatcaatacttgtttggtaatgatgtatggaatactccgtactatttttactgtgataaggattgtaacgatttcttcagaaccattattaaaggaaagaattccgttatgcaggtggatcctactgaaaatttatagtcgaactcactatcagctcaagcttcgaacaacgcagtcagatcctct

SEQ ID NO: 166660 - DNA, 225 bp, Saccharomyces pastorianus
ggcggtattctaaaagagcgcaaacctaataccgcgcatgtttggtcgcatttatccggcggtcatcgccaaagggcggacaggtcacgtcccggtctctgcttcagcaaaaaaagtgtgacctttttcgtagctgggcgtctatcagggcgtcagcaattagaggcacagcggaaaaacaataacaatggtaatagcacttaccgtatgaacgctgcattcgta

SEQ ID NO: 166661 - DNA, 114 bp, Saccharomyces pastorianus
atggagctgggatagaaacgtaatggcccacatcaaaaacatcatggccaacgttaggatgactgtgctcctccaaacactataccgtaaaaacacttcttgttagtaaaaaaa

SEQ ID NO: 166662 - DNA, 216 bp, Saccharomyces pastorianus
tggcacgggactcttgcaaaactgtacatacgtttggttgttctttggggccattatccagaatagcacggacagtgcactaaccactatgaatacaccggcaacagtatagctaaattggtcacgcaaacagacagattagttagtagaaggaaggagggggggaaggaggggggattggcgcacatacaaactactcattgctctttgttcttt

SEQ ID NO: 166663 - DNA, 153 bp, Saccharomyces pastorianus
atattattttgtagaattatcgattcccttttgtggatccctatatcctcgaggagatcttctagtatattctgtatacctgtatcatagcctttagcaacaatagaatcccaacaattatctcaatattcaccaaattctcatattccaaca

SEQ ID NO: 166664 - DNA, 342 bp, Saccharomyces pastorianus
atttcaggcgcggcgcacacaccccgcatttttcattcaccgggtggtgtgccggtgggccccccccccttgaaggggggggggaggggccaccaggccagcaagtcacaccaccctgcgctggcgcccagcgaaaatgcgcgcccatataaatacccgccggtcacgaccccccagggccactcgctacacaggacctagaagtaacaacaccacaacacaacacaactcaccacaacatgtcttttgacgacctacacaaagccaccgagagagcggtcattcaggccgtggacaagatctgcgacgagttcgaagtcacccccgaaaaactggacgagc

SEQ ID NO: 166665 - DNA, 345 bp, Saccharomyces pastorianus
gagggacaaacttttagggacacgtggcacgattcttttctcgtcacgtgctcatcccttacccagtcgggcggcgcctctttttcccttctctctctctttctttaatatccagtttccaatttgccaccgtgtaagtttctgttgtggtgttgcaacacaacatatcctatctcaccgttgtattacacacacacatatatatatatatatatatttgtatttgtatttgaaatttgtatagttttttctctctcgtgcaaggtcgtccccactcaagtcaccaagctaaaagttcaagaacataatgaagttttccgctggcgccatcctgtcatggtcctc

SEQ ID NO: 166666 - DNA, 132 bp, Saccharomyces pastorianus
acatcggaggccactgccatggttgtggccaatcatggtgtagtgtgtatcgatgagtttgacaagatgaccggtgtcgacagattcaccatggatgaagttatgggacaagagaccgtgaccttgttaaag

SEQ ID NO: 166667 - DNA, 120 bp, Saccharomyces pastorianus
attgtgggtgatccctcaatcgccaaatctcaattgttgagatttttgttaaatacggcatctttggttatttccacaaccggtagaggtttttcctgtgcaaatttatccgctgcagtg

SEQ ID NO: 166668 - DNA, 165 bp, Saccharomyces pastorianus
caacaaactgtcaaaaaagttaacgtttttgttgttttggcccagtccctgacacctttcatttattggcatgaccatatttagaagatcatcgcattgatgctcatgggtggtatggagaaatttttagacaccggttcctatttaagaggtgtcatcaatatt

SEQ ID NO: 166669 - DNA, 699 bp, Saccharomyces pastorianus
aaggctattgcatattcaccatataatgatgatggctcttgtaagtctgcagacgcggtctcttctgacttaacgttgatcaaatctaaaggtatttccaaaatccgtgtttatggcaccgactgtaattcctttgaaaccgtccaaccagcagccgtaaaactaggtattaagattaaccaaggtttgtatatcactagtagcggcgttgattccatagatgattctgttaccacattgattcaatatggtcaaactaacggttgggatgtctttgatttcattactgttggaaatgaagctatcaataatggttggtgttcagtttctgatttgattagtaaaatttcctctgtcaaatccaaattaagcgaagctggctattctggccaaattactaccagtgagccccctgtctcatttgaaaataaccctgatttgtgcaaaaaatctgatattgactttgttggtatcaacccacatgcctactttgatactagcgccagtgctgaaactgccggtacatttgttaagggtcaagttgaattaattcaaggtgtttgtggtacttctaatgttttcgtcacggaaacaggttacccatcgtctggtattcaaaatggaggcaacattccatccactgctaaccaaattactgcagtccaaaacatcttgaatgaaatggacttggatgttaca

SEQ ID NO: 166670 - DNA, 195 bp, Saccharomyces pastorianus
cttttttacctcaacagaggatactataatgagttgagtttccgtgtcctggaacgttgtcacgaaatagcgagtgccaggccgaacgacagctctccgatgcgtactttcactgactttgtttctggcgcacctattgtaagaagtcttcagaaaagcaccataaggaaatatgggtacaatttggcaccccac

SEQ ID NO: 166671 - DNA, 156 bp, Saccharomyces pastorianus
gcatttccaaggcacaagaatgttttctcacagtgtacatacttccgaagaatccctttagggtgccttcagagatgcagctgcagcttttggccaagaaaaagctaaaaccaaatttgctttgaaccctcgttcagaggccatctaatctttgtg

SEQ ID NO: 166672 - DNA, 405 bp, Saccharomyces pastorianus
gccatcgtcacattgctgggactagctaatgttgtctctgcgactacagcggcatgcctgccagcaaactcaaggaagaatggtatgaatgtaaatttttaccagtattcattgatggattcttccacgtattccaatgcagcatatatggcttaccaatatgcagacaaagtcaaattgggctctgttagcgggcaaacggatatatctatcaactataatcttccttgtgttacaacttcagggacatatcagtgccctcaagaagatgcatatggtaattggggatgcagaggtaaggggagatgctccaacagtcaagccgtttcatactggagtacagatctatttggcttttataccaccccaacaaacatcaccttagaaatgacaggttacttttta

SEQ ID NO: 166673 - DNA, 180 bp, Saccharomyces pastorianus
atgttatctcttataaatagaagtattcttcattcaataccaattactcgtcacattcttccaatccgattaatattggttaaaatgaaccatgtgcaaatcagaaacataaaattatatcactttatttcatatggtttcatgcttacaaagcttactgtctttctctttaacttattt

SEQ ID NO: 166674 - DNA, 582 bp, Saccharomyces pastorianus
aaagatactgaaattgaagataagaaaagcataggtttattgtcccttggttatctggaccttaatggcttgtttgtacctcagaatattttcaaaaatagcttaacctggaagttttatgagtctttcaagttcttagcgtttcgtacctgggtaatagtatggttactaccaagcctttgctggataatgtccagcaagtgggtttactcatttatgatttctctttttgtcctctttttcgagccaatatttttacctgtcattcatgtatttttctcataagctttcgaaacaactccctgtatttacaaagaaattactaaaaaaacatcagatacgggcatcaatgatcggaaagttgtttcaacaaacctaattttgtacttgtatacaaatatagtctgggatagtaggtactttatcaatgcaacagattgtcaagaagtgtccaaaacaattcttcttcaaccattctctttgaaaaaagacgaaattgctaaggttaagtcatttcaggattttgccccttgcataaaagaggcatttgaagtttctttgaaaaaagatgtatgatactgg

SEQ ID NO: 166675 - DNA, 1143 bp, Saccharomyces pastorianus
atggacggtagaaatgaaaaaccaaccactcctgtgtcagattttcgggtgggaagctccgagcaaagtcaagcgggagtgaatcttgaagatagtagtgaccatcgcacttccaattcagccgagagcaaaaaaggcaatttaagtggtaaaagcatcagtgatctaggtatttctaataatgataacaaaaatgtaagattcactgctgatacggatgctctagaaaatgatttgtcttcaagatctacagaaaccagcgataattctaagggcacagatggacaagatgaacaagataggcctgctcgccacaagaggaagcctaaagtttctttcacacatttaaggaacaatggtaaggatggagacgatgagacgttcatcaagaagataataaataacctgactggaaatcaagggggtttggtccctggcttggcaccaataccttcagaaaatgaaaatgggaagaatgatatagaaaaaaataaccgtaatgaagaaattcccttatccgatctagctgatgcgtctaaaatcgtagacgttcatgagggcgacgataaagaaaaactggaggctctcaaattagaaggtgacgtaaattgtacgtcggatggcgaaacgttaggctcaagttcaaaaaattcatttctggcgcctgcagtggatcattttgatgattatgcggaaaacaattcatccgacgataacgaagggtttattgaaacctccacatatgtaccccctccatctcaagtgaaaagtggagtactagggtcattattgaaactttaccaaaatgaagatcaaaattcaagctcaatcttttcagattcacaagctgtaacaacagatgatgaaggtatttcttctactgctggaaacaaagacgtaccagttgccaagcgtagcagattacaaaatttaaaaggcaaggctaaaaaaggcagaatgcctagactgaagaaaagactaaaaactgaagcgaaaattacggttcacattgcagacattttacaaagacaccggttcatcctacgcatgtgtagagctcttatgatgtatggtgctccgacgcataggcttgaagaatatatggttatgacttctagagtccttgaaatagatggtcagttt

SEQ ID NO: 166676 - DNA, 78 bp, Saccharomyces pastorianus
ttttcatttttttttacaattttggcagttacgtctcgagctatttattataagagtcagaattggcgcagggagtgt

SEQ ID NO: 166677 - DNA, 270 bp, Saccharomyces pastorianus
tcaacttccggttcatctgcaccaagtgaaaccgtcgaaaaggaagaaggattggatgaaaagaagagacctcgtgaagaggaagccaaaaatggcgatgacgacaacaatgatgatgacggcgacgatgatgatgatgacgatgaagatgatgatgaagatgacgatgaagccccaacaaagagacgtcgtcaagagaggaataggttcttggatatcgaagccgaagttagtgatgatgaagatgaagatgaagacgaggaggattca

SEQ ID NO: 166678 - DNA, 867 bp, Saccharomyces pastorianus
atgtcaatttaccatctgccaacgctactgaacccgttgattaacgctatatttaactgccctgaaccagacaaatcgccgttgaagaagcttttcgctaatttgcaaacccgtaggtttattcttctggcgcctccttcccacctcctgttgaactatcacgatgttaaaactaaactgccattacatgagctttgttataatgctgattttatcaactcccacatattgttaactactgagaactcttatataaacacgactttacgagacgatcattacgaaactttagatggtaagactgtagttattcaatggaaaaataatgtcattcacactttgaatggattctctctcaggcgaagacttaaaattttggatacgaaaatattacccaatttcaatgactactttgaaggggctgaatatttcgctatattatatatagatcagcctctaggttgcgaatttgttcctaacgactacttgcactgtttcaatagttatggggaaagtccaaaacttgcacgcaatgcacccaacttgctaatggatacttcccaactagaaagatcatcatttgagaatatattacatattcatccggcttggttaacacaactgggtcaattgttttccaattacagaagagttgctcctaatgacgatccttcgaagaaaatgtttgaagaacttgtagaacaagcatttgatggaatgaaatctgactcacttttcaaaaacttttctaacctttatgatctcatacacgactattttgagctgaatctttatgaagacatttggtccagacttacaatacattttaaaggctatgaagtagatactgataactgcgaatatttt

SEQ ID NO: 166679 - DNA, 315 bp, Saccharomyces pastorianus
tgttggaatggcgaactaagcacatcgacgagtcctgaattatccgggaacagtacatatgaaaacggtgcaattgcatctgcgatctctgaagctactgatggtatccctataactgctcttttaggctcctcaagttccgggaacaccacttcgaactcaacatctgtttcctcttcgaattcagcaaattcatcaaataccatctcgagctcaaactcttcatcctcctcctcctcctcctcagtagcttcctctcatgcctcaacagcaagcaaagcgaatggcgccgctatttcttacgcaaacactagt

SEQ ID NO: 166680 - DNA, 330 bp, Saccharomyces pastorianus
atgtctctttcttctacagcggaaattaaagacattgatgttttgcgtttatttattgctattgctttgcggaactacttgacagctaaagattatgtagacgtggtaatgtactactttgttccgtcttaaagttattgttcagagtccaaaaatccctaagattgacttgcccaatgaacatcggtgatatactgaaggccaacaaggagttctttccatcgagtggcagtagttcttccccctctcgagcacgggcccctttcggcagttgcgattttcttccagaagggcccgattgccgcatcgggaaatggctctttctctttt

SEQ ID NO: 166681 - DNA, 603 bp, Saccharomyces pastorianus
aatatacaaagaggaaacttcaacgcttcatttgaaaatctgtacagatcttacaatttgggaatactaccagatcgatcctcagctgcaaatactttactgtcaagtatgtctatggtgacaaatatcggcattattgtgtatggctcaataattttataaaaaaaggaactattggttcttagtattttcttgctagaagacatattcttaccaatcctttcataagctaattatgccatccatatagcaagagaatccggtgggggtgccatgcctatccggcggcaacattattactctggtatacgggcgtaactccataatatgccaccacttacctttaacatgttcatggtaggtaccccacccagccataaggaaattttcaaaggcgttggatcaaaaaataggcctttatttcatcgcgtgattgaggagcataacatgtttagtgaaggtttcttttggaaaacttcagtcgctcattattagaaccagggaggtccaggctttgctggtgggagagaaagcttatgaagctggggttgcagatttgtcgattggtcgccagtacacagttttaaaaagtcagagaatgta

SEQ ID NO: 166682 - DNA, 543 bp, Saccharomyces pastorianus
tttacttttgggcagtcaacaagtgaaaataagatctctgagggaagtgcgaaacctacattctctttctctaagtcagaggaggaacgtaagagtagtccaatttcaaacgaagcagctaaaccctcgttttcgtttccgggcaagcctgttgatgttcaagcaccgacggatgataagactctcaagccaactttttcttttactgaacctgctcaaatagattcatctgttgtttcggaacctaaaaagccctcctttgcgtttgcgtcttcaaaaacctcacaaccaaagccattgttttcatttggtaagtcagatgcagctaaagaaccaccaggctctaacacctcattttctttcactaaacctcctgctaatgagacagataaaagacctacaccgccatctttcacctttggcggttccacaacaaataatacaacaaccactagcacaaaaccatcttttagttttggggctcccgagtcgatgaagtcgacagcaagtacagcggcagcaaatacggagaagctatcgaat

SEQ ID NO: 166683 - DNA, 159 bp, Saccharomyces pastorianus
ttctacatacctaatattattgccttattaaaaatggaatcccaacaattacatcaaaatccacattctcttcattgagatccttcaactactttgtttccacaccgttctgtgagattgatttgtataatcacatttttaccggtaacgttaactttt

SEQ ID NO: 166684 - DNA, 567 bp, Saccharomyces pastorianus
cattcatcacgtataattggacatccgtggagttccaaaaggagtataaacgcaaatagtaaagctaagatataagtagtgtctaagtaaatgacttctttgtaagcgtacagctaaagtttaccgataagttacgataagaaggcagatgtcacatctttagatgaagatttgagacaactaagagaaagcaaattttcaccggaagcaattccaaatatcaaaatatgggtatataaatctgtcctaaaagagatagctcctcctggagacttattggaatgcttgaaagatggaacagtcctatgtaagctggcaaatattttatatgaagcagacacaggagaagctaaccatattagttggaagagctctaaaatgccatttgttcaaatggatcaaatttcccaatttttatcattttcgagaaaatatggtgtgcctgaagatgaactgtttcagacaattgatctttttgagaaaaaggatcctgccattgttttccaaacgttgaagtcactatctcgttacgccaacaaaaaacatccagatagatttccagttcta

SEQ ID NO: 166685 - DNA, 345 bp, Saccharomyces pastorianus
tacatacatatatatatatataatcgcactacatgcacgaggccttggcatactccctcgaaggatcgactgtttgagtgcatccttcattttctgtcgcaattggcgagaataagagcacctgcaaatgggtgcacttttgaagatgggccttgcctgttgggcctgcctaagtcagcctcgcctagctctaggcggagggtctttatcggcgactcagcgtactgtagggaccaccccaggcgcaacgggctgactcgcacccggaaagtaaagcttatttctgtcggacggagagtgtcctttttctctcgcagaagaccatttattggtcctgaaacggta

SEQ ID NO: 166686 - DNA, 129 bp, Saccharomyces pastorianus
ttaattgttgggattccattgttgttagagcctacaatattaggtacacagaatatactagaacttcttctcgaggatgtaggaatcgtcaaaagggaatcgatagttttacgtaacgatattacttta

SEQ ID NO: 166687 - DNA, 267 bp, Saccharomyces pastorianus
gattctattgttggcaagggctttattttattatgtgtacagaatataatagaatttcccctgagagatatacgaatcctcaaattggaatcgatactcctatataatacaattacaattatttctccctccctttcgtatgtttcattatcctagtacattatcaatccttatatttctgcttccattaaattttaggactgtttctcaatgtttagatcatcttcttacactgtatatgataatatacgagtggcatgaatacta

SEQ ID NO: 166688 - DNA, 306 bp, Saccharomyces pastorianus
atgtctataaatgctcttctgctgtgtgtgttgcgttttgctttgctagtatgaacaggatcagtgattgttctttgtccttccttttcctttgcctcttcctcttgttcttctcactccactttttctgttttacccgtaaacacgttacaccgtacgctcccacttaaatgccacacacttaaattccgattcgattcgattccgagtttgacttcgtcttcgtctccttttccttttcctttttttcccaccacttcgtgcagttgcacttgcctctcccactctgtctttttttttcccatt

SEQ ID NO: 166689 - DNA, 492 bp, Saccharomyces pastorianus
atggaggaagtgaaagcagtcaattctgccgctaaagttttgtgctctgtggatcctcagtttgatccttctaaattaacactttctgtgggcgctactccgacttccaattccttgaaactcgataataaaagtacccttgttaaattcgttactactcaattagttagtacgcttgaaatccactgtggtaattactgcatgtatgacctgcaacaggtggcaacaggctgtgtccaagatcacgaattgtctggttttgtattaggaacagtactatcatcttacccttctagaggtgaattgttgagtaatacaggagtgatgtgtctaacgcgagaagcatcctcaataaaagggtttggaatatgtgccgatttggaacatgtgttaaaatccgagagcttcagtagggaatggtatgtagcaagggtctctcaagaacacgggatactgaggccaataagaaactggaacgaaactactgcgtta

SEQ ID NO: 166690 - DNA, 522 bp, Saccharomyces pastorianus
atgtcgtttactgctccttcagatcccgtcaataaaccgacaaaagtgaaggtatcacagttgtgtgaactatgtcattcaagaaaggctctcattagaagacccaaaaacctgtctaaactttgcaaacaatgcttctgcctcgtgttcgagacggagatccataacactattgtagcaaataacttgtttcagaggggagaaaaagtagccgtgggggcctctggtggtaaagactccacggtgttagcgcatatgctgaagcttctgaatgaccgttacgattacggcattgagattgtactgttgagtattgacgaaggaatcatcggatacagagatgattccttggccacggtgaaaaggaatcagcagcagtacggccttcctttggagattttttcctttaaggacctctatgattggacaatggatgagattgtatccgttgctggtataaggaacagttgcacgtattgtggtgtttttagaagacaatcattggaccgtggtgctgcaaag

SEQ ID NO: 166691 - DNA, 342 bp, Saccharomyces pastorianus
tttcgagcagtaattaccattttaggtttgattacaatcacagcttcagcagaatttgatttcgacgtaggctatgaagagtttgtccgtatcaaccctgataagaccttctgagaaagtgagattggcctttacgttggttggaccgagggtggtcaacggcagataacaacgataccacataattccacgttggcggcatcactacaagagtagaatggttgtggtggtaatggcacagaaacctccatcgctacgtccacacttacgatgagtgatatacctatcgctacgataatgaagcacagaaaaagtgtacttatcatattaccgcaactatgt

SEQ ID NO: 166692 - DNA, 243 bp, Saccharomyces pastorianus
cttaagaaagagttccattcctcaaagagcttccagccatttatccacttagacactcaaccaaaatttgcaatttgtggtttaatcgttacattagctgtattatcatctgccctgttcgccgtcggttctaaatcttcatacattaagaaactcttcttctacacaattttaagtgtaattggcagcttgtttgctggcttgaccactgtttttgcttcgaattctttcggtgtctacgtc

SEQ ID NO: 166693 - DNA, 144 bp, Saccharomyces pastorianus
gtcaagttttcagttcaaaagttagctgctatttcaaatataggcccacaggatgttcctactgtctaaaaaaaagtgaggtctgacggatctgactacgcttcaactgataattacgaactcatggcaatatttactgggccc

SEQ ID NO: 166694 - DNA, 213 bp, Saccharomyces pastorianus
gggtgccgaggtgccttgaaaaacccttttgcgcgcctgcgaagtttccgctttcggtcaaaaagaaaatccgaatttagattaagatcctcgtacagaagcctatgcccaagactgaattcagtctgctctaaacggcttccatggaaaaaatatttctatctcttgaaatccgtacaagatagtaggcgtgtgttgggagtcgtatactgt

SEQ ID NO: 166695 - DNA, 399 bp, Saccharomyces pastorianus
ctcactccaccgcttttatattctaaaaatttaactgcatcaaacctcttcgagccgactacctcactatcttcatctccgacatcttcaactatcccctttgacgagttggagaagctagagtccttattaatttcaccattgctgctacctcaggatggtatagtcaatcctaagcaggagtctaatccttctcgtgttgacgaatatgatgaaaatgaacattatttgaacttagccgactctcttagactcgattctagttaccaattgcattcaaaggcacatttgggttacgaaaacaacttgccacgatcaaacgatctaattgatgatcatttgatctcagatcagatcattgagaataactacaacctatggtttagactatcctccagt

SEQ ID NO: 166696 - DNA, 222 bp, Saccharomyces pastorianus
atcacggaaagaatcaccacaccaaacgccgataggacggtacagcaccatgccttgccagtggatacaacaggtttcattttattgcggtgcttgctttcgggttttgttctttatcgtaatagtctttactaacttacgctgcttttgttcttctcccttaagcgattttttcagtatttgtcaaaaaataatggcgtgtgaagcgataagcaatttttt

SEQ ID NO: 166697 - DNA, 108 bp, Saccharomyces pastorianus
agtgttgcacataccgtttatttggctgcattggtatacctgatgtttttcgtattctgcggattccaagtatacttggccagaagaaaaccttcgatcgagttgcgt

SEQ ID NO: 166698 - DNA, 444 bp, Saccharomyces pastorianus
tttaacgacggtaatgagaacttcgaagattttgatgtagagcatttctctgatgaagagacctacggagaaaaaccacaattcaaggagggcgaagccactgatgcggacggtaagaccattgtcactggtggtaatggaccagaagatttccaacaacaagagcaaataagaagaaagacacttaaggaaaaggctattccaaaggaagaaagagccactaccccatatatgaccaaatatgaaagagcaagaattttgggtacaagagctctgcaaatttccatgaatgccccagtttttgtagacttggaaggtgaaactgatccattgcgtattgccatgaaggaattggctgaaaagaaaattcctttggtcattagaagatatttgccagatggttccttcgaggattggagtgtggaggaacttattgtggatttg

SEQ ID NO: 166699 - DNA, 381 bp, Saccharomyces pastorianus
caaagtatccagcttacaaagtctttgtattacgaaaatagtgaaaatatatccaagtggcaaaaagaggctgatgaatcatcacagttggtatttaacaaattgagagatgtccttggtggcgtatcaaccgctaatttgaataatttggcaaaagcactatcgaagaatagggccctgaatgatcatactttgcaacttttcttgaagacagatctaaaaaggttaacttacagcgattgttctaaaatttcatttgatggttacaaaacgctagccattttttcgccacacctaaccgacttatccctacacatgtgtgggcagttgaaccatgaatcatcgctttacattgctgaaaagctaccgaacttgaaatcg

SEQ ID NO: 166700 - DNA, 834 bp, Saccharomyces pastorianus
tccaacaacaataatagacaatacagacagaaccgtaattataacggcaacaatcatggaaataattataacttcaacaacggtaatggctatataaagggctggaacaagaacttcaataaatatagaagacctagctcttccagttgcaccggaaaatcactactttcaagatatagcatgagctataaccacaacaatggttccaccaacggctatacaaggcgtggctccactagtacggttcaacattcgccaggcgcttatattccaccaaatgctagaaaccatcacgtcagccctagcaatcatcttttaagggttccacaatctactgctccggatatctccactgttttagatagcaagccttcatatcacgatcattatactcaggataacatagactccgagggagaacaagattcggacgacgttctattcactcttgaagaaagtgatcacgattttgtcaatggaatggacaatttatccatacatgatcacttgccaccaataacaacaagtgcccaaagcggtatttttgctcatgctaataacagccacgataacagcgatactagcaatactaataataatgatcaccatcacaatagacaatatattccacctcccttagcaacatcattgcacatcaacaacaataatgaaactaacgaactacctgatttattaaaatcaccagcatcttccgaagcacatctaaatttatcttccggaccagttgatccgatattgacagatagtagtaatattggcaacagatattcacgctcatctgattctaaagaacaacaagagcaagatcaagat

SEQ ID NO: 166701 - DNA, 99 bp, Saccharomyces pastorianus
ccgttccacgctctgtccacggagatatgtttcgaccgcaacaccctcgttccctgtcttcgtcgtggccatggtcacggcaacgttgtttgctttgga

SEQ ID NO: 166702 - DNA, 153 bp, Saccharomyces pastorianus
aaaagagaagtggtctctagcgggatcgaaccgctgatccccgcgttattagcacggtgccttaaccaactgggccaagagaccaggaatttctgttggagtctctttacaggcgatcctgtgttgccccgaacaacaccactgaagcaactt

SEQ ID NO: 166703 - DNA, 132 bp, Saccharomyces pastorianus
atcgatggatacgaattgacatttacaaacaacaagcggtcggataagtcgataatgtcggaaaaggtccaaagggattgcaatcctccaataacacaagggtaaatttggtctagcgggggtcaatacttt

SEQ ID NO: 166704 - DNA, 231 bp, Saccharomyces pastorianus
aattgtgtgatgatttttgggattccattgtttcttaatgttataaaactatgtatatagattgtactagagattctcctcatggacttaggaatccgcaaaaaggaatcttcaatcttgcataatgttacaagtgattctcttcctcttttgtacgttattgttcattgatcctattacattatcaatccttgcgcttcagcttccattaatttcgatgacaatgtgagt

SEQ ID NO: 166705 - DNA, 279 bp, Saccharomyces pastorianus
atggaactttcccagtacctcaactacgcattttcctttgcatattatattatcatccatcttctttgcctctcatatatttacgaaataatacataaaaaatattaaggatggatagcacataaacataaaaacgtctttgtgcgtccaagtaaacttgaagacacactctcgttatataaaactgcgaagaacactaacaaagaaggtgacttgcgcttaattagttttattcccttgcttctaaagtccgtaaaacattctattagagtctataca

SEQ ID NO: 166706 - DNA, 282 bp, Saccharomyces pastorianus
ccacaattggacatggattggtcttacgagcgataccagagaggttacgcttacgtctcttgatcatggtacaatgttcaccgtgactggaagaaggttaccggttacggtaaaagattgaacatctgaccaccagactatgtttctaagtacaccaacgaatacttatcttggccagaaccagaagaagtttctgatccattagaagctcaaagattgatggctcttcaccaagaaaagtgtagaaaagaacacactttcaagagattggctcttccagct

SEQ ID NO: 166707 - DNA, 666 bp, Saccharomyces pastorianus
gtccaccaagaaccatacgttttcaatgctagaccagatggtgttcacgttatcaacgttggtaagacctgggaaaagttggttttggctgctagaattattgctgccattccaaacccagaagatgttgttgccatctcttccagaacctacggtcaaagagctgtcttgaaatttgctgctcacactggtgctactccaatcgccggtagattcactccaggttctttcactaattacatcacccgttctttcaaggaaccaagattggttattgttaccgacccaagattagacgctcaagccattaaggaagcttcttacgttaacattccagtcattgctttgactgatttggactccccatctgaatttgttgatgtcgccatcccatgtaacaacagaggtaagcactccatcggtttaatctggtacttgttggctagagaagttttgagactaagaggtgctttggtcgacagaactcaaccatggtccatcatgccagatttgtacttctacagagacccagaagaagttgaacaacaagttgctgaagaagctaccaccgaagaagctggtgaagaagaagccaaggaagaggttaccgaagagcaagctgaagctactgaatgggctgaagaaaatgctgacaacgtcgagtgg

SEQ ID NO: 166708 - DNA, 387 bp, Saccharomyces pastorianus
atgatatatcccttattcaggctatgtattctaggtacgtttctatcgggcagctatgcgtgtctcgaaaatagtatgcaaaagggtattgaaggtgtaagtctctctaataatagtatgcaaattaatagcacttcggcaaattctgcggtatttggtcaatcagatgctctttcaatgaattattcaactgaaagtattttaagtaataatgcatgtgattataggaagaattcttcgtatccagatactatcaccaatgctactgaggcctttaataacacccttgaaacttttgttaatttgcaagcatacaaggagctttattatagtatgcggacactgctacagaattttttttaccaattgttgctaactgtgaattac

SEQ ID NO: 166709 - DNA, 1086 bp, Saccharomyces pastorianus
gtgaaagaaagtaaaatcgaagatatgaaaagcgtgggtttattgtcatctgaacatctcgtatcgaaaaaaattgtcttatctgcgggccttttttagaaacggctctatttggcactaatatcagagtttcaactccgtagtatttccttactgactgctactatggttacctattactgctgtttcgtgcaaaagctccgattgtcagatttatccatttataactgctatttctctctctgcatgaatagcatttttattccttattcaaatgctgtaccgtcaaatgaactcatccagctttataaacaaatcatcaagaatgctctaggtatagatgctaggaactggaattcggtggtaatgaattttaatttataattgtatgaaaacaaactttggaataccacgtacttttttttaagtggtacgaactgcaaagaagcattcagaaaaacacttccggagccattcctcttgaagaagaaagaaacgctaagatcaagttattgaataattctgcccattttattggagaagcactacaagcttattctacaaaagttgacaaagagtggaagttgataaatactgaaaaaaatatggagatatgtcaacttggagaattctctgctttctaaagaagttcactactttagactcactcgggttttacagaggattctcagtgttcaggaattaccattccttcttaattcaagttttgtccatatttcacagatttatgacatcctgttctttaatctttctcggattgtcaaatggattatcaatgcttattccttactattgtttctttcttatttgaattgtatctttgcgctacgcaattttgatcttctatgttatcttccgtctataggaggcttttttctcgaaacactaaacgatttccaaaatccaagaattgaaatggtgaacatgaaacacaaaatgcttttcttatcaagtactataaattttcgaggaagtgattctgagaggtgagctggaatcacaaagaaaatgaacagatgtcattttgagaaaacgctttggaagaacggagagtatttctttgat

SEQ ID NO: 166710 - DNA, 513 bp, Saccharomyces pastorianus
gccccaaagtggtatccttccgaagacgttgctatcccaaagagaactagaaagactgctcgtccacaaaagttacgtgcttctttgattccaggtaccgtcttgattttattagctggtcgtttcagaggtaagagagttgtttacttaaagcatctagaagacaacaccctattaatcaccggtccattcaaggtcaacggtgtcccattaagaagagtcaatgctcgttatgtcattgccacttctaccaaggtttccgttgaaggtgttaacgttgaaaagttcaacgtcgaatacttcgccaaggaaaaattgaccaagaaggaaaagaaggaagctaacttgttcccagaacaacaaaagaaggaaatcaagactgaacgtgttgaagaccaaaaggttgttgacaaagctttattggccgaattcaagaagaccccattgttgaagcaatatttgtctgcctctttctctttgaagaacggtgacaaaccacacttattgaaattc

SEQ ID NO: 166711 - DNA, 387 bp, Saccharomyces pastorianus
ttgaaatttttcaaaaatggtgcacgggcttcttgtgcacgtggtttgctttcgagcctttccggagtcacgtaatatttattacccgcctggcggtattaagttccctgtcctgcctcgcggcagattctgggcaccacgggtacgggtggtgactgggttcttggcggtgcggcgttcccgtgcactgcgtgggtcgtcgcaagaaaaagaaacaaaacgagcccacgtcgtgcaagagcacagaattttgtcagttacataataaggagcaatttcgaatcaactgaaatttggaacaagtgggcgatgcatccattttaaggctaatttgtatcataacgtcactatcagccattgtcacttgcaaccgtcgtctgctaccgc

SEQ ID NO: 166712 - DNA, 360 bp, Saccharomyces pastorianus
ttgctgttctcatgcgtgtaagctagttgcagtttcgtttgtatgaatatggtgtaaatttagaattcgatattgtcttgcccgaggttttcgagattttcacagttccattttgccccacacctggtgcttattgtatttctaccaaggacccatacctcacgcgttccacttgcacccgtgcatttcgaaaggccagtcctgcaaaaagaatttcacgtaatactttgaaaaagggcttacggcatatgtatgtttagttttctatttatgagtccctagtggcaaaagaactactcttatgtttgggaacgaaaacaaagctttcatcagtcttgccgaaaaacatgtcacttagct

SEQ ID NO: 166713 - DNA, 714 bp, Saccharomyces pastorianus
gaagctgttactctatattgtaaggcttacaggtacgatactgcatgcctagtggcaatcaaaggaaagaaagaggaattgttggaagaagttgtcgaccctggtttgggtgaaggtttcggtataattgcagaattgcttgcggattgtaagggccaagtaaattcacaattgagaagattaagagagttacgagctaaaaaagaggaaaatccatatgccttttatggtcaggaaactgagcaagctgatgatgtttctatcgcaccttctgagacatcgacgcaagaatcatttttcacaagatatacaggtaaaacggggggaactgcaaagacaggtgcctctagacgtacagctaaaaataaacgtagggaagagcgtaagcgtgctcgtggtaaaaaggggaccatatatgaagaggagtatttggttcaatctgttgcaaggttaattgagagactaacccaaacaaagtctgatgctgtgagagttgttgagggtctttgcagaagaaatatgagagagcaggctcaccaaattcaaaagaattttgttgaagtactcgatttattgaaggctaacgttaaggagatttattctattagcgaaaaagacagagagagagttaatgaaaacggggaagtttactacatcccagaaattccggttccagagatccaagatttccccaagagtcacatcgttgatttt

SEQ ID NO: 166714 - DNA, 288 bp, Saccharomyces pastorianus
acttaattaaatgttagatgggtacaagaaaattctgacagaggcaccgaaagtcttggctggcaagttgtttctaaaggtagctctaacgacaccagagttaccgtgagttctggtgactttgccccacataactctaatcttggaacctctgacttccttggaagctctgtaaacgtaggcgatacgcttacccaaatagaattgagcttcttgtggagtggcaacaccttcaatcttaatcaaagagacatttgggttgttaactctcttagatctttggtagga

SEQ ID NO: 166715 - DNA, 78 bp, Saccharomyces pastorianus
tgctccaggggaggttcgaactctcgaccttcagattatgagactgacgctctgccgactgagctactgaagcagtct

SEQ ID NO: 166716 - DNA, 312 bp, Saccharomyces pastorianus
accctcataacatatttttcacttttactgcttagatgcagcgcagcttaggttggcggcgaactagcaccacccttggaaagagacaatactactcgtaccgatgccattaacctgttacggtgcttgtgggttttcgggtacccagataactcagtagtaactgttcaggatgaaataccggtcttaggaatagtaattgacaggccgcctactaacactaccagaccaaataaggtagccattcattgtctctcacgcttttcctacgggctagcgttcttggagttctatggtatgtttccaagcggg

SEQ ID NO: 166717 - DNA, 126 bp, Saccharomyces pastorianus
gataataaacgtcgaagaaaaaatataatcaaacttcttccggataacacagaaacaagttctacaccgagaattaaaaccgtcctctacaatgaagctatttcaagaaatgctgacctcaaagaa

SEQ ID NO: 166718 - DNA, 234 bp, Saccharomyces pastorianus
accactttggtcatcatcacttcttgaaaagaccatatctattttgaaactgtctcctcagctttggttttcactgctaccgtcactgccaatgacgttgtcactcaatacactacctggtgtccattgaccaccgaagccccaaagaacggtacttctacttccgctccagttaagtcaactgaagattcagagaacaccacctctgctgctccgacccactctgtgacctcg

SEQ ID NO: 166719 - DNA, 264 bp, Saccharomyces pastorianus
gtctggtctgagttgttggaaatactagcgtattccgtcgattgctccgtcaatggagacttgtacaccaacacatcgggggagatttcaacagctgacatatttagttcgtggaaattgcagaatacccttttacctagactactaacacaccctatgcgtcaaaacacaccacacattacacaatgcactttctgctaaaaatcccgatcgactattcaccttgggaaaacaacaagcgaaaaaaaaagtgagggcgagaag

SEQ ID NO: 166720 - DNA, 318 bp, Saccharomyces pastorianus
agtaaaaacctgctttacatttctgcagcaggtattgcatccatttacatagttaagaccatagtgaagaccagaagagacgccaaatttacaccacaagctcggggaaagaacggagaattgaaggaacgtgattattatgataatttggcgcaggtgaagccgggattccccctacccaaacaagccaataacaacgctgacggctctgaggaccacgggttggtgagaaagagtaaatatgaaggtagtggacttagtgcggcaacaaggaaaagaggcgataaattagggtttctagatagaagaggaaacgaa

SEQ ID NO: 166721 - DNA, 1992 bp, Saccharomyces pastorianus
ttacaaaaaggccaccagaaccctaaggatgttgaaaatagtgcaggaagctctccggattctgctaccacagaaaaaaaactattagatgatagttctgagggttccgaaacttcttcagataatgccggattgggtctttccaaatcagaagcaattttccactggcgtgatttgtgctatgttgtccctgtgaagggcggcgaaagacgtattttgaacaacgttgatggctgggtgaaaccaggtactttgactgccctaatgggtgcttcaggtgctggtaaaacaactttattagattgtttggccgaaagagtcactatgggtgtcataacaggtaacatcttcgtcgatggtcgtttgcgtgatgaatcgttcccaagatcgattggttattgtcaacagcaggatttacatttgaaaacagctacagtaagagagtctctaaaattttccgcttacttgcgccaaccttcctcggtatccattgaagagaaagacaaatacgtggaagaagttattaagattttggaaatggaaaaatattcagacgctgtcgttggtgttgcaggtgaaggtctaaatgttgaacaaagaaaaagattgactattggtgttgaattagctgccagacctaaattactggtgttcttagatgaaccaacatcaggccttgattcccaaactgcttgggatacttgtcaattaatgagaaaattggccactcatggtcaagctattttgtgtaccatccatcaaccctccgctatcttaatgcaacagtttgacagattactattcttgcaaaagggtggtcagactgtttattttggtgatttaggggacggctgtaaaactatgattgattactttgaaagccatggtgctcataaatgtccacctgaggcaaaccctgctgaatggatgttagaaattgttggtgcggcccccggtactcatgccactcaagattacaatgaagtatggagaaattcagacgaatacaaggctatccaagacgaattggactggatggaaaagaacttaccaggaaaatcaaaagaaccgaccgctgaagaacataagccttatgcggcaccattaggttatcaattcaaaatggttaccattcgtctatttcaacaatactggagatcacctgattatctatggtccaaattcaccctgactattttcaatcaagtcttcattgggtttacttttttcaagtctgatagaagtttacaggggttgcaaaatcaaatgttatcaacattcatgtacaccgttattttcaatcctatgctacaacaatatctgccatcttttgttcagcaaagagacttgtatgaagcgagagaacgtccatcaagaactttttcgtgggtcgcgttcttcgtatcccaaatcattgttgaaattccatggaatattttagcaggtacacttgcctattgtatttactattacgcggttggattttattcgaatgcttcaaccgctggccaacttcacgagagaggtgccttgttttggttgttttctattgccttttacgtgtacattggttctatgggtttgttagtgatttccttcaatgaagttgctgaaacagcagctcatatggggtctcttatgttcacaatggcattgtcgttctgtggtgttatggctactcctagtgctatgccaagattttggatctttatgtatagagtgtctccgctgacctatctgatcgatgcattattagccattggtgtggctaatgttgacgttaaatgttccaaatatgaaatggttaaatttactccaccatccggaagcacctgtggcgaatatatggctggatatatcaaaatggctggaacaggttatttgggcgacccgtctgcaacagatcaatgtagtttctgttccgtatctaccactaacgttttcttagcttccgtcagctctcattattatagaagatggagaaattatggt

SEQ ID NO: 166722 - DNA, 171 bp, Saccharomyces pastorianus
agcgtcacatcagcatcagcgtcagcatcaggctctaaggtagtgagcactgtcaaatcagcttatgtaaccacctctggctccaaggcggagactttgaccactacatataagaccacggttaacgctaaagtagcctccgtaaactccagctcgaccaacggagcattt

SEQ ID NO: 166723 - DNA, 438 bp, Saccharomyces pastorianus
atgcccaacgttcatgttataaatatatgcgtttctacgttattataatttttttcttatgtatgatatctcaatatctgtaaatacaaaaatactaaccccacccccttcgtaatggttgacctaatagtccattaactaatccattcacctatacagtagtatactgactacagttgccatgacatatcctttccttttcggactatattaggcggaagaaaaatagccataaccatagtaagaaacaataatacgggggttttttttttttgggcctacataaggtacttcaccccaatttggaaagagataacagagtctttaccacattataaatcatgctttgtcgcaagactgccagaacgggctgtaaattctttcgtttatatcattcgaaccctatcgaacatgttaaaccaattcatattaaacctt

SEQ ID NO: 166724 - DNA, 204 bp, Saccharomyces pastorianus
aagaggaaagttagagtatgcgaaaactgctcgtttggcaaaaaggctaaaaactgtattatttgcaacttaaacatcggtatcaacgatgccttttactgttgggaatgctgccgcctgggtaaagacaaggatggctgccccaagattctaaatctaggtagcaataagctggatagacatttcgagaagaagaaaaaagta

SEQ ID NO: 166725 - DNA, 303 bp, Saccharomyces pastorianus
atggactttataagcggtgaaaaggaccaagggcaaaaacgtgataccacctagcaagtagacggcgaaaaacaccttcaagctagtcattgaggtcttgtaaggatgtggatcttgctactttgttgtttgctgtctttacaactatccctttcttaattattctcttgacattttatatcgaaaagggatctgcggagaaactgagtgaaaaaagtaaaaaatgtgccatcttcaataatgtacaacagccataagtggtataacaagggtaggagagagaggggaaagagagatagaagt

SEQ ID NO: 166726 - DNA, 564 bp, Saccharomyces pastorianus
gctaacttacgtactcaaaagagacttgccgcttctgtcgtcggtgttggtaagagaaaggtttggttagacccaaacgaagcttctgaaattgctcaagccaactccagaaacgctatcagaaaattggttaagaacggtaccatcgtcaagaaggccgttactgttcactctaaatccagaactagagcacatgcccaatccaagagagaaggtcgtcacagtggttacggtaagagaaagggtaccagagaagcccgtttgccatcccaagttgtctggatcagaagattacgtgtcttgagaagattattggctaagtaccgtgatgctggtaagattgacaagcacttgtaccatgttttgtacaaggaatctaagggtaacgctttcaaacacaagagagccttggttgaacacatcatccaagctaaggctgatgctcaacgtgaaaaggctttgaacgaagaagctgaagctagaagattgaagaacagagctgctcgtgacagaagagctcaaagagttgctgaaaagagagatgctttattgaaggaagacgct

SEQ ID NO: 166727 - DNA, 345 bp, Saccharomyces pastorianus
cacacccacaccagacccggacccacagccacagaccacacaccacagccacacacaccagacccacagagtccacacccacacacaccacacccacaccacaccccaacacaaacacctactctcacgtgatctagcccacaccaatatctagccttcactatcactatccacggcccttacctcaccatctcacgcccggtactactccactacataccacctaactactaccgttaccctccacatattataccatcaccctacctcaataccatatatcattaccttacctcaatatcacataccatcactctctctaccccataccatatatcattaccc

SEQ ID NO: 166728 - DNA, 450 bp, Saccharomyces pastorianus
ctagcatattttgtgctgttcagtaaaatggcagaagttctgtttatggaaagatacatggtattctccatatgttgttctttgttgtgggtgatatgactgggcgtgttccgtgagctgcaggtgttggatttccatcttcattggacaatttgaaatactgcgcgtatcttgattatcgtgaatcttttgatttagattttctgttacagtgtttcaatgttgaatcggattttcttccattacaaaatgaagacggagtccaacgggatcgcccaaagcaataaagtctgattccggttcaattacacccttttgggcggtaacattcttattattgccagatctattgtcagagcaatagaattcattatgggtctacgaagccacataattcaacacgaatggtgtctttacgttttcgataccatgccaatgttcttactacct

SEQ ID NO: 166729 - DNA, 183 bp, Saccharomyces pastorianus
aaaaagaaactcgtaggtgtcgttggtcattttctaaatccttagaaggtattcagaaaaaactaccctgccggtcaattaaaactgcctggcaccataaaagcacttcacacttcgatttatgctcacggagcattttcattacgaacaggccacccagtctctgccctgttggaacaaaac

SEQ ID NO: 166730 - DNA, 381 bp, Saccharomyces pastorianus
gagcattttacattacgacacaggccacacagtctactgccattgtagaacaaaaacgaacccgtgcccagtgctggctagaacacctagctacttacgactttaccctcaaatatctggctggacccaagaatgtcgcagatgcaatataccgtgccgtgcttaccataaccccccaaaacacctagtccaatcggcccagagaactggataactgactgcaattacgatccgccctgttatgctacgctgattcatatgaaagaacagacgcaacacaacatcaatccctaggatatgtccgctttccgaagttaccaaaagaagtttctattgtcggagacttttcgtacgcattattccctatcagatagtatacta

SEQ ID NO: 166731 - DNA, 84 bp, Saccharomyces pastorianus
aaatttactctgatgagcctgaagcacgaatcgttaagactcttttcgaacggaatgtacgacaagtatagttacactggtcga

SEQ ID NO: 166732 - DNA, 105 bp, Saccharomyces pastorianus
gtgtgtaaacatggtatcgtacctgtcacctcgttttgcagacgtcaaagaatcctagatgcccaaactttgttttcctttgacctggccgatgaggaagtcgat

SEQ ID NO: 166733 - DNA, 333 bp, Saccharomyces pastorianus
gaagaatttcctactttgagcaatgaaagcaaaatgcgtgcaattactgtcgtcatcatcggcactggcatgagatggtataaaaggaggaaacggatgccacaatttccaacggtttagtagaaccggccgtctacaccctggaactgcccagcgtcattgacactgacgctgttggaatctataaaacgtatcggaaaggcattgagccacatcaagtaacagagagctgaaaatttcctgacagacaagtactccgctcagataaaggtctcagccactccagcagcagggccagacgtggctttgaagaagattggcgtcgactacgtc

SEQ ID NO: 166734 - DNA, 357 bp, Saccharomyces pastorianus
gccggtgttaaaacttacgaactaagaaccaaatccaaggaacaattggcttcccaattggttgacttgaaaaaagaattggctgaattgaaggtccaaaagttgtccaagccatctttgccaaagatcaagaccgtcagaaagagcattgcctgtgtcttgaccatcatcaacgaacaacaaagagaagctgtcagacaattatacaagggtaagaagtaccaaccaaaggacttgagagccaagaagaccagagctttgagaagagctttgaccaagttcgaagcttcccaagttactgaaaagcaaaagaagaagcaaatcgctttcccacaaagaaagtacgctatcaaggct

SEQ ID NO: 166735 - DNA, 414 bp, Saccharomyces pastorianus
atagccaaaacttcttcttcctcctcatcttctaataatgggtcatcgtcatcattgttagcaccgccagcgagagtggaatttccaagtaaaactttttccctcttcgaagcaaaatcgtcaacttcgttcaagccatatggatcggtctcatccctactactgggggccttgcttctgtttgatcttttagcagccatattttgctaaatcacagtgctctacagtaaatatgcctattctcttttgtaaatcacttacacaaactgttttaatgagatgaggtgagatgagatgagctttactattgaatttttttttcttcatagaagaagcgcagattgaaaatttttcatttcacactgcaaatttcaatttttcagatcagcaaaacaagaatcgaagccaatattt

SEQ ID NO: 166736 - DNA, 228 bp, Saccharomyces pastorianus
cgccccccccacaagaaaacgtttctcttgcattcaataaggtccatcgaagctgtatttggaacttccgattttattaaacttctaggggcgaactcaacctttcgcttgaacaagcttgaatgtgtcgaaaaccttagctcgatccttaaaaaagtatttgcattatcagtaataaacagaaaattaaaacatttaccaaaggcaacgagtcttccatatgaaaaa

SEQ ID NO: 166737 - DNA, 174 bp, Saccharomyces pastorianus
gaatctgcaattctacacaattctataaatattattatcatcattttatatgttaatattcattgatcctattacattatcaatccttgcgtttcagcttccactaatttagatgactatttctcatcatttgcatcatcttctaacaccgtatatgataatatactagtaacg

SEQ ID NO: 166738 - DNA, 171 bp, Saccharomyces pastorianus
accagttgtcaaaatggattatcagcttgatttacgaaatgttacttatcctatatactacataaatatgattctgttggtgttggaacgagagtaattaatagtgacatgagttgctaaggtaacaatctaatgcttacatcgtatattaatgtacaactcgtatacgtt

SEQ ID NO: 166739 - DNA, 174 bp, Saccharomyces pastorianus
gaatctgcaattctacacaattctataaatattattatcatcattttatatgttaatattcattgatcctattacattatcaaaccttgcgtttcagcttccactaatttagatgactatttctcatcatttgcgtcatcttctaacaccgtatatgataatatactagtaacg

SEQ ID NO: 166740 - DNA, 120 bp, Saccharomyces pastorianus
attgctttccctcgtctacaaacagtaattcccctgcagcgaaatactcctgttcgaattacgaaatcggtgatagtgaaaggcgcagtgagcgtgccacggatctcctctccgatgcac

SEQ ID NO: 166741 - DNA, 1035 bp, Saccharomyces pastorianus
agttcaactgaagcaactacttcaagcgatgtaaccagctcaactgaagcaactacttcaactgcccaaactagttcagctgaagcaaccacttcaactgacacaactagctcagctgcaccatctgcttcatctggctcaaccgctacgattggcccaatcaaatctgttaatacaaccatttcaactattccaaatgcttcgtccaaccttgctggtatgtatcgtacagccacttcaagtgacttcaccacttcagttgatgtaaccagctctgtcgcttccaccacttcagttgatgtaaccagctctgtcgcttccaccacttcagttgatgtaaccagctctgtcgcttccaccacttcagctgacgcgactggtccaatcacttctgcccaaactagatcaactgacgcaaccagttcagctgctcaaacgacttcagctgttaaaaccagttcgatttcttcaattactttgactgattcagctagctcagtttccccaattagatcagttgagtcaaccacaactcttcatgcaagtatttcaactgtctcaaccacctctgttacattaaccagttcagtcatcccattggccacatctaacgtaactggttcaactgctttaacgagttcagctaatccagatgcttcatctagtccaacaactacggttggttcaaccattttgactgactcaagcgcttcagctggctcatccactttggtcgcctcatccactactagtgatttgattgcatcagctcatacaacgtcttctactggacaaactacgttagtcaacctattaacttcaatcgcttcaaccgcttcagttcacccaactgcatcaaatgatctaagctcttctgttggatccacttcttccaccggaaaggttaacccaacaaaatctactacagcagcaagcacaagaagtacagttaagcctaatatatcaagcgttaagagcaactctgagacacaatacagatccagcaactcagcttctgaaatcagtgcaactcgc

SEQ ID NO: 166742 - DNA, 192 bp, Saccharomyces pastorianus
ttgccacactcaccttcacttctactgatatgtcatacgcacacggatgctacagtatataccattcttaagttaccctactctcacattccactccatggcccatctctctcactaaatcagtaccaaatgcacccacatcattatgcacggcacttgcctcagcggtctataccctgtgccatttaccca

SEQ ID NO: 166743 - DNA, 309 bp, Saccharomyces pastorianus
gagcttaactaaagataaagaaatgaaggattattctcaaaggcatatggatgaagtagctctatttatacccattccttcatcaaccatcactacttaaacgattcgttaacagatgctcatttatcacttcacacctttcatgtttcatctttcgcaccatcttcatcattaaaaataagatgcacttgttcctgaacgaggcatgcatatatcatgaatttcttatgcgaaggtattgttctatggtgcctatgtgtattcgtatgtgggggaagtgagaatgccaattgtaggggtgccgagatg

SEQ ID NO: 166744 - DNA, 174 bp, Saccharomyces pastorianus
gtttggaaaaaaaaagagtttctctatagtggggctggttgtcaggcattctttgaacggagctttcgtggccttttgttctcaaagaaatccctgtcgcctagatcattaaacgttgaactttggaaatacattcaagaagcacaattaagctctgacggtgagccgttacca

SEQ ID NO: 166745 - DNA, 87 bp, Saccharomyces pastorianus
gaaaaaaatgggtgcttctttctaaaaatggccaacaacagagttttctcagtcaaaaatagcccaagattattgctcttctttata

SEQ ID NO: 166746 - DNA, 156 bp, Saccharomyces pastorianus
ttgttaggattttcattattattgaaggctataatattagatatgcagaatatgctagaagttcttctcagatatatagcaattcatgaaggatcgtcgattattctatagaatagtattattacttcactttccattttatatgttgtaattcat

SEQ ID NO: 166747 - DNA, 192 bp, Saccharomyces pastorianus
gtgaataattggataattgtttgaaatccactgttgaagaaaggctataatattcgtacacagagtatactagaagttcttctcgagggtcttggaatccacaaaaaggcgtcgataaatctccataactatattactttatgttctttcctttcatatgtttcgttatcctattacattatcaattcttgc

SEQ ID NO: 166748 - DNA, 231 bp, Saccharomyces pastorianus
aatgcttacctttactttgtttccaatgttcttctttaacaccaaaacatactatttgagaaatgggtgaatgttgagataattgttgggattccatttttgataaaggctataatattaggtatacagaatatactagaagttctcctcgaggatataggaatcctcaaaatggaatctatatttctatttactaatatcacgattattcctcattccgttttatatgtt

SEQ ID NO: 166749 - DNA, 486 bp, Saccharomyces pastorianus
gatgctgcggtgactctagaggatccccatattgaatggtctaacgctagcacatatcaatgtcctgactgtctaatcggcaaaagcacgaaacatagacatgtcaaaggatcacgactaaagtaccaagaatcatatgagccttttcagtacttgcataccgatatatttggtcctgtacatcacttaccgagaagtacaccttcttactttatatcgtttacagatgagaaaaccagattccaatgggtgtacccattacacgaccgtcgtgaagaatctatcctcaatgtttttacatcgatattagcatttattaagaaccaattcaatgctcgcgttctagttatccagatggatcgtggctccgagtacactaacaaaactcttcataagttctttacgaacagaggtattactgcatgctatacaaccacggcagattctagagcacacggtgtcgctgaacgattaaatcgtacttta

SEQ ID NO: 166750 - DNA, 312 bp, Saccharomyces pastorianus
gcagcagcgccgtttcttttttcccgctgcttcgccctttgtattactcattgcgcactttttcacttgccatattcgttcaccggtttttctttttatttcttcgtcttttttcgtctttttcttcactggatatacgctttttgcatttgcaatagcacatatgtgtatatatataagcaagtgttgagcttgcctgtcaaatcctccatgtgtccttctcgtctatcttgttctgtctggtatagagtaatacttacatacatatacgtacattgtttccgctggctagttcgtaaccacctcctttcc

SEQ ID NO: 166751 - DNA, 288 bp, Saccharomyces pastorianus
agtgaaaaatgggtgaattttgagataattgttgggattccctctgtgttgaaggcaataatattaggtatacaggatatactagaagatttcctcgagattatagaaatgcccaaaaggaagtcgatagtgctacataattatgtaacttcatccttcttccttttatactttgtcgttcgctaccctattacattattaattcttgcatatcagctttctttaaatttgatagctgtttcccatcatactttttgtcaactaattctgtcctatatgataatacat

SEQ ID NO: 166752 - DNA, 204 bp, Saccharomyces pastorianus
tgcttacaacctatcgatgtagtggaatgtacctatcaatattttacaaaatcacggaataaactgtctttaagggtaggcgatttgatttacgtactcactaaaggttctaatggctggtgggatggtgttcttatcagacacagcgctaataataataataattcgttgatactagacagaggttggttccccccttctttt

SEQ ID NO: 166753 - DNA, 273 bp, Saccharomyces pastorianus
atgagtcgcactgcgtcatatgccggcatgacaactccggtgaaagataaggaaggccacgggattccatgcttacaacctatcgatgtagtggaatgtacctatcaatattttacaaaatcgcagaataaactgtctttaagggtaggcgatttgatttacgtactcactaaaggttctaatggctggtgggatggtgttcttatcagacacagcgctaataataataataattcgttgatactagacagaggttggttccccccttctttt

SEQ ID NO: 166754 - DNA, 228 bp, Saccharomyces pastorianus
tttctacagaagtactcgggtaatagaattttacagcaattagaaaataaaactaatttgcctaaatcttatttagttgctggtttaggtttcgcttatctccttttgatttttattaacgtcggaggtgtaggtgaaattctttccaattttgctgggtttgtgttgccagcatatttatcgttggttgctttgaagacaccaacgtccaccgatgacacacaactg

SEQ ID NO: 166755 - DNA, 171 bp, Saccharomyces pastorianus
atatatacacatatatataaaatatatagatattgtagtttttattattcttatttggatcctcctctcttaccgcccgtcttcaatctaccttcgaacccggctcttttctttggtacagcactaccaacatattatcttctcatattttctttgcttgttcttctttta

SEQ ID NO: 166756 - DNA, 1080 bp, Saccharomyces pastorianus
tcagtagtaagttcaagttcagcagacccaactagttcaagcgctgtgactacttcagctgattcaactacttccgtagtcagttcaacttcagctgatccaactacctcgaccgttcaaactacttctgttgatccaactacttcagttgactcaactacctcgaccgttcaaactacttcagttgacccaactacttcaactgactcaactacctcgaccgttcaaactacttcagctgatccaactacttccgtagtcagttcaacttcagctgatccaactacctcgaccgttcaaactacttctgttgatccaactacttcagttgactcaactacctcgaccgttcaaaccacttcagttgacccaagtagctctagcgatttgaccagttcaactagctccattttgtctagttcatttgtctcatctaatttgagcacattagcaactccatatattcgttcatccagtactgttagtggcaccgctttagcagatcaaactacatcagtttatccaactagctcaagcgatataactacttcgactgttcagactacttcagctgatccaagtagccctgttaccatttctacttccacagactctacatcttcaattgagtatactacatcggatgatccacatgcctcatctagtttagcgggtatgtatcgtacaagaagctctgacgaggtaaccacatcaacagatctaactagctcaagtgacgttgctacttcagttgacccaactacttctgttatcagttcaacttcagcagacccaactacttcagcagactcaactacctcgaccgttcaaactacttcagctgatccaactacctcgaccgttcaaactacttctgttgatccaactacttctgtagtcagttcaactttagctgactcaactacttcaaccgttcaaaccacctcagctgatctaagtatctctgttatcagttctacttcagttgacccaactagttcaagcgctgtgactacttcgaccgttcaaaccacttcagctgatccaactagttctgtagtcagttccgctccagttgat

SEQ ID NO: 166757 - DNA, 345 bp, Saccharomyces pastorianus
atgacttctcctgcatcaacgtctactataagtaacgttcaatcaactgcttccgtaatgaatcacagtattgaggacaatatttctgcagctgcctctctagaaagtgtttctggtacctcaactaaagattattctagtcaatccagtgccattcattatacaaattccttcacgaccaccactactaacgcatttatcacatcaaagcattccattgctgctgtatcaacaggagccattacatcatctgccagcatttcattaatcatggaaggcagcgcaaacattgaagcagtaggaaaattggtgtggctcgctgccgctcttcctctagctttcatt

SEQ ID NO: 166758 - DNA, 522 bp, Saccharomyces pastorianus
gaagttccaggttacgtctattcccgtttccaaaacccaaccagtaatgttttggaagaaagaattgctgctttagaaggtggtgctgctgctttggctgtttcctccggtcaagccgctcaaacccttgccatccaaggtttggcacacactggtgacaacatcgtttccacttcttacttatacggtggtacttataaccagttcaaaatctcgttcaaaagatttggtatcgaggctagatttgttgaaggtgacgatccagaagaattcgaaaaagtctttgatgaaagaaccaaggctgtttatttggaaaccattggtaatccaaagtacaatgttccggattttgaaaaaattgttgcaattgctcacaaacacggtattccagttgtcgttgacaacacatttggtgccggtggttacttctgtcagccaattaaatacggtgctgatattgtaacacattctgctaccaaatggattggtggtcatggtactactatcggtggtataattgtt

SEQ ID NO: 166759 - DNA, 384 bp, Saccharomyces pastorianus
tttgggtccaataatgcatctaacacggcggccaccaccaattctactggtttatttagtaataaaccagttggtgcaggagcttctacaagtgctggaggactatttggaaacaataacaactcgtctctaaacaattccaacggttcaacgggcctgtttggtagtaataatacatctcaatccactaatgctggaggcttatttcagaataacactagtacgaacacttcgggcggagggttattttcccaaccttcccagccaatggcacaatcacaaaatgcgctccaacaacagcagcagcaacaacgattacaaattcagaataacaatccctacggtactaatgagcttttttcgaaagcaactgtcaccaacacg

SEQ ID NO: 166760 - DNA, 300 bp, Saccharomyces pastorianus
tgtatacagaatatactagaagttcttctcaaggatataggaattctcaaaatggaatcggtatttctacataataatattttattattctttttcattttatacgtttcattatcctattacattatcaatatttgcatttcagcttccataacagttgatgactgtttctcaatctttacgtcatctttttacaccgcatgtgataatatactagtaacacgaatactactaaaagatgacattttagagcttcaatccaacaacttctcagtgatgtggctttcgacatttcatatt

SEQ ID NO: 166761 - DNA, 135 bp, Saccharomyces pastorianus
atgagtaattgcagaaggctcctatgcagacagctaagcagtgcttaattgaattaccttcccttttatttcttgatatgtcgtcctttttctctctatcttagttcttgcgagtactggcaatcaagtttctcc

SEQ ID NO: 166762 - DNA, 324 bp, Saccharomyces pastorianus
ataaagcgggtaacattaattatcttaccaaggcgacaattcccttttctaaaatttcacagcaaagaagctttagaaagtgcagtaaatctacaactcataagaaggaaaaaaagcgtgaacattcaaatcgacagcgtaaccttctgtatttatttctgtttgttgtactttcgaactctcgaatatcatagaggaactattagtctccataatgtcacaggcagcaaaaaacgtgatagtaaagctaatagtaggagcaggccaagcggcaccatcacctcccgtggggcccgcattgggctccaagggtataaaagccat

SEQ ID NO: 166763 - DNA, 156 bp, Saccharomyces pastorianus
aaaaattgcgataaggaaggcgaaaaatatgagcggtacgagaatcgaacccgtgtccccaccttggaagggtgggatgataaccactacactaaccgcccggagaatgtcttgttgagctatagcaactgtcatattctcatatacaaaaaaggg

SEQ ID NO: 166764 - DNA, 174 bp, Saccharomyces pastorianus
tattccaacataattgattagtgttgtaataaccatttatattgtatgatgatctttgggattccattatttcttaatgttataatattacgtatatagattatactagagattctcctcatggatttaggaatccacagaaaggaatcaataattctacataatattataaat

SEQ ID NO: 166765 - DNA, 390 bp, Saccharomyces pastorianus
aatacagcaacggttagcggaagtactaccaccggcgttactggtaactcagtaaactccgaagctgctgaaacgaaaaccgtgacccacggcaacggtgtgccttcgatttcagaatctggttatgctgaagcacatccaactactactgctcatgcgattggctatagcagtagtgttgcttcagtcccaggggccgctaacaccaaggaccatacaactacttacttaaacactgtctcgcaacaacctcgtagcacttccataagcggtgtagtaggatctagtaccgtttctttagaaatgtcaagctacgctggtattgccaacggtctactggctaatagtgctctaagcgcgttcattgcctccatgctgctggcaattatt

SEQ ID NO: 166766 - DNA, 714 bp, Saccharomyces pastorianus
atggaacaactcgacaccccctccgtggtcatcagcaagccgctgctgaagctgaaactcctcgatgccctgcgccagggaagctttccgaacctgaaggacctgctacaaaggcagttccagcctttggacgacccgaacgtccaacaagtgctccatctcatgctccactacgccgtccaagtcgctcccatgaccgttatcaaagaaatcgtccaccactgggccactaccggcaccacctttttggatatccatctcgatctaaatgaacaggattctaacggcaacaccccactgcacatcgccgcgtaccaatcccgtggtgatatcgttgccttcctcatggaccagccaagcatcaatgactgcgtgcttaattactctcgtctgcaagccatcgaaatgtgcaagaacctgaacatcgcgcagatgatgcaagtgaaacgctccacatacgtagcagagaccgcccaggagttccgaactgcgttcaacaatagagactttggccacctggagtccattctcgctagcacccgaaacgcagaactgctagacatcaacggaatggacccagagactggtgacaccgtcctgcacgagtttgttaagaaaagagacgtcattatgtgccgctggctgctcgaacacggcgcagaccccttcaagagagaccgcaagggcaaactgcccatcgaccatgtaaggaaa

SEQ ID NO: 166767 - DNA, 126 bp, Saccharomyces pastorianus
cttgtcagcagaggcatttgccatgaaaatgctctcattctagccctaatgagattggaaccgatgcttcaacgcttaacactgaatggtcgatccagcagtgggtcgcaccagctaaatgattat

SEQ ID NO: 166768 - DNA, 111 bp, Saccharomyces pastorianus
aagagagtaggctttcataataaactagccttgttggcgcaatcggtagcgcgtatgactcttaatcataaggttaggggttcgagccccctacagggctttattattttt

SEQ ID NO: 166769 - DNA, 192 bp, Saccharomyces pastorianus
cttataatctctgcttctttacagaagtcaaaatatacgtatgcattggtaaacttgaaaccaattgtacccggacatgtactgatcgttccactgagaactacggttttaaacttatcagatctgaccatgcctgaatctcaagataatttcagacttaccagtttatacataggatttattaagtggcaa

SEQ ID NO: 166770 - DNA, 348 bp, Saccharomyces pastorianus
ggacagtcggtaccccacttgcatacacacattattccacgttataaaataaacaatgtaggggatttaatatacgataaattagatcattgggatggtaatgggactttgactgattggcaaggaagaagagacgaatatttgggtgttggtggtaggcaagcaagaaaaaataactctacatcggccactgtagacggggatgaactctcacaaggtcctaatgtcttgaagccagacagtcaaaggaaggttcgagctttaaccgaaatgaaaaaagaagctgaggatcttcaagccagactagaagaatttgtatcttctgatcctggtttaacacaatggtta

SEQ ID NO: 166771 - DNA, 228 bp, Saccharomyces pastorianus
ggcacgtcttctacattactagattgtgatacttcaattctcggtcgtcgcattacaaaagacaccgaacttgccgacttagcagaattgagcattgaaaacagaataacaaaattgaatatattcctgagatccgagaagtactactgttttttttgcggcatcaagtatacggatgaaggtgatctctacgagcattgcccaggagtgaatgaagacgaccacaaa

SEQ ID NO: 166772 - DNA, 75 bp, Saccharomyces pastorianus
tggaagttggtaactcgcgcaatacatcgatttggtgggtgcaactttgcgcacctaatgcaacgttacggcatg

SEQ ID NO: 166773 - DNA, 381 bp, Saccharomyces pastorianus
gtagctgtcgttgttcgtggtcgttacgctggtaagaaggttgtgatcgttaagccacacgatgagggttctaaatctcatccattcggtcacgctttggttgccggtattgaaaggtacccattaaaggtcaccaagaagcacggtgccaagaaggtcgctaagagaactaaaatcaagccattcatcaaagccgtcaactacaaccacttattgccaaccagatacaccttggatgttgaagctttcaagagcgttgtatctacagagacttttgaacaaccatcccaacgtgaagaagccaagaaggttgtaaagaaggcatttgaagaaagacatcaagctggtaaaaaccaatggttcttctccaagttgagattc

SEQ ID NO: 166774 - DNA, 378 bp, Saccharomyces pastorianus
caccatctttcacagggatcatcctcttctccttcatcgatttttgtgtcatcgtccttctcctcttcatcatcggattattcctcgtttccatcttcctcttcctcggcatcatacgtttccactattattactttggagtcatcaagctcagagtacgaaaacactcagtccacttctagctcaaggatggcgtcatcttcttcagctataccgccctccacatccgtcgtcgaatcgactcaaacagagtctttctcaacgagaactacttccacattgacaccatcctccaaggtaagcgcgatttctagaacaacgacatctgcgccagcgcaatcttcttctgttcagtcgatatctgtctcgagctcagaa

SEQ ID NO: 166775 - DNA, 879 bp, Saccharomyces pastorianus
tctgttagtactttgaaactattgggaaaacgcctgtttaattccagcagtcacacggataactcttcgttactgcttagtgccgaacaattgggcaatgggagaagtttaagaaaaaggccaacgtctccgtccattagtggcagtggtagcggtggtaattcaccttcgtcttctgctggggcacggcagagatctgcttctttacatagaagaaaaaacaatgcttctgtaggattttcaaatgggcctgtgtcgtcacacaagccctctgccgcattgcaggacttaattaaacataataataacccttacttgaactctccctctgatattctgggcacaggtactggcattgcctcggcaagagatagggatagagcagttttggatagagaaaaggaaaaagaaagggcgagaaacaaagaaagaaatactcatcacgcgggcttaccgcaaaggtctaatagcatggccagtcaccattttcccaacgagaatatagtttataatccatacggcataagcccaaaccatgctaggccagatactgcatttgcagacactctgaatacgaataaggagaacgatttgagtttttacatgcatgatggtaacagcaagatacggatgttgccccttccaattgctaatccgaacgattttttgcccgaagatatgaaacaatatagtgtccacttgacggataatttcgtatttgatacggacaataaacctattggttcgggtgggtctagtgaagttagaaaggttaaatcaagttacaggcaaaaggatgtttacgctctaaaaaaactgaatatgatataccacgagtcacccgagaagtttacaagagatgctcaaagaattatcata

SEQ ID NO: 166776 - DNA, 195 bp, Saccharomyces pastorianus
tatatactattaatgaaaaatttccttcttagtaatgacactcataaataggtaagtgttggaattaaaatcaactatcgtctaacaactagtagtcacactaccaatatattatcatacacggtgttaaacgatgacataagatatgagaaactgtcatcgaagttagacgaagctgaaatgcaaggattgata

SEQ ID NO: 166777 - DNA, 510 bp, Saccharomyces pastorianus
cctactggttacgcagttttcaaggttaagttgcaacaagatgacattggttcaagattaaaagaagttcaagagcaaatcaatgattttggtgcttttacaaagttaatcgaacttgtctctttcgcgccattcaaaggtgctgctgaagcccttgaaaatgctaacgacatatcagaaggtttagtctctgagagtttgaaagctatcttggatttaaacttaccaaaggcttcctcgaaaaagaagaacgttactttggctatttccgataaaaacttaggtccttctattaaggaagaatttccatatgttgattgtatttcaaatgaacttgctcaggatttgattcgtggtgtcagattacatggcgaaaaattattcaaaggtctacaatctggtgacttagaaagagcccaattaggtttaggtcacgcttactccagagctaaagtgaagttctctgttcaaaagaacgacaatcacatcattcaagctattgctttacta

SEQ ID NO: 166778 - DNA, 144 bp, Saccharomyces pastorianus
ttggtagaggctattatatcatgtatacagaatatagtagaagttctccccaagaatataggaatcctcaaaatgaaatcgatatctctacatagtaatacaacgattattcctcattccgtttcatatgtttcattatcctat

SEQ ID NO: 166779 - DNA, 171 bp, Saccharomyces pastorianus
cacgccgcagcagaagaagatgacgaagaaggtgaagttgatgccggtgacttgaataaggatgatatcgagttagtcgttcaacaaactaacgtttccaaaaaccaagccatcaaagccctgaaagctcacaatggtgacttagtcaacgctatcatgtccttgtctaaa

SEQ ID NO: 166780 - DNA, 393 bp, Saccharomyces pastorianus
atagcattgggtatacagagtttactagaacacctcctcagggatataggaatctgcacaagggaattgacatttcaaacatttcaagtaatattgttatttttcttttcattttatgtgttgtcagtcattaacctatcatattatcaatcactgcattcagattccattagatttgatggcagtttctcaatctttatgtgctcttcttacaccattgagaaatgggtgaattttgagataattgttgggattccattgttggtaaaggctataatattaggtatacacaatatactagaagttctcctcgaggatttaggaatcctcaaaatggaatctatatttctacaacctaatattacgattattcctcattccgttttatatgtt

SEQ ID NO: 166781 - DNA, 72 bp, Saccharomyces pastorianus
tcgagatatgatttacaaggagcgacatagaatcggacgctgaagctatctagctacactgataatgatgac

SEQ ID NO: 166782 - DNA, 279 bp, Saccharomyces pastorianus
ctagaggatcccgaagatggttcttccagaattttgatctccactgatttgttggctagaggtatcgatgtccaacaagtttctttggttattaactacgacttaccagctaacaaagaaaactatattcacagaatcggtagaggtggtcgtttcggtagaaagggtgttgccatcaactttgttactaacgaagacgttggcgctatgagagaactagaaaagttctactccactcaaattgaagaattgccatccgacatcgctactttgttgaac

SEQ ID NO: 166783 - DNA, 405 bp, Saccharomyces pastorianus
agtcattttttttttgcatccaattttattgaaagtccgcccgctctgttaaaaaaggcgtttcttctaaatttgaataggctacgatcgagattccctccgattaattatgcgctactggctcctctttcgtcgtattgcaagtggacttttcaacgaggctatgcatgcccagtgtcattcttgaagcaggcacacacagacgcgcttcaattagttttctttactagatgcatcatttgggcggtttttcactaccgttttcgagtaggggctctcacaaaacgggcacgaccttttgtttacaaccgcccaaagaggaaaaacatcaacaatcaagaagcggacacaaaatatagaagcaccataaaactcacgacaacggtaactttaaatttgttgtat

SEQ ID NO: 166784 - DNA, 108 bp, Saccharomyces pastorianus
aaaaaaaaaggatctcggaaccggaacgagattgctcatttttcgttccgtttccgcaggttttgcaaatcattaagcagatacacaagggtccttttaatgtttatg

SEQ ID NO: 166785 - DNA, 195 bp, Saccharomyces pastorianus
tctgctaaagcactgctatattaccagagggctgcccaactagggaatttaaaggctaagcaagtgctagcttataaatactattctggcttcaatgtcccacgaaattttcataaatctttggtattgtacagggacattgctgaacagctaagaaagtcgtactccagggacgaatgggatatgtcttcccct

SEQ ID NO: 166786 - DNA, 306 bp, Saccharomyces pastorianus
atgaacaaaattataaaagagtctaccaacttcgccagatatctacgaactagcggtgtactcaacagtcttcggaccacatctaagtttgtttaaattaataacaattcatattcaactcatggaagttttgatggcaatgtagctactattttcaatatttcaaaattcaattacatcaattcttcggccaaggggtcacttctaacttataaaagcattaccttcttttgtccaagatatttcaagaaacggcctttagggagacatgcgaagggaaaaggcaaatctgacgaaaagattcta

SEQ ID NO: 166787 - DNA, 267 bp, Saccharomyces pastorianus
atagccgttacactacatcggatttgattagcttgatttgtatagaaaaacatatcaccatatcagtaaatatgaatgatctttatttatatatatatgtccggaaaattgtaggaataaaaatctgttggagtaaaaatcaaccatcatctatcaactagtagtcatactatcaatatattatcatatacggtgttaaatggtgacgcaagttatgagaagctgtcattgaagttagaggaagctgaaatgcaaggattgataatg

SEQ ID NO: 166788 - DNA, 597 bp, Saccharomyces pastorianus
atggcgaaatacattgttgcggcccttcaaatcggctcttgtccgggctctactaaggataccttgaaaaaaattttgtcatatgagaaggagatcaaggaatctggtgccaagttggtcgttatcccagaagccattcttggtggttatccaaagggatcgaactttggggtttatctaggctaccgtcttcaagaaggaagggaggagtatgctaagtatcttgccgaagcaattgagatcggaaacggagagaaatatccagaaattagtcagttgtgcgcactatcgaaggccaccgacgcatccttatgtgtggggtgtatagagcgcgatgggacgacattatattgtaccatggtttatatagatcctaaagatggctacgttgggaagcatcgaaaactgatgccgacagctggcgaaagactgatatggggtcaaggcgatggttcgactctgcctgtcgtggataccgctgctgggaagattggcggtgctatctgctgggagaacatgatgcctctactgagatacgccatgtataaaaaaggggttgagatctggtgtgccccaacggtggatgctaggcctatt

SEQ ID NO: 166789 - DNA, 630 bp, Saccharomyces pastorianus
atggcgcaagaaagccaacatggttcgaagacactatatgtgcacccgtttgataatgagacaatttgggaaggtcattctacgattgtggatgaaatcatagaacaattgaaggaaaatgatatatccttacctagggtgaaagctttagtttgtagtgttggtggtggtgggctatttagtggcataattaaaggcctagagaggaatcaccttgctgaaaaaattccggtcgttgctgtagaaactgccggttgtgacgtattgcataagtctctcaaaaaaggtagtccagttactcttgaaaaattgacaagtgttgcaacttctttgggctccccatacatagcatcattcgcgtttgagagttttaacaagtatggatgtaagtctgtagttttatcagatcaagacgttctggcaacatgcttgagatatgccgatgactacaattttatagtggaaccagcctgtggagcatccttacatttatgttatcatccagagattcttgaagacattctggaacaaaaaatatatgaggatgatatcgttattataatcgcatgcggtggatcatgtatgacgtatgaagacttggtgaaagcgtcgagcacattaaacgtatca

SEQ ID NO: 166790 - DNA, 429 bp, Saccharomyces pastorianus
cccaaggttaccagaactttgtcaagatatgtattcgatatagtaaactttgatgattcaaacactttgatcagagcagaagaagactctgtcgagataagttttgatgctggagaaaattggaaaacaatagatgagattgaagagcctatcgagtcatttgttgttgatcccttccgtgggcatgatagagcttttgctttcgtgaaaacggcaccaaaattttacgtcacggatgatcaaggtaaatcgtggaggcctttgactatacccatttctgagaaagcatcgaattatttttgcgacgtaactactcaccctataaaaaagaagcatcttattattcgttgtgatttgttgacaataaaagactcaggcttaatgtatgttggaagagagatttacacaactaatgatggagtatccttt

SEQ ID NO: 166791 - DNA, 120 bp, Saccharomyces pastorianus
tttgaatgaaactttggtagccatttgttctcaaaggaatctgtgttggctgggttattaaacgtggaactttggaaatacatccaagaggcacaattgagctctaacgatgagccgtta

SEQ ID NO: 166792 - DNA, 738 bp, Saccharomyces pastorianus
atgtctgaaacagatcaaaagaaacaaaaggttgctaacaactctctagaacaatagaaagcctccggcactgtcgttgtagccgacactggtgatttcggctctatagccaagtttcaacctcaagactccacaactaacccatcattgatcttggctgctgccaagcaaccaacttacgccaagttgatcgatgttgccgtggaatacggtaagaagcatggtaagaccaccgaagaacaagtcgaaaatgctgtggacagattgttagtcgaattcggtaaggagatcttaaagattgttccaggcagagtctccaccgaagttgatgctagattgtcttttgacactcaagctaccattgaaaaggctagacatatcattaaattgtttgaacaagaaggtgtctccaaggaaagagtccttattaaaattgcttccacttgggaaggtattcaagctgccaaagaattggaagaaaaggacggtatccactgtaatttgactctattattctccttcgttcaagcagttgcctgtgccgaggcccaagttactttgatttccccatttgttggtagaattctagactggtacaaatccagcactggtaaagattacaagggtgaagccgacccaggtgttatttccgtcaagaaaatctacaactactacaagaagtacggttacaagactattgttatgggtgcttctttcagaagcactgacgaaatcaaa

SEQ ID NO: 166793 - DNA, 267 bp, Saccharomyces pastorianus
tacctgagaacataaagggagttgcgtcgtttagactctattactaggtctccaatctactctcatttccaagagactttgggtggccttgcaacggttagaggttattctcaacagaaaaggttttcccacattaatcaatgccgcattgataataacatgagtgcgttctatccctctatcaatgctaaccgttggctagcatataggttggaacttattggttcaattatcattctaggtgctgcaactttatccgtttttaga

SEQ ID NO: 166794 - DNA, 138 bp, Saccharomyces pastorianus
ttttttcttttatgtagaaacatcgattcgcttctgtgggttcccatatcctcgaggagaacttctaatatattctgtataattaatattatagcattaacaacggtataatctcagtcattatcccagaattcacct

SEQ ID NO: 166795 - DNA, 996 bp, Saccharomyces pastorianus
  modified_base (317)..(318): a, c, g, t, unknown, or other
  modified_base (394)..(394): a, c, g, t, unknown, or other
tttcaacctctagaaaaagattgcggacccgttacctcatttgaatttcgacgataatggccagtttctactgacctcttctctccacacgatagcgatgcaacttgtactagtgccacgaatctgcaaattgcttggacagctatagccctcccaagaaatagtggcttgtcacgtccgcgtatcgtttacgctacagcacatgaacgacagtgtattctatttctctcttaccaagtgaagaaatttttgtaccatgtaatataccgttaactctgggaaaccaaacccaagtatctgaagtatattgtttccgnngtctatcggtcgccctatgtggaactgatattgaagtatgaaccgcctgtgaagcgagtacgttctcttatcgtcntgtctatacgtatcgaatctcgttacggtctttgggatttgaagatctctaaaccgcaagttattataccaagtctcgtaccaaattgtatcgcatatgatccaagtggccttgtattcgcattggggaacccagagaatttcgaaatagggctatataatctgaaaaaaattcaggagggtcctttcttgataattaaaattaatgatacgactttcagtcaatggaataaattagaattttctaacaatggaaagtatttattagttggctcctcgataggaaaacatttaatttttgacgcattcacaggtcaacaattattcgaactaataggaacaagggccttcccgatgagagaatttctagattctggatctgcttgtttcacaccagatggtgaattcgtccttggaacggattatgacggtaggattgccatttggaatcattctgattcaataagtaacaaagtattaaggccgcaagggttcattccctgtgtttctcatgagacctgtcccaggtcaattgcattcaaccctaaatattcgatgtttgttaccgcagacgaaacagtagatttttacgtgtacgatgaa

SEQ ID NO: 166796 - DNA, 633 bp, Saccharomyces pastorianus
gtgtcattcgaggaaggagcactaatagagccattatcagtggcaatccatgctaataaattagcaaagatcaagtttggagcccgttgcgtcgtctttggagctgggcccataggtttgctagccgggaaagtagccagtgtctttggtgctgcagatgttgtttttgtagatctatcagaaaacaagctggaaagggctaggcagtttggtgccacccacatcgtcaactcaggtgatctcccacatggcgttactgtagatagtgttataaaaaaagcaatcggcaagaaaggtgctgacgttgtgtttgaatgttctggtgcagagccttgcgttcgagcaggcatcgaagtctgtaaggcaggtggaacgatcgttcaagttggaatgggacaagaggaaatacaatttcccatctcgatcattccaacaaaagaactgacattccaaggctgtttccgatactgtcaaggtgattatagtgactccatcgagctagtctctagcagaaaactctcgcttaaaccattgattacacatcgctatagctttaaggatgctgtcgaggcattcgaagaaacaagccaccacccgttaaataatatcaagacgatcattgagggcccggaa

SEQ ID NO: 166797 - DNA, 183 bp, Saccharomyces pastorianus
atacggccggaagacttccaagatgatgctaaccgggaactagtgagcaggaaattgaaactgaacgaatggtttagtttttgtttaagttgcaatcatggtatgcatgcgggtcacgctgaagaatggtttgacagacacaatgtctgtcccaccccaggttgcacttgtcagtgcaacaag

SEQ ID NO: 166798 - DNA, 117 bp, Saccharomyces pastorianus
atgattttcaatccggtcatatcaaatcacaagttgagccattatattcatgttttttgtacattcaccacgttctgcatattaggtactgaaacacgtcaggctataacggcgctc

SEQ ID NO: 166799 - DNA, 81 bp, Saccharomyces pastorianus
attcactttacgtgttacgagggggctcattgtaagccgataatgattatgttcctggcatctgtaattttgatttcactg

SEQ ID NO: 166800 - DNA, 123 bp, Saccharomyces pastorianus
gaagccgctactctccattccagaccaaactttataaagtgtcttaccaaggcagcggaaatcgaacaacaatcccaagacgaatattggcgacaagaatatcctggtgtcgatgagtttttt

SEQ ID NO: 166801 - DNA, 156 bp, Saccharomyces pastorianus
gtgcggttgccccaaaaacaccacggaacctcatctgttctcgtactttgttgtgacaaagtagctcactgccttattatcacattttcattatgcaacgcttcggaaaatacgatgttgaaaatgcctctagagatgaaaaacaatcgtaaaagg

SEQ ID NO: 166802 - DNA, 426 bp, Saccharomyces pastorianus
attgatgtcaccggtggtaagaaagcactagtcctttttgtcccagtcccagctttgtctgcataccataaggtccaaaccaaattgacccgtgaattggaaaagaaattccctgaccgtcatgttattttcttggctgaaagaagaatcttgccaaaaccatctagaacatctagacaagtccaaaagagaccaagatccagaactttgactgctgttcacgacaaggttttggaagacatggttttcccaactgaaattgtcggtaaaagagttagatatttggttggtggtaacaagatccaaaaggttttgttagactccaaggatgttcaacaaatcgactacaagttggaatctttccaagctgtctacaacaagttgactggcaaacaaattgtttttgaaattccaagccagaccaac

SEQ ID NO: 166803 - DNA, 516 bp, Saccharomyces pastorianus
actcctcttcttgaaggaactgaggaatgaaattgtacactataaccgtgtgacaagattaacttctccaagaacaggaataccgtatgtggagtagacctatactacccccattctactactttgaatattgcgaacagccttgtagtattttacgaaaaatacctaagaaaccggttcatttactctctatccaagaagaaggtttatgatctaatcaaaacggagttacagaatactgattccttgtgtatagcacctgttaaccaggcgttttgcgcacttgtcactcttattgaagaaggggtagactcggaagcgttccagcgtctccaatataggttcaaggatgcattgttccatggtccacagggtatgaccattatgggaacaaatggtgtgcaaacctgggattgtgcgtttgccattcaatactttttcgtcgcaggcctcgcagaaagacctgaattctataacacaattgtctctgcctataaattcttgtgtcatgctcaa

SEQ ID NO: 166804 - DNA, 99 bp, Saccharomyces pastorianus
ttcaaccactcttgtgcaattgaatacccaagttatcgattcttattccctattaaggcattaggtatgtacagcagggcatatgaaacacatacgctt

SEQ ID NO: 166805 - DNA, 177 bp, Saccharomyces pastorianus
tgtgtattataaattctgagttgtcatggtcctcagaaaagatcgggcgtgtggtctagtggtatgattctcgctttgggcgacttcctgattaacagggagacaaagcatgcgagaggccctgggttcaattcccagctcgcccccttttttactattgaaaatagaagtattcgg

SEQ ID NO: 166806 - DNA, 207 bp, Saccharomyces pastorianus
atctgtttagtattatttgtaatactagcatgtgagatatatgtgggtaattagataattgttgggattccattgttgataaaggctataatattaggtatacagaatatactagaagttctcctcgaggatataggaatcctcaaaatggaatctatatttctacatactaatattacgattattcctcattccgttttatatgtt

SEQ ID NO: 166807 - DNA, 426 bp, Saccharomyces pastorianus
aaatcattagaagtaagcgaaggagcactaattccaaccggtaaaatcgttcaaagaaaaattgctacttttgactcctccaaacctaccattttgcaggatgatggcccgatttatgactacgctttcattgttgatgaaaataagaatttgaaaacgacagactcagtaagtgtaaacaagctcgtccctgccttcaaggcttatcatccggcatcacgactttcattggaggtttcaacaacagaaccaactgtcctattttacacaggtgacaacttgtgtgatggatttacgccgagatctggctttgccgttgaacaaggcagatatgttgacgcaatcaaccgtgatggatggagagactgcgttcttttgagacgtggtgaggtatatacttctaagactcgatatcgttttgcggtg

SEQ ID NO: 166808 - DNA, 570 bp, Saccharomyces pastorianus
  modified_base (449)..(486): a, c, g, t, unknown, or other
aatatattacactcaaaatataaagattataagataaatggtaagctaaactcaaaccaagctacctcatttaagaacttatatgcggctttcaaaaagtttcaaaaggatcttagaaatttggagcagtatgttgagttaaataaaacgggattttcaaaagctctgaagaaatgggacaagagatctcaatctcacgataaagatttttaccttgctactgttgtttccattcaaccaatttttaccagagatgggccactaaaattaaacgatgaaactttacatattctcttagagctgaatgatattgacaacaacaatagaagggcagacatacaatccagtacgtttactaatgacgatgatgacgacaataataccagcaacaataataaacacaataataataataacaataataataacaacaacaacaacaacaatannnnnnnnnnnnnnnnnnnnnnnnnnnnnnnnnnnnnnacaacatcaaagatttcggaaaaccaacttgaacatctttttcaagcatcttcctcctccttggacatggagatggaaatcgaa

SEQ ID NO: 166809 - DNA, 93 bp, Saccharomyces pastorianus
atgagtagcgaggactacgggtatgattacgacctactatttaaaattgtactgatcggtgattccggggtagggaaatccaatctattgtca

SEQ ID NO: 166810 - DNA, 87 bp, Saccharomyces pastorianus
ttgctactaggaacacgtataggaacacgaataggaacacgaatatttattgttcatccgattatatcgccattgattgcagtggaa

SEQ ID NO: 166811 - DNA, 384 bp, Saccharomyces pastorianus
tttgatccaacaccagtaaatccttagttaagtcatcgcatgcatgtttaccacacattcactactatttgtgtacggaagaccaaataagataaaccataatgctggtctccttccatttactaacatacgtaattgctcctactgccgttcagcctaacctactcacacattctgatggtgatcatgcaatctttgactgaatatgttgagtaaaagaacattaagctttatttttttggcgtgaccagcgggtactgcgattctttgactttgttttctactgtatcactggaaattgattgaataaacaaccaatttaaagtaacaataacacagtatcacaaaaagtcacctgatggaccttatgggatatagaatttt

SEQ ID NO: 166812 - DNA, 726 bp, Saccharomyces pastorianus
agggtcaaaggtattgacttccatccaaccgaaccatgggttctaacaaccttgtactccggccgtgttgaaatttggaattacgaaacacaaattgaggtcagatccattcaagtcaccgaaactcctgtaagagcaggtaaattcattgcaagaaaaaactggataattgtaggaagtgacgatttcaggatcagagtcttcaattataacaccggtgaaaaagtcgttgattttgaagctcatccagactatatacgttccattgctgtacacccaacaaaaccttatgtcttgtccggtagtgacgatttaacagtcaaactgtggaattgggaaaacaattgggctctcgaacagacctttgagggtcatgaacattttgttatgtgcgtagcattcaatccaaaggaccctactacatttgcctccggttgtttagatcgaacagttaaagtttggtcgttgggccagtcaacaccaaatttcactttaactacggggcaagaaaggggcgttaactacgttgattactacccattacctgacaagccttatatgatcactgcgtcggatgacttgaccatcaagatctgggactaccaaacaaagtcatgcgtagccactttagaaggtcacatgtctaatgtttcgtttgctgttttccacccaactttaccaatcataatttctggttctgaagatggtactttgaagatctggaac

SEQ ID NO: 166813 - DNA, 111 bp, Saccharomyces pastorianus
gaaagagccttgttggcgcaatcggtagcgcgtatgactcttaatcataaggttaggggttcgagccccctacagggctttctttttatttacgtcttgtttctgatcaat

SEQ ID NO: 166814 - DNA, 90 bp, Saccharomyces pastorianus
aggtctatcagaagagatgcgcgttacaactggatctgtaacccagttcacaaacaccgtgaagccagaggtttgactgccactggtaag

SEQ ID NO: 166815 - DNA, 405 bp, Saccharomyces pastorianus
acttttggtaagaagaaatcagctactgctgttgcccacgtcaagactggtaagggtttgatcaaggttaacggttctccaatcactttggttgaaccagaaatcttaagattcaaggtttacgaaccattgttgttggtcggtttggacaaattctccaacatcgatatcagagttagagttaccggtggtggtcatgtttcccaagtttacgccatcagacaagccattgctaaaggtttggttgcttaccaccaaaagtatgtcgatgaacaatccaagaacgaattgaagaaggctttcacttcttacgacagaaccttgttgattgctgattctagaagaccagaaccaaagaaattcggtggtaagggtgctcgttccagattccaaaaatcttaccgt

SEQ ID NO: 166816 - DNA, 177 bp, Saccharomyces pastorianus
ttgtcagattgtctactatcgaaccagtacgatgatgcgaaatgcgctaaggtgattgaccaactctacgtctgttgttcaaggttctacaaggataacggagaagagtcgcggtctccctgttgtcccttaccttctctgctcaagttgaagatgaaacaaaggaacatcaaacct

SEQ ID NO: 166817 - DNA, 264 bp, Saccharomyces pastorianus
gaaggtgttgttgtcgctaagaaggatttcaaccaaccaaagcacgaagaaattgacaccaagaatttgtatgtcatcaaggctttgcaatctttgacttccaagggttacgttaagactcaattctcatggcaatattactactacaccttgactgaagaaggtgtcgaatatttgagagaatacttgaacttgccagaacacattgttccaggtacctacattcaagaaagaaacccatcccaaagaccccaaagaagatac

SEQ ID NO: 166818 - DNA, 378 bp, Saccharomyces pastorianus
atgcggaagaaatgtccgcaaggtaaaaaattgttgaaaaaggcgacgcgtccctttgtaggagctttttgaaggcgtatacgagccaagaaaaaccttatttcccagtttggccagaccggctgcattgggtacgacggtaaattctctataggcatcaccattgaaaagtatgtccttaatttagtcgtgagaatcatcattgtgttcgccctttgtcgtataaccgagttgagtgtctttgattcatctctaaggtgtaaaagcagaaaaaccagattatctaaagctgcaagaaagaaagaaactgatcatttttatgaacagtgcagatatgtggaagtgaaatttggcctgcagatggcatatctgcaatcc

SEQ ID NO: 166819 - DNA, 990 bp, Saccharomyces pastorianus
cagcaacagcaaaatgccaccaagaacgacgctatcccaccatctgctacgcccaatgccgctgccttccctcaacagcaacaacagaatgcaaactccaaattatatcaaatgcaacagcaacaacaagcccaggcgcaagctcaggctcaagcgcaagctcaagcgcaggctcaggctcaggtgcaagctcaggctcaggcgcaagctcaggctcaagcgcaagctcaagcgcaggctcaggctcaggctcaagcacaagctcaggcacaggctcaggcgcaagctcaagctcaagcacaggcccaggcgcagcaacagccccctcaacagccacaaactcaagcacaacctaacccactacacgggctgacaccaactgcaaaggatgtcgaagtcattaagcaattgtcgttagatgcttccaagactaatctaagactgacggatgtaacaaattctttatccaatgatgaaaaggaaaaaataaaaatgaagttaaagcaaggtcaaaaactatttgtgcaagtgagtaattttgcaccacaagtttacatcattactaagaacgaaaacttcttgaaagaagtcttccagttaagaattttcgtcaaagaaatcctggaaaaatgtgctgaaggtatttttgttgttaaattagacaccgttgacagactgatcatcaagtaccaaaagtactgggagagcatgagaatccaaattttaaggagacaagctatcttaaggcaacaacaacaaatgtccagtaccaacaacaacaataacaacaacaccgctaatgctcctgttaccggcaataacaataatgcgaacaatattgctactcagcaaaatatgcaacaatcgttacaacaaatgcaacatttgcaacaattgaaaatgcagcaacaacaacagcaacaacaacaacaacaacaacaacagcagcagcagcagcagcaacaacaacaacaacaacaacatatatac

SEQ ID NO: 166820 - DNA, 339 bp, Saccharomyces pastorianus
tcccaaaaaaacggaattgccaccctactacaagctgaaaaggaagcccacgaaatagtatcaaaggctagaaagtacagacaagataagttgaagcaagccaagactgatgcagccaaggaaatcgactcatacaaaattcaaaaagacaaggaattgaaggagtttgaacaaaagaatgccggtggtgttggtgaattggaaaagaaagcagaggctggtgtgcaaggtgaattagctgagattaagaaaattgcagagaagaaaaaggatgacgttgtcaaaattttgatcgagactgtcatcaagccttctgctgaagtccatatcaatgccttg

SEQ ID NO: 166821 - DNA, 81 bp, Saccharomyces pastorianus
gtgaatagttggataattgttgggatcccattgtgcacaaaggccataatattatgtctacagaatatactagatgtcctc

SEQ ID NO: 166822 - DNA, 168 bp, Saccharomyces pastorianus
aaatggaaccgatatttctacataataatattacgattattcctccttccgttttatatgtttcattatcctagcacactatcaatctttgcatttcagcttccattagatttgatgactatttctcaatctttatgttatctccttacgccgcatgtgataatatac

SEQ ID NO: 166823 - DNA, 408 bp, Saccharomyces pastorianus
cagacttttggtaagaagaaatcagctaccgctgttgcccacgtcaaggccggtaagggtttgattaaggtcaacggttctccaatcactttggttgaaccagaaatcctaagattcaaggtctacgaaccattattgttggttggtttggacaagttctccaacatcgatatcagagttagagtcactggtggtggtcatgtttctcaagtctacgccatcagacaagctattgctaagggtttagtcgcttaccaccaaaagtacgttgacgaacaatccaagaacgaattgaagaaggccttcacctcttacgacagaactttgttgatcgctgattctagaagaccagaaccaaagaaattcggtggtaagggtgctcgttctagattccaaaaatcttaccgt

SEQ ID NO: 166824 - DNA, 294 bp, Saccharomyces pastorianus
gttaacggtttagatgagccagaaacctcttttgaagaactgaatacaactctacctcgctttcaatcccatgaaacattaactttggaagaaaacgtgccaccattgagtacatcaacttatataccgcctccatcctcggtaggtacttctgacactggcacagtattttccaacagtaccagcgcgtattggtctaataagcaagcagacgatgatcaggacatggaggtagaccaggatgatgagtttctaaatgactaccaggaattccaaaataaaaaggatgatttt

SEQ ID NO: 166825 - DNA, 642 bp, Saccharomyces pastorianus
caattgataaccaaaaatgtagcaccagaggcagcagactatttaacacagcaagtctctcatgatcttgtaggctcaaaaactgcaaattggaccagtgttgagaatactgctcgtgaatctttaacaaaagcattaactcaaatattaacgcctggtgtatccgttgatctcctccgtgaaattcagagcaaaagaagcaaaaaggatgaagaaggtaaatgtgatccctatgtgttctctatagttggtgttaatggtgttggtaagtcaacaaatctttcaaagctagcgttttggttactgcaaaataatttcaaggtcttaattgttgcttgtgatacgtttaggtctggtgcagttgagcaactaagggtccatgttgaaaatttggcacagctaatggatgattcacacgttcgtggctccaagaacaaaaggggtaaaactggtaatgactacgttgaactatttgaagctggttatggtggatctgacttggtaaccaaaattgcaaagcaagccatcaaatattctcgtgatcaaaacttcgatatagtgttaatggatactgccgggagaaggcataatgatcctactttaatgtcgccattgaagtctttcgctgaccaagccaagcct

SEQ ID NO: 166826 - DNA, 141 bp, Saccharomyces pastorianus
gtcatttacattgtttggatctgtcaacttcagccaggaaagttctaccaaagcccacttcaagacatttttttcgaatcgttttttagagagataactggttttgtcatggcatggacatttggatacgccctaatcgga

SEQ ID NO: 166827 - DNA, 243 bp, Saccharomyces pastorianus
gagtgctcgttcaaggcttctcccgaagcctatttggtactgggtgcaatttcccatcttagactatcgagggactaagatcttggtattgctcaaatctacttgggtgaccctcaaattcaacaagatgtccaaatttctgtaaaattaggagacggtcatctgattgtaaagattaattacggtaaagacaagaatggtcaggtacctcccgtgccagaagttcctcaagaatacacgcag

SEQ ID NO: 166828 - DNA, 87 bp, Saccharomyces pastorianus
attcatataaatagggcagccttgatcatctacatttgagattatgcttcattctctttctttcccactaagctaataacatcacta

SEQ ID NO: 166829 - DNA, 234 bp, Saccharomyces pastorianus
tttcgatcgataaagtcttctagtttggtgaatttctccatcaaattagccttgttggcgcaatcggtagcgcgtatgactcttaatcataaggttaggggttcgagccccctacagggctatctttttttcaggaaaaaaacagtgatgatactttgtacataagatcatactgttacttgtaggaattattttgaatatcaaatgtcggtttgtttattttttattacatac

SEQ ID NO: 166830 - DNA, 351 bp, Saccharomyces pastorianus
gtgagcttcttgaaccagatccctggaggaggcatctacccagagctatccttagaatgtctttctatcttcccgatccaaccttccttgaccttcagatgtaagaataatccacacaagtttaaaaactttatctctggaattatgttaaatatgtgcttgatccactggccaaatgaagccagtcgtagtgtatattgtaaacgacacttattgaaccaagctgctcaatgtgcgggcgactttatcttacaacatgatgtacttgatgtaacatttgacaccttcatacaaggtctgtataattatttttacgagccacctggcgtcaaaaaattcttcaacgctatc

SEQ ID NO: 166831 - DNA, 135 bp, Saccharomyces pastorianus
tttccctagtgctcctgtaccaagccatcggagaggagatgccttctagaattcaaggcacgtaaggggtacgaaaatcggaacgggccgaaggccgaatagagacggccgtacgtgagagcacatgcaaagtgg

SEQ ID NO: 166832 - DNA, 354 bp, Saccharomyces pastorianus
ataaaaaccaatctaatctcctcgtttggtttccgaccgcatgtaaggttcggctttcttgacttcggatatagcttaaagtcgattcttgacgtcacttcgcaatatcatttcattcccattaaactggcgtatggactttgcgatcctttattaatagtttacccggattccagttttagtttggctcaagctgcaggtgaaaagaaaaaagtcgtattccctacgtatgaagatgttccgaaactactgttgacgtttaagaagattatgaatacgtataggaagggaagtttgggacagagacagagacagagagagtacgggcgaaatgggaatgaatcacattctacg

SEQ ID NO: 166833 - DNA, 303 bp, Saccharomyces pastorianus
ttgatctctttctttgtttactgagggctgtgtctaatcttccctatcaagatcaatgtcagacacgacgacaaggattattacggtgcattcaccgatgaaatagcaaaaaagaagggcttggtcccattcagcgaaatctctgaagaagaaatcactgcttacacattaggcaaaggatacaccactggccatgaattcagacctgacggatccggcgacgaaacacctgaattagccaaaactagctctgaaaacaccatcgagtttgaaatagtttcatcaaaagcaagatgaaaacaa

SEQ ID NO: 166834 - DNA, 270 bp, Saccharomyces pastorianus
aacgaaatagccttgttggcgcaatcggtagcgcgtatgactcttaatcataaggttaggggttcgagccccctacagggctatcttttttaggctcaaatcaaaaaaatgtctgatacatattattttctacttcctttttatatctcaaagaagaaggcatttaaccccattcatgtggtttacacttgtgttgagatttgttgcttgcgcttcttttatccttttaaaccgcttatttatccttttcaacgataaggctcaaatgac

SEQ ID NO: 166835 - DNA, 90 bp, Saccharomyces pastorianus
cttatcggctcacatttgattggattgtgcgttgcctcatttcttgagcttcttggaaagacttacaattttacatatacatataattta

SEQ ID NO: 166836 - DNA, 465 bp, Saccharomyces pastorianus
tcatctactccagcttcaacaccatccggcttcagtgttgaaacttcatctactccagcatccagctctagtgttgtaacttcatctaccccagttccaactccatccagctctaccactgaaagttcttctgttggcacaaccactcttgtctcatcttcaaccttctcatcactagctcctcgtagtagaaacgaaaccactgttgtcccaactacgacagttactactgctaccaccccaacaacaaccacaatcaccactactgtttgctctatgggtacaaactctgctggtgaaaccacctctggatgccatcccaaaactatcacaactactgtgccatgttcaagcggtacaggtgaaagcactatttccccatccaccactggcacaccagctaccactcccgtaacatcaatgatctcaactactgtcgttaccactgaatattcaacaagcaca

SEQ ID NO: 166837 - DNA, 438 bp, Saccharomyces pastorianus
gttagtgaattggaagacaaactcaaggcctcagaagataagaactctaaatatttggagctacagaaggaatcggagaagataaaagaagaactagatgctaaaacgactgaactaaaaattcaattggaaaagatcactaatttatctaaggccaaggagaaatcagaatctgagttgtctagattgaagaagacatcttctgaggaaagaaaaaatgcagaggagcaattggaaaaattgaaaaatgaaatacaaatcaaaaatcaggccttcgaaaaggaaagaaagctacttaatgaaggatcttcaacaattacacaagaatattctgaaaagatcaatactttggaagatgaattaattaggctacaaaatgaaaacgaattaaaagccaaagagatcgataatacgaggagtgaactagagaaggttagt

SEQ ID NO: 166838 - DNA, 300 bp, Saccharomyces pastorianus
gataagcgtaaatttgaaaaagcaaactttgaggagtttgagttggctctaaatgacttatacgacttggtacattgccactcaataactttatgtgaatcgatgcgcacggaagtgcgatcattctacgaagacgaaaagtctggtctaatcaaagtggtaaaattcagaactggtgcaatcgataggaaaagatcttttgaaaaaattgtcattcccgtcgtggtcaagaaaaatgcacaaaagtttctgaccttcgttgaagacgaaccagatttccagagcggaccaatcccttct

SEQ ID NO: 166839 - DNA, 138 bp, Saccharomyces pastorianus
atattcttctcagagcagatccaaattgttcattctcatggtagtgcttccacgttcgctcacgagggaattcttcatgctaatactatgggattgagaactgtgttcacggaccattcactctacggttttaataac

SEQ ID NO: 166840 - DNA, 252 bp, Saccharomyces pastorianus
tcggaaaagcagaggcagttgaagttgcagaagatatacaaacaaaagtacatcggactgggagatgagagcactacacgagaacagtggcagagaaatgtgagaaacgatacactaaatacattacaaggccactccgcatctttggagtacgtttcattgagccgaggagaccttagtatacgtgacactcgtattcacctcctgaaatccatgtcccctggctataaagcctacttacgagaagagagg

SEQ ID NO: 166841 - DNA, 438 bp, Saccharomyces pastorianus
gtggtgagaaacttgcccaccggtcttggtgagccatgtttcgacaagttggaagccatgctggctcacgccatgctgtccatcccagcatccaaggggttcgagatcggctcgggtttccaaggtgtctctgtaccagggtccaagcacaacgacccattctacttcgaaaaagaaaccaacaggttgagaacaaagaccaataactctggtggtgtgcaaggtggtatctccaacggtgaaaacatctacttctccgtcccattcaagtccgtagccacaatttcccaagaacaaaaaactgtcacttatgatggtgaagagggtgtcctggctgccaaaggtagacatgtaacctgccgtgactccaagagccatccctattgtcgaagccatgccgccctagtgttggccgatgccctcttgatccaaaagtca

SEQ ID NO: 166842 - DNA, 90 bp, Saccharomyces pastorianus
  modified_base (51)..(51): a, c, g, t, unknown, or other
  modified_base (58)..(58): a, c, g, t, unknown, or other
  modified_base (78)..(78): a, c, g, t, unknown, or other
ccattaagatgtccggacgcttccctagtggctggaattaatgcgtcaagngaaatcngagaagtaccaggggaaacnaaggactccatt

SEQ ID NO: 166843 - DNA, 363 bp, Saccharomyces pastorianus
atgtcctcacaagaatatacaacttttatagacataccagtgacaagagagcaggttgaacactgttcttactcgttgtggtcctctactgtatcccataatatgtgcgcgaaatctcatagtggttaaaatcccttactcgttaaatattgtattctaatatgttggatacaagactggtatccaagctaaccctcaagtaggaaaacgtccaggtgctgtgtacaccgtaggaaataatatgtaaatgaagataatgactatagtgattgggaggacgatgaggataccgccaccgaatttgtccaagaagttgagccattgatagattttccagaatacaccagaataaaggatgctttg

SEQ ID NO: 166844 - DNA, 183 bp, Saccharomyces pastorianus
aaaagtaagtgtcaatttaaatctgttctgcgcgtcaaaagtacgtttggtggtataccaacaattcttgaataagaagattccattgaaactgcttcgctaggtgcgacgacgactgattctattgggttatccgacacatcatcagaagattcgcattatggtaatgctaagaaggtaaca

SEQ ID NO: 166845 - DNA, 222 bp, Saccharomyces pastorianus
tttgtcaagactttgaccggtaaaaccataacattggaagttgaatcttccgataccatcgacaacgttaagtcgaaaattcaagacaaggaaggtatccctccagatcaacaaagattgatctttgccggtaagcagctagaagacggtagaacgctgtctgattacaacattcagaaggaatctactcttcacttggtgttgagattgagaggtggtatg

SEQ ID NO: 166846 - DNA, 324 bp, Saccharomyces pastorianus
ccgaacgacagctctacgatgcgtactttcactgactttgtttctggcgcacctattgtaaggagtcttctagaaaagcaccattaaggaaatatggggtacaatgttggcaccgccacatgtttgttgttacatacactgtagatgagctatcgatttttgtctgcatacacaagcaatgtttaccctggtcgaaatagaatagtcgtacatcagagctggctgtaagcgtgtatcttatgccctacgtaaatctcactgagtataaagtactttgtcacagtatatgtaatcgatatgatgaacaatacaggaccgattggg

SEQ ID NO: 166847 - DNA, 228 bp, Saccharomyces pastorianus
aatttgatgataatcttcggtattccattatgtcttaatgttataatattatgtgtacggattatagtagatattcttctcatggatttgggaatccacaaactataataagtgattttgcataatactgtaagtgatcatatcttactttttatgcactccgttcattgatcctattataatatcaatctttgcgcttccagatcccattaatttcgatcaaagttt

SEQ ID NO: 166848 - DNA, 159 bp, Saccharomyces pastorianus
cctgcattaagcaactatatcctgaacgtgtcagcaatcaatggcatcatggagaccttggttgaaactaagctgataccaacttcggagaacgtgacgcaatgagctaatgatatgtctgcttattggagtcaattcgactatggcggagagccaacg

SEQ ID NO: 166849 - DNA, 135 bp, Saccharomyces pastorianus
tttgatgctcccctttcaattaacgaatatctattgactggtatttatattactattatatttgttggaataaaaatccactaccgtctatcaactaatagttatattatcaatatattatcatatacggtgtta

SEQ ID NO: 166850 - DNA, 189 bp, Saccharomyces pastorianus
gaggatcttgggatccaaaatagggaatcggtatttctgcataatattgctattatttctccttctattttacatgcttcattatcctattacattatctagctatgcaattcagctctcattaagtctaatgactgtttttcaattgttgtataatcttcttatacctcatttgataatatagcaata

SEQ ID NO: 166851 - DNA, 474 bp, Saccharomyces pastorianus
tcttccagcgccctagcttcctcagcgctccagacctctgctagcagcatcagttcttcagctagattatccaacactaccagatcgtctgctgaggccgccacttctgcgcccgtggatatcactagcgccattgatgcaaacctcataagcacttctacacgcaccgcatcattggcttccaactctgcaagcattgcaatcagtgcaatagacgctgttgaacgcgtcaccagatctggatcatcctccgatgtctcctctgaggtcacctcctctgcctctgcctctgtctctgcctctgtctctgcctctgcctctgcctctgtctctgcctctgcttcaagttcggcacacacttccgccaccaccaccaccaccactgattctacttctgtaagttcgaatttggcttccaccactgacagatctaatcgcaactctgtcacccactctgccgaatactcggaaaat

SEQ ID NO: 166852 - DNA, 357 bp, Saccharomyces pastorianus
acttcctctactggatactccagcagtgtgccacaccatctactgagtgtacattgcgatgcgacttccactaccgactactccagcagtgccgccacatctaccgagtgtaccacttgtgatatgacttcctctactgaatactccagcagtgccgccacatctaccgagtgtaccacttgtgatatgacttcctctactgaatactccagcagtgccgccacatctaccgagtgtaccacttgtgatatgacttcctctactgaatactccagcagtgccgccacatctaccgagtgtaccacttgtgatatgacttcctctactgaatactccagcagtgcttccacatcatct

SEQ ID NO: 166853 - DNA, 189 bp, Saccharomyces pastorianus
atgtctcgtcattacatattttcgacggtactcgccttcctggctctagttaatgtaacttcaggaagtactgaggcatgtttgccatcaggtgaaaaaaaaagcgggatgaatattaatttttaccagtatacgttaaaggattcatccacatactctaacccagaatatatggctcatggatacgca

SEQ ID NO: 166854 - DNA, 222 bp, Saccharomyces pastorianus
caactagaacagcaactagaatccgcgcaaaaggaactacagctcgtcaaggagaagtgccatttgctgcaatcgatgctggacgataccaacatcgactaaaggtacctagagtcccgcagagatgtaaaaaacactgaacgggacaacctaaaggccaccgggattttgcagccttctccagtgagagcggtgaacccactagtggcttccagcccaatc

SEQ ID NO: 166855 - DNA, 237 bp, Saccharomyces pastorianus
gtcgaactttacgttccaagaaaatgttctgctaccaacagaatcatcaaggctgatgaccacgcctctgttcaaatcaacgttgccagagttgacgaagaaggccgtgccattccaggtgaatacgttacctacgctttgtccggttacgtcagatccagaggtgaatccgatgactctttgaaccgtttggctcaaaacgatggtttgttgaagaacgtctgggcttactcccgt

SEQ ID NO: 166856 - DNA, 1200 bp, Saccharomyces pastorianus
gaaataataagcgagatcagcgctgtcaatgacaacgtcaatgttgagatggcagcaacctcgggcagcaagcatctcttggcagatcccggtaaccacccagcagaacatttcaagaatcgaatgtcacggttaaggttccagtcgcgggaatacctcaccaaattcacaaacaatcaatcaaatttcttatattcattacaaaaaaggcatagaacaccgcttagagatatttatttcaagtacacgtcgttcatgggtgctcatactttctacgtcatcgcattgcccatgcccgtgtggtttgggtatttcgatgtaactcaagacatgatctacatccttggttactcaatctacttgagcgggtacttgaaggactactggtgcctaccaagaccaagagctccaccagtggaaagaattgcgcggagtaagtccactacgaaggaatatggggcgcccagctcacattctgccaatgctaccggagtgagtcttctgttcttttggaaaatatgtatggctgaaacactaacgtggccaatgagattattttttttgagtccggtggttctttactacttgactctggtctttggtagggtgtattgcggcatgcatggaacgttagatttgtttagcggtgcctctgttggggctatctgtttcattattagaattggatcgggttatgttttccggaatttccatagtggtgaacacttctggttccccttcttgagtgtagcatgggggcttttcatcctgttcaatcacgttaggcccgttgacgaatgtccttgttttgaagatagcgtagcatttattggtgttgtgggcgggttggaatttagcgattggctaatccagagatacggattgaacctggtatgcagtagatacacagtgtacggcctcaaagtgtttttaagacctcttgtgggtgtcgcctccgtgctcatttggaaagatgtcattagcaagacactagtttatacgctgctaatcaaactactaaaattccgcgatgacagaggtgaaaaggcccatttgcataacaagaacagggaagacgtcgagtgttctctgtacattggtgttcctaagatagaaatcttcgggagatacatcatatatgcaggtatacccgctaccgtcattttattgtgtccaatttttttcacttgggccaacctg

SEQ ID NO: 166857 - DNA, 174 bp, Saccharomyces pastorianus
cggcatccctgggttgcaatcaggatgtggtgcttggtatatatacatccaacgccagtcagtgtttggaggcaattgtaattgttgttgtgaaattttgggctgttccttgaaaagctgatgtctcataatatatttgttgtatcgagcgagatattatttattatattttat

SEQ ID NO: 166858 - DNA, 132 bp, Saccharomyces pastorianus
ccacagggctgtagcaatcttcacccgcttgtcgttgataacgagtttgggccttatcgcttatcaccagtgctaatcaaacagcaaagaacgtttcattgcgaccgatcgtaagcttatctcgctgccgtg

SEQ ID NO: 166859 - DNA, 117 bp, Saccharomyces pastorianus
tgtaacactctgagacaagcttatatatacaaaaagatcaagacgattgccttcgaacgacgtttacgtttcaaatctaccgcccacagacaaccccagcagaagagcgagacacac

SEQ ID NO: 166860 - DNA, 81 bp, Saccharomyces pastorianus
aaccccgtgagagggcaattataaaagagaatgccgccagcttttttctcttccgaatggattgataaggtcaacggtcta

SEQ ID NO: 166861 - DNA, 201 bp, Saccharomyces pastorianus
ctcctcgaggatataggcatccccaaaaaggaatcgatatttctacataataatatcacgattgttcctcattccatttcatatgtttcattatcctattacattattgatccttgtatttcagctttctctaacttcgatgacagtttctcataccttatgtcatcatgtccacatttgacaccatataagataatatac

SEQ ID NO: 166862 - DNA, 243 bp, Saccharomyces pastorianus
gttttagttcaagatttattgcacccaactgcagcttctgaagcaagaaagcacaaattaaagacattagtccaaggtccaagatcgtacttcctagacgttaagtgcccaggttgtttgaacatcactacagttttctcacacgcccaaactgcagttacctgcgaatcctgctcaacaattttgtgcaccccaactggtggtaaggcaaagctttctgagggtacatctttcagaagaaag

SEQ ID NO: 166863 - DNA, 105 bp, Saccharomyces pastorianus
atcaaagtttacgctgaatagctggtggcaaagtccaaagcaacctatccagataccgaatttaacatctccggtaataattggacgtgaccaggtaacttcaac

SEQ ID NO: 166864 - DNA, 549 bp, Saccharomyces pastorianus
agggctatttatggtataatattaatattaattctgctactgttactagacggtttcccgttcaaacttacacttttttccattgcatgttacatagtatattaccaaaacttaaaaagtttcccatttatttcgttaaccagcccaactttcctattaagctgcgtatgtgtggtcttgaatcactacttctggttcaaatattttaatgatacggaagttcccccacagttcaaatttgatccaaattatataccacgcagacgtgctagtttcgctgaagtagcctcattttttggtatatgcgtttggttcataccatttgccttatttgtttctctgtcagctggtgattatgtgctaccaacgactagtgagcaacatatggctaagaaaaatgatgacatcacaacgaacaaccagccaaaatttcgtaaaagggctgttgggttagctcgtgtagtcatcaactcggtaaggaagtacatctactctctagcccgtgtattcggttatgagatagaacctgactttgatagattggctgtt

SEQ ID NO: 166865 - DNA, 945 bp, Saccharomyces pastorianus
agtacagacaatactcaggctctcactgctagtgtctccagcagtaatgctgacaatcacaataataacaagaagaaaaccagcagcaacaacaacggcaataacagtaatagtgcatccaataaaaccaatgccgatatcaagaattctaacgccgacttgagcgcttctacctctaacaataatgcaataaatgacgactcacatgagagtaattcagaaaaaccaacaaaggcggattttttcgctgcaaggctggctacagctgtaggtgaaaatgaaattagtgattctgaggaaacatttgtttatgaatcggcagctaattcgactaaaaacctaatatttcctgactcctccagccagcagcagcagcaacagcaacctccaaaacaacagcaacagcaacaaaatcatggaataacctcaaagataagcgccccattgctaaacaataacaaaaaattattaagccgactgaaaaattcaagacatattagcactggtgccatattgaataacacaatcgcgactataagcacaaatccgaacttgaattctaatgtgatgcagaacaataacaatctgatgtcgggacacaatcacctggacgagttgagcagtataaaacaggagccaccgcatcaattgcagcagcagcaactaccaatggatgtacaatcggtagattcgtatacctctgacaacccagacagcaatgttattgccaagtcgcctgataagaggtcaagcttagtatccctatctaaagtttctccacatttactttcatccacatcaagcaacggtaacacaatatcgtgtcccaatgttgccacaaattcgcaggaattggaaccaaacaatgatatttcaacgaagaaatctctttccaattctactttgagacattcctccgctaatagaaattctaattatggtgac

SEQ ID NO: 166866 - DNA, 672 bp, Saccharomyces pastorianus
gacatcttcgacaactgattgaaaaactaccctactttggctacggaagacatctccttggccgacttggtggctgcctcgattttcaccagatactttgatagcctgttcggtactgaatggagagctcaacatccagccatcgtgagatggttcaacaccgttagagcctcacccttcttgaaggatgaatacaaggatttcaagttcgctgacaagccattgagtccccctcgaaagaagaaggaaaagaaggccccagccgccgctcccgccgcttcgaagaagaaggaggaagccaagccagctgctaccgaaactgaaacttcttccaagaaaccaaagcacccattagaattattgggcaagtcaactttcgttttggatgactggaagagaaagtactccaatgaagacaccagaccagttgctttaccttggttttgggagcactacaacccagaagatattccctgtggaaagtctcatacaagtacaacgatcaataaaatatgactttgcatgaaaaaaaaaatttgtcggtggtttattcaacagattgtccgcctctaagcaagtacatcattggttgtctgggagactacagttacatcatcaccggacggtattgttggtgcagttatggttagggaacaagattaggttccagct

SEQ ID NO: 166867 - DNA, 123 bp, Saccharomyces pastorianus
aaggctaaaaaacatgtataattatacacaagaaaaaaaaaaaaaaaaaaaaggaacactttcacacaagcaagtatatctcatgagaattttttcgagtcttacagaaccatatcttgcctc

SEQ ID NO: 166868 - DNA, 552 bp, Saccharomyces pastorianus
ttaagatacgtttctttgtttttgaattcatcgactttaggttttcttttcctgataacaaggagaatcaattgctctcgtttaatttcagcaacaggtttgctgatattatccaactgggaaactttcaggaatgagggcactattatatcatttgacagtttagaatggtgtctgttctcagtagtaatttacagttttataagcatttcaattgcaaaactgggaactacgaattggtttgctaatgtgattacattatctatttctttagggctggcaatctcttctaaatttattggaattgtcacttgggccttcgtaattctttcttttgtacgtcaatttgatagactgataagcgacgttaaagttacgaccatccaaataataaaatttgtcattctctgtctattattcgttttgattatccctggttccatcttcataataagttattcgaacttactttcgaattttaagacagacacgccacaattttcaaaatatatgagcacatatttcaagtcctatttaagagggcctcaagtt

SEQ ID NO: 166869 - DNA, 180 bp, Saccharomyces pastorianus
ttcaaattaaacatttatgtggtagtcatatatatgtgtcatgcaagtctttacattaaatatatggtaaccaccagagaacttgttatattagtcacaattaataatgttggaataaaaatccactaccgtctatcaactagtagttatattatcaatatattatcatatacggtgtta

SEQ ID NO: 166870 - DNA, 210 bp, Saccharomyces pastorianus
agatcgacactgatagtgatatacagcaacacaatggagcgattaccattcactcggaacggatccggacatcagccaaatatactccgggatccctaaaaggtccgtacacacttaccctatccgagcgaaatacactaattatatataacagggtaaaaaggtgcgcaagagaaaacgcacaggagtaggagcatcagtaaggggaac

SEQ ID NO: 166871 - DNA, 261 bp, Saccharomyces pastorianus
gtgtgtgtgtgtgcgatacccttttttgaattctttctaccttttatccctcactatgcctttcttttatttgtttcgtccgtacgctttactgtaaatgaacgttgttactacttagtgtgcgtgctcaagttgaattgtgcttttttttatggttatgatatttgaactaaaacgagtgtgtgtttcgtatttagacagatcccgtaaaatccaaattgttcgcttttttccttttatcactattattttttccactct

SEQ ID NO: 166872 - DNA, 213 bp, Saccharomyces pastorianus
atactagacgttctactcgaggacataggaatccttaaaatggaatcggtatttctacataataatactcctaccttctgtttcttatgtttcattatcttattacattatcaatccctgcatttcgcttccattaggtttgatgactgtatctcaatctttatgtcatcttcttacacctcatgtgataaaatgctagtagcatgaatactt

SEQ ID NO: 166873 - DNA, 204 bp, Saccharomyces pastorianus
gatgataaattaacagtaacggatgcacatctagtagagggaatgcaactccacttggtattaacactaagaggtggtaactagaaccattttccgtcatttatggaattttatcgaaggtgttcattagaaaagaagacaaaacgaacataagttcacttggactttggaaggctaccgcccccaatttgtcaaaaaaaaaaa

SEQ ID NO: 166874 - DNA, 192 bp, Saccharomyces pastorianus
gccagaaagtggaacgcagacaagaccatcgccacgtcgggtcacgatttgtacgggcgcaagaacactattaacaagatcatacacggtggcgaaagagctgtgtatgagaacaacgagaccggtgtcattaagaacttggaattgcaaaagcccaccatccagggttacgacaatgacatgaggccagtc

SEQ ID NO: 166875 - DNA, 528 bp, Saccharomyces pastorianus
acagtgaccacgacaaacgatttgggtaccacagttacattgactcaaacgttcacacattctagcaccagtgctacttcatccgcctcctcgtctgtgtcctcgtctgtatcttcgtctggttcatcctccagtgtaaagacgaccacatcgacagggagcgcagtagctgaaacaggcaccaggccagacccctccacagacttcacagaacctcctgtgtctgctgtcactagtctatctattgactcatacattaccatcactgaaggtacaacctccacttacacaaccacacgtgcgccaacgtccatgtgggtcaccgttgttagacagggcaacactgtcactgtgcaaactacttttgtccagcgtttctcctcccagtacgtaacagtcgcttctccctccgtggggtctattgggatgggtactttaaccggtactgtaggcgttattaaatctgcaataaagaaaacagtttcgcataatgaggcccagcatctaggtatgagttcgtttacttca

SEQ ID NO: 166876 - DNA, 279 bp, Saccharomyces pastorianus
gctagcaccagtgaacatcaatttactgctattaagcgccactttaacaaatgtgccagaaaacttttgaaagaagcaatcgactccaaatcaaactcagaaactgctacggtggttctgcaagaaagattttctggcatttgcttattgaaagcgtcttcaattatattaaaactaaaattgaagtttccaaaaaagaaagatagaactgatattagcaaattgtgtgacaagaaagaacggatgacacagtggttagaaatttcaattttgatgaac

SEQ ID NO: 166877 - DNA, 78 bp, Saccharomyces pastorianus
ctcattagtgaccgaacttcttgcaccaagtcctgtgcgagtgctgcacggccttgccttgagggttctgtcgccccc

SEQ ID NO: 166878 - DNA, 87 bp, Saccharomyces pastorianus
cctgtgttcctaattatatttgcgcacagtgacagtgcggcaattgatatgtcagggaccactggaaaacgacgttgcctagtagtt

SEQ ID NO: 166879 - DNA, 141 bp, Saccharomyces pastorianus
gcttcagtaaaacaaaccaacaaaactctccgggagggcaatccagagcatagcacaatcttttacatccgcggaagcattcttgctccgtcatatttccttccggacttcgctcggactctattttccgcggaagatatg

SEQ ID NO: 166880 - DNA, 942 bp, Saccharomyces pastorianus
aataatcattcattacctcgtggtagagcctatgctttggttacttctagggaagcgtacacaaaccaaattcgtcacacgtttccaatttgcaaacctcatatgataaggtttccagcaacgccaactttcaacggataatacacctgttttatctgctgctccagagaatcatcatcatcgtatctgctcaattactgtcgtcacagaatggaccgtacttatagcgatataatcactccgaatcaagccaagccatctagttggtcatttttaggacgcccgactataatgtcgtcgatgtattttcaatcagatactcaaccaacaattttatagtatatatcaccattgagaagcccttcacgtagttgaaacagtatactaacacaacaatctcgtatgttttttgatacaccaatcacgtctcgcaatttttcaccgccacacattctgtgggggaagaatacttctacttggactaaattctacatcaagttttgaaaaattccaacccacaggcaacattcattctaatgaacagggtgaattctgcgaccactatcgtacgaagagcatttatatttgtacaaaacatttcaaacgtttgttccgtttcatttgttgccaatttggttcaagaaaactttagaaatcaattgcagcaattttcaaactgttctctataaagtatgaagaatattgaaccttgaatataatggaagaatatctgcagatttatttgaagcagtgaacactctgacctacagattaaaggaagacgatataaaggtaatgacagactaacttggcagtttatctaaaaaacttttcggagaattcagttgcttacgccagcaatactgtggtagaagaaatattacttggtattcaagccatctacgaggaaggaaaatttataaaaaacacgagtacaataac

SEQ ID NO: 166881 - DNA, 189 bp, Saccharomyces pastorianus
aagaagcaagttgttttagataagacctctgtacccaaaagtttagctcacctattaaccataatggatgacaggtcacgtatgtcaaattcttcaatgtcttagacaacatcttcttcgtcatcatcttcttcttcgtcatcatcgtcgacattatcgtttccgtcttcccaagaaaaaacctgaaaa

SEQ ID NO: 166882 - DNA, 339 bp, Saccharomyces pastorianus
aaaaaaaaaggttgccaagtaaaagcgaggtatttgaagtatactgcaagcatcaccgaaacaggaaatcacgaagctgactcatctgtgattttccgtccccaccatagtgatgtaacatgcagtaacacacggcgggccgaaagtcggactttaccccagatttgtagttgtatcctattggatcacgggcgacagacaagacccgaagtgcggaccggcatggtcagcttgcacggaagctttaagggtttcccttgtttcggcattagaagaggcatttcgcacgttttaccgggtcagaaacttcgaggaagctgtgacaattggaaaaaaaag

SEQ ID NO: 166883 - DNA, 186 bp, Saccharomyces pastorianus
tcactagacttcttgaatcgagtctttcatccagacgaaaagggctaatttgctatgcttcttctaacttgcgaggccacgaagtaatctgtcttgaagcaagttcaagattttgaagaaaacgaccatcccaacagagttttgggacatttacactccaccgccttccaatacactccattatct

SEQ ID NO: 166884 - DNA, 270 bp, Saccharomyces pastorianus
agcgctgccccatcttctagcaaggcttgttccaccgaatcctcttcttcctcttcttcttccaccaaggctccttccagtgaagaatcctcttccacttatgtctcttcgagcaagcaagcttcctccactagcgaggctcactcttccagtgctgcctcttcgaccgtgtcccaagaaacagtctcctctgctctaccaacttctaccgccgttatttctactttctctgaaggttctggtaatgttctagaggcaggaaaatccgtt

SEQ ID NO: 166885 - DNA, 216 bp, Saccharomyces pastorianus
atgttgctatatttatatattttatatattgctctcaaaactgtatctcatctttttttctgcaatccttgctttcgtaatctaagtgtgggtgacatgctaaatccgcggctttccttaagctttttcacaaaccatctattatgtccagaagctccgctgattatccgtggaaaagggtcttattctgccgtaggaacttcttctcgagaaaaa

SEQ ID NO: 166886 - DNA, 369 bp, Saccharomyces pastorianus
tcaatagacgtttcctctgacagaagaaaggccagaaaggcttatttcactgctccatcctctgaacgtcgtgttttgttatctgctccattatccaaggaattgagagctcaatatggtatcaaggctttgccaatcagaagagacgatgaagtcttggttgttcgtggttccaagaagggtcaagaaggtaagatttcatctgtttacagattgaagtttgctgttcaagttgacaaggtcaccaaggaaaaggtcaacggtgcttccgttccaattaacttgcacccatccaagcttgttatcactaagttacacttggacaaggacagaaaggctttgatccaaagaaagggtggtaaattggaa

SEQ ID NO: 166887 - DNA, 771 bp, Saccharomyces pastorianus
atgtgtggcatttttggctattgcaattttttaattgagaagacaagaggagaaatcatcgacactttaatcgaagggttacaggcattggagtacaaggaatatgactccagtggaatttcgatccaaggtgatgagctgaagtctctcaatatttataagcaaaccggtaaaataagcagtttgaaggaagaaatcgacctttacaatcttaataagaacctgccctttatttcgcattgtggcattgcccatactaggcgggcaacacatggagggctaagacgtgcaaattgtcatccacataactcagatccatctaatgaatttgttgtggtacacaacggggttattaccaacttcgctaatttgaaagccttattgatggcaaagggctatgtgttcaaaagtgacactgataccgaatgtattcctaaactgtacaaacacatttatgatacaagcattgaactcgggtacaacctcgatttccatgtattaacaaatttagtacttaaagaattggaaggctcttatggtctgctatgcacttcttctcattttcccgatgaagtggttgccgcaagaaagggttccccgttagttattggtgttaaaggtaaaactgacatggacgtaaactttgtcgaggtggaatatttggatcaagaagaagactacttgaagcttaatactcaaaccaagagttctggtaatgtcttggctgccgcacctgtaaaatataacacttgtttaaggaagtcacccccc

SEQ ID NO: 166888 - DNA, 237 bp, Saccharomyces pastorianus
tttctgaagttttgtacttttaccagtccatctaataccatatattttgataataattatgtctttgacagtaacttatcatcaggactgttggaataaaaatcaaaaatcaactatcgtctatcaactagtagtcacactaccagtatattatgatatacggtgttagatgatggcataaggtatgagaagctgtcatcgaagttagaggatgctgaaatgcaaggattgataatg

SEQ ID NO: 166889 - DNA, 231 bp, Saccharomyces pastorianus
gtaggtattcagaatatactagaggttctcctcgaggatcttggaatccacaaaagggagtcgataaatctatataataaaaattactttatcttctttcgttttatacgttgtcgtttattatcctattacgttatcattcttcgcatttcagctttcattagatttgatgactgtttctcaaactttatgtcattttcttacacctcatatgattatatactagaaaca

SEQ ID NO: 166890 - DNA, 291 bp, Saccharomyces pastorianus
atgtctaatccatgccagaaggaggcctgcgccatccaaggtttgtaatattaacttcaaaagattcgatcgtttttttcttttcactaacgttttttcacattaattttagattgccttctatcacatcagtacgatgatgctaaatgcgctaaagttatagatcagctgtacatctgctgctcaaaattttacaaggacaatggaaaagattcacggtcaccctgctgtccgctaccttcgcttcttgagttgaagatgaaacagcgaaagcttacaccaggggacagt

SEQ ID NO: 166891 - DNA, 240 bp, Saccharomyces pastorianus
caatttgggggcataactaaccttgattttgacgcttttgagaaagcaatctttttgagcggcacagcccctgaggctgtagctgatgctgcgttgcagcgtattgggcttacgggactggccaagaaatcgatggacatcaacgagctcaaacggtcggaagatctcagcagaggtctatccagctatccaacacggatgtttaatctaatcaaggagaaatccgaggtgcctttaggg

SEQ ID NO: 166892 - DNA, 204 bp, Saccharomyces pastorianus
atcccaacaattgtctcaatatttacctatttctcacattgtcaccgctcgaaagtgcattttgttggaataaaaatcaactatcatctactaactagtatttatgttactagtatattatcatatacggtgttagaagatgacgcaaatgatgagaaatagtcatctaaattagtggaagctgaaacgcaaggattgataatg

SEQ ID NO: 166893 - DNA, 411 bp, Saccharomyces pastorianus
gtccaccaagaaccatacgttttcaatgctagaccagacggtgttcacgttatcaacgttggtaagacctgggaaaagttggttttggctgctagaattattgctgccattccaaacccagaagatgttgttgccatctcttccagaacttacggtcaaagagctgtcttgaagtttgctgctcacactggtgctactccaattgccggtagattcaccccaggttctttcaccaattacatcacccgttctttcaaggaaccaagattagttattgtcactgacccaagattagacgctcaagccatcaaggaagcttcttacgttaacatcccagtcattgctttgactgatttggactccccatctggattcgttgatgtccctatccaatgtaacaacagaggtaag

SEQ ID NO: 166894 - DNA, 99 bp, Saccharomyces pastorianus
aaaaaaaaaaaaaaaaaaaaaaagagaattcttcatgtgatttaccatgattctacgtttttgcaagcaaaaatgaagataatccgagcgcatgcgcaa

SEQ ID NO: 166895 - DNA, 315 bp, Saccharomyces pastorianus
aacgagaagtcaggaaactcgactgctcctggtaccgccggttacaacgataatttggcacaagctaaacccgtctcaagttacatttcccatgaaggccctcccaaagacgaactggaagagcttcagaaggaggttgacaaccaactagagaagaaatcgaagtcggatttactatttgtatccgtctgctgtttgatggttgcttttggtgggttcgtgtttgggtgggatactggtactatatctggttttgtcaggcaaacagacttcattaggcgatttggcagcacccgtgcaaacgggactacctat

SEQ ID NO: 166896 - DNA, 366 bp, Saccharomyces pastorianus
gaaccattttcaccaacgacatgtgaaactgtaccgttgtacccccaatgaagtgggttaatagctggccactttgaaacttctgacatatctttttctgttagtttattcgttagtcgagtgttctgaagataacgttcgactttcgagacacgtctcatactgttaaatagtaaggaaaatcttcgaagggactattacttccccggccagcacccgatattttacatccgctcctaatctgcacatgcggagggcttaaaaaaaggatctcggaaccggaacgagtttgccttttttcgttcatcttccgtgccgtgtcgcaaatcattaaacagatacaaacagggccctttgacggttatg

SEQ ID NO: 166897 - DNA, 129 bp, Saccharomyces pastorianus
aacgcatattggctccattgcaaagcgtcaatcaagtaagagaagcaaaaccataaacgcaaatttctcggcagggccaggaacaactgccttgcttatcttatctggatctttttatcgtgcctcgtc

SEQ ID NO: 166898 - DNA, 90 bp, Saccharomyces pastorianus
aaaggcaattccacagagcgcgaaaagggatgcgcgaacacggcacccaaaggtgcgctgccgttacgtttggctaacaaactggcgttt

SEQ ID NO: 166899 - DNA, 204 bp, Saccharomyces pastorianus
atggagcatactgcgcatatatttcctattatcatcaagggttccccaccagtaatgtcttctaatccccgacgacaatatcgtttaaatctccggtcaattaagtgcctcaaaaaaccccgtgtgcgggtatggcaagcgccgtggcccctggagccagcactatcagcggctaaaatgcctcgagctgcgcacgcccacgca

SEQ ID NO: 166900 - DNA, 90 bp, Saccharomyces pastorianus
gctaaagttcacggttccctagctcgtgctggtaaggttaagtctcaaactccaaaagttgaaaaaactgaaaagccaagaagccaaagg

SEQ ID NO: 166901 - DNA, 225 bp, Saccharomyces pastorianus
ccagaaaagaccttaatgatgaaaagcacaaacccaaaaaacggcactaatttattttcaacgcccgcggtcgatctaaccgcagccacaatttggtcacgagctttctaacccaactattctcaccgtgcgaaacgaaaattcatgactctttccaagcatcgtgagttcatgactactttcgcatatataacaggcatatacgtacatatctgtatatatatg

SEQ ID NO: 166902 - DNA, 303 bp, Saccharomyces pastorianus
ccaacgacgtgccctccaccaagggtgttctcatgtagcaccacttcacaagagtatttaaagcttatgtatgtatatatccagtacagtaaataacggtaatagtaacaaaaggcatcaccctgcacatatcaccatgcacgaggcgcaccttccttttttttctttcttcttctttcttttttttcttcgactcgagaaaaaattataaaagagatggaggaacgggaaaaagagagttgcataggaacgtgtctaaggacatatagcaagaataccaagcaaagcattatatattatggc

SEQ ID NO: 166903 - DNA, 213 bp, Saccharomyces pastorianus
atttatgattgttaatattgattacttattataataactagttagtgtaacccttctataagaccagaaaaaaaaataacaccggaaaaagcgccccttgtattccatttagtttctccttcaatgcaagacggaggggttcctcttcgtcttgtaatccttgattgccgccttgatggcgtcttctgcgagcatggagcaatgcagcttcac

SEQ ID NO: 166904 - DNA, 318 bp, Saccharomyces pastorianus
  modified_base (247)..(247): a, c, g, t, unknown, or other
atttttttttttttgtttttgtttttgtgttttccaagtttcctagaagccggaacaaaagacacaggcttaaaacggcgtagagccagaatttaaaaaaccacgcggacgagacgggccgtgactggtgccgtcggatccccgcgtgtaatccgtggcacgctaaagggtgaaatcggtttatccgagcggtttatgggaagggtcttttgctatttcgcactcttgtgttcctggttgtctcggnactactacttcgcctgtgcttctttattatcatcatctcacttctctcgtgtgcgtgctgcgtgtgtgtgt

SEQ ID NO: 166905 - DNA, 333 bp, Saccharomyces pastorianus
agtagggcgtgctctagctcctttttacataacatcctacgtatccgcccacatacacattctgtatactacaatatatgcataccagttcaagccctacacccaaagagtctctttttctctctatctctctctatctctctccactgtatttactgttttttgattttctgcaggtcctgcttttgattcaccggcagcggcctcgaaactgccgttttcttttttttcgcactcatttttttttttttcttcttccaattacgtcaagcagtgtttgactcattttctttgattaccaccacttcgaaatgccaaaaaacaagaaaaaag

SEQ ID NO: 166906 - DNA, 507 bp, Saccharomyces pastorianus
cctgctacagatgatgcccaagcaactttgaatacggattcatccgaagcaaatgaaattgtcaagaaggaagagggctctgatgaaaggaagagacctcgcgaagaggacaccaaaaacagtgatggtgataccaaagatgagggcgataacaaagatgaagacgatgatgaagacgacgatgacgatgatgatgatgaggacgatgacgatgaagccccaactaaaaggcgtcgtcaggagaggaacagattcttggatattgaagctgaggttagtgatgatgaagatgaagatgaagatgaagaggattcagagttggttcgtgaaggtttcattacccatggtgatgatgaagatgacgaagcaagtgctccaggcgcaagaagagacgatagattacatagacaactggaccaagatttgaacaagacttcagaagaagacgctcaaaggttagcgaaagaattaagggagcgttacggtagaagcagctccaagcaatac

SEQ ID NO: 166907 - DNA, 102 bp, Saccharomyces pastorianus
gcagcctcctctttgcatcgtttctcttggtttcatctttccactatccaagttaccctgactctcgttcctgtctatcatgagtctcttgtcaagcctaca

SEQ ID NO: 166908 - DNA, 105 bp, Saccharomyces pastorianus
atgaccaccaattctcggctctgtccttcgagtccatcttcttccctaataaaacatttaactacatccgggggaccatcaacctcacttactataatgttgtca

SEQ ID NO: 166909 - DNA, 927 bp, Saccharomyces pastorianus
tcttctactacctcttctaccacctcttctactacttcctctactacttcctccactacttcgtctactgctccctctacggcttcctctactacacgcgtcacgggggttcttctacatgcagctattacttcttctccaacaggccattgcatactctctcttataacgacgaccggctcctgtaaatcagcagacgcagtctcttccgatttgtccttgattaaatctaagggtataactagaattcgtgtttatggtactgactgtaattcttttgaaactgtccaaccagctgccgtgaaattaggtattaagattaaccaaggtttgtacatcaccagtagcggtgttgactccatcgatgattctctatccactttgattgaatatggtcatactaacggttgggatgtctttgattttattactgttggtaacgaagcaattatcaacgggtggtgttccgtttctgatttgattagtaaaatttcatctgttaaatctcaactaaacagtgctggctattctggtcaaattactacaagtgaaccaccagtctcctttgaaaataatccagatttgtgtacaagctctggaattgactttgtaggtattaatccacacgcctattttgatgctagctccagtgctgaaagcgctggcacatttgttaagggtcaagtcgaattagtaaaaagtgtttgtggtacttccaacattttcatcactgaaactggctacccttcagctggtattcaaaacggtggcaatatcccatctacctccaatcaaattcttgccgttcaaaacatcttgaacgaaatggacctggatgttacaattttatcgacttataatgattactggaaagaacctggtcaatacggtatcgaacaatcattcggtgtcattgaatatctgcca

SEQ ID NO: 166910 - DNA, 591 bp, Saccharomyces pastorianus
gcttcagctgaacaattaatagaagactatctggtgtcacagtataagccgtacgccgttaatgatataatccagaatctgaacaataaagtaagcaggacaaccgccgccaaagcattagaaaacctggtcaacgaaaagcgcatagtatccaaggcatttggcaaaatcttgatctactcttgcaacgaacaggaaccggaattacccaaagatattgacttttctaaatttgatttcgaaacagtgtcgcagttgagaaatgatttgatagaattagaaagagacaaagcgaccgccagagacgctcttgactccgtaactaaagaaccggaaaacggtgaacttttaagtatcatcgaaaaagaagaaactgaactgagagagattgaatcaaaattggaaagcctacagaacgattggaatccggctaacgatgaaatcgttaaacagataatttctagagacacacttttgcagaaggaaatttccaaacggtcaaaaatctgcaaaaacctagttgctacaataaaggactcagtgtgcccaaaaaatatggatgaatttttggtatgtatctggaatgaattt

SEQ ID NO: 166911 - DNA, 126 bp, Saccharomyces pastorianus
ttctcacacactgttgcttctaagcatcccatcacaggtatcatcgtccaatttgaaggtattgctactggtttgagaaccaattctttgagcactttggccgatattttcatccttgcttttttt

SEQ ID NO: 166912 - DNA, 498 bp, Saccharomyces pastorianus
gtcttgactgcaacccagggcaacagacagtatattttcgctatcagtaccagattctctagttttgccttcagtgtctccgaaggaactttcgcagaagcctacgcttattgcctaggctacgacggtgttatcgctactagtgacatgagcatccactacctctggcgtttcttcactgccactggctcagtcacttcaccttctaaagcttctactaccgtctcagagtcagtagtttcctcatctagcgcctatctctggtgtatccaattccatcacagcctctggttcaatcacttctgctgcctctgctactagctccacctcaggttccacctctgcttatactacaacactaaactacataaaaaccaccagcgcagtcgtatttacatttcagaaacaactaatcctaatggtaacattcacaccattaccacaaccactccctgttcacctaccactgccaccatcaccccttgtgacgaaaacgga

SEQ ID NO: 166913 - DNA, 381 bp, Saccharomyces pastorianus
atagctgtcgttgtccgtggtcgttacgccggtaagaaggttgttatcgtcaagccacatgatgaaggttccaagtctcatccatttggtcacgctttggttgccggtattgaaagatacccattaaaggttaccaagaagcacggtgccaagaaggttgctaagagaaccaagatcaagcctttcatcaaggccgttaactacaaccatttattgccaaccagatacactttagatgttgaagctttcaaatccgttgtttccactgaaacatttgaacaaccttcccaacgtgaagaagctaagaaggtcgtcaaaaaggctttcgaagaaagacaccaagctggtaagaaccaatggttcttctctaagttgagattt

SEQ ID NO: 166914 - DNA, 756 bp, Saccharomyces pastorianus
gatttgcctctaaaattcaaaaaattactaagcgttcctgataaaatttcccaagtagctttactaggtaatagcacgaagtcctataattttttgaagtttgtaaatcaaatatcgagtaatataacaatcgtaagaggagagtttgataatgggcatttgccaagcacaaagaaggataaggtatccgaaagctccagaaacctggaggagattcctaatgaacagtataataaaggcaaggcgctttgaaaattggttgttgcagcggttatactgtggtacccaagaatgaccccttgtctttgtatagcatagtcacgccagttggtcatagatgtttcctgtttgggtggcactcataacgtcagaagcttacaccttggaagggaagttctttgtaaatccaggtagttgtacaggagctttaatactgattggccgattgtctttgatgtcgaggatagtgatgaagctgtaacttcagaggtcgagaaaacacctaaggaaagcggagccaggcaggaggacgattctgttgagggagcatcagaaactgacgtagctaatgggaatgagcttaaagctgaaagccaattcaaagaggatgaggtcaatatatcagatctggatgtaaacgggtctaattcgccaagtttttgtctcttggatattcaaggcactacctgtacgttatacatttatctttatgttgatggggaagtgaaggtcgataaagttgtttatgagaaggaa

SEQ ID NO: 166915 - DNA, 231 bp, Saccharomyces pastorianus
ttcctgtatacacgtaacccgcgtgcgcctggtaacctcagaaggccccattgtccggttttcttacggaatggaatcatcatcatcatcctcagcatcaccatcgccgctacttctgctattatcaagatcattcctgatggctgatctttgttatgtgaccctttggtattcgctggcaccttactattttcctttgtcttttcttgattttttgaccatcttgacctt

SEQ ID NO: 166916 - DNA, 384 bp, Saccharomyces pastorianus
tcagtgctcgagccctgtgtcaagaatgtaataatgcccatcgcagacgtggtctaggaatagagaaccggtctccgcaacctcaaagctccctgtcgagcagtccacttactttgtcgagttaattgcaacttattgaacttagtaacttcttttttttgttccgcaagctctctttcatcctgaggagcactaactacaatcgcaactacaagactagaatagctgcttaacagaaaatactatccattctccaaaaaacaactttcaggctctaacatacacgtgaataaagaaggatttacaaattatggtacagcttcaactttcgttattgttggtacctattatatcgctactccacctggtggtagccacgcccta

SEQ ID NO: 166917 - DNA, 249 bp, Saccharomyces pastorianus
agaaaaatattgtcttatgagaaagaaataaaagaatctggtgccaagctggtcgtcattctagaagccacccttggtggttatcccaaaggatcaagttttggggtttatctaggctatcgtttgcaagaaggaagagaagggtttgctaggtatcgtgcggaggcaatcgaaatagggtctggtgattaatatccaggaataagccaattatgtgcattatcaaaggctactaacgcttcgctatgt

SEQ ID NO: 166918 - DNA, 366 bp, Saccharomyces pastorianus
atgcgcaataatgtaactgaattggttgatgccataataagtgtagaagctcctggaacattgccggacactctttctggatctcaaactttacagagacgcgtgaactattttgatgtcaattggatatcatggaattgggacaacgcaaacgttgatcttactgaacgggcagaaacaagtaggcctctccttgaagaggaatatgatgaaggtatattcgactggtttaataataacccaggatggaaatattgttggtcggtaactgataatcctgacccagggcatatagagaattactctgatattggagaagagaatgctgtccatggtgaattgtattttaatacatatgggggggtt

SEQ ID NO: 166919 - DNA, 93 bp, Saccharomyces pastorianus
aaaaaattggtctctagcgggatcgaaccgctgatccccgcgttattagcacggtgccttaaccaactgggccaagagacctgtaatctgtgt

SEQ ID NO: 166920 - DNA, 693 bp, Saccharomyces pastorianus
tctataaatctgttttcaagtaggaagcatcccttcaagtcatttacggcggatggagagggcttgccgttatttgccttccgcactaagaaacctttttttgttaggcgagattatgtgggttttcttttttatcgatacgagatattgaaaaatggggacttccctgaagagtcggattatgaggcaaaaggagagtgcgacggtttcactctgtttaaagttcttttttgcactgttaaggtgaagaaaacaagctattatcgcaataaggagagcatatcccacatactagaactcaacttcggaaaaaaggaagattttaggatattgacacttgttagatgctctgaagttagatcagtatatgttgtagagggtaaaaaggttattatgaaatgggttttcacctcagagagtaaatttaatttgaattcctcactgttcatcataaaggccgcaattggctgtttaccagaggtgggtgatagcatagaggacatacctaaatttgattgggactcctgccctactatcggatgtatttgcagaactaaggaggctctttttcaacttgagtctcgaaaagatatacatatatgccctcaattatttttaggggaaacccggaccgccacattatgatgagatttcagttccgtggctaaaaaaatgaatatatgcacttcagta

SEQ ID NO: 166921 - DNA, 420 bp, Saccharomyces pastorianus
ctcatcgataaaattgtggcagcggtaccaggggtccctgatacaggtggtaatgcttctgctctatcgtttcagaaacgcagtcaggagttcgctacctcatggatatcaatgacatatgatcagagttatggtgaccttgcgcaaacgtggcaaaatgacgaaggcggagcaggaaattttgattcttatgcggaagaggagttacagaatttcttttcaggtaatagagactggaagtactgctttgctgctgaggacacgaagagtggtgagccaattgattacgatgacatacctggtgacggtccaggcacgggttcggcattcaaatcggagatatatttcaacacttacggtggtatagataattattgtaatgacgagcatatcggtgctcagaacactggagatggtcga

SEQ ID NO: 166922 - DNA, 222 bp, Saccharomyces pastorianus
gggaaatgcataccagactacaacctaatcgttctctctgacgtatgtgataagacaaagaaaaaaactgtgcctgtaaaaccattgcaactagttaaaggtgataaatgtaaaaaaccaatgacagtcaaatcagtggatatttcgtgtgagggagttccaaagaagggaacgaatgataaagaaatagtggttacagaaaacaaatttgatttcaagatt

SEQ ID NO: 166923 - DNA, 294 bp, Saccharomyces pastorianus
gcctgtttggacttcatcaatgcactcgataaatgccatcaaaaggaatattacaagagaatatttggcctttgtaacaacgaaaaggatgctttgaacaagtgtctcaaggaggcaagtttgaataacaagaaacgtgctgtcattgaaagtagaataaagagagctgatgtagaaaagagatggaagaaaattgaggaagaagaatatggcgaggacgctatattaaagactatcttagatagacagtacgccaagaaaaagcaggcaagtgacaatgatgcgaactcgaaa

SEQ ID NO: 166924 - DNA, 183 bp, Saccharomyces pastorianus
atgcagacagaagactctcaagatggtgcaaatcgcgaactcgtaagtagaaaactgaagttgaacgagtggttcagcttctgtttgagttgcaaccatggtatgcatgccggtcacgctgaagaatggtttgacagacataatgtttgtcccactccaggttgcacctgccagtgtaataag

SEQ ID NO: 166925 - DNA, 252 bp, Saccharomyces pastorianus
gtatacaatttactagaagctctcgtcgatggtattggaatcctcaaaatggaatcggtatttccacataatagtattactatttttttttttttttttttttttttttttcatttatactttgtcattcagtatcctgttacattatcaatccttgcattccagcttccattatatttgaagactgtttgtcgatctttatgtcatcttctttttcggcatgtgataatatactggtaactggaatactac

SEQ ID NO: 166926 - DNA, 303 bp, Saccharomyces pastorianus
ttgttttttgggttattgcttagtgatgatataggcttaactggaaggaaaagaacagagaaatgtctcaaacaaagctgatcaagccgctgtatttatatgaaaattggaacaactacatctgcacacatgggctcttactggtcgcccatctcacactcatgtcttccacattccacttagcgactaagtcattattactatggggacgggttgttcttgaacgatgctatacttcgtataggaagccgttcttttatgccccatcctttcatatgttccatagcacaagaatgttctcta

SEQ ID NO: 166927 - DNA, 84 bp, Saccharomyces pastorianus
aaaaagtaaatggtctctagcgggatcgaaccgctgatccccgcgttattagcacggtgccttaaccaactgggccaagagacc

SEQ ID NO: 166928 - DNA, 162 bp, Saccharomyces pastorianus
aggaaaaaaaggagctgaaaatttgttggaataaaaatccactatcttatatcaactagtattcctaatgtcagtatattgtcatataaggcgttagatggtgacataaggtatgaaaagttgccatcgaagttagaggaagctgaaatgcaagcattgatg

SEQ ID NO: 166929 - DNA, 114 bp, Saccharomyces pastorianus
atgcatactatttgccttagaagcccgatcgatgaatcctctcctcttccatataaatcaataaggcaacctctagaaaacgcccattcctgccaagcgctttgcagccttatg

SEQ ID NO: 166930 - DNA, 423 bp, Saccharomyces pastorianus
cttggaccaaaagtttggctgagctttacgcacgatactgatattctaaattatttgacaactgctggattgattgatgacactagaaatttaacaaccaatcatgttccctttcgtgatcattcctaccacaggtcgtggtacattcctcagggagctagagtctacacagaaaagtttcgatgctcaaacgattcgtacgtccgttatgtggtcaacgatgctgtggttcctatagagagttgctccagtggtccaggtttttcatgtgaagagggcacattttacgagtatgccaaagacagattacgaggtgtgagcttctatgaagattgcgacgtctccaaagttagcaaagaaaaggaattgacgttttactgggattggaacacaacaaggtataacgcatccttagtgaatcaa

SEQ ID NO: 166931 - DNA, 84 bp, Saccharomyces pastorianus
ttccgactacgaattaggtcagctgatgagccgatgactaccttttataagtgtgtaaactgtggtcatagatggaaggaaaat

SEQ ID NO: 166932 - DNA, 582 bp, Saccharomyces pastorianus
gtcccaactatcttccgttacatcactacttgggaaaatgaatttttagactctcaaagggtgtgggccgagtatgcaacgaaaaggcaggaagctattcagcagaataggaggttagcttttgaagaacttgaaggatcgtgggatcgtggtatacctcgtattagcactttatttcaaagagatcgacatactctagcgtatgacagaggtcacagaatccgtagggaatttaaacagtactctctagagagaaacagccccttttggtggacaaactcccaccatgacggtaaattatggaatttaaatgcctatagaactgatgtgattcaagccttaggaggtattgaaacaattttggaacacactttatttaaggggactggttttaattcatgggaaggtttgtattgggaaaaggcgtccgggtttgaggattccatgcaatttaagaagctaactcatgctcaaagaactggtttaagccaaatcccaaatcgtagatataccttatggtggtcaccaactattaacagagcaaatgtctatgtcggttccttggtgcacttggatctgact

SEQ ID NO: 166933 - DNA, 183 bp, Saccharomyces pastorianus
gaagtgtcaccattaattattgcatcatcaaaaactaagggagagttggcgttgcctgcaaacaatgcgtcgctagagtccttcatcacaagaaactgtgtagcgtcattcttgagagccgcgatcggatccttttctggagccaaagagtcaattagggcatttgctttggaattatcatgt

SEQ ID NO: 166934 - DNA, 219 bp, Saccharomyces pastorianus
actcattttatgtatatacatatatttgtacatatctataccaagcaagtatagtgcaatactgttcttcgacgttattaaacgtaatagcattttcttagttatccttggaatcttatatacaagtacgagtacatactgcgcagtaaattgatcctgatggtgtgtttagatttcgccagaagcggaggcgttctggattctggagatgtaagcctt

SEQ ID NO: 166935 - DNA, 405 bp, Saccharomyces pastorianus
acttttggtaagaagaaatcagctactgctgttgcccatgtcaaggccggtaagggtttgatcaaggttaatggttctccaatcactttggttgaaccagaaatcttaagattcaaggtctacgaaccattattgttagttggtttggacaaattctccaacatcgatattagagttagagttactggtggtggtcatgtttcccaagtttacgccatcagacaagctattgctaaaggtttagttgcttaccatcaaaaatatgtcgatgaacaatccaagaacgaattgaagaaggctttcacttcttacgacagaaccttgttgattgctgattctagaagaccagaaccaaagaaattcggtggtaagggtgctcgttccagattccaaaaatcttaccgt

SEQ ID NO: 166936 - DNA, 513 bp, Saccharomyces pastorianus
gccccaaagtggtatccttcagaagacgttgctgccccaaagaaaaccagaaaggctgttcgcccacaaaagttgcgtgcctctctagttccaggcactgttttgatcttgctagctggccgtttcagaggtaagagagttgtctacttgaaacatctagaagacaacactctattggtcactggtccattcaaggtcaatggtgttccattgagaagagtcaacgctcgttatgtcattgctacctctaccaaagtctccgtggaaggtgtcaacgttgaaaaattcaacgttgaatactttgccaaggaaaaattgaccaagaaggaaaagaaggaagctaacttgttcccagaacaacaaactaaggaaatcaagactgaacgtgttgaagatcaaaaggttgttgacaaggctttgttggctgaaatcaagaagaccccattgttgaagcaatatttgtccgcttctttctctttgaagaacggtgacaagccacacctattgaaattc

SEQ ID NO: 166937 - DNA, 1038 bp, Saccharomyces pastorianus
ctagaggatccctcttcctcttctatctcttctgagtcaccaaagtctacatattcgtcttcttcattaccacctgttaccagtgcgacaacaagccaggaaactgcttcatcattaccgcctgttaccagtgtaacaacaagtcaggaaatcacttcatcattaccacctgttatcagtacaacaacaagccaggaaagtgcttcttcattaccacctgttaccagtgcgacaacaagccaggaaactgcttcatcattaccgcctgttaccagtgtaacaacaagtcaggaaatcacttcatcattaccacctgttaccagtgtaacaacaagtcaggaaataacttcatcattaccacctgttaccagtgcgacaacaagtcaggaaataacttcatcattaccacctgttaccagtgcgacaacaagccaggaaactgcttcatcattaccgcctgttaccagtgcggcaacaagccaggaaactgcttcatcattaccgcctgttaccagtgtaacaacaagtcaggaaatcacttcatcattaccacctgttaccagtgtaacaacaagtcaggaaatcacttcatcattaccacctgttaccagtgtaacaacaagtcaggaaataacttcatcattaccacctgttaccagtgcgacaacaagccaagaaactgcttcttcattaccacctgctaccactacaaaaacgagcgaacaaaccactttggttaccgtgacatcctgcgaatctcatgtgtgcactgaatccatctcctctgcgattgtttccacggccaccgttactgttagcggcgttacaacagagtataccacatggtgccctatttctaccacagagataacaaagcaaactacggagacaacaaagcaaaccaaggggacaacaaagcaaaccaaggggacaacagagcaaaccacagaaacaacaaaacaaaccacagtagttacaatttcttcttgtgaatctgacatatgctctaagactgcttctccagccattgtgtctaca

SEQ ID NO: 166938 - DNA, 321 bp, Saccharomyces pastorianus
ggtacttccacttctacttctaccgaattgaccacagtcaccggtaccaatggtttaccaactgatgaaaccatcattgttgtcagaacaccaacaactgctagcaccatcataactacaactgagccatggactggtactttcacctctacatccacagaaatgactactgtcactggtaccaacggtcaaccaactgacgaaactgtcattgttgtcaaaacaccaacaactgctaacaccatcgtaactacgaccaaaccatggactggtactttcacctctacatccacagaaatgaccacagtcaccggtactaat

SEQ ID NO: 166939 - DNA, 399 bp, Saccharomyces pastorianus
aaattacgtcaattacaaaagaaaaagcaaaaagaaaatgaaaacagcagttctattcagcctaatttatcggcagcaagaattcgtttgaaaagggaccttgattcgctggacctcccaccaacagtgactttgaatgtaataacatcaccagatagtgcggatagatcacaatcgccgaaattggaggtaattgttaggcctgatgaaggatattataattatggatctattaatttcaatttggattttaacgaagtttatccgattgaaccaccaaaagttgtatgtttgaagaagatctttcatccaaatatcgatttaaaggggaacgtgtgcctaaatattcttcgagaagactggtcgccagctctagatttgcagagtatataaccgggc

SEQ ID NO: 166940 - DNA, 339 bp, Saccharomyces pastorianus
  modified_base (186)..(210): a, c, g, t, unknown, or other
aaaagaaaacagcaggctttaagtgcaaacatcaatccaacccccgtcaacgctagaatatcgatgacagcaccattgactccacagcaacagctacttcaaagacaacagcaggccttggagcaacaacagaatggtggagccatgaaaaacgcaaataaacggagtggtaacaatgccaccagnnnnnnnnnnnnnnnnnnnnnnnnngataaaccaaaggttaagcgacctagaaaaaatgcaaaaaaaagcgagagcggtacaccagctcctaaaaagaaaagaatgactaagaagaaacagagcgcaagtagcacgccctcttctactacaatg

SEQ ID NO: 166941 - DNA, 171 bp, Saccharomyces pastorianus
atgtttaaccatgattggaagtactccattaattctaagactttcgccgatttaaacattgaattatttcgaaaccacaagttcaaaactgttttaaattacataataggtgtagttgggtggaatggattaaaacttgccctttttgtttctgacatttacacatgtatc

SEQ ID NO: 166942 - DNA, 180 bp, Saccharomyces pastorianus
atatactcatcctcgcctcttcctttttttttcatattttagttctaattagcagcactggagtttgttttttgtttcccataccataggataaatttcgtggcccttcttaatttctcctatatctaactccagacaaggataatcatactacccaaaagccaaataaatcgttctcta

SEQ ID NO: 166943 - DNA, 243 bp, Saccharomyces pastorianus
gttttagttcaagatttattacatccaactcctgcctctgaagcaagaaagcacaaattaaagactctggtccaaagcccaagatcctactttttggacgttaaatgtccaggttgtttgaacatcactacggttttctctcacgcccaaaccgcggtcacttgtgaatcctgctcaacagtcttgtgcacaccaaccggtggtaaggctaagctttctgaaggtacatctttcagaagaaag

SEQ ID NO: 166944 - DNA, 252 bp, Saccharomyces pastorianus
tgcttggacacgttgtctctcacctcgttctcgttgttggccagcgtcacttccaagtcctctaacttgacgtctgcgggaatgatcgcctccatcctggtcgtgctggtggtgtgcttgctgctctccttggccggctaatcgaagttgaagttgatgatgatggtttatattgttctttttcaaaatttcgctcggcgccgggtcggaaattctggtgaaatcgatattattatattgtattatattgta

SEQ ID NO: 166945 - DNA, 663 bp, Saccharomyces pastorianus
ttaggccaggaacttactgaatctacggtgaatcacactaatcattctgatgatgaactccctggacacctccttctcgattcaggagcatcacgaacccttataagatctgctcatcacatacactcagcatcatctaatcctgacataaacgtagttgatgctcaaaaaagaaatataccaattaacgctattggtgacctacaatttcacttccaggacaacaccaaaacatcaataaaggtattgcacactcctaacatagcctatgacttactcagtttgaatgaattggctgcagtagatatcacagcatgctttaccaaaaacgtcttagaacgatctgacggcactgtacttgcgcctatcgtaaaatatggagacttttactgggtatctaaaaagtacttgcttccttcaaatatctccgtacccaccatcaataatgcccatacaaatgaaagtacacgcaagtatccttatcctttcattcatcgaatgcttgcgcatgccaatgcacagacaattcgatactcacttaaaaataacaccatcacgtattttaacgaatcagatgtcgactggtctagtgctgttgactatcaatgtcctgattgtttaatcggcaaaagcaccaaacacagacatatcaaaggttcgcga

SEQ ID NO: 166946 - DNA, 459 bp, Saccharomyces pastorianus
cacacacccacacccagacacccacagacaccacacgcacacaccacacaccacacccacacccacaccacacccagacacagaccggacgcaaccacacccacacacaccacacccacaccagacccacacccacacccacacacacacccacacccacacccacaccacaccacactacacacactaccctaatccaacccctaatccaaccctgatgaacctgctccaaacttaccctccattaccctacctcaccactcgttaccctgacccatttcattataccactcccaaccaccatccatctctctacttactactactcatccaccgcccatcataaccgttaccctccaattgcccttatccaactccactaccattaccctaccattaccctaccatccaccctgtcctactcactgtactgttgttctaccctccatattgaaacgt

SEQ ID NO: 166947 - DNA, 294 bp, Saccharomyces pastorianus
gcctgtttggattttattaatgcactcgataaatgccaccaaaaggagtactataaaagactatttggtctttgtaacaacgaaaaggatgccttaaacaaatgtctcaaagaggcaagcttgaacaataaaaagcgtgcagttaaagaaagtagaggtaaaagagctgatctagagaaaaagtggaagaaaattgaggaagaagaatatggtgaagacgccatactgaagactatcttagatagacagtacgccaagaaaaagcaggcaagtaacaatgatgcagactcgaaa

SEQ ID NO: 166948 - DNA, 564 bp, Saccharomyces pastorianus
gctaacttacgtactcaaaagagacttgccgcttctgttgtcggtgttggtaagagaaaggtttggttagacccaaacgaagcctctgaaattgctcaagccaactccagaaacgccattagaaaattggttaagaacggtaccatcgttaagaaggccgttactgtccactctaaatctagaaccagagcccacgctcaatccaagagagaaggtcgtcacagtggttacggtaagagaaagggtaccagagaagcccgtttaccatcccaagtcgtctggatcagaagattgcgtgtcttgagaagattattggccaagtaccgtgatgctggtaagattgacaagcatttgtaccatgttttgtacaaggaatccaagggtaacgctttcaagcacaagagagctttggtcgaacacattattcaagctaaggctgatgctcaacgtgaaaaggctttgaacgaagaagctgaagctagaagattgaagaacagagctgctcgtgacagaagagctcaaagagttgctgaaaagagagatgctttgttgaaggaagacgct

SEQ ID NO: 166949 - DNA, 243 bp, Saccharomyces pastorianus
gttttaaatcagctaaaaaacgacattgaaataaaaggtacactgcaatctgtagaccagttcttaaacctgaaactagataatatatcatgcacggatgagaagaaatatccgcatttaggttccgtaagaaatatcttcataagaggttccacagttagatatgtctacctcaataagaacatggtggatacgaatttactgcaagacgccaccagaagggaggtaatgaccgaaagaaag

SEQ ID NO: 166950 - DNA, 90 bp, Saccharomyces pastorianus
aaaaaataaatggtctctagcgggatcgaaccgctgatccccgcgttattagcacggtgccttaaccaactgggccaagagaccatgata

SEQ ID NO: 166951 - DNA, 309 bp, Saccharomyces pastorianus
ccgtccctccaacccccctccctcctccactcaccaggcaacacccaagagcgtgggtacccaccgcagcaacagcagcagtactaccagcagcaaccgcaacagcaacagcagcccggatactacaatcaacaagggtacaaccagcaggggtacaatcaacaaggatacaatcagcaaggatacaatcagcaagggcaccagcagcctgtctacgtccagcaacagcctcctaaaaagggcaatgaaggttgcatgactgcatgcctggctgcattatgtatatgttgtaccatggatatgctgttc

SEQ ID NO: 166952 - DNA, 195 bp, Saccharomyces pastorianus
ttcctttatgtggtcattacctccctggcccaatcgatgtgtgtttttaataaccatttaaattgtatgatgatctttgggattccattttgtcttaatgttataatattatgtatatagattatactagagattctcctcatggatttaggaatccacagaaaggaatcaataattttgcataatattataaat

SEQ ID NO: 166953 - DNA, 147 bp, Saccharomyces pastorianus
ttctttccttctatatttgtccttcacattcatattacgctgacaatctttgcatttcagcttccaccaagcctgatcaccgtttatcaatatttgggtcattttcttatacctcaggtaataataaactagcaacctgaataatat

SEQ ID NO: 166954 - DNA, 708 bp, Saccharomyces pastorianus
  modified_base (6)..(6): a, c, g, t, unknown, or other
acttcnaagaaggttaatgttcagcttcctaagcccagtgcaaatgataaattgaaggatttgaaggctaaatttactaatagtaaaacactcgtgccacctggaataatttctaatgaaaaaaataattctagtgcaaacgatgatgattctagctcctcaggttcttccacagaagacgagtctagttcatcttcctcgtcttctgatgaggaaacttcaacatccaggaaggctagaagagttgttgtaaatacaccaagagaaccagttagatcttcatctaagattgaagccccctctccatctgttaacaaaaaaatcaatgccacccctgataaaattccagttaaacagctaatggacatgtcgtctcctccgtcagttaaatccaagaccacctcaaatccgtctagtatacttcatgaccttccaagaaaagttcgtccttctttgagttcattatctgatcttgtttcaagaggcatcccagatgtaaaggaaaaaacttctaaatcgaatgagaagtcacaaacaaaagccccttcaagcagtgatgatgaatctagctctgattctgactctaactccagttcggactccgtatcggattccagttcagattctaaatctgagtcagattcggatgactcaggggattcatctgatgatggaaaaagttttattagtgcgaaatccgctagtgct

SEQ ID NO: 166955 - DNA, 2127 bp, Saccharomyces pastorianus
gtgaacttcaatacacctcaacaaaacaaaacgcccttttcgttcgggactgccaacaataactctaacaccaccaatcagaattcctctactggtgcgggcgccttcggaacaggtcaatcaacatttggtttcaacaattctgcgccaaataacacgaacaatgcaaactcttcaatcacacctgcatttggtagcaataacactggtaatactgcattcggtaacagtaaccccacaagtaacgtttttggcagcaacaattctacgactaatacatttggtagtaatagtgcagggacatccctttttggatcttccagtgctcaacaaacgaagagcaatggaactgctggaggaaatacatttggttcttcatccttattcaataacagtactaatagcaatacgacaaaacctgcgttcggcggtttgaattttggcggcggcaataacacaactcctagctcgaccggtaatgctaacacaagtaataacttatttggcgctaccgcaaatgcgaataagccagccttttcctttggtgcaaccactaacgacgataaaaaaacagaaccagacaagcctgctttctcctttaattcaagtgtcggtaataagacagacgctcaagctcccactacaggattttcctttggttcacaactaggtggaaacaaaacggttaacgaggctgcaaagccttccctttcatttggttcaggatcagctggtgctaacccagctggagcttcgcaacccgaacctacaactaatgaaccagcaaaaccagccctctcttttggtactgcaacatccgacaataagacaactaacacaaccccaagtttttcgtttggtgctaaatcggatgaaaataaagctggtgctacttctaagcctgccttctcattcggtgctaagccagaagaaaagaaggatgataattcctcaaaaccagctttctcatttggtgccaaatcaaatgaagacaagcaagatggaacggctaagccagcattttcctttggtgccaagcccgcggagaagaataacaatgaaacctccaagccggcattctcttttggagcaaagtccgatgagaaaaaggatggtgatgcctctaaacctgccttctcatttggtgctaaatcggatgaaaataaggacagtgattcttcgaagcctgccttctcatttggtgctaaacccgatgaaaagaagaatgatgaagcctccaagcctgccttctcattcggagcaaaggctaacgaaaagaaagaaagtgatgaatcaaaatcagccttttcatttggttctaagcctacaggaaaggaggaaggcgatgggacgaaggctgccatttcctttggtgctaaacccgaagaacagaaatccagtgatacgagcaagccagcgtttacttttggtgctcaaaaagataatgagaagaaaacagaggaatcttctacggggaagtcaaccgcagatgtcaaatcaagtgatagcttgaaattaaattctaaaccagtagaattgaagccagtttctctcgacaataaaacactggacgatttagtaacgaaatggactaaccaactaacagaatcggcctctcattttgaacagtataccaaaaaaattaatagttgggatcaggtactagtgaaaggaggtgaacaaattagtcagttatactcagatgctgtgatggcggaacatagtcaaaacaaaatagatcaatctctacaatatatcgagaggcaacaggatgaattagaaaacttcttagacaattttgaaaccaagacagaggcacttctgtccgatgttgtgtctacaagttcaggtgctgcggccaacaataatgaccaaaaaagacaacaggcctataagacagcccagactttggacgaaaatttaaactcgttgtcatccaatctttcttctctaatactagaaatcaacaatgttagtaatacattcaacaaaaccactaacatcgatataaacaatgaagacgaaaatattcaactaatcaaaatcttgaattcacatttcgacgctttaaggtcactagacgataactccacctctctggaaaaacaaatcaactcgataaagaaa

SEQ ID NO: 166956 - DNA, 99 bp, Saccharomyces pastorianus
gcagcacctgagtttcgcgtatggtcacccactacactactcggtcaggctcttaccagctgaactacagttgatcggacgggaaacggtgctttctgg

SEQ ID NO: 166957 - DNA, 309 bp, Saccharomyces pastorianus
cttaacaagaaatagtgaaatgaaagcgcatacctcaaggcatacagttgaagcagctctatttatacccgttcctccatcagtcatcactacttaaacgattcgttaacagatgctcatttagcacctcacatatcctccatatctcatcttttgcacaatctcattatcactatggagatgaccttgtttctgaacgaatcatacatctttcatagacttcgtatgtggagtactgttttctggggcctttgtctattcgtatgcgcagaatgtgacagtgccaataataggggtgccagggtgcct

SEQ ID NO: 166958 - DNA, 450 bp, Saccharomyces pastorianus
atgaaacagcgtttttctcaagtagcaactgttatattcttcgtcatgagtatccgttctccaagaaatctcggctttttttttactcttgccctttttgtcgtacttgtttgctcccaggaatggttctcctttgaaatgaatagatcttgttcaatgaaagtggaacatagaatgcaatttttgtcaactataatcagtgaacatcagaaatcggatgtgaattgttgggaccaaatcgcaaagaagatgaatgtatacttatttgagcagaaagtttccggctcagacgtgtttttcttagatggagcagattgtgagcgctttttcgaacgtaatttcctccgttatctaccctcaagaaagtcttcccatcctgacctaccaattgctgaattgttgccgtatatcagaaaagccgacattgcctgtgctggtaagcaattgatt

SEQ ID NO: 166959 - DNA, 150 bp, Saccharomyces pastorianus
aatggaactgagtatccttcgattttttgcaactcttcccccaccattagttacagcaaacattttatacttataacagaatgccctctgtaagtataaggactattatcgttaggtcttagaacagcaatgttcaaacaagtaagaggt

SEQ ID NO: 166960 - DNA, 192 bp, Saccharomyces pastorianus
ctggtattatttcttttcttcgtagtttttgtacagatcacttatacagctttacacagattttcccgcttgttgtgcacttttttttcgaagattattgaagagggatgcgtttggtacaataaaaaacataggttcccaaacctatataaatatatatatgtatatgtatatatactacatatatgctac

SEQ ID NO: 166961 - DNA, 285 bp, Saccharomyces pastorianus
gataattctttgaccaatgctggcactggctctagttcaaaatcagccgctaaccataacggcgaaactactaaacgaactgatgaaaagaattatgttaatcaaaacaataacaatgaaggaaataccaagtactccagtaacggcaacggaaatcgaagtgatattaatcgtggcaatcaaaataatgctttaaatgcgagaagtaaacagtctgctgagccacaaaaaaattcaagcgccaacgctaaaaaggaatctagtggtggttgttgtataatttgt

SEQ ID NO: 166962 - DNA, 675 bp, Saccharomyces pastorianus
  modified_base (660)..(660): a, c, g, t, unknown, or other
acttcagctgactcaactacctcgaccgttcaaactacttctgttgatccaactacttcagttgacccaactagttctatagtcagttctacttcagttgatccaactacttcagttgacccaactacttcagctgacccaactacctcgaccgttcaaactacttcagctgatccaactacttccgtagtcagttcaagttcagctgatctaagtagctctgttatcagttcaagttcagcagacccaactagttcaagtgctgtgactacttcaattaacccaactactccagctgattcaactacttcggccgttcaaactagcccagctgatccaagtagctctgttaccatttccacttccacggactctacatctttaattgagtctactacaacagttggtccacatgcctcatcaagtgttgctggtatgtatcgtacaagaagctctgacgaggtaaccacatcaacagatccaactagctcaagtgacgttgctacttcagcagatccaactagttcaagcgctgtgactactttagttgacccaactacttctgtagtcatttcaacctcagttgatcaaactagctcaagtgacgtttgctacttcagttgaccgaaccacttctgttatcagttcaacttcagcagnccaactacttcagct

SEQ ID NO: 166963 - DNA, 159 bp, Saccharomyces pastorianus
atgaagaacgcagcattgtgtgaggctcttcctctgctcgccacgtgctcccacgaaatcccacccacaccacacacggtctgtttcgccttcccccccgcattattactatccccgagcaaactcacacttttgaattcgcgtcgcgtcgcgtcgcgt

SEQ ID NO: 166964 - DNA, 237 bp, Saccharomyces pastorianus
atttacttgacagattttgataaaaatgtgaaaaagacaaacaacaccgaaagtgaatgtgaaaaggcgagggaagttttcaaagagagcgattccatcgattccgctttggaagaactaaacctaaaaatcaattctaatgagctagaattgcggctcctaaataaccagtgcgacaagcatgcattaaatattcaactgacccaagaaaagctggactcattgttattaatgcag

SEQ ID NO: 166965 - DNA, 522 bp, Saccharomyces pastorianus
tcaaatcaggctccaaagtggtatccatccgaagacgtcgctgctctaaagaagaccagaaagactgctcgcccacaaaagttgcgtgcctctctagttccaggtaccgtcttgatcttactagctggtcgtttcagaggtaagagagttgtttacttgaagcatctagaagacaacactttgttggtttctggtccattcaaggtcaacggtgtcccattgagaagagtcaatgctcgttacgtcattgccacctccaccaacgtctctgtcgaaggtgttaatgttgaaaaattcaacgttgaatactttgccaaggaaaagttgaccaagaaggaaaagaaggaagctaacttgttcccagaacaacaaaagaaggaaatcaagaccgaacgtgttgaagaccaaaaggttgttgacaaggctttgttggctgaaatcaagaagactccattattgaagcaatacttgtctgcttctttctctttgaagaacggtgacaagcctcacatgttgaaattc

SEQ ID NO: 166966 - DNA, 516 bp, Saccharomyces pastorianus
agtgcacatgctcgcaagattatatgctaaatatcacccaatcggtccttgttgttcatcatatcgttacatatctgtgaaaagtactttatctcagtgggtttacgtgggcatagatcacgcttcaagccgctctgtgtcggcctcttttcgccaggtaacttgcttggtatgcaggaaaatcgatagctcatatacgtgtagtaactcaaacatgtagggtgccaaattgtacccatatttccttatggtgcttttactgaagactccttacatatggtgcgccagaaaccaagtcagtgagaagtacgcatcgtacgagctgtcgttcggcctggcactcgcgtatttcgtgacaacgttccaggacacggcaaactcaactcattatagtatcctctgttgaggtgaacaagagaaagggtgatcgtaatcctttgctattgaatttcaaagtatgcacattgagaacaacgtgtagaccatcaagttgattttcttgggaataagatactt

SEQ ID NO: 166967 - DNA, 216 bp, Saccharomyces pastorianus
tattatttgcacgtaacaattatcagaaaatgggtgaacttcgtattaattgttgggatttcgttgttgatattaggtatacaaaatatactagaagttctcctcaacagtcttggaattcacgaaagggagttgatagttctaacaataaaatcactttgtcttcctttcttttatactttgtcattcattattctactacattatcaatttgtt

SEQ ID NO: 166968 - DNA, 540 bp, Saccharomyces pastorianus
cagattagttttgaggaacatccaaatgaagagtgtcaaaattctgttgggttaatcaagagagtgagtactttctttaaaaagaggccattgtctcgaaagaatagcataaagtcaatcggtgacgtaaaatcggaggcacgtaaccggggagaaggcctcctgggtgaagttgataatcttaacgagcagaatgtccgagaaaacctgactagtgaacatgaaaagaatcctgaaggagattccaaaaggtatggcctgttctcctttgaagagaccccccctatacaagtgttggagcagggcaataccaattctgagctttcttcatttaaaaacacttctttggcggaaaacaaacgctcttctgacagcttcgtttcgttaaaaccgggtgaagatgaacatagccctttagagattagtacgtgtggtaatttgactgaaagagaggatttggaatctggcgaagaacggtttgactcagcagcccaaaatataaaggtagcttcgatgaaggaaaaaaaaaaaattcttcaa

SEQ ID NO: 166969 - DNA, 159 bp, Saccharomyces pastorianus
gaaactttgaggtcatgctctagctcagtaagttcacgggaaaatcgcgaaggagacgcaagcatttgatgaagtgatgctatgatagccgaccttctagacatagtcggactcgaagtagagaaggcatccattggccatattgagctaataggcgag

SEQ ID NO: 166970 - DNA, 447 bp, Saccharomyces pastorianus
cccgggcccaggcacagaataccacctggcccggaacttccagagcggcacgcggcccgcgtggcctggcggctcgccgacccggcgcccgccacccgctacaccattcccgacctgttcgaggacccgtggttccagggcgtggagacgtgcgtggagacgtgcgtgggcggcgacggcgatgcccacgccgtcacgtgcaagaagcctattatcaagactacaacgtacgacaacccgcgcgggttcaacatcgctgccaccactactactaccgctgctgccgccaaacctacctccaacccgttccccatcaggtcaatggttgatatagcagtcagcagtcccgcaccggcgccgccgccgccactggcgcgctcgaacagcagcggagaagcgctgttcacgctgtgcgaaaccccgccgcagttgctggacaagctcacc

SEQ ID NO: 166971 - DNA, 168 bp, Saccharomyces pastorianus
atgatcactcgatattatcgatgcttttttgatataatgctctctactcactttattgagtggcgatttgctatttttttttcttcgcaccatgcgtcacgttaaacgaaaaagttagtattaggatggaagtatataatatcacataagattattcagggtatattg

SEQ ID NO: 166972 - DNA, 153 bp, Saccharomyces pastorianus
aaaaaatattcacctgttattattatccaagccttgaagaaagcactgactgatgcactagaagttatcaaacaagtaagtaaacctgtcgatgtggtaaatgatgccgctatgaaaaaattcgattcagcctctatcggtactaaatatgtc

SEQ ID NO: 166973 - DNA, 507 bp, Saccharomyces pastorianus
tcttcctactccccggaaaaacttgcattttgcggacggaacaactttcgatggaggcttggtggaggtatttccggagagaacccatgtcccggatttgccacaaggatggcgtagtgtctcagtccctcgtgcgcgctttgcatgttacattcgggcgcgtgattatagtgggaagcactgcgcggtgcgacctagctgggcatcgggccgcatgcagccaatcacgcgcgagaaaagtagagcaaaagaaaaatctccccaccgcgcacccacgtttttcgggacatttctcgtgacatttctcgtgacatttcccggacgcacgccctttctggttttggaggtttccacgaaaccggaactaatcgaccagccgaaagaaagcgcgttggacgggcactggtgcagatttgtggggacggagaatcccaggacaattgccaaaaaaagaaatgggcggaacaaaatagcagtaggcaggggcccacgcgcgcttctgtacct

SEQ ID NO: 166974 - DNA, 186 bp, Saccharomyces pastorianus
gaatgccaattatagggtgccgaggtgccttataaaacccttttacgcgcgcctgtgacatttcctttttcggtcaaaaagaatatccgaattttagatttggaccctcgtacagaagcttattgttaaagcccatactcagtctgttctaaacggcttccatggaagaaaaataactatattata

SEQ ID NO: 166975 - DNA, 93 bp, Saccharomyces pastorianus
ccggaagagtgcgaggcgcttcgagcttggtataagagaatgcaacagcgccccagcgtgaagaaactgctagaaatccgttctaaatcctcg

SEQ ID NO: 166976 - DNA, 495 bp, Saccharomyces pastorianus
tgtgcatgtgtgtggtgttggtatattttagtatacttcttgataaaggtaccaaagtactgtatacacatgataattactggttagtcatcctggtgttttacttcttggcattcggctcgatcatgaggatttcgggccgaacctgctccgaagaaatctttcggccaggcatcatatcacaatgggttgcagaatttctcgaaggaatcacctgtaggagtgaacctcgaaaaaaagaaaacacatatttcatactgcatcatccttgcaacacaacgcttcctgcagaagttttcgaacaaaaggcttggcaatcctcacttacaccccactcgcgaatccacattttcacgtgagcttgcaacagagaataatagcggaaactttcccgtattatttagatatcatatcttcagacagctagatatcgaaaatggaattttattatgtcaagttctgtaggcgctaattattgtttaagtaatgttttcg

SEQ ID NO: 166977 - DNA, 936 bp, Saccharomyces pastorianus
tccaatgattctcctctaactccacaacagtcacaacaacaacaacaacaacaacaaaaacaacagcaacagcaacagcaacaacagcaacagcaacagcaacaacagcaacagcaacagcaacagcaacagcaacagcaacagcaacagcaacagcaacagcaacagcaacagcaacagcaacagcaacagcaacagcaacagcaacagcaacagcaacagcaacaacaacaacagcagcaggaaacgcagcaacaacaacaacaacatcatcaacatcaacaatcgtctcagaaacattcaccacaacaatctaaccaacaacaagtgaattcttcagtaccgttaccttcacaaggtcaagctgttgggttacactctaatcaatcgcaccaagatttgtccgttgaaccatctgacattggccaatctttcctcttgagggataatactgaaattaacgaaaaaatatggggcacgagcggtataccttccagcattaatggctatatgagtactccccaaccttctacaccaactttagaatggggaaacacttcagtgtctcaacacggttcttcattctttttgccttctgccgcatcaacagctacggtacctgtcaataacggtacaaatgccaatgctatttccaataatgtaactaccaacagcgcaaacacctccaccacactttccaacaactctcaacaacagatgatgcaaatgggtaatgcaatgaacgcttccatttcatcttcgaattcaatgcccccatacggtttgatgtcttctcaaacacaacatatgtcaaatatggttaacacttctgatattaatatcacgcctcaaaagcaaaacagattcatgcaacaacctcagccagagcacatgtatccggtgaatcaaagtggtacccctcaaaaagttcctcca

SEQ ID NO: 166978 - DNA, 195 bp, Saccharomyces pastorianus
ctattttctttcgtcaatttgtccaaaataaaattttcacgacatttcttctccaaataccgcgattactggagaggttgtccattaaacacaacaatcattaacgcatctacgaaggtgctcacattttttattcaacttcccaacattctcacccgtagactgaatgggaaaacaaaccaagaagttgaaagg

SEQ ID NO: 166979 - DNA, 87 bp, Saccharomyces pastorianus
atgcatcaactacgagcgtattgtgttatatcagctctgtccgatataccgcctatttgctgtacgagcccgtccgagctatacgag

SEQ ID NO: 166980 - DNA, 174 bp, Saccharomyces pastorianus
acaaacaagaacagcaaggtcgtgtatggtgaacttctacaaggtgagaaatcacagttcaaattcaccaacgcaaaggttgggaaagttggataccgttatggtagtggaaatagagacaacaagaaagacaggagaatcggtttcaataagttgggccaaatggtatacatt

SEQ ID NO: 166981 - DNA, 324 bp, Saccharomyces pastorianus
acggttcctaaagatcatcctgtctctaaccctgaataggaaaaatactatgtttgttgagctcctgggtgttcattcacccacagggcaattctgacccaatctttgaagcggttaaaaatctgttgtggggcttatgatttgccgctggcagttagattccaaaaaaggttccacttgctacctgccctttcgtatccgggatcagatagaggtcagtttttcgctatcgcttacagcgttgtttcagccaagcaagacaaaccagaagagttatgtggtgggaataacgactcggcaaggcagttagtagatggcactttt

SEQ ID NO: 166982 - DNA, 123 bp, Saccharomyces pastorianus
aattatttaacgcaattggaaacggttaaggatgggtccctgtatctccacttgtgcgttactaatttattctaaaattccagagtgtgtagatttaccacagatttcaaccaagtcaaactg

SEQ ID NO: 166983 - DNA, 249 bp, Saccharomyces pastorianus
ttaaacttgaaacttgaaactgaaactgaaattgaaagaaagaaaaatattaaatatattattaggggaggggagaaggggaggtgttgttgtatattgttctctataaacacaaacaatagaacggtattacttttctttggtgtgataagcgagtaacaaaacatacaaatagtaatacagaaccactacaaaaactggaaaagggcgtatgcatgatgtatatatatagcaagaaaaaaaaaaaga

SEQ ID NO: 166984 - DNA, 243 bp, Saccharomyces pastorianus
cttaagaaaaaagggccacgggatttttttttcgcgttttggcgttttcatataaaaaaaaaccatattaacatctgtacattattattaactaaacatccgtacacaaaaggttttccaagacaaaacgttgtcgagactattctctttcgaagaaattctaaaacacacttcggcaggccggcaacaagaaggcggccccttggggaaagggaagtcaatccgtctgcccgttctctaggc

SEQ ID NO: 166985 - DNA, 258 bp, Saccharomyces pastorianus
gagggtactccttcattcggtaaacgtcacaacaagtcccacactttgtgtaacagatgtggtcgtcgttctttccatgttcaaaagaagacctgttcctcctgtggttatccagctgctaagaccagatcttacaactggggtgctaaggctaagagaagacacactactggtactggtagaatgagatacttgaaacacgtttcaagaagattcaagaacggtttccaaaccggctctgcttctaaggcttctgct

SEQ ID NO: 166986 - DNA, 534 bp, Saccharomyces pastorianus
  modified_base (16)..(16): a, c, g, t, unknown, or other
gaaggtcatgaagatntgctaaattcattggatgctactgaggatggcctgtggatcgcaaccgcctctaaagataatacggctattgtttggagatacaatgagaacagctgcaagtttgatatttatgccaagtatattggtcattcagctgccgtaactgctgttggattgccaaatatagtttcaaagggatatcctgaatttttattgacagcatcgaatgatttaacaatcaagaaatggataattccaaagccaactgctagtatggatgttcaaatcatcaaggtatccgaatatactcgtcatgcccatgaaaaggatatcaatgctttgtcagtttctcctaacgattctatttttgcaacagcatcatacgacaagacctgtaagatctggaacctagaaaatggtgaattggaagccacgttggccaaccacaagcgtggactatgggatgtatcattttgccaatatgataaattattggcaacttcttcaggtgataaaacagtcaagatatggtcattg

SEQ ID NO: 166987 - DNA, 123 bp, Saccharomyces pastorianus
atgatttctgtttgcccacaaaatgacttgcaaaaatgctacagaagcctcacattcgatgttccaggacaacaattcgaagagagaaatgaacaaacccttaaaaacgggccaaaaagaaag

SEQ ID NO: 166988 - DNA, 189 bp, Saccharomyces pastorianus
atagatgctgaccactcggtaaaggatagcaggtctgcaataacagataaagataaggatatatacaaattacagaataactatgatgtgggcaatatcggggaaattgctgaggaagatcaatacgaaaacgaatttaccaactactcacagagtaagagagagttcatagaaagtctaaggcctaaa

SEQ ID NO: 166989 - DNA, 156 bp, Saccharomyces pastorianus
acactccccatatcgctacaggagtacggtggcaatgacggggatgattcggaatctaatgttgctgtacctacaccaaacacgagtggtaacgggtattgccatgttgataaacaccataaaagtgtcgacatcttattatctcaagtatgcatg

SEQ ID NO: 166990 - DNA, 123 bp, Saccharomyces pastorianus
agcttttcaaaatttgatttcgacgtaggcaatgaagagttcgtcaacaccgaccgcgagactatcttttcaaagtgcattattggttttcatattgattatatcgaaaatggccaacgacaa

SEQ ID NO: 166991 - DNA, 249 bp, Saccharomyces pastorianus
aataacaaaaacgacttggtacattgtccctcaataactttatttgaatcgatccccacggaagtgcggtcattctacgaagacgaaaagtctggcctaatcaaagtggtaaaattcagaactggtgcaatggataggaaaaggtcttttgaaaaagttgtcatttccgtcatggtcgggaaaaatgtaaaaaagttcctgacgtttgttgaagacgaaccagatttccagggcggaccaatcccttca

SEQ ID NO: 166992 - DNA, 354 bp, Saccharomyces pastorianus
aaataaaatgtcgatataatacttgaaaatacaagcaatgtcatcaaaaaatttgagcggtacgagaatcgaacccgtgtccccaccttggaagggtgggatgataaccactacactaaccgcccatgtgttggatagtgtaactgtaatgacgaggtaataagtgatggcgactatatcaccaccgaaacacagcgattacttaaaagggtaatcactactgcgattctaattgttggaataaaccaaacctcttccgataatgttggaacgagagtaattaatagtgacatgcgttgctatggtaacaatctaatgcttacatcgtatattaatgtacacctcgtatacgtt

SEQ ID NO: 166993 - DNA, 363 bp, Saccharomyces pastorianus
gaagccgcattgaatatctatttggacaattttgccaccacagttggttctcgtgaacagttagctattgctgagtttgcagctgcattattaatcattccaaaaactttagctgttaacgctgccaaggattctagtgaattagttgcaaaattaaggtcctaccatgccgctagtcaaatggccaagccagaggacgttaagaggagaagctacagaaattacggcctagatttgattagaggtaaaattgtggacgagattcacgctggtgttcttgagccaaccataagcaaagtcaaatccttgaaatcagcattggaggcttgtgtagcaattctaagaattgatacaatgattaca

SEQ ID NO: 166994 - DNA, 609 bp, Saccharomyces pastorianus
aacacgcccttgaccacaacttctccttttggttcactgcaacaaaacgcatcacaaaatgcatcatctacatcgtcagcgtttggcaaaccgactttcggcgcagctactaatacccagtcgccatttggtactattcaaaatacaagtacaagcagtggaacaggagtatccccatttggcacatttggaactaatagtaataacaaatcaccttttagtaatctacagagcggagcaggcgctggttcttcgccgtttggtactacaacctccaaagctaacaacaacaataacgtaggcagtagcgcattcggaacgacgaataatcgatctccttttagcggaggttctgggggcaccttcggttctgcttctaacctcaataaaaataccaatggcaactttcaatcttcttttggtaataaagggttttcattcggaattacaccacaaaacgatgccaacaaagtctcgcaatctaacccttcatttgggcaaacagtgcaaaacacagatccaaacataagtttgaagagcaatggtaacgcaacctcttttggatttggacaacaacagatgaatgctactaatgtcaacgctaatacg

SEQ ID NO: 166995 - DNA, 99 bp, Saccharomyces pastorianus
gtcttaggtgaactagaaagaagagctaaagctggcaagcgtttggctttcgtccatctagttgaacctcgtgtcaccaacccatttttaactgaaggt

SEQ ID NO: 166996 - DNA, 255 bp, Saccharomyces pastorianus
atatataattattatgagtgagtggattttgagataattattgggaattcattattgcttgagataatattattacttatacagaatacactagaagtgctcctcggggacatagagatccataaaaggaaatcgataattctacacattaatctgttttatttctttatctgttttacacgttttcattcattatcttattacaaaatcagcccttgcgcttcatgttccattatactcgcagactgtttctca

SEQ ID NO: 166997 - DNA, 450 bp, Saccharomyces pastorianus
actgaaagacattatctttgcaaaggttgtaaaaggagtatttcagaatcattgctgattcacacgggagaccacattagtaaattttttactctcgggctgaattcctcggcgaagctttgccttgccattttaggtgagaatacgtatttgcggtatcatattgtttttcttctcttccttaactcatttagaaagttcgataatgaacaaagcgctacacaaatatttgatcatggcaaagttaccgcgccaatcgccctgcgcattgtagtcgcctgctccttcagttcgtccgctggttgcggaatatttgaacgtcagttttcaacattgaaacatcagataatgttggtatcgtgtttaaatgatggacgcatctacgtcaccttaagtgcgtttttgcctgtgagatttttatttcattgtgtccacttgctattgtctggt

SEQ ID NO: 166998 - DNA, 117 bp, Saccharomyces pastorianus
aaaccatctggtctggggcttactgaggcatttgagtttatatccatttttttccctgatgttcagcaaaccgaaagaaatataaaatacaactgggaaagatgttttaatggtgag

SEQ ID NO: 166999 - DNA, 126 bp, Saccharomyces pastorianus
aacgtaaaacatgcatgtgaggcttaggtgatttttgagataattgttgggattccattgttgacaaaggctataatattaggtatacagaatatactagaagttctcctcgaggatctaggaatc

SEQ ID NO: 167000 - DNA, 426 bp, Saccharomyces pastorianus
gttgatgttactagtggtaagaaagctttagtcattttcgttccagtcccagctttgtctgcataccacaaggtccaaacaaagttgacccgtgaattggaaaagaagttcccagaccgtcattttattttcttggctgaaagaagaattttgccaaagccatctagaacatctagacaagtccaaaagagaccaagatccagaaccttgactgctgtccacgacaaggtcttggaagacatggttttcccaaccgaaattgtcggaaagagagttagatatttggtcggtggtaacaagatccaaaaggtcttattggactccaaggacgttcaacaaattgactacaaattggaatctttccaagctgtttacaacaagttgactggtaagcaaattgtctttgaaattccaagtcagactaac

SEQ ID NO: 167001 - DNA, 261 bp, Saccharomyces pastorianus
aacacaatcttttaaaagaagagaaatggtatttgtaaagcaagaattgtttttagaggtgatatccaaacaccagacacgtataatgttattggaacagaatccctgaaccataaccacattaaaatattttcaatgattgcaaacaacaggaacatgttcatgaaaacaccggatattaactatccgtccctttatgctaaattagaacaagacatatacattccacacccacatgacagaagatgcgttgctaaacta

SEQ ID NO: 167002 - DNA, 198 bp, Saccharomyces pastorianus
gatgtcaaaggtattaactatgttatcaactatgacatgccaggtaacattgaagattatgttcacagaattggtagaactggtagagcaggtgctactggtactgctgtttctttcttcacagaagaaaacaaaggtttaggtagcaagttgatttccatcatgaaagaagctaaccaaatcattccacccgaatta

SEQ ID NO: 167003 - DNA, 333 bp, Saccharomyces pastorianus
tcgatcatctttcttcccttctttccttggtatttttccgtcttttccttccatcttgcttctccgtagtactgggatttatagcttctcctttttttttctcttttcttttttactttccagtttgtggtaattttccagttttgctatttaaagtaaggttacctggtaccctcactaaaactcgtacggccgatccaccaaagaacaacaacacaatccttgacgagttgctgttttttcgaacggttggaacatttagttattttcggccaattgcacaaggcaacattcaggatatataaataacacggtagtctaaaaagggacgca

SEQ ID NO: 167004 - DNA, 231 bp, Saccharomyces pastorianus
aatgagactataacaaaaagaagagatagtttagctttttggatcgatatcaaagcttttcaaatttattctcatttttgtatttcgactgtcgtaccttgcacagaacgattggatatccataatgtcacaggcagccaaaaacgtaatagtgaagctgatagtaggagcaggtcaagcagcaccatcaccacccgtagggccggcgctgggttccaaaggtataaaagc

SEQ ID NO: 167005 - DNA, 93 bp, Saccharomyces pastorianus
aaaagttggaaaagcagaaagatgagtaagccaatatacttcagcaaatttttggtcactgaacaagtcttctacgtatgcatgctcgtgtat

SEQ ID NO: 167006 - DNA, 309 bp, Saccharomyces pastorianus
atgtagtccttccacgtttctgctacctttggggcatctctgtactgcaaaagcaaccatttcgaagcacttgcaatagactcttgagagtcttccaacgtatttaacttggtggtaaattgttcagacgaaaagggcatactggttgtatttggttcttgatatcggctttcttcagatttcctcacccttttgttaaaaaccttctgcgctcttgcttgggctattattctggcctttcaagtttatatttttttaaaggaaaaagataacaattttagttttcataattaggtagaaggtttacat

SEQ ID NO: 167007 - DNA, 279 bp, Saccharomyces pastorianus
actataatcagagagtcattagtctcgccggggaacgagatatctgcgagacaacatgcaggtttagctggaggggacattactactatactacctttcggtcaaccggttatagttaacaaccataatcccgactcgaaaatacatcctcgtggcattccaggttacgccttacatccgtcacgaaactcttatggctatattatctatcttccatcattaaaaaagacagtagatactgccaattacgttatattacaagacaaccaatccaaattg

SEQ ID NO: 167008 - DNA, 699 bp, Saccharomyces pastorianus
ttgctactgcctacgcatttcggtgccttaggtcccttgatatttgggctgaatttcgctcaaatgtttctggtaatcattttcttcgatcttatgggattgatatctgtagcgttcttttctgtttagaggtgcagaatctaggtctaagacagatggtcctttccagatacttagttggtaatgttgtcagcacgaatgttctcagttaatcaagtttatcgcttgtattgtttggggtattgtaaatactgtagcatgtttacaagtgatgtatactggtcaatccaggtaataagtgtcctatttgggacgtatgcattgttattatcggtgcaacatgtgattgtgacttttcttggtaataatgtcattaaatattatgagaaatgggagtgggtaccaaagtacgctgttttcttagtaatcatcgcgagtttgacaagatctggaaaatttgtcataggagtatgaacatagggcaatactactgcaaggaaatgggcatatcggtgggttgaacagtgttagggatatgttgtaggttggacaacgtacgccattgattacacatgtatataggcgaaggaagacaagtgaagtacaaaatatttatttactcagtagcaggtgtagcagctccagttgtatttcacaatgattcttgtgtctacagtagcaatgactggtgtcggtgat

SEQ ID NO: 167009 - DNA, 135 bp, Saccharomyces pastorianus
ttacaggttcaccaagaaccatatgttttcaacgctagaccagatggtgtccacgttatcaacgttggtaagacctgggaaaacttggtcttagccgctaaattatcgctgcattcaaacccagaagacttgttg

SEQ ID NO: 167010 - DNA, 666 bp, Saccharomyces pastorianus
caggttcaccaagaaccatatgttttcaacgcaagaccagatggtgtccacgttatcaacgttggtaagacctgggaaaaattggttttagccgctagaatcatcgctgccattccaaacccagaagacgttgttgccatctcttccagaactttcggtcaaagagctgtcttaaagttcgctgctcacactggtgctaccccaattgccggtagattcaccccaggttctttcaccaattacattacccgttctttcaaggaaccaagattagttatcgtcaccgacccaagatcagacgctcaagccatcaaggaagcttcttacgttaacatcccagtcattgccctaactgacttggactccccatcagaatacgtcgatgtcgctatcccatgtaacaacagaggtaagcactccatcggtttaatttggtacttattggccagagaagtcttgagactaagaggcgctctagtcgacagaacccaaccatggtctatcatgccagatttgtacttctacagagaccctgaagaagttgaacaagtcgctgaagaagccgccaccgaagaagctggtgaagaagaagccaaggaagaggttactgaagaacaagctgaggccactgaatgggctgaagaaaacgccgacaacgtcgaatgg

SEQ ID NO: 167011 - DNA, 225 bp, Saccharomyces pastorianus
atcttcggcccgcccgacaaatttcctgggctgtcattggcccgctgaagtatcggcgcagcatgcgcttggaactaccgggaattacagcacatacaattgggaaatctggcaaaaaaaaaaccttgttctagaacttggcgattgctgacaaagaaggaaagggcctattgttgttgcctcttttgttgttcctcttattgttctttgagtgctgttatttgt

SEQ ID NO: 167012 - DNA, 420 bp, Saccharomyces pastorianus
caagtgtcacaaattagtggcgccgtgtcctacccgcacgcctcgtcgcacgcgatacactgttaatcacccgccttttgccgcctgtttttttcgccgttcgtttatttagcggtgggcaaacaaacaacacagtgtttattgctggtgaccactgttaaggaaggtttgttttgggtcgtgttttgtacttgtttctgctcaattgactagcacacacacattaccacacacatacaatggctgccccaagagaacctaagaagagaaccactagaaagaagaaggacccaaacgcccccaaaagggctttgtccgcctatatgtttttcgctaacgaaaacagagacattgttcgttctgaaaatccagatatcacgtttggacaggtcggtaagaagcttggtgagaagtggaagg

SEQ ID NO: 167013 - DNA, 684 bp, Saccharomyces pastorianus
atgtccgaatatgcatccagtatccattctcaaatgaaacaatttgataccgtatgtaacctacacacgttttttatgcgttcctcggtagtacagataccaaaatgactcgggaaacgtgattatcgcaacttatactaacatcatggccacttttctctcattgcccttttttccttacagaaatactccggtaacagatttttacaacaattggaaaacaaaaccaacttaccaaaatcttatttgattgccggtttaggttttgcttatcttcttttgatttttatcaatgtcggaggtatcggtgaaatcctctccaaccttgctgggttcgtattgccaacatacctatccttggttgccttgaagaccacaactgccaatgatgacacgcaattgttgacatattggattgtcttctcgtttttgagcgtcattgaattctggtctaaggcaatcttatatttgattccattttattggtttttgaagactgttttcttactctacattgccttaccccaaactggcggtgctagaatgatctaccaaaaaattgttgctccattgactgacagatatattttgagagacgttagcaagactgaaaaggacgaaattagagcctctgttaacgaagcttcaagatccggatcaaagactacaggttcttctgtccat

SEQ ID NO: 167014 - DNA, 177 bp, Saccharomyces pastorianus
agctgcgtggagtcgcgccttccgtatcttgtgctttgcattctgtgcatacgtaaggaataagcaacaccttctggttagaagacaaatttcttttttatccttcatttttttttatcatcaaatgaaaatcctccctacgagatttctggtcgctcttcagtccccgaagtgaga

SEQ ID NO: 167015 - DNA, 390 bp, Saccharomyces pastorianus
atgacatatcttaagatggcattagcatcaaacaaagtaaattgttcctttgcgtgatgcaattccatagatgtgttctcatcatcgatttcaagctttaaacctttgcttgcaaattctagcgccaaggcaaccttcaaattattggccaactgcaaatgagcaggatgactctttgatttatcaaaggagatttgtaaagacatgattagtctgaaaatttcctctttttttgttgtatctctccactaagctacgtatttccaagcaaatcatcgatataatagtcatagccattttttttcttcttttgctctcgataaactggatatagcaattttttttctgcctctcaaaaatcttcccgtcttacgtgacattgcagaaaag

SEQ ID NO: 167016 - DNA, 186 bp, Saccharomyces pastorianus
atggatgcaaacgcgcttgatgtatcatttaaagacattttaatgggtaagaaactggatgaagactctgtcggattaactttgtccgacaagtcagacaataagagtgaatcccatacatcttctacaaatgacaaaaatgaatcagcagtcgaaggagaagatgaagaggatgacttctttgaa

SEQ ID NO: 167017 - DNA, 348 bp, Saccharomyces pastorianus
ttgaatgataaactaagagaaaacttaagtaacagtgatagtacaaaggcgaaggacaaagtgaaactggtatcagaagaagagttagagtcttcactcgcagacaaaacaaaagccattaaagatgcccctgtcgtaatagagtacgataccacagttattgatgacgacatcatagaagatggcgaattggctgcactaagagagctaagcatagaaaaaaggataaccaaattaaatgttcttctgcgatctgaaaaatattactgtttcttttgtggggtacggtacaaggatgaaggcgatctttacgagcattgtcccggtacaaatgaagaggaccatgaa

SEQ ID NO: 167018 - DNA, 228 bp, Saccharomyces pastorianus
cgaagtcacatattccgacaaattcaatcgcacgttctattattagtgcaacagagttcgtttttaatttatattgctagtagtgtccatttaaattgtacaatgatctttgggatttcattgtttcttaatgttataatattatgtatatagattatactagagattctcctcgtggatttaggaatccacaaaaaggaatcagtaattttgcataatattataaat

SEQ ID NO: 167019 - DNA, 285 bp, Saccharomyces pastorianus
atgactacagaggtaatgacccaacagaattctaaatcatatttgaacaagcacgctaactggatagttaaagggctaacggactgctcgaaaaggctaacaagtttatgcagtggtgtacacaccctcttaaagttcagcgataaacatttctatcaaaaattagcgggtatcctgttcgatgtggtcaaatgcgctaaggaattggttaaatgcgtggaaaaggcgagtggccgcgtagcgctgtagaacttttcatcgtcactagttaatataaagaagata

SEQ ID NO: 167020 - DNA, 432 bp, Saccharomyces pastorianus
atgggtcgacaaagacgctcacgatggggaaccgttgccctgccgcagccatgttcgttgacagcgccgatgcccgtgctagctcaactcgtacttcccccatgtcgatcttatagtcgttcaatatctggtcgttggggttgccgttccagatcagcggccaatactttgcagaccatgcactgttcagctcctttgtgctaggcgcaaactctggtacttcgatcacgtcctttacctcgtacttttctgctgtgggccaagcactcttcagcttaagatctatctcatccttttcataaatgtactctttggaacacaacactacttccaatgtggagctctccacattcttgcggatccttttcagatgcttcagtgaaacagggtcatttatctggaaatcgttccgaattagcctactctactagt

SEQ ID NO: 167021 - DNA, 285 bp, Saccharomyces pastorianus
  modified_base (16)..(16): a, c, g, t, unknown, or other
tgtgaaggcgttaaantggtcttggtggcgctgaaatgcgatttgagaaacaatgaaaacgaatcgaacgctatcacaccgaacaatatccaacaacaggacatcaacgtttccagtggcaacaacaacaacataaacagtaactctaatgctaagaatctaataagctatgaagaaggccttgccatggctaagaaaattggtgcattgcgttatttggagtgtagtgcaaaattaaataaaggtgttaatgaagcattcacggaagcagcaagagttgcttta

SEQ ID NO: 167022 - DNA, 201 bp, Saccharomyces pastorianus
tttctcaagtctcaattcgtcaaagtgatatttcattgtactgggtccaagaataggggaccaaaagtagctgctaaattcgaaacctacttacaagaagaagatattacaagtaagtttgagagttgcatcctcgttggaggtttttacgcttgggagacccattgtagagagagtaaccttaaattgattgttagtggt

SEQ ID NO: 167023 - DNA, 231 bp, Saccharomyces pastorianus
aaaataagagagctgcgcaacttagagcatcccaaaacgccatttagaaaacgaaagttggaaagatttgaagaactagagaagaaagaagctcagctaacggttaccaatgatccaattcccatatttaagaaggaaaatgaacttctccattttatgttgaggagtcttttcactgagaggaacatgccttctgatgaacgggacattagttaggcgtgttgttgagaa

SEQ ID NO: 167024 - DNA, 237 bp, Saccharomyces pastorianus
ttatatatattcgtgccaattcctcacaatacacttccacgaccttcgacagagatccaaatgacaataagttgaaagccagaatgcaatggaaaaaaaaaaatgtaggaccacgttgaaccaaatgatcaatacagccaaagaaactaccctagtagtgtgtatgctgacctggtaccaactcgaaatttcgtgagctttgcgcttggaaaggtcgacaaaagtggtcttcaaaaa

SEQ ID NO: 167025 - DNA, 645 bp, Saccharomyces pastorianus
attggattaatcgcgtatatgccagcgaatgtattaactgcatacttgacattggtattaaagagtattggctttaaaactctgcaagttaacttacttgctatacctcaatatgcactccatatagttctattactcggtattacctatttgacggagaggctaaacaacagattaggactatgtcttttgcagcctttgtatactgtaccgttactagccatcttgcgtttttggaaaggaactatggttgataaatggggaacatatattatcattacattgctcttgggaaatccatatatacatgctatttgtgtttcgatgtgttccaggaattcacactcaataaaaacaagaacagtctctgcttcattatacaacatgtttgttcaagccggtctgataatatcttcgaacatttaccaacaaagtgataaaccgctatatcgcaagggtaattcggttttgtttggcctttctctcgccatgtttcctttattgattggaagtaagtttttctatatacatatcaaccgtaagagagataaaatttggaacgcaatgtctgaagaagaaagggagcattatatgaatgtaactacggatacaggttcacgtagattagactttaggtttactcat

SEQ ID NO: 167026 - DNA, 333 bp, Saccharomyces pastorianus
cataccatatatcattaccctacctcaatatcacataccatcactctctctaccccataccatatatcattaccctacctcaatatcacataccatcactctctaccccataccatataccattaccctacctcaataccacaccatacatctttaccctgatctactatcaataccatatatcattaccctactttaataccatataccatcattccgtatcccataccatatatcattaccatcactctctctaccccatacaatatatcattaccctaccatcaatatcacataccatcaccctctccatcacataccattaccctacct

SEQ ID NO: 167027 - DNA, 1041 bp, Saccharomyces pastorianus
gtgaactttaatacaccacaacaaaacaagcaacccttttcgttcggtactgcaaataatggcgctaatgccaccacccaaaataactctggtacaggagcctttggaacaggccaacctgcatttagttttaatagtgcagcaaccaataattcgagtaatcaaaacacttcaaccacacccgcatttggcagtagctctggcaccaacgcattcggtagcaacaatgcgggcgccaatacattcggtaatagcaaccctacggcaaacacatttggcagcaataattcgacaactaatgcgttcggtagcaacaataccggaacatctcttttcggctcttctggtgctacacagacaaaaggcgaaggaaataccggaactaatacattcggttcctcatccttattcaataccaatactaatggtaatgccacgaaaccggcttttggcggtttgaattttggcggcaatagtaacacaactcctgcttccactaacaacgctgccccaagcaacagcttatttggtaacaccgcaaatgcaaacaaacctgccttttcttttggtgcaaactctaacgacaaaaaggaaccggaaccatctaaaactgctttctcctttaactcaaatttaggcaacaaggcagaaggccaagctccttctccgggagtttcccaaggtacacagttaggtgggaatggagctggcagcgaacctgccaagccagcattttcctttggttcgcaattgaatgacagtaaaccagcggtagattctcagccaacgctctcctttggcaccaaacctgcagagacaaaggctaatgacacagcaaagccggcattttcctttggtgctacaacggcggaaaacaagacgactaacataacgccaagtctttcatttggcaccaagcctgccgaaaataatgatggggaagcttctaaacctgcgttctcattcggcgctaagcttggtgaaaagaaggatagtgacgcttctaagcctgcattctccttcggtgctaagccagaagaa

SEQ ID NO: 167028 - DNA, 297 bp, Saccharomyces pastorianus
tacaagatgcaaggatcttatttccggccgtgtccgctttttaaccgccgaaggcgaaccaccggaccaatgaaacgcgagagcgcacaaaaagtggggccgctccgaatgcgcgcgttctcattggctgggcgctcggggccgaggctcggtgtgccttttagctgcatttagttgccccatgacaaagcaaaaactggcaggttccctcgaatcaaatacacgtcaattacaaatccacggattaagtcgattctcgttcgttcttgttccttatttctcgttgcttgtgttctg

SEQ ID NO: 167029 - DNA, 78 bp, Saccharomyces pastorianus
aaataatataaagcctttattatgtgtggtttcaaattctattttaccgacttggactgcgacgaaacatttagctat

SEQ ID NO: 167030 - DNA, 234 bp, Saccharomyces pastorianus
gccctttctgaactattcagatgccttaattgtactgactgttggtgtcttatttatttggagagcctcgatcaacctcgcccgatcgccatatttggtgacggatccccaaggaatcgtgtcatcttcggagaacaatagtcatatctagttttaccaggtgcttcaactgctttaactggtaccctatatatttactggggacaagattttggtaaaactgatttcaaaaac

SEQ ID NO: 167031 - DNA, 105 bp, Saccharomyces pastorianus
ctcgaagaatacggggatgttgagataagaagccactatgctataagtaagaaggcctacgatgagatgaagaaacgcttaggggctgccgcactgttctcccag

SEQ ID NO: 167032 - DNA, 570 bp, Saccharomyces pastorianus
ttcgcggctcctccaagacgataaggatatggtatctccaactacgaaaaagtttgccccacatatggtaccaacaagaactgtctcaagccaatcgaaaagactcacaagcttagtatgaaatttattaccgatttgctcatcaaccactgctctacagaacacaagtgattcaaggagagtacgttttctaagaccaatccaaagcgtgattggttcttttacaagccaccaaaaggttacgatgagaatggtaagccccttcctcctttagtggtccagcttggacttttgatgaaactaaaaatgaactatacctacgtttatttgcaagttgtaaagtcgaattgggtagatgcatattgcagaaaggcaatctgtgaaagtgctattgggttttggttaaaccacggagtagatggttttagaattgacaacgcgggtttatatttgaaacttcctggcttaccagactcaccaatttttggcaaaacctcaaacttgtagcatcctaattgagagtctcataatggccctagaatccgcaagtagcaccgagagctacacaag

SEQ ID NO: 167033 - DNA, 168 bp, Saccharomyces pastorianus
atgaagggcttgtccttattaataaacagaaaaaaagataataatgacttgaatttagatgagatcgagaatgttataagtgctactggatttagctgaatagagacggaggagcaagataagaaagccgattttgagtacggtccagaaacacgaatcgataatgat

SEQ ID NO: 167034 - DNA, 171 bp, Saccharomyces pastorianus
ttgcccgaaagtgccgatagaactttcattgaagtagataaactatttagacttggtgtgtaagtaaggaagctcaagtcaacaaaagtggacccatttgccatcaaagcaaatactggaaatgtcacccataaggatcctaaggaagatgtggaaggttccaccgaggag

SEQ ID NO: 167035 - DNA, 297 bp, Saccharomyces pastorianus
ctaattacgtatagcgtttttcttttttttttcagcctgaagccggttctaccagaaaagagtgctcgcgctttcttcttccgctcatttccattgtggtacctgacgtttggagaaaacggcgcagcagctgataacagcccctctccgttgattggccgcgggaccgcaccgtttctttttcgttgccccaccgcactcaaaatacgtgggccggttccggcgccctagcttcacgataagcagatcgaggccgtccaatgggatcgaaagataaggttatgccagatcaggccc

SEQ ID NO: 167036 - DNA, 375 bp, Saccharomyces pastorianus
acaaaacttttactggaggtaataacacgtaaaccagcagtaaaagggaaggaatggagaactatcacatacaacatgaatcaatatttgtttgacaatggattatgggataccccatactatttctacagtgaaaacaattgttaccgctattttataaaccttattgaaagaaaacatctatattcacaatcagacaccacggctatcggtgcacagtgggatgtgctagaaagtgaaacctcggaagatgcacctaaatcgtatgtctctagttccaagtcggatctggaaagatgtcgtttccaagcagctttacttgaaagacaggcgcaacgtgaatattggagaaaacattatccagatgctggtata

SEQ ID NO: 167037 - DNA, 585 bp, Saccharomyces pastorianus
gaccaaactgttaaggtttgggacttccacaacggctggtcgctgaaatcatttcagccgcattcccaatgggtacgctccatagacgttctaggcgactatatcatctccgggtctcacgacactacattaagattgacacactggccgtcaggtaatggtctcagcgtgggcacagggcacgagtttcccatagagaaagtgaagtttattcatttcattgaggacccggcaaacgtaagattcagaaccccatcaacaacccaatacgagaactggggggttcaatattgcgtttctgcgtcaagagatagaacgataaaaatttgggaaatacctctgcccagattaatggctcatagagcccccataccgaatcccacagattcgaattttaaatgccttttaacgctaaagggccatctttcatgggttagagacattttcatccgtggtcagtatctgttttcttgtggtgatgataaatctgttaggtgttgggatttaaacactgggcaatgtttacatacttggaacgatttgcattcagggtttattaattgtctggatatggatgtagactac

SEQ ID NO: 167038 - DNA, 285 bp, Saccharomyces pastorianus
aatgaagaacccattattccctctgtggacgagcatggcctgaaagtatgtaagttgcgcagtcctaacactccacgaagactcagaaaaacactagatgccgtgaaagctttattggtgtcgtcttgtgcttgtaccgcaagggatttagatatatttgatgacaacaacggcgttgcaatgtggaaatggatcaaaattctgtaccacgaagtagcgcaggaaaccacgctgaaggactcttatagaataactttggtaccttcttctgatggtatatcagta

SEQ ID NO: 167039 - DNA, 123 bp, Saccharomyces pastorianus
tctgatggtatatcagtatgtggaaaactttttaatcgcgagtatgtccgcggcttttactttgcatgcaaggctcagtttgataacctttggggagagttgaacaactgcttttatatgcct

SEQ ID NO: 167040 - DNA, 114 bp, Saccharomyces pastorianus
tccgagcgctggattcaatggttaggccttgaaagcgactaccattgttcattctctagtactcggaatgcggaagacgtagtggcaggtgaggcggcgagttcagatcatgat

SEQ ID NO: 167041 - DNA, 705 bp, Saccharomyces pastorianus
ttttcgggaatgcgtcaggggtgaattgccgtaggacggcactgcgtaggtagcagatttgaaacagatttgtacgagtcggccgacgagtgaactcatggccaatcattccgttcaaacagggcgcaacgtatacggtgacgattcaacgataactagtgtcagtgggacgacgccagacgattgcaggaacgagcttccgagcgctggattcaatggttaggccttgaaagcgactaccattgttcattctccagtactcggaatgcggaagacgtagtggcaggtgaggcggcgagttcagatcatgatcaaaaaatttcaagagtaacgcgaaaaaggccccgagagcccaagagtacaaacgatatcctcgtcgcaggccagaaactctttggcagctcctttgaattcagggacttgcatcagttgcgcttatgtcatgaaatatacatggcagacacaccctctgtggcagtacaggccccaccgggctatggtaagacggagttatttcatctccccttgatagcactggcgtctaagggcgacgtgaaatatgtgtcgtttctgtttgtaccgtacacagtgttgcttgctaattgcatgatcaggttgggccgacgcggttgcttgaatgtggcccctgtaagaaactttattgaagaaggttacgatggcgttactgatttatacgtggggatc

SEQ ID NO: 167042 - DNA, 219 bp, Saccharomyces pastorianus
gtggggtgccaaattgtacccatatccccttatggtgcttttctgaagactccttacaataggtgcgccagaaaccaagtcagtgaaagtacgcatcggagagctgtcgttcggcctgccactcgctatttcgtgaccacgtcccaggacacggaaaactcactcattatagtatcctctgttgaggtaccaaagagaaagggtatcgtcactctttcc

SEQ ID NO: 167043 - DNA, 25 bp, Saccharomyces pastorianus
gtgccactgatattgcttatcttac

SEQ ID NO: 167044 - DNA, 25 bp, Saccharomyces pastorianus
acgcccagcatcattgatgttacat

SEQ ID NO: 167045 - DNA, 25 bp, Saccharomyces pastorianus
aaatggcaaacaacgcccagcatca

SEQ ID NO: 167046 - DNA, 25 bp, Saccharomyces pastorianus
cacgtgctcgttacaaaatacactg

SEQ ID NO: 167047 - DNA, 25 bp, Saccharomyces pastorianus
cgccctgtaaatcacgtgctcgtta

SEQ ID NO: 167048 - DNA, 25 bp, Saccharomyces pastorianus
gatgttacatatactatgcacgttt

SEQ ID NO: 167049 - DNA, 25 bp, Saccharomyces pastorianus
atttctgcgccctgtaaatcacgtg

SEQ ID NO: 167050 - DNA, 25 bp, Saccharomyces pastorianus
attttcaacatttctgcgccctgta

SEQ ID NO: 167051 - DNA, 25 bp, Saccharomyces pastorianus
aaatacactgccatagtaaatacaa

SEQ ID NO: 167052 - DNA, 25 bp, Saccharomyces pastorianus
atattgcttatcttacttttttcta

SEQ ID NO: 167053 - DNA, 25 bp, Saccharomyces pastorianus
aaacaacgcccagcatcattgatgt

SEQ ID NO: 167054 - DNA, 25 bp, Saccharomyces pastorianus
aagtttgacttcttcatctccaact

SEQ ID NO: 167055 - DNA, 25 bp, Saccharomyces pastorianus
ttggcttccacttctccaagttcaa

SEQ ID NO: 167056 - DNA, 25 bp, Saccharomyces pastorianus
ttactgattcaacttcatcccttgg

SEQ ID NO: 167057 - DNA, 25 bp, Saccharomyces pastorianus
ttagctctacttttactgattcaac

SEQ ID NO: 167058 - DNA, 25 bp, Saccharomyces pastorianus
aacatctacctcatcaagttctaaa

SEQ ID NO: 167059 - DNA, 25 bp, Saccharomyces pastorianus
tggctcctctatggcatcttcatca

SEQ ID NO: 167060 - DNA, 25 bp, Saccharomyces pastorianus
atcttcaagttctacatctacctcc

SEQ ID NO: 167061 - DNA, 25 bp, Saccharomyces pastorianus
ccaagttcaacatctattagctcta

SEQ ID NO: 167062 - DNA, 25 bp, Saccharomyces pastorianus
tctacctccctaagttctacatcta

SEQ ID NO: 167063 - DNA, 25 bp, Saccharomyces pastorianus
atctacatccctaagttctacatct

SEQ ID NO: 167064 - DNA, 25 bp, Saccharomyces pastorianus
ttcaagttcagcatctacatcccta

SEQ ID NO: 167065 - DNA, 25 bp, Saccharomyces pastorianus
gcaaccctatctacagttactacgt

SEQ ID NO: 167066 - DNA, 25 bp, Saccharomyces pastorianus
ggtagttggctacagcacgtctgtc

SEQ ID NO: 167067 - DNA, 25 bp, Saccharomyces pastorianus
ttccacttattccacagctgttgat

SEQ ID NO: 167068 - DNA, 25 bp, Saccharomyces pastorianus
acactagcttagttccagtttccac

SEQ ID NO: 167069 - DNA, 25 bp, Saccharomyces pastorianus
tactagcttagttccagtttccact

SEQ ID NO: 167070 - DNA, 25 bp, Saccharomyces pastorianus
agttggctatagtacatctgtcggt

SEQ ID NO: 167071 - DNA, 25 bp, Saccharomyces pastorianus
gtttgtaccacatgtactgccactt

SEQ ID NO: 167072 - DNA, 25 bp, Saccharomyces pastorianus
gggcttaaagtgtctacttccacag

SEQ ID NO: 167073 - DNA, 25 bp, Saccharomyces pastorianus
acgtctgtcggtgatgctcaatatg

SEQ ID NO: 167074 - DNA, 25 bp, Saccharomyces pastorianus
gtggtattcatcctcaacagccaag

SEQ ID NO: 167075 - DNA, 25 bp, Saccharomyces pastorianus
ccaagccacctacgatttcaattta

SEQ ID NO: 167076 - DNA, 25 bp, Saccharomyces pastorianus
gctttcgttccaaacgatggttgtt

SEQ ID NO: 167077 - DNA, 25 bp, Saccharomyces pastorianus
aggtcgttaaggtctctggtgtctc

SEQ ID NO: 167078 - DNA, 25 bp, Saccharomyces pastorianus
actgctttcgttccaaacgatggtt

SEQ ID NO: 167079 - DNA, 25 bp, Saccharomyces pastorianus
gtcgttaaggtctctggtgtctcct

SEQ ID NO: 167080 - DNA, 25 bp, Saccharomyces pastorianus
taagggtgatattccaggtgttaga

SEQ ID NO: 167081 - DNA, 25 bp, Saccharomyces pastorianus
taaggtctctggtgtctccttgttg

SEQ ID NO: 167082 - DNA, 25 bp, Saccharomyces pastorianus
tccaggtgttagattcaaggtcgtt

SEQ ID NO: 167083 - DNA, 25 bp, Saccharomyces pastorianus
aggtctctggtgtctccttgttggc

SEQ ID NO: 167084 - DNA, 25 bp, Saccharomyces pastorianus
gattcaaggtcgttaaggtctctgg

SEQ ID NO: 167085 - DNA, 25 bp, Saccharomyces pastorianus
caaggtcgttaaggtctctggtgtc

SEQ ID NO: 167086 - DNA, 25 bp, Saccharomyces pastorianus
gttccaaacgatggttgtttgaact

SEQ ID NO: 167087 - DNA, 25 bp, Saccharomyces pastorianus
ggatatattactaatctccatcatt

SEQ ID NO: 167088 - DNA, 25 bp, Saccharomyces pastorianus
ttactaatctccatcattaaaaaga

SEQ ID NO: 167089 - DNA, 25 bp, Saccharomyces pastorianus
gccttcatccgtcacgaaatcttat

SEQ ID NO: 167090 - DNA, 25 bp, Saccharomyces pastorianus
ataacatacgttattccagacagca

SEQ ID NO: 167091 - DNA, 25 bp, Saccharomyces pastorianus
tatattactaatctccatcattaaa

SEQ ID NO: 167092 - DNA, 25 bp, Saccharomyces pastorianus
gtcacgaaatcttatggatatatta

SEQ ID NO: 167093 - DNA, 25 bp, Saccharomyces pastorianus
taacatacgttattccagacagcat

SEQ ID NO: 167094 - DNA, 25 bp, Saccharomyces pastorianus
ccttcatccgtcacgaaatcttatg

SEQ ID NO: 167095 - DNA, 25 bp, Saccharomyces pastorianus
gatatattactaatctccatcatta

SEQ ID NO: 167096 - DNA, 25 bp, Saccharomyces pastorianus
ccgtcacgaaatcttatggatatat

SEQ ID NO: 167097 - DNA, 25 bp, Saccharomyces pastorianus
aacatacgttattccagacagcatc

SEQ ID NO: 167098 - DNA, 25 bp, Saccharomyces pastorianus
gtaagcacactcaacacaaggttac

SEQ ID NO: 167099 - DNA, 25 bp, Saccharomyces pastorianus
gtcgtaagcacactcaacacaaggt

SEQ ID NO: 167100 - DNA, 25 bp, Saccharomyces pastorianus
accaagcctgttttccacaagaaag

SEQ ID NO: 167101 - DNA, 25 bp, Saccharomyces pastorianus
tcaaaccaagcctgttttccacaag

SEQ ID NO: 167102 - DNA, 25 bp, Saccharomyces pastorianus
acaaagctggtaaggcttccttgtt

SEQ ID NO: 167103 - DNA, 25 bp, Saccharomyces pastorianus
gtttcggtggtcaaaccaagcctgt

SEQ ID NO: 167104 - DNA, 25 bp, Saccharomyces pastorianus
agactaccaagaaggttgttttgag

SEQ ID NO: 167105 - DNA, 25 bp, Saccharomyces pastorianus
gtaagagacgttatgaccgtaaaca

SEQ ID NO: 167106 - DNA, 25 bp, Saccharomyces pastorianus
gtggtcaaaccaagcctgttttcca

SEQ ID NO: 167107 - DNA, 25 bp, Saccharomyces pastorianus
cctgtcgtaagcacactcaacacaa

SEQ ID NO: 167108 - DNA, 25 bp, Saccharomyces pastorianus
ggttgttttgagattggaatgtgtc

SEQ ID NO: 167109 - DNA, 25 bp, Saccharomyces pastorianus
agcaaccaaattcccggcaacaaca

SEQ ID NO: 167110 - DNA, 25 bp, Saccharomyces pastorianus
agcaacaactgtcccaagcacagca

SEQ ID NO: 167111 - DNA, 25 bp, Saccharomyces pastorianus
aacatccacaacaacatatgcaaat

SEQ ID NO: 167112 - DNA, 25 bp, Saccharomyces pastorianus
agaggtaccaacaagaacaggaaga

SEQ ID NO: 167113 - DNA, 25 bp, Saccharomyces pastorianus
aacaggaagacgtccaagtgcagca

SEQ ID NO: 167114 - DNA, 25 bp, Saccharomyces pastorianus
aagcacagcaaccaaattcccggca

SEQ ID NO: 167115 - DNA, 25 bp, Saccharomyces pastorianus
gaagacgtccaagtgcagcaacaac

SEQ ID NO: 167116 - DNA, 25 bp, Saccharomyces pastorianus
aagtgcagcaacaactgtcccaagc

SEQ ID NO: 167117 - DNA, 25 bp, Saccharomyces pastorianus
aggaagacgtccaagtgcagcaaca

SEQ ID NO: 167118 - DNA, 25 bp, Saccharomyces pastorianus
gacgtccaagtgcagcaacaactgt

SEQ ID NO: 167119 - DNA, 25 bp, Saccharomyces pastorianus
gcaacaacttcaataccagcagcag

SEQ ID NO: 167120 - DNA, 25 bp, Saccharomyces pastorianus
agatgtctacggcatcgaaaagacg

SEQ ID NO: 167121 - DNA, 25 bp, Saccharomyces pastorianus
gaaaagacgtataaatgcatctgag

SEQ ID NO: 167122 - DNA, 25 bp, Saccharomyces pastorianus
aaaagatgtctacggcatcgaaaag

SEQ ID NO: 167123 - DNA, 25 bp, Saccharomyces pastorianus
gtctacggcatcgaaaagacgtata

SEQ ID NO: 167124 - DNA, 25 bp, Saccharomyces pastorianus
atgtctacggcatcgaaaagacgta

SEQ ID NO: 167125 - DNA, 25 bp, Saccharomyces pastorianus
acggcatcgaaaagacgtataaatg

SEQ ID NO: 167126 - DNA, 25 bp, Saccharomyces pastorianus
tctacggcatcgaaaagacgtataa

SEQ ID NO: 167127 - DNA, 25 bp, Saccharomyces pastorianus
tgtctacggcatcgaaaagacgtat

SEQ ID NO: 167128 - DNA, 25 bp, Saccharomyces pastorianus
tcgaaaagacgtataaatgcatctg

SEQ ID NO: 167129 - DNA, 25 bp, Saccharomyces pastorianus
ctacggcatcgaaaagacgtataaa

SEQ ID NO: 167130 - DNA, 25 bp, Saccharomyces pastorianus
gatgtctacggcatcgaaaagacgt

SEQ ID NO: 167131 - DNA, 25 bp, Saccharomyces pastorianus
aggttgtatctctaacaaaaagatt

SEQ ID NO: 167132 - DNA, 25 bp, Saccharomyces pastorianus
tctaaaaagacaaagcacccctact

SEQ ID NO: 167133 - DNA, 25 bp, Saccharomyces pastorianus
tcccaaaggtgcgtttttgtagcgg

SEQ ID NO: 167134 - DNA, 25 bp, Saccharomyces pastorianus
gttgtatctctaacaaaaagattcc

SEQ ID NO: 167135 - DNA, 25 bp, Saccharomyces pastorianus
tatctctaacaaaaagattcctttc

SEQ ID NO: 167136 - DNA, 25 bp, Saccharomyces pastorianus
ttgtagcgggaagggtgcttctaaa

SEQ ID NO: 167137 - DNA, 25 bp, Saccharomyces pastorianus
tagcgggaagggtgcttctaaaaag

SEQ ID NO: 167138 - DNA, 25 bp, Saccharomyces pastorianus
gtatctctaacaaaaagattccttt

SEQ ID NO: 167139 - DNA, 25 bp, Saccharomyces pastorianus
taaaaagacaaagcacccctactgc

SEQ ID NO: 167140 - DNA, 25 bp, Saccharomyces pastorianus
tttttgtagcgggaagggtgcttct

SEQ ID NO: 167141 - DNA, 25 bp, Saccharomyces pastorianus
ctaaaaagacaaagcacccctactg

SEQ ID NO: 167142 - DNA, 25 bp, Saccharomyces pastorianus
agcacaaatgacagaccttatagta

SEQ ID NO: 167143 - DNA, 25 bp, Saccharomyces pastorianus
gatagagcacaaatgacagacctta

SEQ ID NO: 167144 - DNA, 25 bp, Saccharomyces pastorianus
gcctgcaggtctttgagattctgta

SEQ ID NO: 167145 - DNA, 25 bp, Saccharomyces pastorianus
ggatagagcacaaatgacagacctt

SEQ ID NO: 167146 - DNA, 25 bp, Saccharomyces pastorianus
gagcacaaatgacagaccttatagt

SEQ ID NO: 167147 - DNA, 25 bp, Saccharomyces pastorianus
gcaggtctttgagattctgtatata

SEQ ID NO: 167148 - DNA, 25 bp, Saccharomyces pastorianus
cctgcaggtctttgagattctgtat

SEQ ID NO: 167149 - DNA, 25 bp, Saccharomyces pastorianus
tgcctgcaggtctttgagattctgt

SEQ ID NO: 167150 - DNA, 25 bp, Saccharomyces pastorianus
tagagcacaaatgacagaccttata

SEQ ID NO: 167151 - DNA, 25 bp, Saccharomyces pastorianus
ctgcaggtctttgagattctgtata

SEQ ID NO: 167152 - DNA, 25 bp, Saccharomyces pastorianus
ggtctttgagattctgtatataaat

SEQ ID NO: 167153 - DNA, 25 bp, Saccharomyces pastorianus
aatcaactctggtacattcgtcaaa

SEQ ID NO: 167154 - DNA, 25 bp, Saccharomyces pastorianus
tcctactctactattagacaattgg

SEQ ID NO: 167155 - DNA, 25 bp, Saccharomyces pastorianus
caaggctactttggaactattgaag

SEQ ID NO: 167156 - DNA, 25 bp, Saccharomyces pastorianus
attcgtcaaagttaccaaggctact

SEQ ID NO: 167157 - DNA, 25 bp, Saccharomyces pastorianus
gggtaagtatggtatcttgtccatt

SEQ ID NO: 167158 - DNA, 25 bp, Saccharomyces pastorianus
gtccgacaatgctatcatcgaagcc

SEQ ID NO: 167159 - DNA, 25 bp, Saccharomyces pastorianus
catcgaagccaacttgggtaagtat

SEQ ID NO: 167160 - DNA, 25 bp, Saccharomyces pastorianus
atggtatcttgtccattgacgattt

SEQ ID NO: 167161 - DNA, 25 bp, Saccharomyces pastorianus
caacacaagttggtcttcgttgtca

SEQ ID NO: 167162 - DNA, 25 bp, Saccharomyces pastorianus
caagttggtcttcgttgtcagaatc

SEQ ID NO: 167163 - DNA, 25 bp, Saccharomyces pastorianus
ctactacgtcgaagctcaacacaag

SEQ ID NO: 167164 - DNA, 25 bp, Saccharomyces pastorianus
ttggcagatattcaggtatataaac

SEQ ID NO: 167165 - DNA, 25 bp, Saccharomyces pastorianus
cattggcagatattcaggtatataa

SEQ ID NO: 167166 - DNA, 25 bp, Saccharomyces pastorianus
ccattggcagatattcaggtatata

SEQ ID NO: 167167 - DNA, 25 bp, Saccharomyces pastorianus
atggccgcgcaaaatccattggcag

SEQ ID NO: 167168 - DNA, 25 bp, Saccharomyces pastorianus
tattcaggtatataaacgttacaaa

SEQ ID NO: 167169 - DNA, 25 bp, Saccharomyces pastorianus
ccgcgcaaaatccattggcagatat

SEQ ID NO: 167170 - DNA, 25 bp, Saccharomyces pastorianus
gccgcgcaaaatccattggcagata

SEQ ID NO: 167171 - DNA, 25 bp, Saccharomyces pastorianus
tggccgcgcaaaatccattggcaga

SEQ ID NO: 167172 - DNA, 25 bp, Saccharomyces pastorianus
gatattcaggtatataaacgttaca

SEQ ID NO: 167173 - DNA, 25 bp, Saccharomyces pastorianus
gcagatattcaggtatataaacgtt

SEQ ID NO: 167174 - DNA, 25 bp, Saccharomyces pastorianus
ggccgcgcaaaatccattggcagat

SEQ ID NO: 167175 - DNA, 25 bp, Saccharomyces pastorianus
tgatcactttccttgctgcttctgt

SEQ ID NO: 167176 - DNA, 25 bp, Saccharomyces pastorianus
tacggtacaccatggactcaagaat

SEQ ID NO: 167177 - DNA, 25 bp, Saccharomyces pastorianus
ccaaaccttgactaaacgtgaatct

SEQ ID NO: 167178 - DNA, 25 bp, Saccharomyces pastorianus
actaaacgtgaatctcaacctgccg

SEQ ID NO: 167179 - DNA, 25 bp, Saccharomyces pastorianus
gagcttcagtccaattatttacggt

SEQ ID NO: 167180 - DNA, 25 bp, Saccharomyces pastorianus
gtctggttgggactacaattgtaac

SEQ ID NO: 167181 - DNA, 25 bp, Saccharomyces pastorianus
agatctcatgaacgaggatggcaag

SEQ ID NO: 167182 - DNA, 25 bp, Saccharomyces pastorianus
acctgccgccactagtacagttgaa

SEQ ID NO: 167183 - DNA, 25 bp, Saccharomyces pastorianus
cttgctgcttctgtgtatttcttca

SEQ ID NO: 167184 - DNA, 25 bp, Saccharomyces pastorianus
gtaacacatacttttcttcattaga

SEQ ID NO: 167185 - DNA, 25 bp, Saccharomyces pastorianus
tgtgtatttcttcaagagcttcagt

SEQ ID NO: 167186 - DNA, 25 bp, Saccharomyces pastorianus
aacttttacatttggctcctctgca

SEQ ID NO: 167187 - DNA, 25 bp, Saccharomyces pastorianus
gttgaaaaaccttcctctaagcctg

SEQ ID NO: 167188 - DNA, 25 bp, Saccharomyces pastorianus
ttaccctctgcggttgatggtgaaa

SEQ ID NO: 167189 - DNA, 25 bp, Saccharomyces pastorianus
cctctgcactcgctgacaataaaga

SEQ ID NO: 167190 - DNA, 25 bp, Saccharomyces pastorianus
ggactcaaagccagctttttcattt

SEQ ID NO: 167191 - DNA, 25 bp, Saccharomyces pastorianus
tacaaatactactaaaaccgcggat

SEQ ID NO: 167192 - DNA, 25 bp, Saccharomyces pastorianus
aaccgcggatactaaagctccaact

SEQ ID NO: 167193 - DNA, 25 bp, Saccharomyces pastorianus
aatatctaacgctggtaccgagaaa

SEQ ID NO: 167194 - DNA, 25 bp, Saccharomyces pastorianus
gcaaagactctgacaaaccctcttt

SEQ ID NO: 167195 - DNA, 25 bp, Saccharomyces pastorianus
aagtagatgctaccccagaagaatc

SEQ ID NO: 167196 - DNA, 25 bp, Saccharomyces pastorianus
aagcctgccttcaatttaatatcta

SEQ ID NO: 167197 - DNA, 25 bp, Saccharomyces pastorianus
ggtaagtacctaggcaaagcatttg

SEQ ID NO: 167198 - DNA, 25 bp, Saccharomyces pastorianus
ttaccaccgttcagtgagttacaat

SEQ ID NO: 167199 - DNA, 25 bp, Saccharomyces pastorianus
gtgaagctcgtgatgagtccaatga

SEQ ID NO: 167200 - DNA, 25 bp, Saccharomyces pastorianus
gaggattcatatcttgctatctttc

SEQ ID NO: 167201 - DNA, 25 bp, Saccharomyces pastorianus
aaatccgatcagcttactgtgttga

SEQ ID NO: 167202 - DNA, 25 bp, Saccharomyces pastorianus
gttctttgaggcaacggactatgta

SEQ ID NO: 167203 - DNA, 25 bp, Saccharomyces pastorianus
gttctatcttggatattggcaacat

SEQ ID NO: 167204 - DNA, 25 bp, Saccharomyces pastorianus
gggaaaggcaagactattaccagtt

SEQ ID NO: 167205 - DNA, 25 bp, Saccharomyces pastorianus
caatcagctgttttaacggtggaac

SEQ ID NO: 167206 - DNA, 25 bp, Saccharomyces pastorianus
gggttactatccaacaatcagctgt

SEQ ID NO: 167207 - DNA, 25 bp, Saccharomyces pastorianus
cagcttactgtgttgacgggaattc

SEQ ID NO: 167208 - DNA, 25 bp, Saccharomyces pastorianus
acatagattataggagctcaggaca

SEQ ID NO: 167209 - DNA, 25 bp, Saccharomyces pastorianus
gagccatactgtgagcacatagatt

SEQ ID NO: 167210 - DNA, 25 bp, Saccharomyces pastorianus
aggacagcttgtaaaccccagtttg

SEQ ID NO: 167211 - DNA, 25 bp, Saccharomyces pastorianus
gacattaaagttactggagttgaca

SEQ ID NO: 167212 - DNA, 25 bp, Saccharomyces pastorianus
ggagttgacaatcagtgagccatac

SEQ ID NO: 167213 - DNA, 25 bp, Saccharomyces pastorianus
tcagtgagccatactgtgagcacat

SEQ ID NO: 167214 - DNA, 25 bp, Saccharomyces pastorianus
ttgcctttggagacattaaagttac

SEQ ID NO: 167215 - DNA, 25 bp, Saccharomyces pastorianus
tgtaaaccccagtttgtcgagtttg

SEQ ID NO: 167216 - DNA, 25 bp, Saccharomyces pastorianus
gctcaggacagcttgtaaaccccag

SEQ ID NO: 167217 - DNA, 25 bp, Saccharomyces pastorianus
agacgatattgagaagggttactat

SEQ ID NO: 167218 - DNA, 25 bp, Saccharomyces pastorianus
tgtcgagtttgtttgaagacgatat

SEQ ID NO: 167219 - DNA, 25 bp, Saccharomyces pastorianus
tataccctccttccatcttgaagaa

SEQ ID NO: 167220 - DNA, 25 bp, Saccharomyces pastorianus
gtgagcgaccgtatgttctgtgaca

SEQ ID NO: 167221 - DNA, 25 bp, Saccharomyces pastorianus
agatcattattataccctccttcca

SEQ ID NO: 167222 - DNA, 25 bp, Saccharomyces pastorianus
gtcaaagggctattttaaaccagag

SEQ ID NO: 167223 - DNA, 25 bp, Saccharomyces pastorianus
ttagggcggctttcacggtgatgaa

SEQ ID NO: 167224 - DNA, 25 bp, Saccharomyces pastorianus
gaccagggatacttgcgggaagatc

SEQ ID NO: 167225 - DNA, 25 bp, Saccharomyces pastorianus
atcaatgggtaattctttatgtcaa

SEQ ID NO: 167226 - DNA, 25 bp, Saccharomyces pastorianus
gggaagatcatacccatcacacaat

SEQ ID NO: 167227 - DNA, 25 bp, Saccharomyces pastorianus
agcattatctagagggctggtcctg

SEQ ID NO: 167228 - DNA, 25 bp, Saccharomyces pastorianus
gatccgcattactataggcacaagt

SEQ ID NO: 167229 - DNA, 25 bp, Saccharomyces pastorianus
ccatcacacaattcatccagcatgt

SEQ ID NO: 167230 - DNA, 25 bp, Saccharomyces pastorianus
gaacgccttttttttgcaatatgct

SEQ ID NO: 167231 - DNA, 25 bp, Saccharomyces pastorianus
gcaatatgctctcttatattacgaa

SEQ ID NO: 167232 - DNA, 25 bp, Saccharomyces pastorianus
ttcgcgatatgcaacggccaatcaa

SEQ ID NO: 167233 - DNA, 25 bp, Saccharomyces pastorianus
aagcagcgcagggatattccactct

SEQ ID NO: 167234 - DNA, 25 bp, Saccharomyces pastorianus
gatccacgggattagccgcccacgg

SEQ ID NO: 167235 - DNA, 25 bp, Saccharomyces pastorianus
cacggcaacccggtgcaacgggtag

SEQ ID NO: 167236 - DNA, 25 bp, Saccharomyces pastorianus
tcgagccgtaagctataacacttat

SEQ ID NO: 167237 - DNA, 25 bp, Saccharomyces pastorianus
ttcttaactccccaggacaggccaa

SEQ ID NO: 167238 - DNA, 25 bp, Saccharomyces pastorianus
gatattccactcttcgagccgtaag

SEQ ID NO: 167239 - DNA, 25 bp, Saccharomyces pastorianus
aatcaacggcgagctccgggcgcgt

SEQ ID NO: 167240 - DNA, 25 bp, Saccharomyces pastorianus
gtgtttcgcgatatgcaacggccaa

SEQ ID NO: 167241 - DNA, 25 bp, Saccharomyces pastorianus
gacgaggatggtatgcctcacgcta

SEQ ID NO: 167242 - DNA, 25 bp, Saccharomyces pastorianus
ctaccgagagattggttgacactaa

SEQ ID NO: 167243 - DNA, 25 bp, Saccharomyces pastorianus
gcgactatacacttaacatctctgt

SEQ ID NO: 167244 - DNA, 25 bp, Saccharomyces pastorianus
atgcctcacgctactgatgtatcag

SEQ ID NO: 167245 - DNA, 25 bp, Saccharomyces pastorianus
tatatccattgctcaacatgctggg

SEQ ID NO: 167246 - DNA, 25 bp, Saccharomyces pastorianus
aacgctcgagaatgcaactgcctgg

SEQ ID NO: 167247 - DNA, 25 bp, Saccharomyces pastorianus
gggcacaagcgactatacacttaac

SEQ ID NO: 167248 - DNA, 25 bp, Saccharomyces pastorianus
tgatgtatcagaccgactctatgag

SEQ ID NO: 167249 - DNA, 25 bp, Saccharomyces pastorianus
gcaactgcctggattaattcaaatt

SEQ ID NO: 167250 - DNA, 25 bp, Saccharomyces pastorianus
atagctcaattctactgacctcgac

SEQ ID NO: 167251 - DNA, 25 bp, Saccharomyces pastorianus
tgacctcgacacatatatccattgc

SEQ ID NO: 167252 - DNA, 25 bp, Saccharomyces pastorianus
agccattgctatacgaggcctccta

SEQ ID NO: 167253 - DNA, 25 bp, Saccharomyces pastorianus
ttgcactgtttctcttagcttatcc

SEQ ID NO: 167254 - DNA, 25 bp, Saccharomyces pastorianus
aattgtcgtttctgctcttggagcc

SEQ ID NO: 167255 - DNA, 25 bp, Saccharomyces pastorianus
actataatgtcaccagccattgcta

SEQ ID NO: 167256 - DNA, 25 bp, Saccharomyces pastorianus
tcattgctctttctttgcactgttt

SEQ ID NO: 167257 - DNA, 25 bp, Saccharomyces pastorianus
acaattccttcattgctctttcttt

SEQ ID NO: 167258 - DNA, 25 bp, Saccharomyces pastorianus
agcttatcctgctactgcccaatta

SEQ ID NO: 167259 - DNA, 25 bp, Saccharomyces pastorianus
cgtccacctcactaactataatgtc

SEQ ID NO: 167260 - DNA, 25 bp, Saccharomyces pastorianus
tgcgaagccacacacacaattcctt

SEQ ID NO: 167261 - DNA, 25 bp, Saccharomyces pastorianus
tggagcccatcttctttcctaacaa

SEQ ID NO: 167262 - DNA, 25 bp, Saccharomyces pastorianus
ttcctaacaaagcatccgaccacgt

SEQ ID NO: 167263 - DNA, 25 bp, Saccharomyces pastorianus
ttcgtcgttgtctttgtctcctttt

SEQ ID NO: 167264 - DNA, 25 bp, Saccharomyces pastorianus
aggatcggtagttactcttctcttg

SEQ ID NO: 167265 - DNA, 25 bp, Saccharomyces pastorianus
gctttgctaatatggacaggatcgg

SEQ ID NO: 167266 - DNA, 25 bp, Saccharomyces pastorianus
gtgaacacgtacactatacgctccc

SEQ ID NO: 167267 - DNA, 25 bp, Saccharomyces pastorianus
gattccgagttcgtcgttgtctttg

SEQ ID NO: 167268 - DNA, 25 bp, Saccharomyces pastorianus
acccaaatgccactcacttaaattc

SEQ ID NO: 167269 - DNA, 25 bp, Saccharomyces pastorianus
tatggacaggatcggtagttactct

SEQ ID NO: 167270 - DNA, 25 bp, Saccharomyces pastorianus
aatgctcttctatatgtcttaagcc

SEQ ID NO: 167271 - DNA, 25 bp, Saccharomyces pastorianus
agttcgtcgttgtctttgtctcctt

SEQ ID NO: 167272 - DNA, 25 bp, Saccharomyces pastorianus
gacaggatcggtagttactcttctc

SEQ ID NO: 167273 - DNA, 25 bp, Saccharomyces pastorianus
attcgattccgagttcgtcgttgtc

SEQ ID NO: 167274 - DNA, 25 bp, Saccharomyces pastorianus
gttagaccccgaatgccaattacaa

SEQ ID NO: 167275 - DNA, 25 bp, Saccharomyces pastorianus
gttaaacgcgcagaatattgcattt

SEQ ID NO: 167276 - DNA, 25 bp, Saccharomyces pastorianus
ttacaaaactctgataactctgaag

SEQ ID NO: 167277 - DNA, 25 bp, Saccharomyces pastorianus
agtgaagttagaccccgaatgccaa

SEQ ID NO: 167278 - DNA, 25 bp, Saccharomyces pastorianus
tgttaaacgcgcagaatattgcatt

SEQ ID NO: 167279 - DNA, 25 bp, Saccharomyces pastorianus
tatggataaattgaacagtgtgcta

SEQ ID NO: 167280 - DNA, 25 bp, Saccharomyces pastorianus
ggatagtgaagttagaccccgaatg

SEQ ID NO: 167281 - DNA, 25 bp, Saccharomyces pastorianus
ttgttaaacgcgcagaatattgcat

SEQ ID NO: 167282 - DNA, 25 bp, Saccharomyces pastorianus
ttaaacgcgcagaatattgcatttg

SEQ ID NO: 167283 - DNA, 25 bp, Saccharomyces pastorianus
attgaacagtgtgctaatagcagac

SEQ ID NO: 167284 - DNA, 25 bp, Saccharomyces pastorianus
aaacgcgcagaatattgcatttgct

SEQ ID NO: 167285 - DNA, 25 bp, Saccharomyces pastorianus
tttgttctctttcgccatgccatat

SEQ ID NO: 167286 - DNA, 25 bp, Saccharomyces pastorianus
attacgcttgctttgcttgttttgt

SEQ ID NO: 167287 - DNA, 25 bp, Saccharomyces pastorianus
acagctgtgcattacgcttgctttg

SEQ ID NO: 167288 - DNA, 25 bp, Saccharomyces pastorianus
tgtgctcttttttagccacagctgt

SEQ ID NO: 167289 - DNA, 25 bp, Saccharomyces pastorianus
ttctctttcgccatgccatattact

SEQ ID NO: 167290 - DNA, 25 bp, Saccharomyces pastorianus
ctcttttttagccacagctgtgcat

SEQ ID NO: 167291 - DNA, 25 bp, Saccharomyces pastorianus
acgcttgctttgcttgttttgttct

SEQ ID NO: 167292 - DNA, 25 bp, Saccharomyces pastorianus
tgttttgttctctttcgccatgcca

SEQ ID NO: 167293 - DNA, 25 bp, Saccharomyces pastorianus
ttagccacagctgtgcattacgctt

SEQ ID NO: 167294 - DNA, 25 bp, Saccharomyces pastorianus
gcttgctttgcttgttttgttctct

SEQ ID NO: 167295 - DNA, 25 bp, Saccharomyces pastorianus
tgcattacgcttgctttgcttgttt

SEQ ID NO: 167296 - DNA, 25 bp, Saccharomyces pastorianus
tatagtatcctaatcctttctattg

SEQ ID NO: 167297 - DNA, 25 bp, Saccharomyces pastorianus
gtactgcgcaacttacatgctttca

SEQ ID NO: 167298 - DNA, 25 bp, Saccharomyces pastorianus
ctcgcatttcgtaacaacccattat

SEQ ID NO: 167299 - DNA, 25 bp, Saccharomyces pastorianus
catcgtggagtcttagtactgcgca

SEQ ID NO: 167300 - DNA, 25 bp, Saccharomyces pastorianus
ccttacaataggtgccggcgaaagt

SEQ ID NO: 167301 - DNA, 25 bp, Saccharomyces pastorianus
aagtaccaatcctagagctctcgtt

SEQ ID NO: 167302 - DNA, 25 bp, Saccharomyces pastorianus
ttgccgtacaaccacaacacgacat

SEQ ID NO: 167303 - DNA, 25 bp, Saccharomyces pastorianus
tgccggcgaaagtaccaatcctaga

SEQ ID NO: 167304 - DNA, 25 bp, Saccharomyces pastorianus
aatatatctaaatcccttgccgtac

SEQ ID NO: 167305 - DNA, 25 bp, Saccharomyces pastorianus
tacatgctttcaagccatgctcgtc

SEQ ID NO: 167306 - DNA, 25 bp, Saccharomyces pastorianus
atgctcgtccgctctgtgtgtcgac

SEQ ID NO: 167307 - DNA, 25 bp, Saccharomyces pastorianus
cttttcgccagttaacttgcttggt

SEQ ID NO: 167308 - DNA, 25 bp, Saccharomyces pastorianus
tagatcacgcttcacccgctctgtg

SEQ ID NO: 167309 - DNA, 25 bp, Saccharomyces pastorianus
ttcgccagttaacttgcttggtatg

SEQ ID NO: 167310 - DNA, 25 bp, Saccharomyces pastorianus
acccgctctgtgtcgactttctttt

SEQ ID NO: 167311 - DNA, 25 bp, Saccharomyces pastorianus
tttcgccagttaacttgcttggtat

SEQ ID NO: 167312 - DNA, 25 bp, Saccharomyces pastorianus
atagatcacgcttcacccgctctgt

SEQ ID NO: 167313 - DNA, 25 bp, Saccharomyces pastorianus
ttttcgccagttaacttgcttggta

SEQ ID NO: 167314 - DNA, 25 bp, Saccharomyces pastorianus
cccgctctgtgtcgactttcttttc

SEQ ID NO: 167315 - DNA, 25 bp, Saccharomyces pastorianus
tcacccgctctgtgtcgactttctt

SEQ ID NO: 167316 - DNA, 25 bp, Saccharomyces pastorianus
gcttcacccgctctgtgtcgacttt

SEQ ID NO: 167317 - DNA, 25 bp, Saccharomyces pastorianus
gtgggcatagatcacgcttcacccg

SEQ ID NO: 167318 - DNA, 25 bp, Saccharomyces pastorianus
tagtttgttttaaaatagcaacgca

SEQ ID NO: 167319 - DNA, 25 bp, Saccharomyces pastorianus
gcagctcaaagctgttttgattaat

SEQ ID NO: 167320 - DNA, 25 bp, Saccharomyces pastorianus
tttctatttctgagctatataaagc

SEQ ID NO: 167321 - DNA, 25 bp, Saccharomyces pastorianus
tcgccggtttttttctatttctgag

SEQ ID NO: 167322 - DNA, 25 bp, Saccharomyces pastorianus
gcacgtacagtatctcatcgaggtt

SEQ ID NO: 167323 - DNA, 25 bp, Saccharomyces pastorianus
tttaacagccattcgcagcacgtac

SEQ ID NO: 167324 - DNA, 25 bp, Saccharomyces pastorianus
cattcgcagcacgtacagtatctca

SEQ ID NO: 167325 - DNA, 25 bp, Saccharomyces pastorianus
aatcttctctatactttcttctctt

SEQ ID NO: 167326 - DNA, 25 bp, Saccharomyces pastorianus
cgtacagtatctcatcgaggttgaa

SEQ ID NO: 167327 - DNA, 25 bp, Saccharomyces pastorianus
ttctctatactttcttctctttaaa

SEQ ID NO: 167328 - DNA, 25 bp, Saccharomyces pastorianus
aagctgttttgattaatcttctcta

SEQ ID NO: 167329 - DNA, 25 bp, Saccharomyces pastorianus
gtccgacaacgctatcattgaagct

SEQ ID NO: 167330 - DNA, 25 bp, Saccharomyces pastorianus
gttcttactacgttgaagctcaacg

SEQ ID NO: 167331 - DNA, 25 bp, Saccharomyces pastorianus
acggaatcttgtctattgacgattt

SEQ ID NO: 167332 - DNA, 25 bp, Saccharomyces pastorianus
gctaacttgggtaagtacggaatct

SEQ ID NO: 167333 - DNA, 25 bp, Saccharomyces pastorianus
agtacggaatcttgtctattgacga

SEQ ID NO: 167334 - DNA, 25 bp, Saccharomyces pastorianus
gtcaaggtcaccaaggccactttgg

SEQ ID NO: 167335 - DNA, 25 bp, Saccharomyces pastorianus
acgctatcattgaagctaacttggg

SEQ ID NO: 167336 - DNA, 25 bp, Saccharomyces pastorianus
ggtcaccaaggccactttggaattg

SEQ ID NO: 167337 - DNA, 25 bp, Saccharomyces pastorianus
accatcagacaattagtctacaaga

SEQ ID NO: 167338 - DNA, 25 bp, Saccharomyces pastorianus
aggccactttggaattgttgaagtt

SEQ ID NO: 167339 - DNA, 25 bp, Saccharomyces pastorianus
accaaggccactttggaattgttga

SEQ ID NO: 167340 - DNA, 25 bp, Saccharomyces pastorianus
gtcgaacccataatcttctgattag

SEQ ID NO: 167341 - DNA, 25 bp, Saccharomyces pastorianus
agtcagacgcgttgccattacgcca

SEQ ID NO: 167342 - DNA, 25 bp, Saccharomyces pastorianus
gggtcgaacccataatcttctgatt

SEQ ID NO: 167343 - DNA, 25 bp, Saccharomyces pastorianus
attagaagtcagacgcgttgccatt

SEQ ID NO: 167344 - DNA, 25 bp, Saccharomyces pastorianus
aagtcagacgcgttgccattacgcc

SEQ ID NO: 167345 - DNA, 25 bp, Saccharomyces pastorianus
ttagaagtcagacgcgttgccatta

SEQ ID NO: 167346 - DNA, 25 bp, Saccharomyces pastorianus
tcagacgcgttgccattacgccacg

SEQ ID NO: 167347 - DNA, 25 bp, Saccharomyces pastorianus
ttacgccacgcaagcttaatgttgt

SEQ ID NO: 167348 - DNA, 25 bp, Saccharomyces pastorianus
ggtcgaacccataatcttctgatta

SEQ ID NO: 167349 - DNA, 25 bp, Saccharomyces pastorianus
gaacccataatcttctgattagaag

SEQ ID NO: 167350 - DNA, 25 bp, Saccharomyces pastorianus
gaagtcagacgcgttgccattacgc

SEQ ID NO: 167351 - DNA, 25 bp, Saccharomyces pastorianus
ttagtggcagatgctccttgaacta

SEQ ID NO: 167352 - DNA, 25 bp, Saccharomyces pastorianus
tgctcccccccgagttgaaacaaag

SEQ ID NO: 167353 - DNA, 25 bp, Saccharomyces pastorianus
cgaagcatgagaaagtttgctcccc

SEQ ID NO: 167354 - DNA, 25 bp, Saccharomyces pastorianus
tatttgccaagttaacgaagcatga

SEQ ID NO: 167355 - DNA, 25 bp, Saccharomyces pastorianus
gagttgaaacaaagttatctcttct

SEQ ID NO: 167356 - DNA, 25 bp, Saccharomyces pastorianus
ccacagttaggtcacaaatctttta

SEQ ID NO: 167357 - DNA, 25 bp, Saccharomyces pastorianus
aaagttatctcttctaatatgatgg

SEQ ID NO: 167358 - DNA, 25 bp, Saccharomyces pastorianus
aggtcacaaatcttttagtggcaga

SEQ ID NO: 167359 - DNA, 25 bp, Saccharomyces pastorianus
tctcttctaatatgatggttgtttg

SEQ ID NO: 167360 - DNA, 25 bp, Saccharomyces pastorianus
ggttactaccacagttaggtcacaa

SEQ ID NO: 167361 - DNA, 25 bp, Saccharomyces pastorianus
atgagaaagtttgctcccccccgag

SEQ ID NO: 167362 - DNA, 25 bp, Saccharomyces pastorianus
tggcttcaaaacttttacgaccagg

SEQ ID NO: 167363 - DNA, 25 bp, Saccharomyces pastorianus
tacgaccagggagatggcaaacatt

SEQ ID NO: 167364 - DNA, 25 bp, Saccharomyces pastorianus
aggaaatatatacaggcggccttat

SEQ ID NO: 167365 - DNA, 25 bp, Saccharomyces pastorianus
tttccggctcatgaaatatcgcttc

SEQ ID NO: 167366 - DNA, 25 bp, Saccharomyces pastorianus
ggcagcacttaaaacctttcctgga

SEQ ID NO: 167367 - DNA, 25 bp, Saccharomyces pastorianus
gaaagcattgaatggcagcacttaa

SEQ ID NO: 167368 - DNA, 25 bp, Saccharomyces pastorianus
tacaggcggccttattaattactgc

SEQ ID NO: 167369 - DNA, 25 bp, Saccharomyces pastorianus
ataaactaatatgcatcaaccggaa

SEQ ID NO: 167370 - DNA, 25 bp, Saccharomyces pastorianus
agaaatttgatagcgcgctttcgat

SEQ ID NO: 167371 - DNA, 25 bp, Saccharomyces pastorianus
aaatacgtatctgttctgaaattaa

SEQ ID NO: 167372 - DNA, 25 bp, Saccharomyces pastorianus
gaacacatacttatcatcatcgaaa

SEQ ID NO: 167373 - DNA, 25 bp, Saccharomyces pastorianus
ctatttctcatcatttacgtcatct

SEQ ID NO: 167374 - DNA, 25 bp, Saccharomyces pastorianus
gaatctgcaattctacacaattcta

SEQ ID NO: 167375 - DNA, 25 bp, Saccharomyces pastorianus
actatttctcatcatttacgtcatc

SEQ ID NO: 167376 - DNA, 25 bp, Saccharomyces pastorianus
tttctcatcatttacgtcatcttct

SEQ ID NO: 167377 - DNA, 25 bp, Saccharomyces pastorianus
tatttctcatcatttacgtcatctt

SEQ ID NO: 167378 - DNA, 25 bp, Saccharomyces pastorianus
atgactatttctcatcatttacgtc

SEQ ID NO: 167379 - DNA, 25 bp, Saccharomyces pastorianus
atttctcatcatttacgtcatcttc

SEQ ID NO: 167380 - DNA, 25 bp, Saccharomyces pastorianus
gcgtttcagcttccactaatttaga

SEQ ID NO: 167381 - DNA, 25 bp, Saccharomyces pastorianus
gactatttctcatcatttacgtcat

SEQ ID NO: 167382 - DNA, 25 bp, Saccharomyces pastorianus
tgactatttctcatcatttacgtca

SEQ ID NO: 167383 - DNA, 25 bp, Saccharomyces pastorianus
gatgactatttctcatcatttacgt

SEQ ID NO: 167384 - DNA, 25 bp, Saccharomyces pastorianus
tttttcccttttctctcactagtct

SEQ ID NO: 167385 - DNA, 25 bp, Saccharomyces pastorianus
ctgggctgcacgtgatactatgtta

SEQ ID NO: 167386 - DNA, 25 bp, Saccharomyces pastorianus
gaaaaacatacatctatcccgttat

SEQ ID NO: 167387 - DNA, 25 bp, Saccharomyces pastorianus
gtgatactatgttaccctgtcgggc

SEQ ID NO: 167388 - DNA, 25 bp, Saccharomyces pastorianus
aagcagcatgtctaattggtaattc

SEQ ID NO: 167389 - DNA, 25 bp, Saccharomyces pastorianus
gttacgcgtgcattttcttgttgca

SEQ ID NO: 167390 - DNA, 25 bp, Saccharomyces pastorianus
actagtctctttttccaatttgcca

SEQ ID NO: 167391 - DNA, 25 bp, Saccharomyces pastorianus
ttttctgctggtgccgtcctgtcat

SEQ ID NO: 167392 - DNA, 25 bp, Saccharomyces pastorianus
ggtaattctaaagctgccaagctct

SEQ ID NO: 167393 - DNA, 25 bp, Saccharomyces pastorianus
atttgccaccgtgtagcattttgtt

SEQ ID NO: 167394 - DNA, 25 bp, Saccharomyces pastorianus
tatcccgttatgaagttttctgctg

SEQ ID NO: 167395 - DNA, 25 bp, Saccharomyces pastorianus
atacatactcgatcagcatttcact

SEQ ID NO: 167396 - DNA, 25 bp, Saccharomyces pastorianus
tagcagcacgcaggatggaagagaa

SEQ ID NO: 167397 - DNA, 25 bp, Saccharomyces pastorianus
aggatgctacaaacttgtggttcat

SEQ ID NO: 167398 - DNA, 25 bp, Saccharomyces pastorianus
ggttcattctatacaaagtacttat

SEQ ID NO: 167399 - DNA, 25 bp, Saccharomyces pastorianus
aaaggatgctacaaacttgtggttc

SEQ ID NO: 167400 - DNA, 25 bp, Saccharomyces pastorianus
aacttgtggttcattctatacaaag

SEQ ID NO: 167401 - DNA, 25 bp, Saccharomyces pastorianus
gctacaaacttgtggttcattctat

SEQ ID NO: 167402 - DNA, 25 bp, Saccharomyces pastorianus
gtggttcattctatacaaagtactt

SEQ ID NO: 167403 - DNA, 25 bp, Saccharomyces pastorianus
acaaacttgtggttcattctataca

SEQ ID NO: 167404 - DNA, 25 bp, Saccharomyces pastorianus
gatgctacaaacttgtggttcattc

SEQ ID NO: 167405 - DNA, 25 bp, Saccharomyces pastorianus
ttagcagcacgcaggatggaagaga

SEQ ID NO: 167406 - DNA, 25 bp, Saccharomyces pastorianus
gaggttcatctcattttgttagctt

SEQ ID NO: 167407 - DNA, 25 bp, Saccharomyces pastorianus
tataagcttagagatacgatttcaa

SEQ ID NO: 167408 - DNA, 25 bp, Saccharomyces pastorianus
tctacgactttgtatgaggttcatc

SEQ ID NO: 167409 - DNA, 25 bp, Saccharomyces pastorianus
agcttctattcacatacctactata

SEQ ID NO: 167410 - DNA, 25 bp, Saccharomyces pastorianus
gttagcttctattcacatacctact

SEQ ID NO: 167411 - DNA, 25 bp, Saccharomyces pastorianus
aaggcgcagctcttctgttagcagt

SEQ ID NO: 167412 - DNA, 25 bp, Saccharomyces pastorianus
gttagcagttttctctacgactttg

SEQ ID NO: 167413 - DNA, 25 bp, Saccharomyces pastorianus
catctcattttgttagcttctattc

SEQ ID NO: 167414 - DNA, 25 bp, Saccharomyces pastorianus
gcagctcttctgttagcagttttct

SEQ ID NO: 167415 - DNA, 25 bp, Saccharomyces pastorianus
gcagttttctctacgactttgtatg

SEQ ID NO: 167416 - DNA, 25 bp, Saccharomyces pastorianus
atacgatttcaaggcgcagctcttc

SEQ ID NO: 167417 - DNA, 25 bp, Saccharomyces pastorianus
tacaggatttttcatggattttgca

SEQ ID NO: 167418 - DNA, 25 bp, Saccharomyces pastorianus
aataactatctttgagcatcgtacc

SEQ ID NO: 167419 - DNA, 25 bp, Saccharomyces pastorianus
tcaggcgcaacaataactatctttg

SEQ ID NO: 167420 - DNA, 25 bp, Saccharomyces pastorianus
ttttcatttccgcttttgcctcagg

SEQ ID NO: 167421 - DNA, 25 bp, Saccharomyces pastorianus
gcatcgtaccaccaatacaaaagga

SEQ ID NO: 167422 - DNA, 25 bp, Saccharomyces pastorianus
ttgagcatcgtaccaccaatacaaa

SEQ ID NO: 167423 - DNA, 25 bp, Saccharomyces pastorianus
ggatttttcatttccgcttttgcct

SEQ ID NO: 167424 - DNA, 25 bp, Saccharomyces pastorianus
gatcgttatcatacaggatttttca

SEQ ID NO: 167425 - DNA, 25 bp, Saccharomyces pastorianus
tcatctggatttttcatttccgctt

SEQ ID NO: 167426 - DNA, 25 bp, Saccharomyces pastorianus
atttccgcttttgcctcaggcgcaa

SEQ ID NO: 167427 - DNA, 25 bp, Saccharomyces pastorianus
tttcatggattttgcatgtttcggt

SEQ ID NO: 167428 - DNA, 25 bp, Saccharomyces pastorianus
tcagggaattcggatcgggcgcgtc

SEQ ID NO: 167429 - DNA, 25 bp, Saccharomyces pastorianus
gcaacgttcagggaattcggatcgg

SEQ ID NO: 167430 - DNA, 25 bp, Saccharomyces pastorianus
caaagtcgcaacgttcagggaattc

SEQ ID NO: 167431 - DNA, 25 bp, Saccharomyces pastorianus
ggatcgggcgcgtcctctggatact

SEQ ID NO: 167432 - DNA, 25 bp, Saccharomyces pastorianus
gtcgcaacgttcagggaattcggat

SEQ ID NO: 167433 - DNA, 25 bp, Saccharomyces pastorianus
ctcaaagtcgcaacgttcagggaat

SEQ ID NO: 167434 - DNA, 25 bp, Saccharomyces pastorianus
tcgcaacgttcagggaattcggatc

SEQ ID NO: 167435 - DNA, 25 bp, Saccharomyces pastorianus
ggcgcgtcctctggatactccaagt

SEQ ID NO: 167436 - DNA, 25 bp, Saccharomyces pastorianus
caacgttcagggaattcggatcggg

SEQ ID NO: 167437 - DNA, 25 bp, Saccharomyces pastorianus
gggcgcgtcctctggatactccaag

SEQ ID NO: 167438 - DNA, 25 bp, Saccharomyces pastorianus
aagtcgcaacgttcagggaattcgg

SEQ ID NO: 167439 - DNA, 25 bp, Saccharomyces pastorianus
catcaaaaaatttcaagagtaacgc

SEQ ID NO: 167440 - DNA, 25 bp, Saccharomyces pastorianus
aatcatcatcaaaaaatttcaagag

SEQ ID NO: 167441 - DNA, 25 bp, Saccharomyces pastorianus
gcggcgagttcaaatcatcatcaaa

SEQ ID NO: 167442 - DNA, 25 bp, Saccharomyces pastorianus
ggcgagttcaaatcatcatcaaaaa

SEQ ID NO: 167443 - DNA, 25 bp, Saccharomyces pastorianus
gacggactcacttccgagcgctgga

SEQ ID NO: 167444 - DNA, 25 bp, Saccharomyces pastorianus
gaggcggcgagttcaaatcatcatc

SEQ ID NO: 167445 - DNA, 25 bp, Saccharomyces pastorianus
tgacggactcacttccgagcgctgg

SEQ ID NO: 167446 - DNA, 25 bp, Saccharomyces pastorianus
aggcggcgagttcaaatcatcatca

SEQ ID NO: 167447 - DNA, 25 bp, Saccharomyces pastorianus
cggcgagttcaaatcatcatcaaaa

SEQ ID NO: 167448 - DNA, 25 bp, Saccharomyces pastorianus
acttccgagcgctggattcagtggt

SEQ ID NO: 167449 - DNA, 25 bp, Saccharomyces pastorianus
ggcggcgagttcaaatcatcatcaa

SEQ ID NO: 167450 - DNA, 25 bp, Saccharomyces pastorianus
aaaacgcctgtatcgcatttatctt

SEQ ID NO: 167451 - DNA, 25 bp, Saccharomyces pastorianus
gcctgtatcgcatttatcttttaat

SEQ ID NO: 167452 - DNA, 25 bp, Saccharomyces pastorianus
cctcaaaaacgcctgtatcgcattt

SEQ ID NO: 167453 - DNA, 25 bp, Saccharomyces pastorianus
aaacgcctgtatcgcatttatcttt

SEQ ID NO: 167454 - DNA, 25 bp, Saccharomyces pastorianus
tttcctcaaaaacgcctgtatcgca

SEQ ID NO: 167455 - DNA, 25 bp, Saccharomyces pastorianus
cgcctgtatcgcatttatcttttaa

SEQ ID NO: 167456 - DNA, 25 bp, Saccharomyces pastorianus
ttttcctcaaaaacgcctgtatcgc

SEQ ID NO: 167457 - DNA, 25 bp, Saccharomyces pastorianus
caaaaacgcctgtatcgcatttatc

SEQ ID NO: 167458 - DNA, 25 bp, Saccharomyces pastorianus
gtatcgcatttatcttttaatgttg

SEQ ID NO: 167459 - DNA, 25 bp, Saccharomyces pastorianus
gcatttatcttttaatgttggacta

SEQ ID NO: 167460 - DNA, 25 bp, Saccharomyces pastorianus
acgcctgtatcgcatttatctttta

SEQ ID NO: 167461 - DNA, 25 bp, Saccharomyces pastorianus
tcttttttggcggttcgtgttgcta

SEQ ID NO: 167462 - DNA, 25 bp, Saccharomyces pastorianus
cggttcgtgttgctatgagtcgttt

SEQ ID NO: 167463 - DNA, 25 bp, Saccharomyces pastorianus
ttcgtgttgctatgagtcgttttcg

SEQ ID NO: 167464 - DNA, 25 bp, Saccharomyces pastorianus
ttggcggttcgtgttgctatgagtc

SEQ ID NO: 167465 - DNA, 25 bp, Saccharomyces pastorianus
tttggcggttcgtgttgctatgagt

SEQ ID NO: 167466 - DNA, 25 bp, Saccharomyces pastorianus
gattacacgtgtgaaaacaagcttt

SEQ ID NO: 167467 - DNA, 25 bp, Saccharomyces pastorianus
gcggttcgtgttgctatgagtcgtt

SEQ ID NO: 167468 - DNA, 25 bp, Saccharomyces pastorianus
tacacgtgtgaaaacaagctttaaa

SEQ ID NO: 167469 - DNA, 25 bp, Saccharomyces pastorianus
gttcgtgttgctatgagtcgttttc

SEQ ID NO: 167470 - DNA, 25 bp, Saccharomyces pastorianus
gtgaaaacaagctttaaaacaatag

SEQ ID NO: 167471 - DNA, 25 bp, Saccharomyces pastorianus
tttttggcggttcgtgttgctatga

SEQ ID NO: 167472 - DNA, 25 bp, Saccharomyces pastorianus
tagacaagagtagcgcggagcaagt

SEQ ID NO: 167473 - DNA, 25 bp, Saccharomyces pastorianus
tagcgcggagcaagtagatatcctc

SEQ ID NO: 167474 - DNA, 25 bp, Saccharomyces pastorianus
agccctggagttttgatgaggtcga

SEQ ID NO: 167475 - DNA, 25 bp, Saccharomyces pastorianus
ccatgcggtgtgctggtaaagccct

SEQ ID NO: 167476 - DNA, 25 bp, Saccharomyces pastorianus
agcacctagacaagagtagcgcgga

SEQ ID NO: 167477 - DNA, 25 bp, Saccharomyces pastorianus
gctggtaaagccctggagttttgat

SEQ ID NO: 167478 - DNA, 25 bp, Saccharomyces pastorianus
tgatgccatgcggtgtgctggtaaa

SEQ ID NO: 167479 - DNA, 25 bp, Saccharomyces pastorianus
atgaggtcgaaacctagcagcacct

SEQ ID NO: 167480 - DNA, 25 bp, Saccharomyces pastorianus
gaaacctagcagcacctagacaaga

SEQ ID NO: 167481 - DNA, 25 bp, Saccharomyces pastorianus
gtgtgctggtaaagccctggagttt

SEQ ID NO: 167482 - DNA, 25 bp, Saccharomyces pastorianus
ggtcgaaacctagcagcacctagac

SEQ ID NO: 167483 - DNA, 25 bp, Saccharomyces pastorianus
tcagtttcgtttagaggtacgagaa

SEQ ID NO: 167484 - DNA, 25 bp, Saccharomyces pastorianus
gatttcaaatgagatagctcctcga

SEQ ID NO: 167485 - DNA, 25 bp, Saccharomyces pastorianus
tttgtttgcggccttgaacttcggc

SEQ ID NO: 167486 - DNA, 25 bp, Saccharomyces pastorianus
gctcctcgattaagttgaagtttga

SEQ ID NO: 167487 - DNA, 25 bp, Saccharomyces pastorianus
ggctccattaaatttggactttacg

SEQ ID NO: 167488 - DNA, 25 bp, Saccharomyces pastorianus
agatagctcctcgattaagttgaag

SEQ ID NO: 167489 - DNA, 25 bp, Saccharomyces pastorianus
cttcggctccattaaatttggactt

SEQ ID NO: 167490 - DNA, 25 bp, Saccharomyces pastorianus
ttgaacttcggctccattaaatttg

SEQ ID NO: 167491 - DNA, 25 bp, Saccharomyces pastorianus
ttggactttacgatttcaaatgaga

SEQ ID NO: 167492 - DNA, 25 bp, Saccharomyces pastorianus
ggccttgaacttcggctccattaaa

SEQ ID NO: 167493 - DNA, 25 bp, Saccharomyces pastorianus
ctgttcagtttcgtttagaggtacg

SEQ ID NO: 167494 - DNA, 25 bp, Saccharomyces pastorianus
aaagtcatcgccttatctgctacga

SEQ ID NO: 167495 - DNA, 25 bp, Saccharomyces pastorianus
gcaactatgcatggacatctgtcgt

SEQ ID NO: 167496 - DNA, 25 bp, Saccharomyces pastorianus
atgtgaacgcggtgacgaaaatgcc

SEQ ID NO: 167497 - DNA, 25 bp, Saccharomyces pastorianus
atgtgtccattgcagtcgatatagt

SEQ ID NO: 167498 - DNA, 25 bp, Saccharomyces pastorianus
tgaaacaagccggtatgtgaacgcg

SEQ ID NO: 167499 - DNA, 25 bp, Saccharomyces pastorianus
tggtcctccttcttgaaagtcatcg

SEQ ID NO: 167500 - DNA, 25 bp, Saccharomyces pastorianus
gaaaatgccgaatgtgtccattgca

SEQ ID NO: 167501 - DNA, 25 bp, Saccharomyces pastorianus
aagtgtgctttgctagacaaggttt

SEQ ID NO: 167502 - DNA, 25 bp, Saccharomyces pastorianus
ctgtcgttggtgtagacgctgacat

SEQ ID NO: 167503 - DNA, 25 bp, Saccharomyces pastorianus
atctgctacgatgcccaagcaacta

SEQ ID NO: 167504 - DNA, 25 bp, Saccharomyces pastorianus
gggttcagtgacgtcttgattgaaa

SEQ ID NO: 167505 - DNA, 25 bp, Saccharomyces pastorianus
agaccattgtaatctgttttccacc

SEQ ID NO: 167506 - DNA, 25 bp, Saccharomyces pastorianus
aagagaccattgtaatctgttttcc

SEQ ID NO: 167507 - DNA, 25 bp, Saccharomyces pastorianus
gaccattgtaatctgttttccaccc

SEQ ID NO: 167508 - DNA, 25 bp, Saccharomyces pastorianus
actaccaaaccaacgtcacaaatgc

SEQ ID NO: 167509 - DNA, 25 bp, Saccharomyces pastorianus
accattgtaatctgttttccaccct

SEQ ID NO: 167510 - DNA, 25 bp, Saccharomyces pastorianus
gccaagagaccattgtaatctgttt

SEQ ID NO: 167511 - DNA, 25 bp, Saccharomyces pastorianus
taccaaaccaacgtcacaaatgcgt

SEQ ID NO: 167512 - DNA, 25 bp, Saccharomyces pastorianus
gagaccattgtaatctgttttccac

SEQ ID NO: 167513 - DNA, 25 bp, Saccharomyces pastorianus
acactaccaaaccaacgtcacaaat

SEQ ID NO: 167514 - DNA, 25 bp, Saccharomyces pastorianus
cattgtaatctgttttccaccctcc

SEQ ID NO: 167515 - DNA, 25 bp, Saccharomyces pastorianus
ttgtaatctgttttccaccctccct

SEQ ID NO: 167516 - DNA, 25 bp, Saccharomyces pastorianus
agagccaatgtgataccaggccaat

SEQ ID NO: 167517 - DNA, 25 bp, Saccharomyces pastorianus
gataccaggccaatgggtcactata

SEQ ID NO: 167518 - DNA, 25 bp, Saccharomyces pastorianus
atgggtcactatatccggtgcatgc

SEQ ID NO: 167519 - DNA, 25 bp, Saccharomyces pastorianus
tgggttctctggcaatccaatacgc

SEQ ID NO: 167520 - DNA, 25 bp, Saccharomyces pastorianus
tgcccatattccaccaaacgtcaat

SEQ ID NO: 167521 - DNA, 25 bp, Saccharomyces pastorianus
tgccccaatcttgtgtgcaggtatc

SEQ ID NO: 167522 - DNA, 25 bp, Saccharomyces pastorianus
cggtggcttgggttctctggcaatc

SEQ ID NO: 167523 - DNA, 25 bp, Saccharomyces pastorianus
actatatccggtgcatgcggtggct

SEQ ID NO: 167524 - DNA, 25 bp, Saccharomyces pastorianus
accaaacgtcaatcttgctgaagtt

SEQ ID NO: 167525 - DNA, 25 bp, Saccharomyces pastorianus
atacgcaactgccgatgccgttcaa

SEQ ID NO: 167526 - DNA, 25 bp, Saccharomyces pastorianus
atacgcccttgctatgggttacagg

SEQ ID NO: 167527 - DNA, 25 bp, Saccharomyces pastorianus
acacgagatctttcacgcatacatc

SEQ ID NO: 167528 - DNA, 25 bp, Saccharomyces pastorianus
caacacgagatctttcacgcataca

SEQ ID NO: 167529 - DNA, 25 bp, Saccharomyces pastorianus
ctttcctgcacaacacgagatcttt

SEQ ID NO: 167530 - DNA, 25 bp, Saccharomyces pastorianus
atgattccctttcctgcacaacacg

SEQ ID NO: 167531 - DNA, 25 bp, Saccharomyces pastorianus
ttccctttcctgcacaacacgagat

SEQ ID NO: 167532 - DNA, 25 bp, Saccharomyces pastorianus
ttcctgcacaacacgagatctttca

SEQ ID NO: 167533 - DNA, 25 bp, Saccharomyces pastorianus
tcctgcacaacacgagatctttcac

SEQ ID NO: 167534 - DNA, 25 bp, Saccharomyces pastorianus
cgagatctttcacgcatacatcgga

SEQ ID NO: 167535 - DNA, 25 bp, Saccharomyces pastorianus
aacacgagatctttcacgcatacat

SEQ ID NO: 167536 - DNA, 25 bp, Saccharomyces pastorianus
acgagatctttcacgcatacatcgg

SEQ ID NO: 167537 - DNA, 25 bp, Saccharomyces pastorianus
gcacaacacgagatctttcacgcat

SEQ ID NO: 167538 - DNA, 25 bp, Saccharomyces pastorianus
tttgccattctccatccagttgcat

SEQ ID NO: 167539 - DNA, 25 bp, Saccharomyces pastorianus
atattttgccattctccatccagtt

SEQ ID NO: 167540 - DNA, 25 bp, Saccharomyces pastorianus
cttcttcatattttgccattctcca

SEQ ID NO: 167541 - DNA, 25 bp, Saccharomyces pastorianus
attctccatccagttgcatctttaa

SEQ ID NO: 167542 - DNA, 25 bp, Saccharomyces pastorianus
ttcatattttgccattctccatcca

SEQ ID NO: 167543 - DNA, 25 bp, Saccharomyces pastorianus
acagttacgcataataatatttctt

SEQ ID NO: 167544 - DNA, 25 bp, Saccharomyces pastorianus
ttttccttccttcttcttcatattt

SEQ ID NO: 167545 - DNA, 25 bp, Saccharomyces pastorianus
gacattctcctcaagaaatccacaa

SEQ ID NO: 167546 - DNA, 25 bp, Saccharomyces pastorianus
aaaggaatcaacagttacgcataat

SEQ ID NO: 167547 - DNA, 25 bp, Saccharomyces pastorianus
aaagacattctcctcaagaaatcca

SEQ ID NO: 167548 - DNA, 25 bp, Saccharomyces pastorianus
ctccatccagttgcatctttaagat

SEQ ID NO: 167549 - DNA, 25 bp, Saccharomyces pastorianus
gtcaagattttctagctacctgcaa

SEQ ID NO: 167550 - DNA, 25 bp, Saccharomyces pastorianus
gaagaggagattgcccatttgatga

SEQ ID NO: 167551 - DNA, 25 bp, Saccharomyces pastorianus
gatactgacgatactatggctttaa

SEQ ID NO: 167552 - DNA, 25 bp, Saccharomyces pastorianus
atgatcaggttcattattcctttga

SEQ ID NO: 167553 - DNA, 25 bp, Saccharomyces pastorianus
gagggatcactctaaacttaattgc

SEQ ID NO: 167554 - DNA, 25 bp, Saccharomyces pastorianus
attcctttgatggattgtgcaagac

SEQ ID NO: 167555 - DNA, 25 bp, Saccharomyces pastorianus
agaactcaacttcaggacctttagt

SEQ ID NO: 167556 - DNA, 25 bp, Saccharomyces pastorianus
tggattacctaaattgccctcagtg

SEQ ID NO: 167557 - DNA, 25 bp, Saccharomyces pastorianus
gatgacccaggaatttaatcctttg

SEQ ID NO: 167558 - DNA, 25 bp, Saccharomyces pastorianus
aggacctttagtgatgtaatgggca

SEQ ID NO: 167559 - DNA, 25 bp, Saccharomyces pastorianus
ttgtgcaagactttatgggcgtcca

SEQ ID NO: 167560 - DNA, 25 bp, Saccharomyces pastorianus
ttctatctcttgaaatccgtacaag

SEQ ID NO: 167561 - DNA, 25 bp, Saccharomyces pastorianus
ctctaaacggcttccatggaagtaa

SEQ ID NO: 167562 - DNA, 25 bp, Saccharomyces pastorianus
ttaagaccctcgttcagaagcttat

SEQ ID NO: 167563 - DNA, 25 bp, Saccharomyces pastorianus
agattaagaccctcgttcagaagct

SEQ ID NO: 167564 - DNA, 25 bp, Saccharomyces pastorianus
attttagattaagaccctcgttcag

SEQ ID NO: 167565 - DNA, 25 bp, Saccharomyces pastorianus
tttagattaagaccctcgttcagaa

SEQ ID NO: 167566 - DNA, 25 bp, Saccharomyces pastorianus
gcttccatggaagtaatatttctat

SEQ ID NO: 167567 - DNA, 25 bp, Saccharomyces pastorianus
ctaagcccatattcagtctgctcta

SEQ ID NO: 167568 - DNA, 25 bp, Saccharomyces pastorianus
gattaagaccctcgttcagaagctt

SEQ ID NO: 167569 - DNA, 25 bp, Saccharomyces pastorianus
ttttagattaagaccctcgttcaga

SEQ ID NO: 167570 - DNA, 25 bp, Saccharomyces pastorianus
attaagaccctcgttcagaagctta

SEQ ID NO: 167571 - DNA, 25 bp, Saccharomyces pastorianus
attattctgttcctctttttatatg

SEQ ID NO: 167572 - DNA, 25 bp, Saccharomyces pastorianus
ttttaaaatatcaatccttgcgctt

SEQ ID NO: 167573 - DNA, 25 bp, Saccharomyces pastorianus
cttttaaaatatcaatccttgcgct

SEQ ID NO: 167574 - DNA, 25 bp, Saccharomyces pastorianus
attctgttcctctttttatatgttg

SEQ ID NO: 167575 - DNA, 25 bp, Saccharomyces pastorianus
tgttgtcattcattgatccttttaa

SEQ ID NO: 167576 - DNA, 25 bp, Saccharomyces pastorianus
tccttttaaaatatcaatccttgcg

SEQ ID NO: 167577 - DNA, 25 bp, Saccharomyces pastorianus
ctgttcctctttttatatgttgtca

SEQ ID NO: 167578 - DNA, 25 bp, Saccharomyces pastorianus
atccttttaaaatatcaatccttgc

SEQ ID NO: 167579 - DNA, 25 bp, Saccharomyces pastorianus
tattctgttcctctttttatatgtt

SEQ ID NO: 167580 - DNA, 25 bp, Saccharomyces pastorianus
ttattctgttcctctttttatatgt

SEQ ID NO: 167581 - DNA, 25 bp, Saccharomyces pastorianus
ccttttaaaatatcaatccttgcgc

SEQ ID NO: 167582 - DNA, 25 bp, Saccharomyces pastorianus
aaatgaaatcaaagactacccttat

SEQ ID NO: 167583 - DNA, 25 bp, Saccharomyces pastorianus
ttctccactcggatttaggaatcca

SEQ ID NO: 167584 - DNA, 25 bp, Saccharomyces pastorianus
caaagactacccttattatttgatt

SEQ ID NO: 167585 - DNA, 25 bp, Saccharomyces pastorianus
gaaatcaaagactacccttattatt

SEQ ID NO: 167586 - DNA, 25 bp, Saccharomyces pastorianus
tactagagattctccactcggattt

SEQ ID NO: 167587 - DNA, 25 bp, Saccharomyces pastorianus
gactacccttattatttgattaatg

SEQ ID NO: 167588 - DNA, 25 bp, Saccharomyces pastorianus
gagattctccactcggatttaggaa

SEQ ID NO: 167589 - DNA, 25 bp, Saccharomyces pastorianus
attctccactcggatttaggaatcc

SEQ ID NO: 167590 - DNA, 25 bp, Saccharomyces pastorianus
agagattctccactcggatttagga

SEQ ID NO: 167591 - DNA, 25 bp, Saccharomyces pastorianus
actagagattctccactcggattta

SEQ ID NO: 167592 - DNA, 25 bp, Saccharomyces pastorianus
tacccttattatttgattaatgaac

SEQ ID NO: 167593 - DNA, 25 bp, Saccharomyces pastorianus
atgactaccaaagcaatggtccaaa

SEQ ID NO: 167594 - DNA, 25 bp, Saccharomyces pastorianus
ggatgcgattccacaaagcttggga

SEQ ID NO: 167595 - DNA, 25 bp, Saccharomyces pastorianus
aagcgcaccagggaattggttgaat

SEQ ID NO: 167596 - DNA, 25 bp, Saccharomyces pastorianus
gcagatatcctgatggaagtaacca

SEQ ID NO: 167597 - DNA, 25 bp, Saccharomyces pastorianus
gattgctcgcaaaagttatcggaat

SEQ ID NO: 167598 - DNA, 25 bp, Saccharomyces pastorianus
ggaagtaaccaagcgcaccagggaa

SEQ ID NO: 167599 - DNA, 25 bp, Saccharomyces pastorianus
gaaaggctcacagattgctcgcaaa

SEQ ID NO: 167600 - DNA, 25 bp, Saccharomyces pastorianus
taaactggatttaggcgagcactgt

SEQ ID NO: 167601 - DNA, 25 bp, Saccharomyces pastorianus
aagcttgggaagaaacgattctatc

SEQ ID NO: 167602 - DNA, 25 bp, Saccharomyces pastorianus
agatggcgaacaggcagactctttc

SEQ ID NO: 167603 - DNA, 25 bp, Saccharomyces pastorianus
aattgtgtacttatggatgcgattc

SEQ ID NO: 167604 - DNA, 25 bp, Saccharomyces pastorianus
caattgtttttgtattccttataat

SEQ ID NO: 167605 - DNA, 25 bp, Saccharomyces pastorianus
caaagaaacatttttagatctaaca

SEQ ID NO: 167606 - DNA, 25 bp, Saccharomyces pastorianus
ataattagaaagacctgctgtttaa

SEQ ID NO: 167607 - DNA, 25 bp, Saccharomyces pastorianus
gacgaagtgaagtattcaggagtat

SEQ ID NO: 167608 - DNA, 25 bp, Saccharomyces pastorianus
ttagaaagacctgctgtttaatgtg

SEQ ID NO: 167609 - DNA, 25 bp, Saccharomyces pastorianus
tccttataattagaaagacctgctg

SEQ ID NO: 167610 - DNA, 25 bp, Saccharomyces pastorianus
tagatctaacattttacttcaattg

SEQ ID NO: 167611 - DNA, 25 bp, Saccharomyces pastorianus
gtattcaggagtatattattacata

SEQ ID NO: 167612 - DNA, 25 bp, Saccharomyces pastorianus
gaagaaactgcctttttagaattgt

SEQ ID NO: 167613 - DNA, 25 bp, Saccharomyces pastorianus
attacatacatacaaagcaagacaa

SEQ ID NO: 167614 - DNA, 25 bp, Saccharomyces pastorianus
tacttcaattgtttttgtattcctt

SEQ ID NO: 167615 - DNA, 25 bp, Saccharomyces pastorianus
tgtccctcaatctttatgtgatctt

SEQ ID NO: 167616 - DNA, 25 bp, Saccharomyces pastorianus
gagattgatattctcgatacaatag

SEQ ID NO: 167617 - DNA, 25 bp, Saccharomyces pastorianus
atcctactaaattatcattcattgc

SEQ ID NO: 167618 - DNA, 25 bp, Saccharomyces pastorianus
tccctcaatctttatgtgatctttt

SEQ ID NO: 167619 - DNA, 25 bp, Saccharomyces pastorianus
gattggatttgatgactgtccctca

SEQ ID NO: 167620 - DNA, 25 bp, Saccharomyces pastorianus
tggatttgatgactgtccctcaatc

SEQ ID NO: 167621 - DNA, 25 bp, Saccharomyces pastorianus
agcttcgattggatttgatgactgt

SEQ ID NO: 167622 - DNA, 25 bp, Saccharomyces pastorianus
tgatattctcgatacaatagcatta

SEQ ID NO: 167623 - DNA, 25 bp, Saccharomyces pastorianus
ttggatttgatgactgtccctcaat

SEQ ID NO: 167624 - DNA, 25 bp, Saccharomyces pastorianus
tgactgtccctcaatctttatgtga

SEQ ID NO: 167625 - DNA, 25 bp, Saccharomyces pastorianus
gactgtccctcaatctttatgtgat

SEQ ID NO: 167626 - DNA, 25 bp, Saccharomyces pastorianus
gctaacggttagtcagccacacatt

SEQ ID NO: 167627 - DNA, 25 bp, Saccharomyces pastorianus
ttttttcttacatacactgcaccag

SEQ ID NO: 167628 - DNA, 25 bp, Saccharomyces pastorianus
tacactgcaccagacatgtcggttc

SEQ ID NO: 167629 - DNA, 25 bp, Saccharomyces pastorianus
tcagccacacattgacgtacactgt

SEQ ID NO: 167630 - DNA, 25 bp, Saccharomyces pastorianus
atttctttccatgtatctcagtgcc

SEQ ID NO: 167631 - DNA, 25 bp, Saccharomyces pastorianus
gcctcattcccattgcatacagaaa

SEQ ID NO: 167632 - DNA, 25 bp, Saccharomyces pastorianus
ttcttaatatgtcgctacgcctcat

SEQ ID NO: 167633 - DNA, 25 bp, Saccharomyces pastorianus
gtgaacagcgtatttctttccatgt

SEQ ID NO: 167634 - DNA, 25 bp, Saccharomyces pastorianus
agtagtgcgttttgcgaacgtcaca

SEQ ID NO: 167635 - DNA, 25 bp, Saccharomyces pastorianus
aagtttggccatgcattgtcattct

SEQ ID NO: 167636 - DNA, 25 bp, Saccharomyces pastorianus
aacgtcacagatcaaaagtttggcc

SEQ ID NO: 167637 - DNA, 25 bp, Saccharomyces pastorianus
tacatcaggtgtcgcaaaagtcatc

SEQ ID NO: 167638 - DNA, 25 bp, Saccharomyces pastorianus
aaaagtcatcgaaaagtcaccaatc

SEQ ID NO: 167639 - DNA, 25 bp, Saccharomyces pastorianus
tttactggatacatcaggtgtcgca

SEQ ID NO: 167640 - DNA, 25 bp, Saccharomyces pastorianus
actccgtctacgaagatgctcaata

SEQ ID NO: 167641 - DNA, 25 bp, Saccharomyces pastorianus
gatgctcaatatataggtcatgcct

SEQ ID NO: 167642 - DNA, 25 bp, Saccharomyces pastorianus
tgggctactccgtctacgaagatgc

SEQ ID NO: 167643 - DNA, 25 bp, Saccharomyces pastorianus
ccttcaagaaagctggccattttat

SEQ ID NO: 167644 - DNA, 25 bp, Saccharomyces pastorianus
gtcaccaatcgcagaaataatcagg

SEQ ID NO: 167645 - DNA, 25 bp, Saccharomyces pastorianus
taggtcatgccttcaagaaagctgg

SEQ ID NO: 167646 - DNA, 25 bp, Saccharomyces pastorianus
caggaaatcaaatgccgagttaggt

SEQ ID NO: 167647 - DNA, 25 bp, Saccharomyces pastorianus
agttaggtaggctgggctactccgt

SEQ ID NO: 167648 - DNA, 25 bp, Saccharomyces pastorianus
tgaacaagagcacctgcaaacgggt

SEQ ID NO: 167649 - DNA, 25 bp, Saccharomyces pastorianus
caaggcttccttgcctattgggcct

SEQ ID NO: 167650 - DNA, 25 bp, Saccharomyces pastorianus
ttagcacgctatctcgaaggatcga

SEQ ID NO: 167651 - DNA, 25 bp, Saccharomyces pastorianus
tcagccttgcttggctctgggcgga

SEQ ID NO: 167652 - DNA, 25 bp, Saccharomyces pastorianus
ggatcgaccgtatgggtgcatccat

SEQ ID NO: 167653 - DNA, 25 bp, Saccharomyces pastorianus
tcagtgcagcgtagggactcactca

SEQ ID NO: 167654 - DNA, 25 bp, Saccharomyces pastorianus
ttatcggcgactcagtgcagcgtag

SEQ ID NO: 167655 - DNA, 25 bp, Saccharomyces pastorianus
aacgggtgcacttttgcaaggcttc

SEQ ID NO: 167656 - DNA, 25 bp, Saccharomyces pastorianus
tattgggcctgcttgggtcagcctt

SEQ ID NO: 167657 - DNA, 25 bp, Saccharomyces pastorianus
atttgctgtcgtcgcttgaacaaga

SEQ ID NO: 167658 - DNA, 25 bp, Saccharomyces pastorianus
acacacaactgtactctttctctct

SEQ ID NO: 167659 - DNA, 25 bp, Saccharomyces pastorianus
acttctctacactaaagactacagt

SEQ ID NO: 167660 - DNA, 25 bp, Saccharomyces pastorianus
gtctgctaccgttgttagcgttcaa

SEQ ID NO: 167661 - DNA, 25 bp, Saccharomyces pastorianus
aagactacagttaccgtatgtgact

SEQ ID NO: 167662 - DNA, 25 bp, Saccharomyces pastorianus
ctaccgttgttagcgttcaatctaa

SEQ ID NO: 167663 - DNA, 25 bp, Saccharomyces pastorianus
tccgcctgtcaagctaagaagtctg

SEQ ID NO: 167664 - DNA, 25 bp, Saccharomyces pastorianus
tacagttaccgtatgtgactccgcc

SEQ ID NO: 167665 - DNA, 25 bp, Saccharomyces pastorianus
agttaccgtatgtgactccgcctgt

SEQ ID NO: 167666 - DNA, 25 bp, Saccharomyces pastorianus
gctaagaagtctgctaccgttgtta

SEQ ID NO: 167667 - DNA, 25 bp, Saccharomyces pastorianus
gactccgcctgtcaagctaagaagt

SEQ ID NO: 167668 - DNA, 25 bp, Saccharomyces pastorianus
gcgttcaatctaaaactaccggtat

SEQ ID NO: 167669 - DNA, 25 bp, Saccharomyces pastorianus
caatctaaaactaccggtatcgttg

SEQ ID NO: 167670 - DNA, 25 bp, Saccharomyces pastorianus
gataactgtccatatcgcagacatt

SEQ ID NO: 167671 - DNA, 25 bp, Saccharomyces pastorianus
gaaaaaactttgtctgccgctattg

SEQ ID NO: 167672 - DNA, 25 bp, Saccharomyces pastorianus
attgagggccagagtcttccggcaa

SEQ ID NO: 167673 - DNA, 25 bp, Saccharomyces pastorianus
atgtgcagggccctcatgatgtatg

SEQ ID NO: 167674 - DNA, 25 bp, Saccharomyces pastorianus
gtgccgcctccaactcaagtgagga

SEQ ID NO: 167675 - DNA, 25 bp, Saccharomyces pastorianus
aaaaatcattcttagcacctgcagt

SEQ ID NO: 167676 - DNA, 25 bp, Saccharomyces pastorianus
agtcgcaagctccaacagatgatga

SEQ ID NO: 167677 - DNA, 25 bp, Saccharomyces pastorianus
gagtcttccggcaattaagcgtact

SEQ ID NO: 167678 - DNA, 25 bp, Saccharomyces pastorianus
agcacctgcagtggaccattttgac

SEQ ID NO: 167679 - DNA, 25 bp, Saccharomyces pastorianus
gtttcaccgaaacttccacatacgt

SEQ ID NO: 167680 - DNA, 25 bp, Saccharomyces pastorianus
aagacaccgttttattctgcgcatg

SEQ ID NO: 167681 - DNA, 25 bp, Saccharomyces pastorianus
ggatcctggcaaacatgcccgctac

SEQ ID NO: 167682 - DNA, 25 bp, Saccharomyces pastorianus
tgatcaactctatggctggaaggga

SEQ ID NO: 167683 - DNA, 25 bp, Saccharomyces pastorianus
gatttcggagaggttggaacccaag

SEQ ID NO: 167684 - DNA, 25 bp, Saccharomyces pastorianus
ggcgctattgatcaactctatggct

SEQ ID NO: 167685 - DNA, 25 bp, Saccharomyces pastorianus
gctattgatcaactctatggctgga

SEQ ID NO: 167686 - DNA, 25 bp, Saccharomyces pastorianus
ctctatggctggaagggatttcgga

SEQ ID NO: 167687 - DNA, 25 bp, Saccharomyces pastorianus
ggaacccaaggatcctggcaaacat

SEQ ID NO: 167688 - DNA, 25 bp, Saccharomyces pastorianus
aaggatcctggcaaacatgcccgct

SEQ ID NO: 167689 - DNA, 25 bp, Saccharomyces pastorianus
ggccggcgctattgatcaactctat

SEQ ID NO: 167690 - DNA, 25 bp, Saccharomyces pastorianus
caactctatggctggaagggatttc

SEQ ID NO: 167691 - DNA, 25 bp, Saccharomyces pastorianus
ggttggaacccaaggatcctggcaa

SEQ ID NO: 167692 - DNA, 25 bp, Saccharomyces pastorianus
acttaggacgcccacaaggtcacca

SEQ ID NO: 167693 - DNA, 25 bp, Saccharomyces pastorianus
ttttttgcagctgtagtgggatctt

SEQ ID NO: 167694 - DNA, 25 bp, Saccharomyces pastorianus
gggatctttgagttactatgtgtac

SEQ ID NO: 167695 - DNA, 25 bp, Saccharomyces pastorianus
tctctgatccattttttgcagctgt

SEQ ID NO: 167696 - DNA, 25 bp, Saccharomyces pastorianus
aggacgcccacaaggtcaccatcta

SEQ ID NO: 167697 - DNA, 25 bp, Saccharomyces pastorianus
cagctgtagtgggatctttgagtta

SEQ ID NO: 167698 - DNA, 25 bp, Saccharomyces pastorianus
tttgcagctgtagtgggatctttga

SEQ ID NO: 167699 - DNA, 25 bp, Saccharomyces pastorianus
tgatccattttttgcagctgtagtg

SEQ ID NO: 167700 - DNA, 25 bp, Saccharomyces pastorianus
atctttgagttactatgtgtacgaa

SEQ ID NO: 167701 - DNA, 25 bp, Saccharomyces pastorianus
gaaagaaacttaggacgcccacaag

SEQ ID NO: 167702 - DNA, 25 bp, Saccharomyces pastorianus
agattctctgatccattttttgcag

SEQ ID NO: 167703 - DNA, 25 bp, Saccharomyces pastorianus
aggctgctttctctggaacttctct

SEQ ID NO: 167704 - DNA, 25 bp, Saccharomyces pastorianus
gatgctctaggctgctttctctgga

SEQ ID NO: 167705 - DNA, 25 bp, Saccharomyces pastorianus
ctcgttgttgaatccccgcggaggt

SEQ ID NO: 167706 - DNA, 25 bp, Saccharomyces pastorianus
tgctttctctggaacttctctcctt

SEQ ID NO: 167707 - DNA, 25 bp, Saccharomyces pastorianus
tgctctaggctgctttctctggaac

SEQ ID NO: 167708 - DNA, 25 bp, Saccharomyces pastorianus
atacctcgttgttgaatccccgcgg

SEQ ID NO: 167709 - DNA, 25 bp, Saccharomyces pastorianus
ttccccacatacctcgttgttgaat

SEQ ID NO: 167710 - DNA, 25 bp, Saccharomyces pastorianus
tctaggctgctttctctggaacttc

SEQ ID NO: 167711 - DNA, 25 bp, Saccharomyces pastorianus
cacatacctcgttgttgaatccccg

SEQ ID NO: 167712 - DNA, 25 bp, Saccharomyces pastorianus
acctcgttgttgaatccccgcggag

SEQ ID NO: 167713 - DNA, 25 bp, Saccharomyces pastorianus
taggctgctttctctggaacttctc

SEQ ID NO: 167714 - DNA, 25 bp, Saccharomyces pastorianus
ccgttttcatatgtttcgtttctat

SEQ ID NO: 167715 - DNA, 25 bp, Saccharomyces pastorianus
tttcgtttctattacactatcaatc

SEQ ID NO: 167716 - DNA, 25 bp, Saccharomyces pastorianus
cgtttctattacactatcaatcctt

SEQ ID NO: 167717 - DNA, 25 bp, Saccharomyces pastorianus
ccgttgttgatagaggctacaatat

SEQ ID NO: 167718 - DNA, 25 bp, Saccharomyces pastorianus
atgtttcgtttctattacactatca

SEQ ID NO: 167719 - DNA, 25 bp, Saccharomyces pastorianus
tcgtttctattacactatcaatcct

SEQ ID NO: 167720 - DNA, 25 bp, Saccharomyces pastorianus
tgtttcgtttctattacactatcaa

SEQ ID NO: 167721 - DNA, 25 bp, Saccharomyces pastorianus
cgttgttgatagaggctacaatatt

SEQ ID NO: 167722 - DNA, 25 bp, Saccharomyces pastorianus
attgagatttattattcctcattcc

SEQ ID NO: 167723 - DNA, 25 bp, Saccharomyces pastorianus
gtttcgtttctattacactatcaat

SEQ ID NO: 167724 - DNA, 25 bp, Saccharomyces pastorianus
gttgttgatagaggctacaatatta

SEQ ID NO: 167725 - DNA, 25 bp, Saccharomyces pastorianus
gaaacatatcgtgcacatacgaagt

SEQ ID NO: 167726 - DNA, 25 bp, Saccharomyces pastorianus
agtaacaatgttcaaactcatcaat

SEQ ID NO: 167727 - DNA, 25 bp, Saccharomyces pastorianus
tttcttctcttagcgttgtaacgga

SEQ ID NO: 167728 - DNA, 25 bp, Saccharomyces pastorianus
taacggatagtgttgttggttctca

SEQ ID NO: 167729 - DNA, 25 bp, Saccharomyces pastorianus
ctcaatctgatccattgtggcaatg

SEQ ID NO: 167730 - DNA, 25 bp, Saccharomyces pastorianus
gttggttctcaatctgatccattgt

SEQ ID NO: 167731 - DNA, 25 bp, Saccharomyces pastorianus
aatggtctgttttgcttcttagcct

SEQ ID NO: 167732 - DNA, 25 bp, Saccharomyces pastorianus
atgttcttcgcttagatgttcatct

SEQ ID NO: 167733 - DNA, 25 bp, Saccharomyces pastorianus
gcttcttagccttagccattttttg

SEQ ID NO: 167734 - DNA, 25 bp, Saccharomyces pastorianus
gttcttctccagtttcttctcttag

SEQ ID NO: 167735 - DNA, 25 bp, Saccharomyces pastorianus
gtgcacatacgaagtgtacaattgt

SEQ ID NO: 167736 - DNA, 25 bp, Saccharomyces pastorianus
ggcttggtgccatcatgatatacta

SEQ ID NO: 167737 - DNA, 25 bp, Saccharomyces pastorianus
attttattacggcttggtgccatca

SEQ ID NO: 167738 - DNA, 25 bp, Saccharomyces pastorianus
acggcttggtgccatcatgatatac

SEQ ID NO: 167739 - DNA, 25 bp, Saccharomyces pastorianus
ggtgccatcatgatatactaaataa

SEQ ID NO: 167740 - DNA, 25 bp, Saccharomyces pastorianus
ttacggcttggtgccatcatgatat

SEQ ID NO: 167741 - DNA, 25 bp, Saccharomyces pastorianus
tattacggcttggtgccatcatgat

SEQ ID NO: 167742 - DNA, 25 bp, Saccharomyces pastorianus
gttatttgtctgacttttcttaact

SEQ ID NO: 167743 - DNA, 25 bp, Saccharomyces pastorianus
gtctgacttttcttaactacccatt

SEQ ID NO: 167744 - DNA, 25 bp, Saccharomyces pastorianus
gacttttcttaactacccatttcat

SEQ ID NO: 167745 - DNA, 25 bp, Saccharomyces pastorianus
tatgaattttgccttttcttaattt

SEQ ID NO: 167746 - DNA, 25 bp, Saccharomyces pastorianus
tcttaactacccatttcattttatt

SEQ ID NO: 167747 - DNA, 25 bp, Saccharomyces pastorianus
taggtttgccattttatttcacctg

SEQ ID NO: 167748 - DNA, 25 bp, Saccharomyces pastorianus
ggtttgccattttatttcacctgta

SEQ ID NO: 167749 - DNA, 25 bp, Saccharomyces pastorianus
atttcacctgtatgtccatcatgga

SEQ ID NO: 167750 - DNA, 25 bp, Saccharomyces pastorianus
ttgccattttatttcacctgtatgt

SEQ ID NO: 167751 - DNA, 25 bp, Saccharomyces pastorianus
gtagatcatttgacgtagctaagtt

SEQ ID NO: 167752 - DNA, 25 bp, Saccharomyces pastorianus
ttcacctgtatgtccatcatggaag

SEQ ID NO: 167753 - DNA, 25 bp, Saccharomyces pastorianus
attttatttcacctgtatgtccatc

SEQ ID NO: 167754 - DNA, 25 bp, Saccharomyces pastorianus
atcatttgacgtagctaagttgaaa

SEQ ID NO: 167755 - DNA, 25 bp, Saccharomyces pastorianus
ttatttcacctgtatgtccatcatg

SEQ ID NO: 167756 - DNA, 25 bp, Saccharomyces pastorianus
acctgtatgtccatcatggaaggta

SEQ ID NO: 167757 - DNA, 25 bp, Saccharomyces pastorianus
gaaggtagatcatttgacgtagcta

SEQ ID NO: 167758 - DNA, 25 bp, Saccharomyces pastorianus
catacctcaaaggcatatagttgaa

SEQ ID NO: 167759 - DNA, 25 bp, Saccharomyces pastorianus
ggcatatagttgaagcagctctatt

SEQ ID NO: 167760 - DNA, 25 bp, Saccharomyces pastorianus
catctttcacacaatctcattatct

SEQ ID NO: 167761 - DNA, 25 bp, Saccharomyces pastorianus
atctcattatctctatggagatgct

SEQ ID NO: 167762 - DNA, 25 bp, Saccharomyces pastorianus
taacagacgctcatttagcacctca

SEQ ID NO: 167763 - DNA, 25 bp, Saccharomyces pastorianus
tcctccatctgtcatcactacttaa

SEQ ID NO: 167764 - DNA, 25 bp, Saccharomyces pastorianus
tctcattatctctatggagatgctc

SEQ ID NO: 167765 - DNA, 25 bp, Saccharomyces pastorianus
tcattatctctatggagatgctctt

SEQ ID NO: 167766 - DNA, 25 bp, Saccharomyces pastorianus
cattatctctatggagatgctcttg

SEQ ID NO: 167767 - DNA, 25 bp, Saccharomyces pastorianus
ctcattatctctatggagatgctct

SEQ ID NO: 167768 - DNA, 25 bp, Saccharomyces pastorianus
ttagcacctcacatattctccatat

SEQ ID NO: 167769 - DNA, 25 bp, Saccharomyces pastorianus
gaaacatttcacgatttccaaaatt

SEQ ID NO: 167770 - DNA, 25 bp, Saccharomyces pastorianus
ggcggtttctcgaaacatttcacga

SEQ ID NO: 167771 - DNA, 25 bp, Saccharomyces pastorianus
aaatgccttttttatcaactattat

SEQ ID NO: 167772 - DNA, 25 bp, Saccharomyces pastorianus
actatcgcacctttcttatctgaat

SEQ ID NO: 167773 - DNA, 25 bp, Saccharomyces pastorianus
gagtggcctaattgtaatcttttat

SEQ ID NO: 167774 - DNA, 25 bp, Saccharomyces pastorianus
ctaattattgaaggcggtttctcga

SEQ ID NO: 167775 - DNA, 25 bp, Saccharomyces pastorianus
gaattgtattcttgagtggcctaat

SEQ ID NO: 167776 - DNA, 25 bp, Saccharomyces pastorianus
atttccaattcttattccccactat

SEQ ID NO: 167777 - DNA, 25 bp, Saccharomyces pastorianus
atcaactattatgaattctctagaa

SEQ ID NO: 167778 - DNA, 25 bp, Saccharomyces pastorianus
tctctagaaagtggttgcaaaggaa

SEQ ID NO: 167779 - DNA, 25 bp, Saccharomyces pastorianus
gcacctttcttatctgaattgtatt

SEQ ID NO: 167780 - DNA, 25 bp, Saccharomyces pastorianus
gtgttgcgactctcaagacgctctt

SEQ ID NO: 167781 - DNA, 25 bp, Saccharomyces pastorianus
actaatggtcgagacgccgtgatta

SEQ ID NO: 167782 - DNA, 25 bp, Saccharomyces pastorianus
aagtcggacttgctagatttagaac

SEQ ID NO: 167783 - DNA, 25 bp, Saccharomyces pastorianus
gaatttcaagtttctgttggacgac

SEQ ID NO: 167784 - DNA, 25 bp, Saccharomyces pastorianus
ataccttgatatcaggctacttggg

SEQ ID NO: 167785 - DNA, 25 bp, Saccharomyces pastorianus
gagaagctagcttattacttttaga

SEQ ID NO: 167786 - DNA, 25 bp, Saccharomyces pastorianus
agacgctcttctttgcatacttaaa

SEQ ID NO: 167787 - DNA, 25 bp, Saccharomyces pastorianus
agagatgcttctgccataaattggg

SEQ ID NO: 167788 - DNA, 25 bp, Saccharomyces pastorianus
ggtgattgttgttcaaaaggtccaa

SEQ ID NO: 167789 - DNA, 25 bp, Saccharomyces pastorianus
aacggtgctcgtattatcggtgatt

SEQ ID NO: 167790 - DNA, 25 bp, Saccharomyces pastorianus
aatttaatctgtgccgtgttgcgac

SEQ ID NO: 167791 - DNA, 25 bp, Saccharomyces pastorianus
gccgttcgtcagaaaagggttcaca

SEQ ID NO: 167792 - DNA, 25 bp, Saccharomyces pastorianus
gctaggacactaaatccgggcgata

SEQ ID NO: 167793 - DNA, 25 bp, Saccharomyces pastorianus
gctttcaaagaccacccagttctaa

SEQ ID NO: 167794 - DNA, 25 bp, Saccharomyces pastorianus
ttgggctaactaatgctaggacact

SEQ ID NO: 167795 - DNA, 25 bp, Saccharomyces pastorianus
gattccaaaccaattgctagacaca

SEQ ID NO: 167796 - DNA, 25 bp, Saccharomyces pastorianus
gggttcacaacttttactgatggac

SEQ ID NO: 167797 - DNA, 25 bp, Saccharomyces pastorianus
gatcccactgatcatacaaaatttg

SEQ ID NO: 167798 - DNA, 25 bp, Saccharomyces pastorianus
caatttaggttatggccgttcgtca

SEQ ID NO: 167799 - DNA, 25 bp, Saccharomyces pastorianus
gtcgctgatataaaactttcacgca

SEQ ID NO: 167800 - DNA, 25 bp, Saccharomyces pastorianus
ttgcctcccagtttgggctttcaaa

SEQ ID NO: 167801 - DNA, 25 bp, Saccharomyces pastorianus
gcaaacacgggcatttctctcattc

SEQ ID NO: 167802 - DNA, 25 bp, Saccharomyces pastorianus
gagcatcttgtggagtagcgacacc

SEQ ID NO: 167803 - DNA, 25 bp, Saccharomyces pastorianus
agtagcgacaccttcgatcttgatc

SEQ ID NO: 167804 - DNA, 25 bp, Saccharomyces pastorianus
gcatcttgtggagtagcgacacctt

SEQ ID NO: 167805 - DNA, 25 bp, Saccharomyces pastorianus
gacaccttcgatcttgatcaaagag

SEQ ID NO: 167806 - DNA, 25 bp, Saccharomyces pastorianus
tcttgtggagtagcgacaccttcga

SEQ ID NO: 167807 - DNA, 25 bp, Saccharomyces pastorianus
tagcgacaccttcgatcttgatcaa

SEQ ID NO: 167808 - DNA, 25 bp, Saccharomyces pastorianus
ggagtagcgacaccttcgatcttga

SEQ ID NO: 167809 - DNA, 25 bp, Saccharomyces pastorianus
attgagcatcttgtggagtagcgac

SEQ ID NO: 167810 - DNA, 25 bp, Saccharomyces pastorianus
gtggagtagcgacaccttcgatctt

SEQ ID NO: 167811 - DNA, 25 bp, Saccharomyces pastorianus
ttgtggagtagcgacaccttcgatc

SEQ ID NO: 167812 - DNA, 25 bp, Saccharomyces pastorianus
agcgacaccttcgatcttgatcaaa

SEQ ID NO: 167813 - DNA, 25 bp, Saccharomyces pastorianus
actttggctccaagtgcaccagtaa

SEQ ID NO: 167814 - DNA, 25 bp, Saccharomyces pastorianus
ttgttaccactgaatcctctacggg

SEQ ID NO: 167815 - DNA, 25 bp, Saccharomyces pastorianus
tgctgctacaaacgctgccggtgaa

SEQ ID NO: 167816 - DNA, 25 bp, Saccharomyces pastorianus
gttggtactaactccgctggcgaaa

SEQ ID NO: 167817 - DNA, 25 bp, Saccharomyces pastorianus
aaccactactgaatgttctgctgct

SEQ ID NO: 167818 - DNA, 25 bp, Saccharomyces pastorianus
tacaacagcttctgcttctagcatg

SEQ ID NO: 167819 - DNA, 25 bp, Saccharomyces pastorianus
gcaaccaaccctatttcaatcaaga

SEQ ID NO: 167820 - DNA, 25 bp, Saccharomyces pastorianus
gttgttaccactgagtcatctgttg

SEQ ID NO: 167821 - DNA, 25 bp, Saccharomyces pastorianus
aactacatctgtatgctctgctaag

SEQ ID NO: 167822 - DNA, 25 bp, Saccharomyces pastorianus
taactccgctggtgagacgacaact

SEQ ID NO: 167823 - DNA, 25 bp, Saccharomyces pastorianus
acgacagctattccaaccacagttg

SEQ ID NO: 167824 - DNA, 25 bp, Saccharomyces pastorianus
tcttcaactccattcagctctacta

SEQ ID NO: 167825 - DNA, 25 bp, Saccharomyces pastorianus
tacaactacgacttctgtcactaca

SEQ ID NO: 167826 - DNA, 25 bp, Saccharomyces pastorianus
atcatccaaataccctggcagtcaa

SEQ ID NO: 167827 - DNA, 25 bp, Saccharomyces pastorianus
gaaagcttttctactggcactactg

SEQ ID NO: 167828 - DNA, 25 bp, Saccharomyces pastorianus
actactgaaagctctgtagcaccag

SEQ ID NO: 167829 - DNA, 25 bp, Saccharomyces pastorianus
gaaactaccattgttccaactacaa

SEQ ID NO: 167830 - DNA, 25 bp, Saccharomyces pastorianus
actattactactacggtttgctcta

SEQ ID NO: 167831 - DNA, 25 bp, Saccharomyces pastorianus
gaaacctctgtttcttctacaaccg

SEQ ID NO: 167832 - DNA, 25 bp, Saccharomyces pastorianus
tactgtcactccatcatcatccaaa

SEQ ID NO: 167833 - DNA, 25 bp, Saccharomyces pastorianus
cctggcagtcaaacagaaacctctg

SEQ ID NO: 167834 - DNA, 25 bp, Saccharomyces pastorianus
gaaagctctgtagcaccagtaccaa

SEQ ID NO: 167835 - DNA, 25 bp, Saccharomyces pastorianus
atcgagcaccttaagcagaacattg

SEQ ID NO: 167836 - DNA, 25 bp, Saccharomyces pastorianus
ggacaggacccagctattagtaaac

SEQ ID NO: 167837 - DNA, 25 bp, Saccharomyces pastorianus
gatttccgaccaattttattggaca

SEQ ID NO: 167838 - DNA, 25 bp, Saccharomyces pastorianus
gaaagcgtcgttccttttgacattg

SEQ ID NO: 167839 - DNA, 25 bp, Saccharomyces pastorianus
tccaaagcgaggaatgtttttccat

SEQ ID NO: 167840 - DNA, 25 bp, Saccharomyces pastorianus
ccttttgacattggatttccgacca

SEQ ID NO: 167841 - DNA, 25 bp, Saccharomyces pastorianus
gtttttccattgatcggaggacgta

SEQ ID NO: 167842 - DNA, 25 bp, Saccharomyces pastorianus
ttgagtattaagttgacaccagatc

SEQ ID NO: 167843 - DNA, 25 bp, Saccharomyces pastorianus
gacaccagatcagatagaacgtcta

SEQ ID NO: 167844 - DNA, 25 bp, Saccharomyces pastorianus
gctattagtaaacaggttccttcct

SEQ ID NO: 167845 - DNA, 25 bp, Saccharomyces pastorianus
ggaggacgtaaaatcgagcacctta

SEQ ID NO: 167846 - DNA, 25 bp, Saccharomyces pastorianus
tgaggctttctggacttttaaaaca

SEQ ID NO: 167847 - DNA, 25 bp, Saccharomyces pastorianus
ctatcgttttgaggctttctggact

SEQ ID NO: 167848 - DNA, 25 bp, Saccharomyces pastorianus
agacattgagtgctattaacttaga

SEQ ID NO: 167849 - DNA, 25 bp, Saccharomyces pastorianus
acttcctaagcaatcctatcgtttt

SEQ ID NO: 167850 - DNA, 25 bp, Saccharomyces pastorianus
gacattctacttcctaagcaatcct

SEQ ID NO: 167851 - DNA, 25 bp, Saccharomyces pastorianus
gagtttctctttgacaaaattgctt

SEQ ID NO: 167852 - DNA, 25 bp, Saccharomyces pastorianus
ggctgtaattttgcagtattttatc

SEQ ID NO: 167853 - DNA, 25 bp, Saccharomyces pastorianus
taagaggttctttggctgtaatttt

SEQ ID NO: 167854 - DNA, 25 bp, Saccharomyces pastorianus
gaaatctgtgctacatttgttatta

SEQ ID NO: 167855 - DNA, 25 bp, Saccharomyces pastorianus
gttattaaacgttgaactatggcca

SEQ ID NO: 167856 - DNA, 25 bp, Saccharomyces pastorianus
aacagctatgaatcgccgttacttt

SEQ ID NO: 167857 - DNA, 25 bp, Saccharomyces pastorianus
tgtccgcgtatgtcggtccattaga

SEQ ID NO: 167858 - DNA, 25 bp, Saccharomyces pastorianus
aagcttatccgtatgattaaatcta

SEQ ID NO: 167859 - DNA, 25 bp, Saccharomyces pastorianus
cgcgtatgtcggtccattagattca

SEQ ID NO: 167860 - DNA, 25 bp, Saccharomyces pastorianus
agttttgtccgcgtatgtcggtcca

SEQ ID NO: 167861 - DNA, 25 bp, Saccharomyces pastorianus
gattatccaagcttatccgtatgat

SEQ ID NO: 167862 - DNA, 25 bp, Saccharomyces pastorianus
aagtactctgagattgaatatatca

SEQ ID NO: 167863 - DNA, 25 bp, Saccharomyces pastorianus
gaatatatcagcgaatctggtgatt

SEQ ID NO: 167864 - DNA, 25 bp, Saccharomyces pastorianus
gattaaatctaaggctgtatcagat

SEQ ID NO: 167865 - DNA, 25 bp, Saccharomyces pastorianus
attatagttttgtccgcgtatgtcg

SEQ ID NO: 167866 - DNA, 25 bp, Saccharomyces pastorianus
gcgaatctggtgattatccaagctt

SEQ ID NO: 167867 - DNA, 25 bp, Saccharomyces pastorianus
atcagattatagttttgtccgcgta

SEQ ID NO: 167868 - DNA, 25 bp, Saccharomyces pastorianus
ctctccatctgtctctacgaaatta

SEQ ID NO: 167869 - DNA, 25 bp, Saccharomyces pastorianus
ttatcacacattaaccctgcaatcc

SEQ ID NO: 167870 - DNA, 25 bp, Saccharomyces pastorianus
ttctacgggtggaaactcagactgc

SEQ ID NO: 167871 - DNA, 25 bp, Saccharomyces pastorianus
gggtggaaactcagactgcagctga

SEQ ID NO: 167872 - DNA, 25 bp, Saccharomyces pastorianus
acgggtggaaactcagactgcagct

SEQ ID NO: 167873 - DNA, 25 bp, Saccharomyces pastorianus
gaaactcagactgcagctgagattt

SEQ ID NO: 167874 - DNA, 25 bp, Saccharomyces pastorianus
ctacgggtggaaactcagactgcag

SEQ ID NO: 167875 - DNA, 25 bp, Saccharomyces pastorianus
tgccagaaggtttctacgggtggaa

SEQ ID NO: 167876 - DNA, 25 bp, Saccharomyces pastorianus
ccatctgtctctacgaaattattgg

SEQ ID NO: 167877 - DNA, 25 bp, Saccharomyces pastorianus
ttgccagaaggtttctacgggtgga

SEQ ID NO: 167878 - DNA, 25 bp, Saccharomyces pastorianus
ctccatctgtctctacgaaattatt

SEQ ID NO: 167879 - DNA, 25 bp, Saccharomyces pastorianus
tagcctatgatttaagtatttcagc

SEQ ID NO: 167880 - DNA, 25 bp, Saccharomyces pastorianus
gatttcaattccttttattatacaa

SEQ ID NO: 167881 - DNA, 25 bp, Saccharomyces pastorianus
gacaagatctacaatttcggtgaac

SEQ ID NO: 167882 - DNA, 25 bp, Saccharomyces pastorianus
gacaccatagtcgatgattccaatt

SEQ ID NO: 167883 - DNA, 25 bp, Saccharomyces pastorianus
aagtatttcagcattgttgggtgac

SEQ ID NO: 167884 - DNA, 25 bp, Saccharomyces pastorianus
ttagcggaacgccaacaattagcct

SEQ ID NO: 167885 - DNA, 25 bp, Saccharomyces pastorianus
ttcggtgaactgttacatcatcaag

SEQ ID NO: 167886 - DNA, 25 bp, Saccharomyces pastorianus
caagcatcactttagcggaacgcca

SEQ ID NO: 167887 - DNA, 25 bp, Saccharomyces pastorianus
tacatcatcaagtaatggacaccat

SEQ ID NO: 167888 - DNA, 25 bp, Saccharomyces pastorianus
ggaacgccaacaattagcctatgat

SEQ ID NO: 167889 - DNA, 25 bp, Saccharomyces pastorianus
gcattgttgggtgacaagatctaca

SEQ ID NO: 167890 - DNA, 25 bp, Saccharomyces pastorianus
aaaatacctaattccttcgcacatt

SEQ ID NO: 167891 - DNA, 25 bp, Saccharomyces pastorianus
gctaacaataaacaacgtcaacaaa

SEQ ID NO: 167892 - DNA, 25 bp, Saccharomyces pastorianus
caacgtcaacaaaagcaaaagcgta

SEQ ID NO: 167893 - DNA, 25 bp, Saccharomyces pastorianus
ttcgcacatttcaaagctaacaata

SEQ ID NO: 167894 - DNA, 25 bp, Saccharomyces pastorianus
cgtcaacaaaagcaaaagcgtaaat

SEQ ID NO: 167895 - DNA, 25 bp, Saccharomyces pastorianus
taattccttcgcacatttcaaagct

SEQ ID NO: 167896 - DNA, 25 bp, Saccharomyces pastorianus
taaacaacgtcaacaaaagcaaaag

SEQ ID NO: 167897 - DNA, 25 bp, Saccharomyces pastorianus
gcacatttcaaagctaacaataaac

SEQ ID NO: 167898 - DNA, 25 bp, Saccharomyces pastorianus
agcaaaagcgtaaataaatatccat

SEQ ID NO: 167899 - DNA, 25 bp, Saccharomyces pastorianus
ttccttcgcacatttcaaagctaac

SEQ ID NO: 167900 - DNA, 25 bp, Saccharomyces pastorianus
aagctaacaataaacaacgtcaaca

SEQ ID NO: 167901 - DNA, 25 bp, Saccharomyces pastorianus
ctcgttattcccaagcactcttaaa

SEQ ID NO: 167902 - DNA, 25 bp, Saccharomyces pastorianus
atagggttcagcgaatatgcagtac

SEQ ID NO: 167903 - DNA, 25 bp, Saccharomyces pastorianus
cactggcggtatatgtgcacctgta

SEQ ID NO: 167904 - DNA, 25 bp, Saccharomyces pastorianus
taaaactggctctatacctgaccgc

SEQ ID NO: 167905 - DNA, 25 bp, Saccharomyces pastorianus
gaccatatactcaatgaccagacat

SEQ ID NO: 167906 - DNA, 25 bp, Saccharomyces pastorianus
gacattgtccaatggtactgctaga

SEQ ID NO: 167907 - DNA, 25 bp, Saccharomyces pastorianus
aacgccgggctaggtggtcatttgc

SEQ ID NO: 167908 - DNA, 25 bp, Saccharomyces pastorianus
acctgtagctcgtgctgctttagtg

SEQ ID NO: 167909 - DNA, 25 bp, Saccharomyces pastorianus
tttgatagcgtactcgttattccca

SEQ ID NO: 167910 - DNA, 25 bp, Saccharomyces pastorianus
gtcgcagcaatatgtgtcgcagcca

SEQ ID NO: 167911 - DNA, 25 bp, Saccharomyces pastorianus
taacactgctactctagaacgccgg

SEQ ID NO: 167912 - DNA, 25 bp, Saccharomyces pastorianus
tagggcagtcttggtcagctatatt

SEQ ID NO: 167913 - DNA, 25 bp, Saccharomyces pastorianus
aaatagggcagtcttggtcagctat

SEQ ID NO: 167914 - DNA, 25 bp, Saccharomyces pastorianus
gcagtcttggtcagctatatttgag

SEQ ID NO: 167915 - DNA, 25 bp, Saccharomyces pastorianus
atagggcagtcttggtcagctatat

SEQ ID NO: 167916 - DNA, 25 bp, Saccharomyces pastorianus
taaatagggcagtcttggtcagcta

SEQ ID NO: 167917 - DNA, 25 bp, Saccharomyces pastorianus
ataaatagggcagtcttggtcagct

SEQ ID NO: 167918 - DNA, 25 bp, Saccharomyces pastorianus
aatagggcagtcttggtcagctata

SEQ ID NO: 167919 - DNA, 25 bp, Saccharomyces pastorianus
cagtcttggtcagctatatttgaga

SEQ ID NO: 167920 - DNA, 25 bp, Saccharomyces pastorianus
ggcagtcttggtcagctatatttga

SEQ ID NO: 167921 - DNA, 25 bp, Saccharomyces pastorianus
agggcagtcttggtcagctatattt

SEQ ID NO: 167922 - DNA, 25 bp, Saccharomyces pastorianus
gggcagtcttggtcagctatatttg

SEQ ID NO: 167923 - DNA, 25 bp, Saccharomyces pastorianus
gactcgcgggacaagctgtctctga

SEQ ID NO: 167924 - DNA, 25 bp, Saccharomyces pastorianus
atagaggctggttcccttgttcttt

SEQ ID NO: 167925 - DNA, 25 bp, Saccharomyces pastorianus
gctgtctctgagattgggcgattta

SEQ ID NO: 167926 - DNA, 25 bp, Saccharomyces pastorianus
gatagcagccccttgatgttggata

SEQ ID NO: 167927 - DNA, 25 bp, Saccharomyces pastorianus
atggtgttctcatacggcattgcgc

SEQ ID NO: 167928 - DNA, 25 bp, Saccharomyces pastorianus
gcttacagcccatcgatgtggtgga

SEQ ID NO: 167929 - DNA, 25 bp, Saccharomyces pastorianus
gaataaaggatagcggcggccacga

SEQ ID NO: 167930 - DNA, 25 bp, Saccharomyces pastorianus
gggcgatttagtctacgtactcaat

SEQ ID NO: 167931 - DNA, 25 bp, Saccharomyces pastorianus
ttatgagcacttcagcgactcgcgg

SEQ ID NO: 167932 - DNA, 25 bp, Saccharomyces pastorianus
atgagtttccttgggtcagacgcca

SEQ ID NO: 167933 - DNA, 25 bp, Saccharomyces pastorianus
gggtcagacgccagtacgactacaa

SEQ ID NO: 167934 - DNA, 25 bp, Saccharomyces pastorianus
gaaccaaatcgtcatctggcagttt

SEQ ID NO: 167935 - DNA, 25 bp, Saccharomyces pastorianus
acagcccgctttaaggaacttgcct

SEQ ID NO: 167936 - DNA, 25 bp, Saccharomyces pastorianus
tgcgccgttcaagaatcccactgaa

SEQ ID NO: 167937 - DNA, 25 bp, Saccharomyces pastorianus
ttagcgccggatacaacatctctta

SEQ ID NO: 167938 - DNA, 25 bp, Saccharomyces pastorianus
tcatctggcagttttgtctcgttag

SEQ ID NO: 167939 - DNA, 25 bp, Saccharomyces pastorianus
aagtttgctactttggagcctgcgc

SEQ ID NO: 167940 - DNA, 25 bp, Saccharomyces pastorianus
ggtcatccatgatcctttgcaaggt

SEQ ID NO: 167941 - DNA, 25 bp, Saccharomyces pastorianus
gacttgaatttgtcccatcatccgg

SEQ ID NO: 167942 - DNA, 25 bp, Saccharomyces pastorianus
ttgaagagacacctcccgtggaagt

SEQ ID NO: 167943 - DNA, 25 bp, Saccharomyces pastorianus
gtatcaaatcaactggcggtgtcaa

SEQ ID NO: 167944 - DNA, 25 bp, Saccharomyces pastorianus
gacatggcctgttttcttttgaaga

SEQ ID NO: 167945 - DNA, 25 bp, Saccharomyces pastorianus
cttctccaactgaaaacggtgtctt

SEQ ID NO: 167946 - DNA, 25 bp, Saccharomyces pastorianus
aacgaatacagattggccttctacc

SEQ ID NO: 167947 - DNA, 25 bp, Saccharomyces pastorianus
cagattggccttctaccaagtcact

SEQ ID NO: 167948 - DNA, 25 bp, Saccharomyces pastorianus
gctaagtacttgatcgaccacatca

SEQ ID NO: 167949 - DNA, 25 bp, Saccharomyces pastorianus
gtgctgtcggtaacttgggtaacgc

SEQ ID NO: 167950 - DNA, 25 bp, Saccharomyces pastorianus
gtctcttctccaactgaaaacggtg

SEQ ID NO: 167951 - DNA, 25 bp, Saccharomyces pastorianus
tgggtaacgctgtcactgtcactga

SEQ ID NO: 167952 - DNA, 25 bp, Saccharomyces pastorianus
ctgtcactgaagatggtaccgttgt

SEQ ID NO: 167953 - DNA, 25 bp, Saccharomyces pastorianus
taccgttgttactgttgtttccact

SEQ ID NO: 167954 - DNA, 25 bp, Saccharomyces pastorianus
cagcttcctacgctaagtacttgat

SEQ ID NO: 167955 - DNA, 25 bp, Saccharomyces pastorianus
gtaacttgggtaacgctgtcactgt

SEQ ID NO: 167956 - DNA, 25 bp, Saccharomyces pastorianus
gatgtctgttttatgtccccacgtt

SEQ ID NO: 167957 - DNA, 25 bp, Saccharomyces pastorianus
tatttgatgtctgttttatgtcccc

SEQ ID NO: 167958 - DNA, 25 bp, Saccharomyces pastorianus
gtctgttttatgtccccacgttaca

SEQ ID NO: 167959 - DNA, 25 bp, Saccharomyces pastorianus
atttgatgtctgttttatgtcccca

SEQ ID NO: 167960 - DNA, 25 bp, Saccharomyces pastorianus
tttgatgtctgttttatgtccccac

SEQ ID NO: 167961 - DNA, 25 bp, Saccharomyces pastorianus
ttgatgtctgttttatgtccccacg

SEQ ID NO: 167962 - DNA, 25 bp, Saccharomyces pastorianus
tgtctgttttatgtccccacgttac

SEQ ID NO: 167963 - DNA, 25 bp, Saccharomyces pastorianus
tctgttttatgtccccacgttacac

SEQ ID NO: 167964 - DNA, 25 bp, Saccharomyces pastorianus
atgtctgttttatgtccccacgtta

SEQ ID NO: 167965 - DNA, 25 bp, Saccharomyces pastorianus
ccattatatttgatgtctgttttat

SEQ ID NO: 167966 - DNA, 25 bp, Saccharomyces pastorianus
tgatgtctgttttatgtccccacgt

SEQ ID NO: 167967 - DNA, 25 bp, Saccharomyces pastorianus
gagcgcaagctacttctaatttatg

SEQ ID NO: 167968 - DNA, 25 bp, Saccharomyces pastorianus
gaaattctcgaagccttgcaagtct

SEQ ID NO: 167969 - DNA, 25 bp, Saccharomyces pastorianus
agattcaccgtcctcagtagtaacg

SEQ ID NO: 167970 - DNA, 25 bp, Saccharomyces pastorianus
gtctttttatcctttttcgtcatct

SEQ ID NO: 167971 - DNA, 25 bp, Saccharomyces pastorianus
gtcaaaatcgtcatcttcggtttcg

SEQ ID NO: 167972 - DNA, 25 bp, Saccharomyces pastorianus
taacggtctgtacctttactgtctt

SEQ ID NO: 167973 - DNA, 25 bp, Saccharomyces pastorianus
tactatacagttccacaagcttttg

SEQ ID NO: 167974 - DNA, 25 bp, Saccharomyces pastorianus
gtcatcttcggtttcgttggcaatg

SEQ ID NO: 167975 - DNA, 25 bp, Saccharomyces pastorianus
aaatagcttcacagattcaccgtcc

SEQ ID NO: 167976 - DNA, 25 bp, Saccharomyces pastorianus
gaacttgcccttttgcaaaacaact

SEQ ID NO: 167977 - DNA, 25 bp, Saccharomyces pastorianus
aagcttttgatacccctgagcgcaa

SEQ ID NO: 167978 - DNA, 25 bp, Saccharomyces pastorianus
gtttccagagcttacggtggttcca

SEQ ID NO: 167979 - DNA, 25 bp, Saccharomyces pastorianus
cagagcttacggtggttccagatgt

SEQ ID NO: 167980 - DNA, 25 bp, Saccharomyces pastorianus
agcttacggtggttccagatgtgcc

SEQ ID NO: 167981 - DNA, 25 bp, Saccharomyces pastorianus
ctgtttccagagcttacggtggttc

SEQ ID NO: 167982 - DNA, 25 bp, Saccharomyces pastorianus
gtggttccagatgtgccaactgtgt

SEQ ID NO: 167983 - DNA, 25 bp, Saccharomyces pastorianus
ttccagagcttacggtggttccaga

SEQ ID NO: 167984 - DNA, 25 bp, Saccharomyces pastorianus
gactgtttccagagcttacggtggt

SEQ ID NO: 167985 - DNA, 25 bp, Saccharomyces pastorianus
cggtggttccagatgtgccaactgt

SEQ ID NO: 167986 - DNA, 25 bp, Saccharomyces pastorianus
tacggtggttccagatgtgccaact

SEQ ID NO: 167987 - DNA, 25 bp, Saccharomyces pastorianus
cttacggtggttccagatgtgccaa

SEQ ID NO: 167988 - DNA, 25 bp, Saccharomyces pastorianus
aagactgtttccagagcttacggtg

SEQ ID NO: 167989 - DNA, 25 bp, Saccharomyces pastorianus
gagagcttattgtcaagtgtatctt

SEQ ID NO: 167990 - DNA, 25 bp, Saccharomyces pastorianus
gtgcttattagacttatatccaggc

SEQ ID NO: 167991 - DNA, 25 bp, Saccharomyces pastorianus
aatcaaacacttgaaccccagcttt

SEQ ID NO: 167992 - DNA, 25 bp, Saccharomyces pastorianus
gacgatgtggactgcgagattttgt

SEQ ID NO: 167993 - DNA, 25 bp, Saccharomyces pastorianus
gattttgtgttcgttgcacttcacc

SEQ ID NO: 167994 - DNA, 25 bp, Saccharomyces pastorianus
gaatacatctcgatcttgaaactta

SEQ ID NO: 167995 - DNA, 25 bp, Saccharomyces pastorianus
agaactgcaaggtctcttaaaaatg

SEQ ID NO: 167996 - DNA, 25 bp, Saccharomyces pastorianus
gtttgccattatcgaaagcctaatt

SEQ ID NO: 167997 - DNA, 25 bp, Saccharomyces pastorianus
caataaccctccaaatgacgatgtg

SEQ ID NO: 167998 - DNA, 25 bp, Saccharomyces pastorianus
gaaccccagctttcagaatacatct

SEQ ID NO: 167999 - DNA, 25 bp, Saccharomyces pastorianus
gttgcacttcaccacagtttattct

SEQ ID NO: 168000 - DNA, 25 bp, Saccharomyces pastorianus
atgctttttgtgcagtcgctggtat

SEQ ID NO: 168001 - DNA, 25 bp, Saccharomyces pastorianus
atgaacttcgtgatgctttttgtgc

SEQ ID NO: 168002 - DNA, 25 bp, Saccharomyces pastorianus
gcgtcgtcgatcctgatgacagtga

SEQ ID NO: 168003 - DNA, 25 bp, Saccharomyces pastorianus
aatgggctgactcggtggccaactc

SEQ ID NO: 168004 - DNA, 25 bp, Saccharomyces pastorianus
acaagttcgttgtcaacctggccaa

SEQ ID NO: 168005 - DNA, 25 bp, Saccharomyces pastorianus
gctggtatgtacactagcgttgtgc

SEQ ID NO: 168006 - DNA, 25 bp, Saccharomyces pastorianus
ggccaacttcaacatgaacttcgtg

SEQ ID NO: 168007 - DNA, 25 bp, Saccharomyces pastorianus
atcctgtcgtactgcgcgtcgtcga

SEQ ID NO: 168008 - DNA, 25 bp, Saccharomyces pastorianus
gcaagcatgaatgggctgactcggt

SEQ ID NO: 168009 - DNA, 25 bp, Saccharomyces pastorianus
gtgcagtcgctggtatgtacactag

SEQ ID NO: 168010 - DNA, 25 bp, Saccharomyces pastorianus
tcaacctggccaacttcaacatgaa

SEQ ID NO: 168011 - DNA, 25 bp, Saccharomyces pastorianus
ccaggtctgtgtacaccgaggaaat

SEQ ID NO: 168012 - DNA, 25 bp, Saccharomyces pastorianus
ggtcctcactgtatcccaaatatgt

SEQ ID NO: 168013 - DNA, 25 bp, Saccharomyces pastorianus
aacgaattaggtgcagtggctccca

SEQ ID NO: 168014 - DNA, 25 bp, Saccharomyces pastorianus
caatatttggaacaagacggtatca

SEQ ID NO: 168015 - DNA, 25 bp, Saccharomyces pastorianus
ttactcgttttggtcctcactgtat

SEQ ID NO: 168016 - DNA, 25 bp, Saccharomyces pastorianus
gtggctcccaagttaaactggtctg

SEQ ID NO: 168017 - DNA, 25 bp, Saccharomyces pastorianus
gaaaactccaggtctgtgtacaccg

SEQ ID NO: 168018 - DNA, 25 bp, Saccharomyces pastorianus
agagacgctacctggattttgccga

SEQ ID NO: 168019 - DNA, 25 bp, Saccharomyces pastorianus
acgctacctggattttgccgaataa

SEQ ID NO: 168020 - DNA, 25 bp, Saccharomyces pastorianus
gattttgccgaataacactatgaag

SEQ ID NO: 168021 - DNA, 25 bp, Saccharomyces pastorianus
aactggtctgcaccaagagacgcta

SEQ ID NO: 168022 - DNA, 25 bp, Saccharomyces pastorianus
gtgccttaggcatggatcaaaattc

SEQ ID NO: 168023 - DNA, 25 bp, Saccharomyces pastorianus
tcaagagaatccgaggtgccttagg

SEQ ID NO: 168024 - DNA, 25 bp, Saccharomyces pastorianus
atccgaggtgccttaggcatggatc

SEQ ID NO: 168025 - DNA, 25 bp, Saccharomyces pastorianus
ctatcaagagaatccgaggtgcctt

SEQ ID NO: 168026 - DNA, 25 bp, Saccharomyces pastorianus
agaatccgaggtgccttaggcatgg

SEQ ID NO: 168027 - DNA, 25 bp, Saccharomyces pastorianus
ggcatggatcaaaattcggaagaaa

SEQ ID NO: 168028 - DNA, 25 bp, Saccharomyces pastorianus
ccgaggtgccttaggcatggatcaa

SEQ ID NO: 168029 - DNA, 25 bp, Saccharomyces pastorianus
cttaggcatggatcaaaattcggaa

SEQ ID NO: 168030 - DNA, 25 bp, Saccharomyces pastorianus
gagaatccgaggtgccttaggcatg

SEQ ID NO: 168031 - DNA, 25 bp, Saccharomyces pastorianus
agagaatccgaggtgccttaggcat

SEQ ID NO: 168032 - DNA, 25 bp, Saccharomyces pastorianus
gccttaggcatggatcaaaattcgg

SEQ ID NO: 168033 - DNA, 25 bp, Saccharomyces pastorianus
cattgtagatgacttgcacgattgg

SEQ ID NO: 168034 - DNA, 25 bp, Saccharomyces pastorianus
tgcacgattgggaaacggagttcta

SEQ ID NO: 168035 - DNA, 25 bp, Saccharomyces pastorianus
ttgtagatgacttgcacgattggga

SEQ ID NO: 168036 - DNA, 25 bp, Saccharomyces pastorianus
gacttgcacgattgggaaacggagt

SEQ ID NO: 168037 - DNA, 25 bp, Saccharomyces pastorianus
atgacttgcacgattgggaaacgga

SEQ ID NO: 168038 - DNA, 25 bp, Saccharomyces pastorianus
aacctcgattttgacgctttcgagt

SEQ ID NO: 168039 - DNA, 25 bp, Saccharomyces pastorianus
gtagatgacttgcacgattgggaaa

SEQ ID NO: 168040 - DNA, 25 bp, Saccharomyces pastorianus
tagatgacttgcacgattgggaaac

SEQ ID NO: 168041 - DNA, 25 bp, Saccharomyces pastorianus
agttctaccgtcagtcgctatttgg

SEQ ID NO: 168042 - DNA, 25 bp, Saccharomyces pastorianus
cctcattgtagatgacttgcacgat

SEQ ID NO: 168043 - DNA, 25 bp, Saccharomyces pastorianus
gtaagcaatctctgtgagcgacaca

SEQ ID NO: 168044 - DNA, 25 bp, Saccharomyces pastorianus
taagggtgattaccaccgattaagg

SEQ ID NO: 168045 - DNA, 25 bp, Saccharomyces pastorianus
gattaccaccgattaaggaaggctg

SEQ ID NO: 168046 - DNA, 25 bp, Saccharomyces pastorianus
aaccgatacaggtacgcgagttcta

SEQ ID NO: 168047 - DNA, 25 bp, Saccharomyces pastorianus
ggtgattaccaccgattaaggaagg

SEQ ID NO: 168048 - DNA, 25 bp, Saccharomyces pastorianus
tacaggtacgcgagttctatggact

SEQ ID NO: 168049 - DNA, 25 bp, Saccharomyces pastorianus
gtaagggtgattaccaccgattaag

SEQ ID NO: 168050 - DNA, 25 bp, Saccharomyces pastorianus
gtgattaccaccgattaaggaaggc

SEQ ID NO: 168051 - DNA, 25 bp, Saccharomyces pastorianus
ccgatacaggtacgcgagttctatg

SEQ ID NO: 168052 - DNA, 25 bp, Saccharomyces pastorianus
gggtgattaccaccgattaaggaag

SEQ ID NO: 168053 - DNA, 25 bp, Saccharomyces pastorianus
tgattaccaccgattaaggaaggct

SEQ ID NO: 168054 - DNA, 25 bp, Saccharomyces pastorianus
gtataaccgatacaggtacgcgagt

SEQ ID NO: 168055 - DNA, 25 bp, Saccharomyces pastorianus
ggcagctacgtgacccacgagaagg

SEQ ID NO: 168056 - DNA, 25 bp, Saccharomyces pastorianus
agggccatttcgtatatttttacat

SEQ ID NO: 168057 - DNA, 25 bp, Saccharomyces pastorianus
taaaaacttcggcagctacgtgacc

SEQ ID NO: 168058 - DNA, 25 bp, Saccharomyces pastorianus
gtgacccacgagaagggccatttcg

SEQ ID NO: 168059 - DNA, 25 bp, Saccharomyces pastorianus
aaaacttcggcagctacgtgaccca

SEQ ID NO: 168060 - DNA, 25 bp, Saccharomyces pastorianus
tcgttggtaaaaacttcggcagcta

SEQ ID NO: 168061 - DNA, 25 bp, Saccharomyces pastorianus
ttggtaaaaacttcggcagctacgt

SEQ ID NO: 168062 - DNA, 25 bp, Saccharomyces pastorianus
gagaagggccatttcgtatattttt

SEQ ID NO: 168063 - DNA, 25 bp, Saccharomyces pastorianus
gacccacgagaagggccatttcgta

SEQ ID NO: 168064 - DNA, 25 bp, Saccharomyces pastorianus
ccatttcgtatatttttacatcggg

SEQ ID NO: 168065 - DNA, 25 bp, Saccharomyces pastorianus
ttcggcagctacgtgacccacgaga

SEQ ID NO: 168066 - DNA, 25 bp, Saccharomyces pastorianus
tatgccagaactatcggtatcgccg

SEQ ID NO: 168067 - DNA, 25 bp, Saccharomyces pastorianus
actgctgcttatgccagaactatcg

SEQ ID NO: 168068 - DNA, 25 bp, Saccharomyces pastorianus
aaagtgcacttcgaccaagctggta

SEQ ID NO: 168069 - DNA, 25 bp, Saccharomyces pastorianus
gaacgtgttaaagtgcacttcgacc

SEQ ID NO: 168070 - DNA, 25 bp, Saccharomyces pastorianus
agaactatcggtatcgccgttgacc

SEQ ID NO: 168071 - DNA, 25 bp, Saccharomyces pastorianus
agtgcacttcgaccaagctggtaag

SEQ ID NO: 168072 - DNA, 25 bp, Saccharomyces pastorianus
taacagaaaggtcagagctggcaga

SEQ ID NO: 168073 - DNA, 25 bp, Saccharomyces pastorianus
attgctccaagacctctagatctct

SEQ ID NO: 168074 - DNA, 25 bp, Saccharomyces pastorianus
tctagatctcttgagacctgttgtt

SEQ ID NO: 168075 - DNA, 25 bp, Saccharomyces pastorianus
aactatcggtatcgccgttgaccac

SEQ ID NO: 168076 - DNA, 25 bp, Saccharomyces pastorianus
aagacctctagatctcttgagacct

SEQ ID NO: 168077 - DNA, 25 bp, Saccharomyces pastorianus
gtgtcacaatataaaccattttctg

SEQ ID NO: 168078 - DNA, 25 bp, Saccharomyces pastorianus
gatccttctcagtttgattttgaaa

SEQ ID NO: 168079 - DNA, 25 bp, Saccharomyces pastorianus
gttaacgagaaacgcatagtgtcta

SEQ ID NO: 168080 - DNA, 25 bp, Saccharomyces pastorianus
gcatagtgtctaaaaccttcggaaa

SEQ ID NO: 168081 - DNA, 25 bp, Saccharomyces pastorianus
agaacctgaaaatgaagatctccta

SEQ ID NO: 168082 - DNA, 25 bp, Saccharomyces pastorianus
ggccaaagacgctcttgactctgta

SEQ ID NO: 168083 - DNA, 25 bp, Saccharomyces pastorianus
aaatcaatggccaaagacgctcttg

SEQ ID NO: 168084 - DNA, 25 bp, Saccharomyces pastorianus
gaaactgtattgcaactgagaaatg

SEQ ID NO: 168085 - DNA, 25 bp, Saccharomyces pastorianus
acgaacaagatacagcattaccaag

SEQ ID NO: 168086 - DNA, 25 bp, Saccharomyces pastorianus
atagaagattacttggtgtcacaat

SEQ ID NO: 168087 - DNA, 25 bp, Saccharomyces pastorianus
ttaccaagcaatattgatccttctc

SEQ ID NO: 168088 - DNA, 25 bp, Saccharomyces pastorianus
atttgccatggtttcatcgtatttt

SEQ ID NO: 168089 - DNA, 25 bp, Saccharomyces pastorianus
agaagtcccatctagattaaccaat

SEQ ID NO: 168090 - DNA, 25 bp, Saccharomyces pastorianus
tcatagcgtgtctcagatctctgtc

SEQ ID NO: 168091 - DNA, 25 bp, Saccharomyces pastorianus
atctctgtccattaagatcttaatc

SEQ ID NO: 168092 - DNA, 25 bp, Saccharomyces pastorianus
taaccaattttttttcgatcatgat

SEQ ID NO: 168093 - DNA, 25 bp, Saccharomyces pastorianus
gccatggtttcatcgtattttcttc

SEQ ID NO: 168094 - DNA, 25 bp, Saccharomyces pastorianus
tcatcgtattttcttcattggcaga

SEQ ID NO: 168095 - DNA, 25 bp, Saccharomyces pastorianus
gtgtctcagatctctgtccattaag

SEQ ID NO: 168096 - DNA, 25 bp, Saccharomyces pastorianus
attttcttcattggcagaagtccca

SEQ ID NO: 168097 - DNA, 25 bp, Saccharomyces pastorianus
gtcccatctagattaaccaattttt

SEQ ID NO: 168098 - DNA, 25 bp, Saccharomyces pastorianus
gatcttaatcatttgccatggtttc

SEQ ID NO: 168099 - DNA, 25 bp, Saccharomyces pastorianus
ttgtctcttagttgcacttcatcta

SEQ ID NO: 168100 - DNA, 25 bp, Saccharomyces pastorianus
gagctattttgcgtttgtctcttag

SEQ ID NO: 168101 - DNA, 25 bp, Saccharomyces pastorianus
gtctattcaacgttttcaacctata

SEQ ID NO: 168102 - DNA, 25 bp, Saccharomyces pastorianus
aaacggtgttattcgatgggatgaa

SEQ ID NO: 168103 - DNA, 25 bp, Saccharomyces pastorianus
ttggcttttcgagatagctattaaa

SEQ ID NO: 168104 - DNA, 25 bp, Saccharomyces pastorianus
gtgtctcaatttatgtttactcaag

SEQ ID NO: 168105 - DNA, 25 bp, Saccharomyces pastorianus
aattgcaacattttccttggcggtg

SEQ ID NO: 168106 - DNA, 25 bp, Saccharomyces pastorianus
cttggcggtgtgtgtctcaatttat

SEQ ID NO: 168107 - DNA, 25 bp, Saccharomyces pastorianus
aagtttgtcggtgggagctattttg

SEQ ID NO: 168108 - DNA, 25 bp, Saccharomyces pastorianus
gtttactcaagtctattcaacgttt

SEQ ID NO: 168109 - DNA, 25 bp, Saccharomyces pastorianus
aaccttatttggcttttcgagatag

SEQ ID NO: 168110 - DNA, 25 bp, Saccharomyces pastorianus
aatcatgttgccagaatcgtcgaat

SEQ ID NO: 168111 - DNA, 25 bp, Saccharomyces pastorianus
gcagccatactgtctgatatcgttc

SEQ ID NO: 168112 - DNA, 25 bp, Saccharomyces pastorianus
tatatcagccttcccatatgttttc

SEQ ID NO: 168113 - DNA, 25 bp, Saccharomyces pastorianus
caagcattgttggacctgatcgaca

SEQ ID NO: 168114 - DNA, 25 bp, Saccharomyces pastorianus
gtctgttcttcggatgtagttctat

SEQ ID NO: 168115 - DNA, 25 bp, Saccharomyces pastorianus
actgcaactagcttttatccaacac

SEQ ID NO: 168116 - DNA, 25 bp, Saccharomyces pastorianus
taagagtgcgtgctgcagccatact

SEQ ID NO: 168117 - DNA, 25 bp, Saccharomyces pastorianus
gggcttgacgccaacaaatacactt

SEQ ID NO: 168118 - DNA, 25 bp, Saccharomyces pastorianus
tatccaacacttcctgtcagcagaa

SEQ ID NO: 168119 - DNA, 25 bp, Saccharomyces pastorianus
gatagagtctctttcaacacggaag

SEQ ID NO: 168120 - DNA, 25 bp, Saccharomyces pastorianus
gggcaagctgccaagaacaccatca

SEQ ID NO: 168121 - DNA, 25 bp, Saccharomyces pastorianus
gctcaatgctgccataggtcaagat

SEQ ID NO: 168122 - DNA, 25 bp, Saccharomyces pastorianus
tgctgccataggtcaagatgggatc

SEQ ID NO: 168123 - DNA, 25 bp, Saccharomyces pastorianus
atagagctcaatgctgccataggtc

SEQ ID NO: 168124 - DNA, 25 bp, Saccharomyces pastorianus
aacatagagctcaatgctgccatag

SEQ ID NO: 168125 - DNA, 25 bp, Saccharomyces pastorianus
aggtcaagatgggatctccgagtct

SEQ ID NO: 168126 - DNA, 25 bp, Saccharomyces pastorianus
gtcaagatgggatctccgagtctag

SEQ ID NO: 168127 - DNA, 25 bp, Saccharomyces pastorianus
aaaacatagagctcaatgctgccat

SEQ ID NO: 168128 - DNA, 25 bp, Saccharomyces pastorianus
aagatgggatctccgagtctagatt

SEQ ID NO: 168129 - DNA, 25 bp, Saccharomyces pastorianus
ctcaatgctgccataggtcaagatg

SEQ ID NO: 168130 - DNA, 25 bp, Saccharomyces pastorianus
gagctcaatgctgccataggtcaag

SEQ ID NO: 168131 - DNA, 25 bp, Saccharomyces pastorianus
aacatcgaaaacatagagctcaatg

SEQ ID NO: 168132 - DNA, 25 bp, Saccharomyces pastorianus
gattccacttatcccaatctgtaaa

SEQ ID NO: 168133 - DNA, 25 bp, Saccharomyces pastorianus
cccaatctgtaaatttttgctatgg

SEQ ID NO: 168134 - DNA, 25 bp, Saccharomyces pastorianus
ggcttgactttagtagcgattccac

SEQ ID NO: 168135 - DNA, 25 bp, Saccharomyces pastorianus
tttgctatggaaatataggccatcc

SEQ ID NO: 168136 - DNA, 25 bp, Saccharomyces pastorianus
aatgttcaaagatagcatgctccat

SEQ ID NO: 168137 - DNA, 25 bp, Saccharomyces pastorianus
agcatccaaaagtcaccatcttcgg

SEQ ID NO: 168138 - DNA, 25 bp, Saccharomyces pastorianus
ttcaaagatagcatgctccatctgt

SEQ ID NO: 168139 - DNA, 25 bp, Saccharomyces pastorianus
taggccatccaaaaggcatgataga

SEQ ID NO: 168140 - DNA, 25 bp, Saccharomyces pastorianus
attggcgcgatttggcttgacttta

SEQ ID NO: 168141 - DNA, 25 bp, Saccharomyces pastorianus
tagtagcgattccacttatcccaat

SEQ ID NO: 168142 - DNA, 25 bp, Saccharomyces pastorianus
tcaccatcttcggattggcgcgatt

SEQ ID NO: 168143 - DNA, 25 bp, Saccharomyces pastorianus
agatggctctatagtcaccgtcgtg

SEQ ID NO: 168144 - DNA, 25 bp, Saccharomyces pastorianus
ctccaagtacttgatcgatcatatc

SEQ ID NO: 168145 - DNA, 25 bp, Saccharomyces pastorianus
atcatatcaaggtagacggtgccgt

SEQ ID NO: 168146 - DNA, 25 bp, Saccharomyces pastorianus
atcagattcatctctataaggcaga

SEQ ID NO: 168147 - DNA, 25 bp, Saccharomyces pastorianus
ggcagaaccagtacaaattagtctt

SEQ ID NO: 168148 - DNA, 25 bp, Saccharomyces pastorianus
aagatcgtcagatcattgaccgttg

SEQ ID NO: 168149 - DNA, 25 bp, Saccharomyces pastorianus
tgacgttacatcaccaaccgaaaac

SEQ ID NO: 168150 - DNA, 25 bp, Saccharomyces pastorianus
ttgaccgttgacgttacatcaccaa

SEQ ID NO: 168151 - DNA, 25 bp, Saccharomyces pastorianus
ttaggcaaagccatcgaggtcaccg

SEQ ID NO: 168152 - DNA, 25 bp, Saccharomyces pastorianus
tcgaggtcaccgaagatggctctat

SEQ ID NO: 168153 - DNA, 25 bp, Saccharomyces pastorianus
tcgacccagcttcatactccaagta

SEQ ID NO: 168154 - DNA, 25 bp, Saccharomyces pastorianus
gggcgattacatcatttgttcctac

SEQ ID NO: 168155 - DNA, 25 bp, Saccharomyces pastorianus
caaccctggttttagtgaaagcgca

SEQ ID NO: 168156 - DNA, 25 bp, Saccharomyces pastorianus
gcgttgcacaaggataccggttctt

SEQ ID NO: 168157 - DNA, 25 bp, Saccharomyces pastorianus
tgaaagcgcaggtcacttcacccaa

SEQ ID NO: 168158 - DNA, 25 bp, Saccharomyces pastorianus
tgaaaacttggcacttggttacggt

SEQ ID NO: 168159 - DNA, 25 bp, Saccharomyces pastorianus
tggtctgacacactagcaacatatg

SEQ ID NO: 168160 - DNA, 25 bp, Saccharomyces pastorianus
aaaactacgctgactcctacgattg

SEQ ID NO: 168161 - DNA, 25 bp, Saccharomyces pastorianus
tttgttcctacaaagccgctggtaa

SEQ ID NO: 168162 - DNA, 25 bp, Saccharomyces pastorianus
gattgttcaggcaacctagtccact

SEQ ID NO: 168163 - DNA, 25 bp, Saccharomyces pastorianus
ccggctctgttgatgcctggtataa

SEQ ID NO: 168164 - DNA, 25 bp, Saccharomyces pastorianus
accggttctttgacatggtctgaca

SEQ ID NO: 168165 - DNA, 25 bp, Saccharomyces pastorianus
aatcaatggcttggcggtatctcaa

SEQ ID NO: 168166 - DNA, 25 bp, Saccharomyces pastorianus
gaaaacattgcgctgactttcccca

SEQ ID NO: 168167 - DNA, 25 bp, Saccharomyces pastorianus
tacactccgactaatgtccttctaa

SEQ ID NO: 168168 - DNA, 25 bp, Saccharomyces pastorianus
tagatatgctataccggcggaactt

SEQ ID NO: 168169 - DNA, 25 bp, Saccharomyces pastorianus
aagtgtgaccttttccgtagctaga

SEQ ID NO: 168170 - DNA, 25 bp, Saccharomyces pastorianus
ggcggaactttgttacacacggctc

SEQ ID NO: 168171 - DNA, 25 bp, Saccharomyces pastorianus
tgttgccacaacataagccgctttg

SEQ ID NO: 168172 - DNA, 25 bp, Saccharomyces pastorianus
ggtcacgacctattttttcttgcag

SEQ ID NO: 168173 - DNA, 25 bp, Saccharomyces pastorianus
tatgcaaccgtcttatttacactcc

SEQ ID NO: 168174 - DNA, 25 bp, Saccharomyces pastorianus
ataagcgtccttctgtggtttagat

SEQ ID NO: 168175 - DNA, 25 bp, Saccharomyces pastorianus
attcgacgcatttatccggtggtca

SEQ ID NO: 168176 - DNA, 25 bp, Saccharomyces pastorianus
aagcgaattgatagctctacataat

SEQ ID NO: 168177 - DNA, 25 bp, Saccharomyces pastorianus
tataccttgtcattctttattttat

SEQ ID NO: 168178 - DNA, 25 bp, Saccharomyces pastorianus
tacataataatgttactctatcttc

SEQ ID NO: 168179 - DNA, 25 bp, Saccharomyces pastorianus
gcgaattgatagctctacataataa

SEQ ID NO: 168180 - DNA, 25 bp, Saccharomyces pastorianus
tttataccttgtcattctttatttt

SEQ ID NO: 168181 - DNA, 25 bp, Saccharomyces pastorianus
ttttattacattatcaacccttgaa

SEQ ID NO: 168182 - DNA, 25 bp, Saccharomyces pastorianus
gatagctctacataataatgttact

SEQ ID NO: 168183 - DNA, 25 bp, Saccharomyces pastorianus
gactatttttcaatgtttatgacat

SEQ ID NO: 168184 - DNA, 25 bp, Saccharomyces pastorianus
taccttgtcattctttattttatta

SEQ ID NO: 168185 - DNA, 25 bp, Saccharomyces pastorianus
caaaaagcgaattgatagctctaca

SEQ ID NO: 168186 - DNA, 25 bp, Saccharomyces pastorianus
gtcattctttattttattacattat

SEQ ID NO: 168187 - DNA, 25 bp, Saccharomyces pastorianus
agaaagactttgttgtgtcggaatg

SEQ ID NO: 168188 - DNA, 25 bp, Saccharomyces pastorianus
aaagactttgttgtgtcggaatgtt

SEQ ID NO: 168189 - DNA, 25 bp, Saccharomyces pastorianus
agactttgttgtgtcggaatgttgg

SEQ ID NO: 168190 - DNA, 25 bp, Saccharomyces pastorianus
tgttgtgtcggaatgttggaataaa

SEQ ID NO: 168191 - DNA, 25 bp, Saccharomyces pastorianus
gactttgttgtgtcggaatgttgga

SEQ ID NO: 168192 - DNA, 25 bp, Saccharomyces pastorianus
ttgttgtgtcggaatgttggaataa

SEQ ID NO: 168193 - DNA, 25 bp, Saccharomyces pastorianus
gttgtgtcggaatgttggaataaaa

SEQ ID NO: 168194 - DNA, 25 bp, Saccharomyces pastorianus
actttgttgtgtcggaatgttggaa

SEQ ID NO: 168195 - DNA, 25 bp, Saccharomyces pastorianus
gaaagactttgttgtgtcggaatgt

SEQ ID NO: 168196 - DNA, 25 bp, Saccharomyces pastorianus
aagactttgttgtgtcggaatgttg

SEQ ID NO: 168197 - DNA, 25 bp, Saccharomyces pastorianus
tttgttgtgtcggaatgttggaata

SEQ ID NO: 168198 - DNA, 25 bp, Saccharomyces pastorianus
tatactctttcgaacacaacaccac

SEQ ID NO: 168199 - DNA, 25 bp, Saccharomyces pastorianus
tattgtttatttcaccttcgtcgca

SEQ ID NO: 168200 - DNA, 25 bp, Saccharomyces pastorianus
ggcacttcgatatcatcactcagtt

SEQ ID NO: 168201 - DNA, 25 bp, Saccharomyces pastorianus
tgggcgcaaactcaggcacttcgat

SEQ ID NO: 168202 - DNA, 25 bp, Saccharomyces pastorianus
aaatcaacggccagtacttcacaga

SEQ ID NO: 168203 - DNA, 25 bp, Saccharomyces pastorianus
gcggatccttttcaaatgtctcaat

SEQ ID NO: 168204 - DNA, 25 bp, Saccharomyces pastorianus
ctcagttcatactttttcgttccaa

SEQ ID NO: 168205 - DNA, 25 bp, Saccharomyces pastorianus
agaccaggcattgttcagttccttt

SEQ ID NO: 168206 - DNA, 25 bp, Saccharomyces pastorianus
accttcgtcgcaaatatactctttc

SEQ ID NO: 168207 - DNA, 25 bp, Saccharomyces pastorianus
gttccaacccaaatactcttcaatt

SEQ ID NO: 168208 - DNA, 25 bp, Saccharomyces pastorianus
ggaggtctcgatgtccttgcggatc

SEQ ID NO: 168209 - DNA, 25 bp, Saccharomyces pastorianus
ggttgttttctgatgtactcacatg

SEQ ID NO: 168210 - DNA, 25 bp, Saccharomyces pastorianus
tttcagatcaacattcaaacacggt

SEQ ID NO: 168211 - DNA, 25 bp, Saccharomyces pastorianus
ggttgttaggtggttgttttctgat

SEQ ID NO: 168212 - DNA, 25 bp, Saccharomyces pastorianus
gttttctgatgtactcacatgagaa

SEQ ID NO: 168213 - DNA, 25 bp, Saccharomyces pastorianus
tctgatgtactcacatgagaatcac

SEQ ID NO: 168214 - DNA, 25 bp, Saccharomyces pastorianus
gagagattaatttttgttttcagat

SEQ ID NO: 168215 - DNA, 25 bp, Saccharomyces pastorianus
acaatatccataataagtacgagag

SEQ ID NO: 168216 - DNA, 25 bp, Saccharomyces pastorianus
gatcaacattcaaacacggttgtta

SEQ ID NO: 168217 - DNA, 25 bp, Saccharomyces pastorianus
cattcaaacacggttgttaggtggt

SEQ ID NO: 168218 - DNA, 25 bp, Saccharomyces pastorianus
taggtggttgttttctgatgtactc

SEQ ID NO: 168219 - DNA, 25 bp, Saccharomyces pastorianus
gtggttgttttctgatgtactcaca

SEQ ID NO: 168220 - DNA, 25 bp, Saccharomyces pastorianus
gtggtcaagaccatagtgaaagcta

SEQ ID NO: 168221 - DNA, 25 bp, Saccharomyces pastorianus
gattgctctgaggaccatcaattag

SEQ ID NO: 168222 - DNA, 25 bp, Saccharomyces pastorianus
gctaaatttataccaaaggcgcggg

SEQ ID NO: 168223 - DNA, 25 bp, Saccharomyces pastorianus
tttactatacatttctgcagccggg

SEQ ID NO: 168224 - DNA, 25 bp, Saccharomyces pastorianus
tgcagccgggattgcgtctatttat

SEQ ID NO: 168225 - DNA, 25 bp, Saccharomyces pastorianus
cagggttccccatacctaaagatgg

SEQ ID NO: 168226 - DNA, 25 bp, Saccharomyces pastorianus
tattatgataaccttgctcaagtca

SEQ ID NO: 168227 - DNA, 25 bp, Saccharomyces pastorianus
gaggagacaacattgattgctctga

SEQ ID NO: 168228 - DNA, 25 bp, Saccharomyces pastorianus
ttgctcaagtcaaaccagggttccc

SEQ ID NO: 168229 - DNA, 25 bp, Saccharomyces pastorianus
gattgcgtctatttatgtggtcaag

SEQ ID NO: 168230 - DNA, 25 bp, Saccharomyces pastorianus
ggtagcgggcttagtgctgtaacaa

SEQ ID NO: 168231 - DNA, 25 bp, Saccharomyces pastorianus
gaaatcctccaagtggagtcggtaa

SEQ ID NO: 168232 - DNA, 25 bp, Saccharomyces pastorianus
ctgatgactggttctcaatatttat

SEQ ID NO: 168233 - DNA, 25 bp, Saccharomyces pastorianus
taggtgtacgaatataccaagtttc

SEQ ID NO: 168234 - DNA, 25 bp, Saccharomyces pastorianus
tagtctgatgactggttctcaatat

SEQ ID NO: 168235 - DNA, 25 bp, Saccharomyces pastorianus
aatagagaaatcctccaagtggagt

SEQ ID NO: 168236 - DNA, 25 bp, Saccharomyces pastorianus
gaaatttcattgttatcaagagcta

SEQ ID NO: 168237 - DNA, 25 bp, Saccharomyces pastorianus
ctccaagtggagtcggtaaatctac

SEQ ID NO: 168238 - DNA, 25 bp, Saccharomyces pastorianus
gtttccctcgagaatagagaaatcc

SEQ ID NO: 168239 - DNA, 25 bp, Saccharomyces pastorianus
gtggagtcggtaaatctacataata

SEQ ID NO: 168240 - DNA, 25 bp, Saccharomyces pastorianus
atataccaagtttccctcgagaata

SEQ ID NO: 168241 - DNA, 25 bp, Saccharomyces pastorianus
accaagtttccctcgagaatagaga

SEQ ID NO: 168242 - DNA, 25 bp, Saccharomyces pastorianus
attgttaggtcaggcattccctttc

SEQ ID NO: 168243 - DNA, 25 bp, Saccharomyces pastorianus
attccctttccacttttatgttcat

SEQ ID NO: 168244 - DNA, 25 bp, Saccharomyces pastorianus
tccacttttatgttcatttggacgc

SEQ ID NO: 168245 - DNA, 25 bp, Saccharomyces pastorianus
taggtcaggcattccctttccactt

SEQ ID NO: 168246 - DNA, 25 bp, Saccharomyces pastorianus
aatcacgataattgttaggtcaggc

SEQ ID NO: 168247 - DNA, 25 bp, Saccharomyces pastorianus
aattgttaggtcaggcattcccttt

SEQ ID NO: 168248 - DNA, 25 bp, Saccharomyces pastorianus
tgttaggtcaggcattccctttcca

SEQ ID NO: 168249 - DNA, 25 bp, Saccharomyces pastorianus
gataattgttaggtcaggcattccc

SEQ ID NO: 168250 - DNA, 25 bp, Saccharomyces pastorianus
ccctttccacttttatgttcatttg

SEQ ID NO: 168251 - DNA, 25 bp, Saccharomyces pastorianus
tttttgacacaataatcacgataat

SEQ ID NO: 168252 - DNA, 25 bp, Saccharomyces pastorianus
aggcattccctttccacttttatgt

SEQ ID NO: 168253 - DNA, 25 bp, Saccharomyces pastorianus
gcctatgatttaaaccacccaattt

SEQ ID NO: 168254 - DNA, 25 bp, Saccharomyces pastorianus
agagccttgatgtgtttaactgttc

SEQ ID NO: 168255 - DNA, 25 bp, Saccharomyces pastorianus
ttgcacgctgcgtacacagaaaaag

SEQ ID NO: 168256 - DNA, 25 bp, Saccharomyces pastorianus
tggaaccaccgcctatgatttaaac

SEQ ID NO: 168257 - DNA, 25 bp, Saccharomyces pastorianus
aaatggcgatgtgtctgttggctcc

SEQ ID NO: 168258 - DNA, 25 bp, Saccharomyces pastorianus
tgtctgttggctccactttggaaaa

SEQ ID NO: 168259 - DNA, 25 bp, Saccharomyces pastorianus
ggttcctgtatttcgttctagaaat

SEQ ID NO: 168260 - DNA, 25 bp, Saccharomyces pastorianus
aacatcttccgtaacgataaagcct

SEQ ID NO: 168261 - DNA, 25 bp, Saccharomyces pastorianus
cacccaatttccagagccttgatgt

SEQ ID NO: 168262 - DNA, 25 bp, Saccharomyces pastorianus
gataaagcctacacacctttaacca

SEQ ID NO: 168263 - DNA, 25 bp, Saccharomyces pastorianus
aacatcttagatttgcacgctgcgt

SEQ ID NO: 168264 - DNA, 25 bp, Saccharomyces pastorianus
gagaaatgttgctgacataatgaca

SEQ ID NO: 168265 - DNA, 25 bp, Saccharomyces pastorianus
gttgctgacataatgacaaaacctc

SEQ ID NO: 168266 - DNA, 25 bp, Saccharomyces pastorianus
gtactaacctgaacatataccacat

SEQ ID NO: 168267 - DNA, 25 bp, Saccharomyces pastorianus
gaacatataccacatcgacataaag

SEQ ID NO: 168268 - DNA, 25 bp, Saccharomyces pastorianus
acctgaacatataccacatcgacat

SEQ ID NO: 168269 - DNA, 25 bp, Saccharomyces pastorianus
ataccacatcgacataaagagaaat

SEQ ID NO: 168270 - DNA, 25 bp, Saccharomyces pastorianus
ctgaacatataccacatcgacataa

SEQ ID NO: 168271 - DNA, 25 bp, Saccharomyces pastorianus
tgctgacataatgacaaaacctctt

SEQ ID NO: 168272 - DNA, 25 bp, Saccharomyces pastorianus
taacctgaacatataccacatcgac

SEQ ID NO: 168273 - DNA, 25 bp, Saccharomyces pastorianus
gacaaaacctcttccattaaaatca

SEQ ID NO: 168274 - DNA, 25 bp, Saccharomyces pastorianus
catataccacatcgacataaagaga

SEQ ID NO: 168275 - DNA, 25 bp, Saccharomyces pastorianus
agatatgacgtatgagttaatccaa

SEQ ID NO: 168276 - DNA, 25 bp, Saccharomyces pastorianus
atccaatacctatgggatactagag

SEQ ID NO: 168277 - DNA, 25 bp, Saccharomyces pastorianus
gttaatccaatacctatgggatact

SEQ ID NO: 168278 - DNA, 25 bp, Saccharomyces pastorianus
gtatgagttaatccaatacctatgg

SEQ ID NO: 168279 - DNA, 25 bp, Saccharomyces pastorianus
aatacctatgggatactagagataa

SEQ ID NO: 168280 - DNA, 25 bp, Saccharomyces pastorianus
gacgtatgagttaatccaataccta

SEQ ID NO: 168281 - DNA, 25 bp, Saccharomyces pastorianus
atgagttaatccaatacctatggga

SEQ ID NO: 168282 - DNA, 25 bp, Saccharomyces pastorianus
gagttaatccaatacctatgggata

SEQ ID NO: 168283 - DNA, 25 bp, Saccharomyces pastorianus
tacctatgggatactagagataaac

SEQ ID NO: 168284 - DNA, 25 bp, Saccharomyces pastorianus
cgagtattagatatgacgtatgagt

SEQ ID NO: 168285 - DNA, 25 bp, Saccharomyces pastorianus
atatgacgtatgagttaatccaata

SEQ ID NO: 168286 - DNA, 25 bp, Saccharomyces pastorianus
gcaacccggtatgaaactattaagt

SEQ ID NO: 168287 - DNA, 25 bp, Saccharomyces pastorianus
agcaaagtggtgcaacccggtatga

SEQ ID NO: 168288 - DNA, 25 bp, Saccharomyces pastorianus
agtacgtggatggtcatgtgtgttc

SEQ ID NO: 168289 - DNA, 25 bp, Saccharomyces pastorianus
acccggtatgaaactattaagtcat

SEQ ID NO: 168290 - DNA, 25 bp, Saccharomyces pastorianus
gtgcaacccggtatgaaactattaa

SEQ ID NO: 168291 - DNA, 25 bp, Saccharomyces pastorianus
agtcatatctaataattcagtgtta

SEQ ID NO: 168292 - DNA, 25 bp, Saccharomyces pastorianus
gaaagaagtacgtggatggtcatgt

SEQ ID NO: 168293 - DNA, 25 bp, Saccharomyces pastorianus
aaagcaaagtggtgcaacccggtat

SEQ ID NO: 168294 - DNA, 25 bp, Saccharomyces pastorianus
aatcacctctagtaggtttaaagca

SEQ ID NO: 168295 - DNA, 25 bp, Saccharomyces pastorianus
ctacaatcacctctagtaggtttaa

SEQ ID NO: 168296 - DNA, 25 bp, Saccharomyces pastorianus
cctctagtaggtttaaagcaaagtg

SEQ ID NO: 168297 - DNA, 25 bp, Saccharomyces pastorianus
gtacaccgaacatagagtcagcacc

SEQ ID NO: 168298 - DNA, 25 bp, Saccharomyces pastorianus
atgaagacgcggagataagtacacc

SEQ ID NO: 168299 - DNA, 25 bp, Saccharomyces pastorianus
gagagtgctgttcctatcgagtcaa

SEQ ID NO: 168300 - DNA, 25 bp, Saccharomyces pastorianus
atttggtagaaagtgcctcaaggtt

SEQ ID NO: 168301 - DNA, 25 bp, Saccharomyces pastorianus
gcaagcattcacaacggtaaggaga

SEQ ID NO: 168302 - DNA, 25 bp, Saccharomyces pastorianus
acgatggtgtcgatttactaggaga

SEQ ID NO: 168303 - DNA, 25 bp, Saccharomyces pastorianus
catcaggcaaagcaagacgaaagtg

SEQ ID NO: 168304 - DNA, 25 bp, Saccharomyces pastorianus
gttcctatcgagtcaatcaccgaag

SEQ ID NO: 168305 - DNA, 25 bp, Saccharomyces pastorianus
gtcagcaccaggaaaacatcaggca

SEQ ID NO: 168306 - DNA, 25 bp, Saccharomyces pastorianus
gtgcctcaaggttggaaagtttact

SEQ ID NO: 168307 - DNA, 25 bp, Saccharomyces pastorianus
gggtcttctgcaagcattcacaacg

SEQ ID NO: 168308 - DNA, 25 bp, Saccharomyces pastorianus
ttagaagtgcggaaacataagtatt

SEQ ID NO: 168309 - DNA, 25 bp, Saccharomyces pastorianus
tgggcacagggcgagcgaatttttt

SEQ ID NO: 168310 - DNA, 25 bp, Saccharomyces pastorianus
acctttagaagtgcggaaacataag

SEQ ID NO: 168311 - DNA, 25 bp, Saccharomyces pastorianus
gaagtgcggaaacataagtattttt

SEQ ID NO: 168312 - DNA, 25 bp, Saccharomyces pastorianus
ccaaggaaaatccaaatgggcacag

SEQ ID NO: 168313 - DNA, 25 bp, Saccharomyces pastorianus
tacctttagaagtgcggaaacataa

SEQ ID NO: 168314 - DNA, 25 bp, Saccharomyces pastorianus
tgtttgtttacctttagaagtgcgg

SEQ ID NO: 168315 - DNA, 25 bp, Saccharomyces pastorianus
tttacctttagaagtgcggaaacat

SEQ ID NO: 168316 - DNA, 25 bp, Saccharomyces pastorianus
caaatgggcacagggcgagcgaatt

SEQ ID NO: 168317 - DNA, 25 bp, Saccharomyces pastorianus
taccaaggaaaatccaaatgggcac

SEQ ID NO: 168318 - DNA, 25 bp, Saccharomyces pastorianus
ttacctttagaagtgcggaaacata

SEQ ID NO: 168319 - DNA, 25 bp, Saccharomyces pastorianus
gaagcgggctacattaaaactgtcc

SEQ ID NO: 168320 - DNA, 25 bp, Saccharomyces pastorianus
aaaactgtcccaggcagctcattaa

SEQ ID NO: 168321 - DNA, 25 bp, Saccharomyces pastorianus
caacaaagattgtcgctggccaagt

SEQ ID NO: 168322 - DNA, 25 bp, Saccharomyces pastorianus
agctcattaacctccgttccaggat

SEQ ID NO: 168323 - DNA, 25 bp, Saccharomyces pastorianus
acctccgttccaggatttttcgctg

SEQ ID NO: 168324 - DNA, 25 bp, Saccharomyces pastorianus
gtcgacactgatgaagcgggctaca

SEQ ID NO: 168325 - DNA, 25 bp, Saccharomyces pastorianus
tacttctgctggctctggttgtatg

SEQ ID NO: 168326 - DNA, 25 bp, Saccharomyces pastorianus
cgctggccaagtcgacactgatgaa

SEQ ID NO: 168327 - DNA, 25 bp, Saccharomyces pastorianus
ggattctaaatacagacaagctatt

SEQ ID NO: 168328 - DNA, 25 bp, Saccharomyces pastorianus
tggctctggttgtatggccgctttg

SEQ ID NO: 168329 - DNA, 25 bp, Saccharomyces pastorianus
ctattacttctgctggctctggttg

SEQ ID NO: 168330 - DNA, 25 bp, Saccharomyces pastorianus
ttgacgccatggtcatccttgccgt

SEQ ID NO: 168331 - DNA, 25 bp, Saccharomyces pastorianus
caatcattctagcatgttccgcatg

SEQ ID NO: 168332 - DNA, 25 bp, Saccharomyces pastorianus
gttccttgacgccatggtcatcctt

SEQ ID NO: 168333 - DNA, 25 bp, Saccharomyces pastorianus
attctagcatgttccgcatgttcct

SEQ ID NO: 168334 - DNA, 25 bp, Saccharomyces pastorianus
tagcatgttccgcatgttccttgac

SEQ ID NO: 168335 - DNA, 25 bp, Saccharomyces pastorianus
aacgcaagcacacccggcgccaaaa

SEQ ID NO: 168336 - DNA, 25 bp, Saccharomyces pastorianus
agggcgccgttcacacaacgcaagc

SEQ ID NO: 168337 - DNA, 25 bp, Saccharomyces pastorianus
atgttccgcatgttccttgacgcca

SEQ ID NO: 168338 - DNA, 25 bp, Saccharomyces pastorianus
gcatgttccttgacgccatggtcat

SEQ ID NO: 168339 - DNA, 25 bp, Saccharomyces pastorianus
ctttcggcaatcattctagcatgtt

SEQ ID NO: 168340 - DNA, 25 bp, Saccharomyces pastorianus
ggcaatcattctagcatgttccgca

SEQ ID NO: 168341 - DNA, 25 bp, Saccharomyces pastorianus
gtaggcggtgccacgcaaattagga

SEQ ID NO: 168342 - DNA, 25 bp, Saccharomyces pastorianus
catgtaggcggtgccacgcaaatta

SEQ ID NO: 168343 - DNA, 25 bp, Saccharomyces pastorianus
caagatcaaccagttttggcatgta

SEQ ID NO: 168344 - DNA, 25 bp, Saccharomyces pastorianus
ttttggcatgtaggcggtgccacgc

SEQ ID NO: 168345 - DNA, 25 bp, Saccharomyces pastorianus
gacaagatcaaccagttttggcatg

SEQ ID NO: 168346 - DNA, 25 bp, Saccharomyces pastorianus
ggcatgtaggcggtgccacgcaaat

SEQ ID NO: 168347 - DNA, 25 bp, Saccharomyces pastorianus
aggcggtgccacgcaaattaggaat

SEQ ID NO: 168348 - DNA, 25 bp, Saccharomyces pastorianus
agatcaaccagttttggcatgtagg

SEQ ID NO: 168349 - DNA, 25 bp, Saccharomyces pastorianus
taggcggtgccacgcaaattaggaa

SEQ ID NO: 168350 - DNA, 25 bp, Saccharomyces pastorianus
gcatgtaggcggtgccacgcaaatt

SEQ ID NO: 168351 - DNA, 25 bp, Saccharomyces pastorianus
agttttggcatgtaggcggtgccac

SEQ ID NO: 168352 - DNA, 25 bp, Saccharomyces pastorianus
ttctattgttgggagtgctgccgct

SEQ ID NO: 168353 - DNA, 25 bp, Saccharomyces pastorianus
ggatcttaaaccttggcagcaatag

SEQ ID NO: 168354 - DNA, 25 bp, Saccharomyces pastorianus
agataaagatggctgtcctaggatc

SEQ ID NO: 168355 - DNA, 25 bp, Saccharomyces pastorianus
gcaaatgtcctatctgcgactctta

SEQ ID NO: 168356 - DNA, 25 bp, Saccharomyces pastorianus
aaatgtgatggcaaatgtcctatct

SEQ ID NO: 168357 - DNA, 25 bp, Saccharomyces pastorianus
gtcctatctgcgactcttatgtaag

SEQ ID NO: 168358 - DNA, 25 bp, Saccharomyces pastorianus
aatgacgcattctattgttgggagt

SEQ ID NO: 168359 - DNA, 25 bp, Saccharomyces pastorianus
gtatgtgaaaactgttcgtttggta

SEQ ID NO: 168360 - DNA, 25 bp, Saccharomyces pastorianus
ggctgtcctaggatcttaaaccttg

SEQ ID NO: 168361 - DNA, 25 bp, Saccharomyces pastorianus
gagtgctgccgcttaggtaaagata

SEQ ID NO: 168362 - DNA, 25 bp, Saccharomyces pastorianus
gcgactcttatgtaaggcccaaaag

SEQ ID NO: 168363 - DNA, 25 bp, Saccharomyces pastorianus
agaaacaatctttttgagcggcaca

SEQ ID NO: 168364 - DNA, 25 bp, Saccharomyces pastorianus
ataactaaccttgatttgacgcttt

SEQ ID NO: 168365 - DNA, 25 bp, Saccharomyces pastorianus
tttgacgcttttgagaaacaatctt

SEQ ID NO: 168366 - DNA, 25 bp, Saccharomyces pastorianus
aggtctaccggcagtcgcaattggg

SEQ ID NO: 168367 - DNA, 25 bp, Saccharomyces pastorianus
cttgatttgacgcttttgagaaaca

SEQ ID NO: 168368 - DNA, 25 bp, Saccharomyces pastorianus
acaatctttttgagcggcacagccc

SEQ ID NO: 168369 - DNA, 25 bp, Saccharomyces pastorianus
gagaaacaatctttttgagcggcac

SEQ ID NO: 168370 - DNA, 25 bp, Saccharomyces pastorianus
gggcataactaaccttgatttgacg

SEQ ID NO: 168371 - DNA, 25 bp, Saccharomyces pastorianus
ctaaccttgatttgacgcttttgag

SEQ ID NO: 168372 - DNA, 25 bp, Saccharomyces pastorianus
accggcagtcgcaattgggggcata

SEQ ID NO: 168373 - DNA, 25 bp, Saccharomyces pastorianus
aaccttgatttgacgcttttgagaa

SEQ ID NO: 168374 - DNA, 25 bp, Saccharomyces pastorianus
ccttttttgttggacttgactccat

SEQ ID NO: 168375 - DNA, 25 bp, Saccharomyces pastorianus
actttggtactttgtatggtggtca

SEQ ID NO: 168376 - DNA, 25 bp, Saccharomyces pastorianus
atggtgtagcatgccactttggtac

SEQ ID NO: 168377 - DNA, 25 bp, Saccharomyces pastorianus
aatgacgatgaactaccaataaggg

SEQ ID NO: 168378 - DNA, 25 bp, Saccharomyces pastorianus
gacttcgtcatatacccttttttgt

SEQ ID NO: 168379 - DNA, 25 bp, Saccharomyces pastorianus
tttcctccaggtgttaatgacgatg

SEQ ID NO: 168380 - DNA, 25 bp, Saccharomyces pastorianus
gacaataacgagattaccgaggaat

SEQ ID NO: 168381 - DNA, 25 bp, Saccharomyces pastorianus
gaatctgatagtccatttaaagaga

SEQ ID NO: 168382 - DNA, 25 bp, Saccharomyces pastorianus
attttgggccaatgattttgacggt

SEQ ID NO: 168383 - DNA, 25 bp, Saccharomyces pastorianus
gattttgacggtgtttttcctccag

SEQ ID NO: 168384 - DNA, 25 bp, Saccharomyces pastorianus
ggtggtcattatacagcctatgtga

SEQ ID NO: 168385 - DNA, 25 bp, Saccharomyces pastorianus
ggaggatcaaacacctgcttgttat

SEQ ID NO: 168386 - DNA, 25 bp, Saccharomyces pastorianus
gcatatgctacatacctctttgcaa

SEQ ID NO: 168387 - DNA, 25 bp, Saccharomyces pastorianus
gggagcatcggcgtactttaatcat

SEQ ID NO: 168388 - DNA, 25 bp, Saccharomyces pastorianus
tgagggactccatacagtacacttc

SEQ ID NO: 168389 - DNA, 25 bp, Saccharomyces pastorianus
aagagtttggcctgttgggagcatc

SEQ ID NO: 168390 - DNA, 25 bp, Saccharomyces pastorianus
aatttcacccattgtcgtaatcggc

SEQ ID NO: 168391 - DNA, 25 bp, Saccharomyces pastorianus
gtaatcggcctgtatctaatttccc

SEQ ID NO: 168392 - DNA, 25 bp, Saccharomyces pastorianus
gaccggacagaaccttaatcttcaa

SEQ ID NO: 168393 - DNA, 25 bp, Saccharomyces pastorianus
aatcatccatggtccgttctaacta

SEQ ID NO: 168394 - DNA, 25 bp, Saccharomyces pastorianus
aagttcgtacgtggtgtctaattca

SEQ ID NO: 168395 - DNA, 25 bp, Saccharomyces pastorianus
gaacatccgatacttcaactgcaaa

SEQ ID NO: 168396 - DNA, 25 bp, Saccharomyces pastorianus
gagagtggtttatatgacgaacata

SEQ ID NO: 168397 - DNA, 25 bp, Saccharomyces pastorianus
aaacgatctgatgcctcagggctgt

SEQ ID NO: 168398 - DNA, 25 bp, Saccharomyces pastorianus
aggctttgaccggaaggactgcaaa

SEQ ID NO: 168399 - DNA, 25 bp, Saccharomyces pastorianus
ctcagggctgtaggctttgaccgga

SEQ ID NO: 168400 - DNA, 25 bp, Saccharomyces pastorianus
atctgatgcctcagggctgtaggct

SEQ ID NO: 168401 - DNA, 25 bp, Saccharomyces pastorianus
gactgcaaaggagagtggtttatat

SEQ ID NO: 168402 - DNA, 25 bp, Saccharomyces pastorianus
gctgtaggctttgaccggaaggact

SEQ ID NO: 168403 - DNA, 25 bp, Saccharomyces pastorianus
agtccattatgggtaaacgatctga

SEQ ID NO: 168404 - DNA, 25 bp, Saccharomyces pastorianus
ttgaccggaaggactgcaaaggaga

SEQ ID NO: 168405 - DNA, 25 bp, Saccharomyces pastorianus
atgggtaaacgatctgatgcctcag

SEQ ID NO: 168406 - DNA, 25 bp, Saccharomyces pastorianus
atgcctcagggctgtaggctttgac

SEQ ID NO: 168407 - DNA, 25 bp, Saccharomyces pastorianus
agatcaggcaacctcaatgagatag

SEQ ID NO: 168408 - DNA, 25 bp, Saccharomyces pastorianus
gtatcgtgacttcagataattacac

SEQ ID NO: 168409 - DNA, 25 bp, Saccharomyces pastorianus
gaacatatgcctagatgatctaact

SEQ ID NO: 168410 - DNA, 25 bp, Saccharomyces pastorianus
atctaactagatcaggcaacctcaa

SEQ ID NO: 168411 - DNA, 25 bp, Saccharomyces pastorianus
gacttcagataattacactcttcaa

SEQ ID NO: 168412 - DNA, 25 bp, Saccharomyces pastorianus
gacacgcaatggttccgacattaag

SEQ ID NO: 168413 - DNA, 25 bp, Saccharomyces pastorianus
catctttcaaaagtatcgtgacttc

SEQ ID NO: 168414 - DNA, 25 bp, Saccharomyces pastorianus
tacactcttcaaagacacgcaatgg

SEQ ID NO: 168415 - DNA, 25 bp, Saccharomyces pastorianus
caaagacacgcaatggttccgacat

SEQ ID NO: 168416 - DNA, 25 bp, Saccharomyces pastorianus
ggtgcacacagaacatatgcctaga

SEQ ID NO: 168417 - DNA, 25 bp, Saccharomyces pastorianus
ggttccgacattaaggtgcacacag

SEQ ID NO: 168418 - DNA, 25 bp, Saccharomyces pastorianus
aataaaaggcaatgctaactattca

SEQ ID NO: 168419 - DNA, 25 bp, Saccharomyces pastorianus
actgaaattccagacatgtttacta

SEQ ID NO: 168420 - DNA, 25 bp, Saccharomyces pastorianus
attccagacatgtttactacagaaa

SEQ ID NO: 168421 - DNA, 25 bp, Saccharomyces pastorianus
acactgaaattccagacatgtttac

SEQ ID NO: 168422 - DNA, 25 bp, Saccharomyces pastorianus
gaaattccagacatgtttactacag

SEQ ID NO: 168423 - DNA, 25 bp, Saccharomyces pastorianus
aaattccagacatgtttactacaga

SEQ ID NO: 168424 - DNA, 25 bp, Saccharomyces pastorianus
tatcgacaaaacactgaaattccag

SEQ ID NO: 168425 - DNA, 25 bp, Saccharomyces pastorianus
aaatgattatcgacaaaacactgaa

SEQ ID NO: 168426 - DNA, 25 bp, Saccharomyces pastorianus
gaaggttatgaaaatgattatcgac

SEQ ID NO: 168427 - DNA, 25 bp, Saccharomyces pastorianus
gtttactacagaaaaactagctgaa

SEQ ID NO: 168428 - DNA, 25 bp, Saccharomyces pastorianus
aaactagctgaaataaaaggcaatg

SEQ ID NO: 168429 - DNA, 25 bp, Saccharomyces pastorianus
tgcctccaatcattcaaaacactaa

SEQ ID NO: 168430 - DNA, 25 bp, Saccharomyces pastorianus
actaatgatactagcgtcgcacgtc

SEQ ID NO: 168431 - DNA, 25 bp, Saccharomyces pastorianus
aatgatactagcgtcgcacgtccaa

SEQ ID NO: 168432 - DNA, 25 bp, Saccharomyces pastorianus
tagcgtcgcacgtccaaataacctt

SEQ ID NO: 168433 - DNA, 25 bp, Saccharomyces pastorianus
aaaacactaatgatactagcgtcgc

SEQ ID NO: 168434 - DNA, 25 bp, Saccharomyces pastorianus
acactaatgatactagcgtcgcacg

SEQ ID NO: 168435 - DNA, 25 bp, Saccharomyces pastorianus
tgatactagcgtcgcacgtccaaat

SEQ ID NO: 168436 - DNA, 25 bp, Saccharomyces pastorianus
gcgtcgcacgtccaaataaccttaa

SEQ ID NO: 168437 - DNA, 25 bp, Saccharomyces pastorianus
tactagcgtcgcacgtccaaataac

SEQ ID NO: 168438 - DNA, 25 bp, Saccharomyces pastorianus
gtcgcacgtccaaataaccttaaat

SEQ ID NO: 168439 - DNA, 25 bp, Saccharomyces pastorianus
gcacgtccaaataaccttaaatcaa

SEQ ID NO: 168440 - DNA, 25 bp, Saccharomyces pastorianus
agttgcgttctgataggttggctga

SEQ ID NO: 168441 - DNA, 25 bp, Saccharomyces pastorianus
aatatatggcgtttccgctacttct

SEQ ID NO: 168442 - DNA, 25 bp, Saccharomyces pastorianus
ttgctattgaacctgtgttcccagc

SEQ ID NO: 168443 - DNA, 25 bp, Saccharomyces pastorianus
tcatctgctcagttgcgttctgata

SEQ ID NO: 168444 - DNA, 25 bp, Saccharomyces pastorianus
taaatgtcgaaatcgcgcgcgtttg

SEQ ID NO: 168445 - DNA, 25 bp, Saccharomyces pastorianus
ggttggctgaggtccactttggaac

SEQ ID NO: 168446 - DNA, 25 bp, Saccharomyces pastorianus
aaagcttgtgtagcaccttcatctg

SEQ ID NO: 168447 - DNA, 25 bp, Saccharomyces pastorianus
tgtgaagttatatttgtccccagaa

SEQ ID NO: 168448 - DNA, 25 bp, Saccharomyces pastorianus
atggattttactgttattgcggtta

SEQ ID NO: 168449 - DNA, 25 bp, Saccharomyces pastorianus
tttccgctacttctccaattgatgg

SEQ ID NO: 168450 - DNA, 25 bp, Saccharomyces pastorianus
agccgctatcctgacgaatccaagg

SEQ ID NO: 168451 - DNA, 25 bp, Saccharomyces pastorianus
aatcattgaaagctctttgtcgacg

SEQ ID NO: 168452 - DNA, 25 bp, Saccharomyces pastorianus
ctaaggtttcgtcaagtaattccag

SEQ ID NO: 168453 - DNA, 25 bp, Saccharomyces pastorianus
aattcgaccgtttctaccacaacat

SEQ ID NO: 168454 - DNA, 25 bp, Saccharomyces pastorianus
gaaagctctttgtcgacgggttaca

SEQ ID NO: 168455 - DNA, 25 bp, Saccharomyces pastorianus
tgtcgacgggttacaattcgaccgt

SEQ ID NO: 168456 - DNA, 25 bp, Saccharomyces pastorianus
gttcacttgaatctaaggtttcgtc

SEQ ID NO: 168457 - DNA, 25 bp, Saccharomyces pastorianus
tacaattcgaccgtttctaccacaa

SEQ ID NO: 168458 - DNA, 25 bp, Saccharomyces pastorianus
gtaattccagaatggccacttccaa

SEQ ID NO: 168459 - DNA, 25 bp, Saccharomyces pastorianus
atccgccgcatctagttcacttgaa

SEQ ID NO: 168460 - DNA, 25 bp, Saccharomyces pastorianus
ttccagaatggccacttccaaaacc

SEQ ID NO: 168461 - DNA, 25 bp, Saccharomyces pastorianus
gccgcatctagttcacttgaatcta

SEQ ID NO: 168462 - DNA, 25 bp, Saccharomyces pastorianus
ttcatctccctttctttattcacgg

SEQ ID NO: 168463 - DNA, 25 bp, Saccharomyces pastorianus
gtcctttcatctccctttctttatt

SEQ ID NO: 168464 - DNA, 25 bp, Saccharomyces pastorianus
tttcatctccctttctttattcacg

SEQ ID NO: 168465 - DNA, 25 bp, Saccharomyces pastorianus
agaaagctattgcagctgctacggc

SEQ ID NO: 168466 - DNA, 25 bp, Saccharomyces pastorianus
ttgcagctgctacggcgtcctttca

SEQ ID NO: 168467 - DNA, 25 bp, Saccharomyces pastorianus
agctattgcagctgctacggcgtcc

SEQ ID NO: 168468 - DNA, 25 bp, Saccharomyces pastorianus
atctccctttctttattcacggcct

SEQ ID NO: 168469 - DNA, 25 bp, Saccharomyces pastorianus
tttctttattcacggccttaagagc

SEQ ID NO: 168470 - DNA, 25 bp, Saccharomyces pastorianus
aaagctattgcagctgctacggcgt

SEQ ID NO: 168471 - DNA, 25 bp, Saccharomyces pastorianus
atgaccgaaagaaagctattgcagc

SEQ ID NO: 168472 - DNA, 25 bp, Saccharomyces pastorianus
tattgcagctgctacggcgtccttt

SEQ ID NO: 168473 - DNA, 25 bp, Saccharomyces pastorianus
gaaccaagaatttattctgctttaa

SEQ ID NO: 168474 - DNA, 25 bp, Saccharomyces pastorianus
ttctgctttaattgatggccattgt

SEQ ID NO: 168475 - DNA, 25 bp, Saccharomyces pastorianus
tgctttaattgatggccattgtgaa

SEQ ID NO: 168476 - DNA, 25 bp, Saccharomyces pastorianus
agacgccccaaatttagaattcaat

SEQ ID NO: 168477 - DNA, 25 bp, Saccharomyces pastorianus
gacaaccaaaatcacccgttgattt

SEQ ID NO: 168478 - DNA, 25 bp, Saccharomyces pastorianus
attcaattgtctggtaatccaattc

SEQ ID NO: 168479 - DNA, 25 bp, Saccharomyces pastorianus
tgacaaccaaaatcacccgttgatt

SEQ ID NO: 168480 - DNA, 25 bp, Saccharomyces pastorianus
aatctgacaaccaaaatcacccgtt

SEQ ID NO: 168481 - DNA, 25 bp, Saccharomyces pastorianus
tagaattcaattgtctggtaatcca

SEQ ID NO: 168482 - DNA, 25 bp, Saccharomyces pastorianus
aatacattcaactgattgatgctaa

SEQ ID NO: 168483 - DNA, 25 bp, Saccharomyces pastorianus
acgccccaaatttagaattcaattg

SEQ ID NO: 168484 - DNA, 25 bp, Saccharomyces pastorianus
tttacactcacctaggttctcatga

SEQ ID NO: 168485 - DNA, 25 bp, Saccharomyces pastorianus
ggttctcatgagtattgctagctag

SEQ ID NO: 168486 - DNA, 25 bp, Saccharomyces pastorianus
ctagtgcgagtttgatctatacttc

SEQ ID NO: 168487 - DNA, 25 bp, Saccharomyces pastorianus
tggaggatttttctctgctttctaa

SEQ ID NO: 168488 - DNA, 25 bp, Saccharomyces pastorianus
gagtaagtatggaagactgttaact

SEQ ID NO: 168489 - DNA, 25 bp, Saccharomyces pastorianus
ggaacttgatccatactgagtaagt

SEQ ID NO: 168490 - DNA, 25 bp, Saccharomyces pastorianus
agaaggttcactgctttacactcac

SEQ ID NO: 168491 - DNA, 25 bp, Saccharomyces pastorianus
gactgttaacttggaggatttttct

SEQ ID NO: 168492 - DNA, 25 bp, Saccharomyces pastorianus
ttgctagctagtgcgagtttgatct

SEQ ID NO: 168493 - DNA, 25 bp, Saccharomyces pastorianus
gtggacaaactgtggaacttgatcc

SEQ ID NO: 168494 - DNA, 25 bp, Saccharomyces pastorianus
tcactgctttacactcacctaggtt

SEQ ID NO: 168495 - DNA, 25 bp, Saccharomyces pastorianus
gtgatgtcactaaacccgagagatg

SEQ ID NO: 168496 - DNA, 25 bp, Saccharomyces pastorianus
agaggaaactaaagtatctgttgat

SEQ ID NO: 168497 - DNA, 25 bp, Saccharomyces pastorianus
ttgtgatgtcactaaacccgagaga

SEQ ID NO: 168498 - DNA, 25 bp, Saccharomyces pastorianus
gatgtcactaaacccgagagatgtt

SEQ ID NO: 168499 - DNA, 25 bp, Saccharomyces pastorianus
gttgttgaccgggaaaatgtagatt

SEQ ID NO: 168500 - DNA, 25 bp, Saccharomyces pastorianus
tcccttcattgaatattctgataga

SEQ ID NO: 168501 - DNA, 25 bp, Saccharomyces pastorianus
cactaaacccgagagatgttcgctt

SEQ ID NO: 168502 - DNA, 25 bp, Saccharomyces pastorianus
aaaggaaatacagccgacagaaagt

SEQ ID NO: 168503 - DNA, 25 bp, Saccharomyces pastorianus
tacagccgacagaaagtaagagagg

SEQ ID NO: 168504 - DNA, 25 bp, Saccharomyces pastorianus
ttgaaagttgttgaccgggaaaatg

SEQ ID NO: 168505 - DNA, 25 bp, Saccharomyces pastorianus
tcatcccttcattgaatattctgat

SEQ ID NO: 168506 - DNA, 25 bp, Saccharomyces pastorianus
actcactctggcttgggtcattatt

SEQ ID NO: 168507 - DNA, 25 bp, Saccharomyces pastorianus
gggtcattattgatttgcccgagac

SEQ ID NO: 168508 - DNA, 25 bp, Saccharomyces pastorianus
tgaacttttcagtcaaggtgtccct

SEQ ID NO: 168509 - DNA, 25 bp, Saccharomyces pastorianus
aactggcagaaccttgagcgaaatc

SEQ ID NO: 168510 - DNA, 25 bp, Saccharomyces pastorianus
ggtgtccctgctagaaaatttgcat

SEQ ID NO: 168511 - DNA, 25 bp, Saccharomyces pastorianus
gcatctacagtagttgatccctttg

SEQ ID NO: 168512 - DNA, 25 bp, Saccharomyces pastorianus
gatttgcccgagacaactggcagaa

SEQ ID NO: 168513 - DNA, 25 bp, Saccharomyces pastorianus
ctacagtagttgatccctttggaaa

SEQ ID NO: 168514 - DNA, 25 bp, Saccharomyces pastorianus
atcgtccgcaagttgataacattat

SEQ ID NO: 168515 - DNA, 25 bp, Saccharomyces pastorianus
gagggctacaaaatcgtccgcaagt

SEQ ID NO: 168516 - DNA, 25 bp, Saccharomyces pastorianus
ggtggctttacgcactcactctggc

SEQ ID NO: 168517 - DNA, 25 bp, Saccharomyces pastorianus
cgagatatacggttttgattatgac

SEQ ID NO: 168518 - DNA, 25 bp, Saccharomyces pastorianus
gattatgaccatggaccacaagagg

SEQ ID NO: 168519 - DNA, 25 bp, Saccharomyces pastorianus
gatatacggttttgattatgaccat

SEQ ID NO: 168520 - DNA, 25 bp, Saccharomyces pastorianus
ttatgaccatggaccacaagaggca

SEQ ID NO: 168521 - DNA, 25 bp, Saccharomyces pastorianus
acggttttgattatgaccatggacc

SEQ ID NO: 168522 - DNA, 25 bp, Saccharomyces pastorianus
tatacggttttgattatgaccatgg

SEQ ID NO: 168523 - DNA, 25 bp, Saccharomyces pastorianus
tatgaccatggaccacaagaggcag

SEQ ID NO: 168524 - DNA, 25 bp, Saccharomyces pastorianus
ccgagatatacggttttgattatga

SEQ ID NO: 168525 - DNA, 25 bp, Saccharomyces pastorianus
tgattatgaccatggaccacaagag

SEQ ID NO: 168526 - DNA, 25 bp, Saccharomyces pastorianus
cggttttgattatgaccatggacca

SEQ ID NO: 168527 - DNA, 25 bp, Saccharomyces pastorianus
tacggttttgattatgaccatggac

SEQ ID NO: 168528 - DNA, 25 bp, Saccharomyces pastorianus
tggcaccagttcctcatcagatatt

SEQ ID NO: 168529 - DNA, 25 bp, Saccharomyces pastorianus
cagttcctcatcagatattctccat

SEQ ID NO: 168530 - DNA, 25 bp, Saccharomyces pastorianus
gacatgggacagaagcagctctatt

SEQ ID NO: 168531 - DNA, 25 bp, Saccharomyces pastorianus
tttaaacgatcgctgactggcacca

SEQ ID NO: 168532 - DNA, 25 bp, Saccharomyces pastorianus
aaggcatatctttaagacatgggac

SEQ ID NO: 168533 - DNA, 25 bp, Saccharomyces pastorianus
gttgctatttaaacgatcgctgact

SEQ ID NO: 168534 - DNA, 25 bp, Saccharomyces pastorianus
ccctcatgggttgttgctatttaaa

SEQ ID NO: 168535 - DNA, 25 bp, Saccharomyces pastorianus
aaacgatcgctgactggcaccagtt

SEQ ID NO: 168536 - DNA, 25 bp, Saccharomyces pastorianus
gttcctcatcagatattctccatat

SEQ ID NO: 168537 - DNA, 25 bp, Saccharomyces pastorianus
ttccctcatgggttgttgctattta

SEQ ID NO: 168538 - DNA, 25 bp, Saccharomyces pastorianus
atttatacccattccctcatgggtt

SEQ ID NO: 168539 - DNA, 25 bp, Saccharomyces pastorianus
tccagaggcggttacggtggctcta

SEQ ID NO: 168540 - DNA, 25 bp, Saccharomyces pastorianus
ggccccccaagagatgcgtacagaa

SEQ ID NO: 168541 - DNA, 25 bp, Saccharomyces pastorianus
gctctagaggcggttacgacagtcc

SEQ ID NO: 168542 - DNA, 25 bp, Saccharomyces pastorianus
aggcggttacggtggctctagaggc

SEQ ID NO: 168543 - DNA, 25 bp, Saccharomyces pastorianus
tacgacggccccagaggtggctttg

SEQ ID NO: 168544 - DNA, 25 bp, Saccharomyces pastorianus
cagaggtggctttggcgccccaaga

SEQ ID NO: 168545 - DNA, 25 bp, Saccharomyces pastorianus
attatggccccccaagagatgcgta

SEQ ID NO: 168546 - DNA, 25 bp, Saccharomyces pastorianus
tctagaggcggttacgacagtccaa

SEQ ID NO: 168547 - DNA, 25 bp, Saccharomyces pastorianus
agaggcggttacgacggccccagag

SEQ ID NO: 168548 - DNA, 25 bp, Saccharomyces pastorianus
tttggcgccccaagaggtggctacg

SEQ ID NO: 168549 - DNA, 25 bp, Saccharomyces pastorianus
ttacgacggccccagaggtggcttt

SEQ ID NO: 168550 - DNA, 25 bp, Saccharomyces pastorianus
catttgactggtccgactgtcgagg

SEQ ID NO: 168551 - DNA, 25 bp, Saccharomyces pastorianus
gttccttgtcaatacttttccgatt

SEQ ID NO: 168552 - DNA, 25 bp, Saccharomyces pastorianus
aatacttttccgatttgctaggctt

SEQ ID NO: 168553 - DNA, 25 bp, Saccharomyces pastorianus
agctcgctacaaactttggtaccga

SEQ ID NO: 168554 - DNA, 25 bp, Saccharomyces pastorianus
ttttttatacttgctctatgcgaaa

SEQ ID NO: 168555 - DNA, 25 bp, Saccharomyces pastorianus
tgctaggcttgttgcgcccatttga

SEQ ID NO: 168556 - DNA, 25 bp, Saccharomyces pastorianus
aaattaagtggccttgttggcgcaa

SEQ ID NO: 168557 - DNA, 25 bp, Saccharomyces pastorianus
agctttctctgctatcattctcatt

SEQ ID NO: 168558 - DNA, 25 bp, Saccharomyces pastorianus
actgtcgaggctggtctggttcatc

SEQ ID NO: 168559 - DNA, 25 bp, Saccharomyces pastorianus
gtttggatcatcaacaagctcgcta

SEQ ID NO: 168560 - DNA, 25 bp, Saccharomyces pastorianus
tctggttcatcttttggttcgtttg

SEQ ID NO: 168561 - DNA, 25 bp, Saccharomyces pastorianus
attgctgcatggatcggtcgtgtgc

SEQ ID NO: 168562 - DNA, 25 bp, Saccharomyces pastorianus
atcggtcgtgtgcatttccaattac

SEQ ID NO: 168563 - DNA, 25 bp, Saccharomyces pastorianus
gaagactacaagcacatacataggt

SEQ ID NO: 168564 - DNA, 25 bp, Saccharomyces pastorianus
gatgctctgcggataaaaatcgttg

SEQ ID NO: 168565 - DNA, 25 bp, Saccharomyces pastorianus
gcaagctttgcattgattgctgcat

SEQ ID NO: 168566 - DNA, 25 bp, Saccharomyces pastorianus
aggaacatccatcttcaacagaaag

SEQ ID NO: 168567 - DNA, 25 bp, Saccharomyces pastorianus
agtgacgggctacgcaagctttgca

SEQ ID NO: 168568 - DNA, 25 bp, Saccharomyces pastorianus
ttccaattaccgatgctctgcggat

SEQ ID NO: 168569 - DNA, 25 bp, Saccharomyces pastorianus
gtacgcatcgctgagtgacgggcta

SEQ ID NO: 168570 - DNA, 25 bp, Saccharomyces pastorianus
gatacagctttacaggaacatccat

SEQ ID NO: 168571 - DNA, 25 bp, Saccharomyces pastorianus
atgtatattagtacgcatcgctgag

SEQ ID NO: 168572 - DNA, 25 bp, Saccharomyces pastorianus
aacagacggtctcttgatttctcct

SEQ ID NO: 168573 - DNA, 25 bp, Saccharomyces pastorianus
ataacttttcactttgactcgattg

SEQ ID NO: 168574 - DNA, 25 bp, Saccharomyces pastorianus
gtctcttgatttctccttctagtag

SEQ ID NO: 168575 - DNA, 25 bp, Saccharomyces pastorianus
ctccttctagtagcagtaatactca

SEQ ID NO: 168576 - DNA, 25 bp, Saccharomyces pastorianus
atggaaaacggaatctgaatcactt

SEQ ID NO: 168577 - DNA, 25 bp, Saccharomyces pastorianus
actttgactcgattgtgggcagcta

SEQ ID NO: 168578 - DNA, 25 bp, Saccharomyces pastorianus
atggaagtcgttgttgtcttgcaac

SEQ ID NO: 168579 - DNA, 25 bp, Saccharomyces pastorianus
tgactcgattgtgggcagctaataa

SEQ ID NO: 168580 - DNA, 25 bp, Saccharomyces pastorianus
gtaatactcataacttttcactttg

SEQ ID NO: 168581 - DNA, 25 bp, Saccharomyces pastorianus
ttgatttctccttctagtagcagta

SEQ ID NO: 168582 - DNA, 25 bp, Saccharomyces pastorianus
gttgtcttgcaacagacggtctctt

SEQ ID NO: 168583 - DNA, 25 bp, Saccharomyces pastorianus
gcaccaaatcgcctgtaaataataa

SEQ ID NO: 168584 - DNA, 25 bp, Saccharomyces pastorianus
tttgccgtttcggaaatagactttg

SEQ ID NO: 168585 - DNA, 25 bp, Saccharomyces pastorianus
ttttttcttccctgagctctatttc

SEQ ID NO: 168586 - DNA, 25 bp, Saccharomyces pastorianus
tctatttctttttcccacacggata

SEQ ID NO: 168587 - DNA, 25 bp, Saccharomyces pastorianus
ttgcaaaagaaaagacgtggctcgg

SEQ ID NO: 168588 - DNA, 25 bp, Saccharomyces pastorianus
gagaagaaatccaccgcgatgacac

SEQ ID NO: 168589 - DNA, 25 bp, Saccharomyces pastorianus
gaaatagactttggcgttccacgcc

SEQ ID NO: 168590 - DNA, 25 bp, Saccharomyces pastorianus
cgagattttctcgagttctttatat

SEQ ID NO: 168591 - DNA, 25 bp, Saccharomyces pastorianus
ttttcccacacggatattccgcttg

SEQ ID NO: 168592 - DNA, 25 bp, Saccharomyces pastorianus
tgagctctatttctttttcccacac

SEQ ID NO: 168593 - DNA, 25 bp, Saccharomyces pastorianus
gatgacacacacagcaccaaatcgc

SEQ ID NO: 168594 - DNA, 25 bp, Saccharomyces pastorianus
gtgaaatttcatgattttggcttta

SEQ ID NO: 168595 - DNA, 25 bp, Saccharomyces pastorianus
gaatcagtacttgttcggtttatga

SEQ ID NO: 168596 - DNA, 25 bp, Saccharomyces pastorianus
gagacatttcccaataaacttactg

SEQ ID NO: 168597 - DNA, 25 bp, Saccharomyces pastorianus
atctctgagagacatttcccaataa

SEQ ID NO: 168598 - DNA, 25 bp, Saccharomyces pastorianus
taaaagaggcatttctttttccatt

SEQ ID NO: 168599 - DNA, 25 bp, Saccharomyces pastorianus
ggctttattgtttgtaatctttcat

SEQ ID NO: 168600 - DNA, 25 bp, Saccharomyces pastorianus
gagaatagagagttatcacatataa

SEQ ID NO: 168601 - DNA, 25 bp, Saccharomyces pastorianus
tcaatgagccaatctctgagagaca

SEQ ID NO: 168602 - DNA, 25 bp, Saccharomyces pastorianus
tgttcggtttatgaaatacttcgta

SEQ ID NO: 168603 - DNA, 25 bp, Saccharomyces pastorianus
tagtgctctaggcaacttcaatgag

SEQ ID NO: 168604 - DNA, 25 bp, Saccharomyces pastorianus
gggcatatttagtgctctaggcaac

SEQ ID NO: 168605 - DNA, 25 bp, Saccharomyces pastorianus
gatgatcgaagaccttcttagaagg

SEQ ID NO: 168606 - DNA, 25 bp, Saccharomyces pastorianus
gctttcagatgatcgaagaccttct

SEQ ID NO: 168607 - DNA, 25 bp, Saccharomyces pastorianus
ggcaatagttagcttgtcgtttgac

SEQ ID NO: 168608 - DNA, 25 bp, Saccharomyces pastorianus
aactatccttaggaagatatgcatt

SEQ ID NO: 168609 - DNA, 25 bp, Saccharomyces pastorianus
attagggcaatagttagcttgtcgt

SEQ ID NO: 168610 - DNA, 25 bp, Saccharomyces pastorianus
gagcgagagctgctttcagatgatc

SEQ ID NO: 168611 - DNA, 25 bp, Saccharomyces pastorianus
gagctgctttcagatgatcgaagac

SEQ ID NO: 168612 - DNA, 25 bp, Saccharomyces pastorianus
gaggaaggtttgacttcgccatgat

SEQ ID NO: 168613 - DNA, 25 bp, Saccharomyces pastorianus
gccatgataagagcgagagctgctt

SEQ ID NO: 168614 - DNA, 25 bp, Saccharomyces pastorianus
aaggtttgacttcgccatgataaga

SEQ ID NO: 168615 - DNA, 25 bp, Saccharomyces pastorianus
cttcttagaaggagtattagggcaa

SEQ ID NO: 168616 - DNA, 25 bp, Saccharomyces pastorianus
gagcgtgtattccttatcaaatcta

SEQ ID NO: 168617 - DNA, 25 bp, Saccharomyces pastorianus
acagaaacttatattttgacgccga

SEQ ID NO: 168618 - DNA, 25 bp, Saccharomyces pastorianus
ggatctgtcctggtttaccgctaag

SEQ ID NO: 168619 - DNA, 25 bp, Saccharomyces pastorianus
acaaagatccttatggttgccgttt

SEQ ID NO: 168620 - DNA, 25 bp, Saccharomyces pastorianus
ttttgtgtttttctggttccaacag

SEQ ID NO: 168621 - DNA, 25 bp, Saccharomyces pastorianus
gaatcttattcttggatgtaccggt

SEQ ID NO: 168622 - DNA, 25 bp, Saccharomyces pastorianus
atggttgccgtttggatctgtcctg

SEQ ID NO: 168623 - DNA, 25 bp, Saccharomyces pastorianus
aagtcacacaagttcgattcacgaa

SEQ ID NO: 168624 - DNA, 25 bp, Saccharomyces pastorianus
cagggcaaccattctgaaaatcgtt

SEQ ID NO: 168625 - DNA, 25 bp, Saccharomyces pastorianus
aaatctaggtacaacaagtcacaca

SEQ ID NO: 168626 - DNA, 25 bp, Saccharomyces pastorianus
tggtttaccgctaaggtttcctgag

SEQ ID NO: 168627 - DNA, 25 bp, Saccharomyces pastorianus
tattctctctcaactagtagtctta

SEQ ID NO: 168628 - DNA, 25 bp, Saccharomyces pastorianus
ttctctctcaactagtagtcttact

SEQ ID NO: 168629 - DNA, 25 bp, Saccharomyces pastorianus
ctattctctctcaactagtagtctt

SEQ ID NO: 168630 - DNA, 25 bp, Saccharomyces pastorianus
aatcaactattctctctcaactagt

SEQ ID NO: 168631 - DNA, 25 bp, Saccharomyces pastorianus
gtagtcttactacgagtatattata

SEQ ID NO: 168632 - DNA, 25 bp, Saccharomyces pastorianus
aaatcaactattctctctcaactag

SEQ ID NO: 168633 - DNA, 25 bp, Saccharomyces pastorianus
caactagtagtcttactacgagtat

SEQ ID NO: 168634 - DNA, 25 bp, Saccharomyces pastorianus
aaaaatcaactattctctctcaact

SEQ ID NO: 168635 - DNA, 25 bp, Saccharomyces pastorianus
tcaactattctctctcaactagtag

SEQ ID NO: 168636 - DNA, 25 bp, Saccharomyces pastorianus
aactattctctctcaactagtagtc

SEQ ID NO: 168637 - DNA, 25 bp, Saccharomyces pastorianus
tctctcaactagtagtcttactacg

SEQ ID NO: 168638 - DNA, 25 bp, Saccharomyces pastorianus
attcccttaacctagatgccaatga

SEQ ID NO: 168639 - DNA, 25 bp, Saccharomyces pastorianus
acctagatgccaatgagccacctat

SEQ ID NO: 168640 - DNA, 25 bp, Saccharomyces pastorianus
agatgccaatgagccacctattgac

SEQ ID NO: 168641 - DNA, 25 bp, Saccharomyces pastorianus
tagatgccaatgagccacctattga

SEQ ID NO: 168642 - DNA, 25 bp, Saccharomyces pastorianus
cttaacctagatgccaatgagccac

SEQ ID NO: 168643 - DNA, 25 bp, Saccharomyces pastorianus
aaattcccttaacctagatgccaat

SEQ ID NO: 168644 - DNA, 25 bp, Saccharomyces pastorianus
tcccttaacctagatgccaatgagc

SEQ ID NO: 168645 - DNA, 25 bp, Saccharomyces pastorianus
agactgaacacggtgactctaaaaa

SEQ ID NO: 168646 - DNA, 25 bp, Saccharomyces pastorianus
taacctagatgccaatgagccacct

SEQ ID NO: 168647 - DNA, 25 bp, Saccharomyces pastorianus
cctagatgccaatgagccacctatt

SEQ ID NO: 168648 - DNA, 25 bp, Saccharomyces pastorianus
tgaacacggtgactctaaaaattcc

SEQ ID NO: 168649 - DNA, 25 bp, Saccharomyces pastorianus
tatcccgttctaccgatgacgtcag

SEQ ID NO: 168650 - DNA, 25 bp, Saccharomyces pastorianus
ccgttctaccgatgacgtcagtgaa

SEQ ID NO: 168651 - DNA, 25 bp, Saccharomyces pastorianus
gtaaacaccaaggacagaacccaga

SEQ ID NO: 168652 - DNA, 25 bp, Saccharomyces pastorianus
agatatcccgttctaccgatgacgt

SEQ ID NO: 168653 - DNA, 25 bp, Saccharomyces pastorianus
aaagatatcccgttctaccgatgac

SEQ ID NO: 168654 - DNA, 25 bp, Saccharomyces pastorianus
tctaccgatgacgtcagtgaaaaaa

SEQ ID NO: 168655 - DNA, 25 bp, Saccharomyces pastorianus
gaacccagagacaaagatatcccgt

SEQ ID NO: 168656 - DNA, 25 bp, Saccharomyces pastorianus
gagacaaagatatcccgttctaccg

SEQ ID NO: 168657 - DNA, 25 bp, Saccharomyces pastorianus
gttctaccgatgacgtcagtgaaaa

SEQ ID NO: 168658 - DNA, 25 bp, Saccharomyces pastorianus
ttcttcactagtaaacaccaaggac

SEQ ID NO: 168659 - DNA, 25 bp, Saccharomyces pastorianus
ggacagaacccagagacaaagatat

SEQ ID NO: 168660 - DNA, 25 bp, Saccharomyces pastorianus
tttccaaatccgtttacgtgacttg

SEQ ID NO: 168661 - DNA, 25 bp, Saccharomyces pastorianus
aatagtgccctttctggttctttgt

SEQ ID NO: 168662 - DNA, 25 bp, Saccharomyces pastorianus
tctctaaccccttccaaagcgaaga

SEQ ID NO: 168663 - DNA, 25 bp, Saccharomyces pastorianus
aagcactcgggaccacctaattata

SEQ ID NO: 168664 - DNA, 25 bp, Saccharomyces pastorianus
gtctccttccgacaaggatttccaa

SEQ ID NO: 168665 - DNA, 25 bp, Saccharomyces pastorianus
tcataactgattgtacggattctat

SEQ ID NO: 168666 - DNA, 25 bp, Saccharomyces pastorianus
agagttttgtactgttacatcaaca

SEQ ID NO: 168667 - DNA, 25 bp, Saccharomyces pastorianus
tctataatttttctacggtctcctt

SEQ ID NO: 168668 - DNA, 25 bp, Saccharomyces pastorianus
gcattttcaacgcaagcactcggga

SEQ ID NO: 168669 - DNA, 25 bp, Saccharomyces pastorianus
tatacaagatttctctaaccccttc

SEQ ID NO: 168670 - DNA, 25 bp, Saccharomyces pastorianus
gaggacaattctgcctttgcatttg

SEQ ID NO: 168671 - DNA, 25 bp, Saccharomyces pastorianus
tcaattgaaaaaggctaaggcccaa

SEQ ID NO: 168672 - DNA, 25 bp, Saccharomyces pastorianus
cttgactcctgaatctcaattgaaa

SEQ ID NO: 168673 - DNA, 25 bp, Saccharomyces pastorianus
gctaaggcccaacaaaagaccgctg

SEQ ID NO: 168674 - DNA, 25 bp, Saccharomyces pastorianus
ctcaattgaaaaaggctaaggccca

SEQ ID NO: 168675 - DNA, 25 bp, Saccharomyces pastorianus
tctcaattgaaaaaggctaaggccc

SEQ ID NO: 168676 - DNA, 25 bp, Saccharomyces pastorianus
ggctaaggcccaacaaaagaccgct

SEQ ID NO: 168677 - DNA, 25 bp, Saccharomyces pastorianus
ggcccaacaaaagaccgctgagcaa

SEQ ID NO: 168678 - DNA, 25 bp, Saccharomyces pastorianus
ttgactcctgaatctcaattgaaaa

SEQ ID NO: 168679 - DNA, 25 bp, Saccharomyces pastorianus
aggcccaacaaaagaccgctgagca

SEQ ID NO: 168680 - DNA, 25 bp, Saccharomyces pastorianus
aaggcccaacaaaagaccgctgagc

SEQ ID NO: 168681 - DNA, 25 bp, Saccharomyces pastorianus
taaggcccaacaaaagaccgctgag

SEQ ID NO: 168682 - DNA, 25 bp, Saccharomyces pastorianus
gatagagctactttctacaccatgt

SEQ ID NO: 168683 - DNA, 25 bp, Saccharomyces pastorianus
ttacattgattacccaacttacggt

SEQ ID NO: 168684 - DNA, 25 bp, Saccharomyces pastorianus
gtacgatagagctactttctacacc

SEQ ID NO: 168685 - DNA, 25 bp, Saccharomyces pastorianus
gtccgcagaaggttacattgattac

SEQ ID NO: 168686 - DNA, 25 bp, Saccharomyces pastorianus
gaacaagtacgatagagctactttc

SEQ ID NO: 168687 - DNA, 25 bp, Saccharomyces pastorianus
accatgtccgcagaaggttacattg

SEQ ID NO: 168688 - DNA, 25 bp, Saccharomyces pastorianus
ggttacattgattacccaacttacg

SEQ ID NO: 168689 - DNA, 25 bp, Saccharomyces pastorianus
acgatagagctactttctacaccat

SEQ ID NO: 168690 - DNA, 25 bp, Saccharomyces pastorianus
gaaggttacattgattacccaactt

SEQ ID NO: 168691 - DNA, 25 bp, Saccharomyces pastorianus
catgtccgcagaaggttacattgat

SEQ ID NO: 168692 - DNA, 25 bp, Saccharomyces pastorianus
tagagctactttctacaccatgtcc

SEQ ID NO: 168693 - DNA, 25 bp, Saccharomyces pastorianus
aagaacccaatgcatgcagattgtt

SEQ ID NO: 168694 - DNA, 25 bp, Saccharomyces pastorianus
tccaggtacataggtatcgttctag

SEQ ID NO: 168695 - DNA, 25 bp, Saccharomyces pastorianus
aacagactttggatttgtcaacgaa

SEQ ID NO: 168696 - DNA, 25 bp, Saccharomyces pastorianus
agtgctgcaaaattccaggtacata

SEQ ID NO: 168697 - DNA, 25 bp, Saccharomyces pastorianus
gggtacattacatccattcgaaggg

SEQ ID NO: 168698 - DNA, 25 bp, Saccharomyces pastorianus
ccattcgaagggtcttgttcacaga

SEQ ID NO: 168699 - DNA, 25 bp, Saccharomyces pastorianus
agactaaaagaacccaatgcatgca

SEQ ID NO: 168700 - DNA, 25 bp, Saccharomyces pastorianus
gcagattgttttcccaattgataag

SEQ ID NO: 168701 - DNA, 25 bp, Saccharomyces pastorianus
atcgttctagaatatgcatgtggag

SEQ ID NO: 168702 - DNA, 25 bp, Saccharomyces pastorianus
aacgaattttgctcacgtaacgaat

SEQ ID NO: 168703 - DNA, 25 bp, Saccharomyces pastorianus
atttgtcaacgaattttgctcacgt

SEQ ID NO: 168704 - DNA, 25 bp, Saccharomyces pastorianus
accgacaagctgaaagaggatattt

SEQ ID NO: 168705 - DNA, 25 bp, Saccharomyces pastorianus
gtgacacacgaaaagggccattttg

SEQ ID NO: 168706 - DNA, 25 bp, Saccharomyces pastorianus
atacggcaatacctggcatgtgatt

SEQ ID NO: 168707 - DNA, 25 bp, Saccharomyces pastorianus
aagaactttgggagctacgtgacac

SEQ ID NO: 168708 - DNA, 25 bp, Saccharomyces pastorianus
gaaagagacattgctgggacggtaa

SEQ ID NO: 168709 - DNA, 25 bp, Saccharomyces pastorianus
agtaaagatgctctggacaagtacc

SEQ ID NO: 168710 - DNA, 25 bp, Saccharomyces pastorianus
agcaattggatgtcaaatacggcaa

SEQ ID NO: 168711 - DNA, 25 bp, Saccharomyces pastorianus
actttgggagctacgtgacacacga

SEQ ID NO: 168712 - DNA, 25 bp, Saccharomyces pastorianus
aatacctggcatgtgattgtcggaa

SEQ ID NO: 168713 - DNA, 25 bp, Saccharomyces pastorianus
gcatgtgattgtcggaaagaacttt

SEQ ID NO: 168714 - DNA, 25 bp, Saccharomyces pastorianus
gctctggacaagtaccagttggaaa

SEQ ID NO: 168715 - DNA, 25 bp, Saccharomyces pastorianus
ggagagccagcaattgcggaagtac

SEQ ID NO: 168716 - DNA, 25 bp, Saccharomyces pastorianus
cagcaattgcggaagtacatagcat

SEQ ID NO: 168717 - DNA, 25 bp, Saccharomyces pastorianus
gagagccagcaattgcggaagtaca

SEQ ID NO: 168718 - DNA, 25 bp, Saccharomyces pastorianus
ccagcaattgcggaagtacatagca

SEQ ID NO: 168719 - DNA, 25 bp, Saccharomyces pastorianus
gaagtacatagcattgtacaacaga

SEQ ID NO: 168720 - DNA, 25 bp, Saccharomyces pastorianus
aattgcggaagtacatagcattgta

SEQ ID NO: 168721 - DNA, 25 bp, Saccharomyces pastorianus
agagccagcaattgcggaagtacat

SEQ ID NO: 168722 - DNA, 25 bp, Saccharomyces pastorianus
gcggaagtacatagcattgtacaac

SEQ ID NO: 168723 - DNA, 25 bp, Saccharomyces pastorianus
gcaattgcggaagtacatagcattg

SEQ ID NO: 168724 - DNA, 25 bp, Saccharomyces pastorianus
gagccagcaattgcggaagtacata

SEQ ID NO: 168725 - DNA, 25 bp, Saccharomyces pastorianus
tggagagccagcaattgcggaagta

SEQ ID NO: 168726 - DNA, 25 bp, Saccharomyces pastorianus
tctacttccggttccacttcatttg

SEQ ID NO: 168727 - DNA, 25 bp, Saccharomyces pastorianus
gctttctctttctcaaatgctattc

SEQ ID NO: 168728 - DNA, 25 bp, Saccharomyces pastorianus
aatcttgagaatggcagtacctacg

SEQ ID NO: 168729 - DNA, 25 bp, Saccharomyces pastorianus
tggtggttccgtctctggtttgcaa

SEQ ID NO: 168730 - DNA, 25 bp, Saccharomyces pastorianus
gcaacacaaggcaactcacaattct

SEQ ID NO: 168731 - DNA, 25 bp, Saccharomyces pastorianus
aatcaggttctgtcaacaacggtga

SEQ ID NO: 168732 - DNA, 25 bp, Saccharomyces pastorianus
gtctccgaaggaacatttgctggtg

SEQ ID NO: 168733 - DNA, 25 bp, Saccharomyces pastorianus
tattctcaatggtggttccgtctct

SEQ ID NO: 168734 - DNA, 25 bp, Saccharomyces pastorianus
tggtgcttccgtaactggttcaacc

SEQ ID NO: 168735 - DNA, 25 bp, Saccharomyces pastorianus
gctggtgcctatgcttattatctaa

SEQ ID NO: 168736 - DNA, 25 bp, Saccharomyces pastorianus
aattctccttctctattggtactgg

SEQ ID NO: 168737 - DNA, 25 bp, Saccharomyces pastorianus
gaatataaaggtctcatcaccatta

SEQ ID NO: 168738 - DNA, 25 bp, Saccharomyces pastorianus
gagtcaaattcaactttcgacaaat

SEQ ID NO: 168739 - DNA, 25 bp, Saccharomyces pastorianus
attcggccaggatgatactgagtca

SEQ ID NO: 168740 - DNA, 25 bp, Saccharomyces pastorianus
gttctgacagcctaaggtataccgt

SEQ ID NO: 168741 - DNA, 25 bp, Saccharomyces pastorianus
actttccctcaaacaatagacaccg

SEQ ID NO: 168742 - DNA, 25 bp, Saccharomyces pastorianus
ccattattccttccaaacctgattt

SEQ ID NO: 168743 - DNA, 25 bp, Saccharomyces pastorianus
aaaagataccgaattcggccaggat

SEQ ID NO: 168744 - DNA, 25 bp, Saccharomyces pastorianus
aattgggttcaggaactgcttcatt

SEQ ID NO: 168745 - DNA, 25 bp, Saccharomyces pastorianus
gaactgcttcatttgttcaggttct

SEQ ID NO: 168746 - DNA, 25 bp, Saccharomyces pastorianus
aaacaatagacaccgccagtgacca

SEQ ID NO: 168747 - DNA, 25 bp, Saccharomyces pastorianus
gtataccgtcggaaattccgtggca

SEQ ID NO: 168748 - DNA, 25 bp, Saccharomyces pastorianus
ctgatttaatctcagcggctgcttt

SEQ ID NO: 168749 - DNA, 25 bp, Saccharomyces pastorianus
agaggttacgcgctggtttaatcga

SEQ ID NO: 168750 - DNA, 25 bp, Saccharomyces pastorianus
aataccttgtctgtgatgaccacga

SEQ ID NO: 168751 - DNA, 25 bp, Saccharomyces pastorianus
taatcgagtaattaagtcccgcttt

SEQ ID NO: 168752 - DNA, 25 bp, Saccharomyces pastorianus
tcccgcttttttgaaggtgaatttg

SEQ ID NO: 168753 - DNA, 25 bp, Saccharomyces pastorianus
gcgtaaagccatataatgccactga

SEQ ID NO: 168754 - DNA, 25 bp, Saccharomyces pastorianus
gaggtctaagcatccagaggttacg

SEQ ID NO: 168755 - DNA, 25 bp, Saccharomyces pastorianus
gatgaccacgaaactcttgctgatt

SEQ ID NO: 168756 - DNA, 25 bp, Saccharomyces pastorianus
gccgcaagagagaatgtcgacacca

SEQ ID NO: 168757 - DNA, 25 bp, Saccharomyces pastorianus
gctgctttttcgctagggtttataa

SEQ ID NO: 168758 - DNA, 25 bp, Saccharomyces pastorianus
gacaccattgtttcgctttacgaga

SEQ ID NO: 168759 - DNA, 25 bp, Saccharomyces pastorianus
cgtcgactgcgtttactgattaccg

SEQ ID NO: 168760 - DNA, 25 bp, Saccharomyces pastorianus
gcaccctttgtcaagagttcgtggt

SEQ ID NO: 168761 - DNA, 25 bp, Saccharomyces pastorianus
gttaacgtcgactgcgtttactgat

SEQ ID NO: 168762 - DNA, 25 bp, Saccharomyces pastorianus
gacggcaccctttgtcaagagttcg

SEQ ID NO: 168763 - DNA, 25 bp, Saccharomyces pastorianus
ctttgtcaagagttcgtggttaacg

SEQ ID NO: 168764 - DNA, 25 bp, Saccharomyces pastorianus
cggcaccctttgtcaagagttcgtg

SEQ ID NO: 168765 - DNA, 25 bp, Saccharomyces pastorianus
caagagttcgtggttaacgtcgact

SEQ ID NO: 168766 - DNA, 25 bp, Saccharomyces pastorianus
tcgactgcgtttactgattaccgtt

SEQ ID NO: 168767 - DNA, 25 bp, Saccharomyces pastorianus
gtggttaacgtcgactgcgtttact

SEQ ID NO: 168768 - DNA, 25 bp, Saccharomyces pastorianus
agttcgtggttaacgtcgactgcgt

SEQ ID NO: 168769 - DNA, 25 bp, Saccharomyces pastorianus
ttcgtggttaacgtcgactgcgttt

SEQ ID NO: 168770 - DNA, 25 bp, Saccharomyces pastorianus
atgactttgggccacgaatccaacg

SEQ ID NO: 168771 - DNA, 25 bp, Saccharomyces pastorianus
atctgcggattagacattcactact

SEQ ID NO: 168772 - DNA, 25 bp, Saccharomyces pastorianus
atagccctcatacccaaataggttt

SEQ ID NO: 168773 - DNA, 25 bp, Saccharomyces pastorianus
gaaggctattggaatctgcggatta

SEQ ID NO: 168774 - DNA, 25 bp, Saccharomyces pastorianus
agaatttctgtgaggccattatagt

SEQ ID NO: 168775 - DNA, 25 bp, Saccharomyces pastorianus
gcgtaaagtaacctgggaagcccat

SEQ ID NO: 168776 - DNA, 25 bp, Saccharomyces pastorianus
attcactactacacggatggccagg

SEQ ID NO: 168777 - DNA, 25 bp, Saccharomyces pastorianus
atgcagtaagcatatagccctcata

SEQ ID NO: 168778 - DNA, 25 bp, Saccharomyces pastorianus
gaatccaacggtgctgttcttgaaa

SEQ ID NO: 168779 - DNA, 25 bp, Saccharomyces pastorianus
cggatggccaggtcagcgtaaagta

SEQ ID NO: 168780 - DNA, 25 bp, Saccharomyces pastorianus
caaactactgtaaagcgggtgatgc

SEQ ID NO: 168781 - DNA, 25 bp, Saccharomyces pastorianus
cggtacaatcaacatcgtctctggt

SEQ ID NO: 168782 - DNA, 25 bp, Saccharomyces pastorianus
gcgcctactcatattacctaaacta

SEQ ID NO: 168783 - DNA, 25 bp, Saccharomyces pastorianus
atctctggtgtctcaaactccacta

SEQ ID NO: 168784 - DNA, 25 bp, Saccharomyces pastorianus
tcaataattccttcatctagcgcct

SEQ ID NO: 168785 - DNA, 25 bp, Saccharomyces pastorianus
tactgccactggttcagtcacttta

SEQ ID NO: 168786 - DNA, 25 bp, Saccharomyces pastorianus
ggtactactggtgtcttaactgcaa

SEQ ID NO: 168787 - DNA, 25 bp, Saccharomyces pastorianus
actacctctggtgttgtctctactg

SEQ ID NO: 168788 - DNA, 25 bp, Saccharomyces pastorianus
atgacggtgtcatcgctacaagcgc

SEQ ID NO: 168789 - DNA, 25 bp, Saccharomyces pastorianus
acagcatctggttcaatcgcttcta

SEQ ID NO: 168790 - DNA, 25 bp, Saccharomyces pastorianus
tggattctctagttctggcttcagt

SEQ ID NO: 168791 - DNA, 25 bp, Saccharomyces pastorianus
agtcactttatcctctaacgcttct

SEQ ID NO: 168792 - DNA, 25 bp, Saccharomyces pastorianus
aaggagatattatccgaccgactgt

SEQ ID NO: 168793 - DNA, 25 bp, Saccharomyces pastorianus
attatccgaccgactgttttgtgat

SEQ ID NO: 168794 - DNA, 25 bp, Saccharomyces pastorianus
atccgaccgactgttttgtgatatg

SEQ ID NO: 168795 - DNA, 25 bp, Saccharomyces pastorianus
aaagtgcccaagtgacatttagcta

SEQ ID NO: 168796 - DNA, 25 bp, Saccharomyces pastorianus
cgaccgactgttttgtgatatggca

SEQ ID NO: 168797 - DNA, 25 bp, Saccharomyces pastorianus
aatgtcattagaaagtgcccaagtg

SEQ ID NO: 168798 - DNA, 25 bp, Saccharomyces pastorianus
gagcaaaattacttcttttggctgg

SEQ ID NO: 168799 - DNA, 25 bp, Saccharomyces pastorianus
gactgttttgtgatatggcaaacta

SEQ ID NO: 168800 - DNA, 25 bp, Saccharomyces pastorianus
gatattatccgaccgactgttttgt

SEQ ID NO: 168801 - DNA, 25 bp, Saccharomyces pastorianus
tacttcttttggctggaaatgtcat

SEQ ID NO: 168802 - DNA, 25 bp, Saccharomyces pastorianus
ttcttttggctggaaatgtcattag

SEQ ID NO: 168803 - DNA, 25 bp, Saccharomyces pastorianus
tgtacatccaacaaagccttatgtt

SEQ ID NO: 168804 - DNA, 25 bp, Saccharomyces pastorianus
tgggccttagaacaaacttttgaag

SEQ ID NO: 168805 - DNA, 25 bp, Saccharomyces pastorianus
gaacactttgtcatgtgcgtcgcat

SEQ ID NO: 168806 - DNA, 25 bp, Saccharomyces pastorianus
gagtcttcaactacaatacaggtga

SEQ ID NO: 168807 - DNA, 25 bp, Saccharomyces pastorianus
acttttgaaggccacgaacactttg

SEQ ID NO: 168808 - DNA, 25 bp, Saccharomyces pastorianus
tgttgggagtgatgatttcaggatc

SEQ ID NO: 168809 - DNA, 25 bp, Saccharomyces pastorianus
aagccttatgttttatccggcagtg

SEQ ID NO: 168810 - DNA, 25 bp, Saccharomyces pastorianus
gttacggaaactcctgttagagcag

SEQ ID NO: 168811 - DNA, 25 bp, Saccharomyces pastorianus
gaagttagatccatccaagttacgg

SEQ ID NO: 168812 - DNA, 25 bp, Saccharomyces pastorianus
tccggcagtgatgatttgacagtca

SEQ ID NO: 168813 - DNA, 25 bp, Saccharomyces pastorianus
tggaattgggaaaataactgggcct

SEQ ID NO: 168814 - DNA, 25 bp, Saccharomyces pastorianus
tcaattcctggctatccaaattctc

SEQ ID NO: 168815 - DNA, 25 bp, Saccharomyces pastorianus
ggaacgtagtagctccttatcagca

SEQ ID NO: 168816 - DNA, 25 bp, Saccharomyces pastorianus
atcagcaacgttcaattcctggcta

SEQ ID NO: 168817 - DNA, 25 bp, Saccharomyces pastorianus
ggctatccaaattctctatagcttc

SEQ ID NO: 168818 - DNA, 25 bp, Saccharomyces pastorianus
gtatccagaagataatggtacccgt

SEQ ID NO: 168819 - DNA, 25 bp, Saccharomyces pastorianus
cagaagataatggtacccgtaagaa

SEQ ID NO: 168820 - DNA, 25 bp, Saccharomyces pastorianus
gtagctccttatcagcaacgttcaa

SEQ ID NO: 168821 - DNA, 25 bp, Saccharomyces pastorianus
gtagtagctccttatcagcaacgtt

SEQ ID NO: 168822 - DNA, 25 bp, Saccharomyces pastorianus
tcctggctatccaaattctctatag

SEQ ID NO: 168823 - DNA, 25 bp, Saccharomyces pastorianus
ctccttatcagcaacgttcaattcc

SEQ ID NO: 168824 - DNA, 25 bp, Saccharomyces pastorianus
aacgttcaattcctggctatccaaa

SEQ ID NO: 168825 - DNA, 25 bp, Saccharomyces pastorianus
gaaagcgcgttggacagatacttga

SEQ ID NO: 168826 - DNA, 25 bp, Saccharomyces pastorianus
gagaatcttgggacaaatgcaaaaa

SEQ ID NO: 168827 - DNA, 25 bp, Saccharomyces pastorianus
gagagagaatcttgggacaaatgca

SEQ ID NO: 168828 - DNA, 25 bp, Saccharomyces pastorianus
ttttgcttcccacgaaatcggaact

SEQ ID NO: 168829 - DNA, 25 bp, Saccharomyces pastorianus
ttggacagatacttgagcagatttt

SEQ ID NO: 168830 - DNA, 25 bp, Saccharomyces pastorianus
atgcaaaaaagaaatggtcggaaca

SEQ ID NO: 168831 - DNA, 25 bp, Saccharomyces pastorianus
atctatcagccgaagaaagcgcgtt

SEQ ID NO: 168832 - DNA, 25 bp, Saccharomyces pastorianus
cagatacttgagcagattttgtggg

SEQ ID NO: 168833 - DNA, 25 bp, Saccharomyces pastorianus
gcgttggacagatacttgagcagat

SEQ ID NO: 168834 - DNA, 25 bp, Saccharomyces pastorianus
agcgcgttggacagatacttgagca

SEQ ID NO: 168835 - DNA, 25 bp, Saccharomyces pastorianus
tcggggagcaatttttgggagcaaa

SEQ ID NO: 168836 - DNA, 25 bp, Saccharomyces pastorianus
gattcatctggttcatttgaaacga

SEQ ID NO: 168837 - DNA, 25 bp, Saccharomyces pastorianus
tatttccaaggaacaccccagccaa

SEQ ID NO: 168838 - DNA, 25 bp, Saccharomyces pastorianus
ccgcacagctctagcgttgtaacat

SEQ ID NO: 168839 - DNA, 25 bp, Saccharomyces pastorianus
aaagactactgtcttgtctcaattg

SEQ ID NO: 168840 - DNA, 25 bp, Saccharomyces pastorianus
ttttcccaacagtccggtcaaacag

SEQ ID NO: 168841 - DNA, 25 bp, Saccharomyces pastorianus
tctggtccgagtgggccaagttatt

SEQ ID NO: 168842 - DNA, 25 bp, Saccharomyces pastorianus
gtctcaattgttcatcacgacttca

SEQ ID NO: 168843 - DNA, 25 bp, Saccharomyces pastorianus
tttgaaacgaacctagacccgcaca

SEQ ID NO: 168844 - DNA, 25 bp, Saccharomyces pastorianus
agaagagtcattcaaggcatggaga

SEQ ID NO: 168845 - DNA, 25 bp, Saccharomyces pastorianus
gtttagtatctggtccgagtgggcc

SEQ ID NO: 168846 - DNA, 25 bp, Saccharomyces pastorianus
gtccggtcaaacagactacaatcat

SEQ ID NO: 168847 - DNA, 25 bp, Saccharomyces pastorianus
actctccaggaatcatgcattgtta

SEQ ID NO: 168848 - DNA, 25 bp, Saccharomyces pastorianus
gtacaacctttattagaatcaccga

SEQ ID NO: 168849 - DNA, 25 bp, Saccharomyces pastorianus
gggcggtaaaagagtggattcacac

SEQ ID NO: 168850 - DNA, 25 bp, Saccharomyces pastorianus
gaggctgctgccataacaagtcaca

SEQ ID NO: 168851 - DNA, 25 bp, Saccharomyces pastorianus
gcattgttaagttgcgacccgctca

SEQ ID NO: 168852 - DNA, 25 bp, Saccharomyces pastorianus
agaagttatcctgggctctgataca

SEQ ID NO: 168853 - DNA, 25 bp, Saccharomyces pastorianus
ggattcacacactttttcccaagta

SEQ ID NO: 168854 - DNA, 25 bp, Saccharomyces pastorianus
taacggtcaaagaattggctcaaat

SEQ ID NO: 168855 - DNA, 25 bp, Saccharomyces pastorianus
cccgctcacgggtaaggtatatata

SEQ ID NO: 168856 - DNA, 25 bp, Saccharomyces pastorianus
gtaatggtacgttcattaacggtca

SEQ ID NO: 168857 - DNA, 25 bp, Saccharomyces pastorianus
gtacgagcccgactttatctaatat

SEQ ID NO: 168858 - DNA, 25 bp, Saccharomyces pastorianus
aggtttacctagagccagcatccta

SEQ ID NO: 168859 - DNA, 25 bp, Saccharomyces pastorianus
atcctacctacagctttcagacgaa

SEQ ID NO: 168860 - DNA, 25 bp, Saccharomyces pastorianus
atgaacccggtgatacagtaaccat

SEQ ID NO: 168861 - DNA, 25 bp, Saccharomyces pastorianus
atggtggattagttcgcccgatgac

SEQ ID NO: 168862 - DNA, 25 bp, Saccharomyces pastorianus
catttccaagacgtgaggcagttca

SEQ ID NO: 168863 - DNA, 25 bp, Saccharomyces pastorianus
ttggaccctgaggtttacctagagc

SEQ ID NO: 168864 - DNA, 25 bp, Saccharomyces pastorianus
ggatgtttcaagattcctagcaaat

SEQ ID NO: 168865 - DNA, 25 bp, Saccharomyces pastorianus
cagtggagttcctaatgatcttaag

SEQ ID NO: 168866 - DNA, 25 bp, Saccharomyces pastorianus
gaaaagttcactagcaccaaggtta

SEQ ID NO: 168867 - DNA, 25 bp, Saccharomyces pastorianus
agctttcagacgaacatgccaatga

SEQ ID NO: 168868 - DNA, 25 bp, Saccharomyces pastorianus
gattacatctgaaggtcatttccaa

SEQ ID NO: 168869 - DNA, 25 bp, Saccharomyces pastorianus
gcataacgagatgtcatctacggac

SEQ ID NO: 168870 - DNA, 25 bp, Saccharomyces pastorianus
gataagattgttactcaatacaaga

SEQ ID NO: 168871 - DNA, 25 bp, Saccharomyces pastorianus
aaacgtttagagattttgatgaatt

SEQ ID NO: 168872 - DNA, 25 bp, Saccharomyces pastorianus
gatggaggcaaaacgtttagagatt

SEQ ID NO: 168873 - DNA, 25 bp, Saccharomyces pastorianus
acgggcataacgagatgtcatctac

SEQ ID NO: 168874 - DNA, 25 bp, Saccharomyces pastorianus
agtcatatgtggtcgttttaacgca

SEQ ID NO: 168875 - DNA, 25 bp, Saccharomyces pastorianus
cagttggctttcagtagtgatggag

SEQ ID NO: 168876 - DNA, 25 bp, Saccharomyces pastorianus
taacgcaagatgacgggcataacga

SEQ ID NO: 168877 - DNA, 25 bp, Saccharomyces pastorianus
tattgaagtcatatgtggtcgtttt

SEQ ID NO: 168878 - DNA, 25 bp, Saccharomyces pastorianus
ggctttcagtagtgatggaggcaaa

SEQ ID NO: 168879 - DNA, 25 bp, Saccharomyces pastorianus
gttttaacgcaagatgacgggcata

SEQ ID NO: 168880 - DNA, 25 bp, Saccharomyces pastorianus
caacgaattatccagtttcacgagt

SEQ ID NO: 168881 - DNA, 25 bp, Saccharomyces pastorianus
gagtcaaggcggtaattttgaaatc

SEQ ID NO: 168882 - DNA, 25 bp, Saccharomyces pastorianus
gacttacatgaaaacgccaacgaat

SEQ ID NO: 168883 - DNA, 25 bp, Saccharomyces pastorianus
gacgacttacatgaaaacgccaacg

SEQ ID NO: 168884 - DNA, 25 bp, Saccharomyces pastorianus
cagtttcacgagtcaaggcggtaat

SEQ ID NO: 168885 - DNA, 25 bp, Saccharomyces pastorianus
gccaacgaattatccagtttcacga

SEQ ID NO: 168886 - DNA, 25 bp, Saccharomyces pastorianus
atccagtttcacgagtcaaggcggt

SEQ ID NO: 168887 - DNA, 25 bp, Saccharomyces pastorianus
ttcacgagtcaaggcggtaattttg

SEQ ID NO: 168888 - DNA, 25 bp, Saccharomyces pastorianus
gaaaacgccaacgaattatccagtt

SEQ ID NO: 168889 - DNA, 25 bp, Saccharomyces pastorianus
aacgccaacgaattatccagtttca

SEQ ID NO: 168890 - DNA, 25 bp, Saccharomyces pastorianus
aattatccagtttcacgagtcaagg

SEQ ID NO: 168891 - DNA, 25 bp, Saccharomyces pastorianus
gggattgccggaatcggtcgcaatc

SEQ ID NO: 168892 - DNA, 25 bp, Saccharomyces pastorianus
agtgccgcccctaaaaacgcttgcg

SEQ ID NO: 168893 - DNA, 25 bp, Saccharomyces pastorianus
agaaattcctgtttggggattgccg

SEQ ID NO: 168894 - DNA, 25 bp, Saccharomyces pastorianus
gcgcattgggcagaaattcctgttt

SEQ ID NO: 168895 - DNA, 25 bp, Saccharomyces pastorianus
tcaaaacagttttgctgaaggaaaa

SEQ ID NO: 168896 - DNA, 25 bp, Saccharomyces pastorianus
tgccggaatcggtcgcaatcgggta

SEQ ID NO: 168897 - DNA, 25 bp, Saccharomyces pastorianus
tgccgcggccatttctggggctgtc

SEQ ID NO: 168898 - DNA, 25 bp, Saccharomyces pastorianus
ggctgtccgcgcattgggcagaaat

SEQ ID NO: 168899 - DNA, 25 bp, Saccharomyces pastorianus
cgagtgccgcccctaaaaacgcttg

SEQ ID NO: 168900 - DNA, 25 bp, Saccharomyces pastorianus
tgtccgcgcattgggcagaaattcc

SEQ ID NO: 168901 - DNA, 25 bp, Saccharomyces pastorianus
cattgggcagaaattcctgtttggg

SEQ ID NO: 168902 - DNA, 25 bp, Saccharomyces pastorianus
gaagacgtcttcaagtgccgttttt

SEQ ID NO: 168903 - DNA, 25 bp, Saccharomyces pastorianus
gatatcgtttgcactagcttttctt

SEQ ID NO: 168904 - DNA, 25 bp, Saccharomyces pastorianus
gatacctgtggtccattttattggc

SEQ ID NO: 168905 - DNA, 25 bp, Saccharomyces pastorianus
accctgacggtgatttgtttaatga

SEQ ID NO: 168906 - DNA, 25 bp, Saccharomyces pastorianus
ttttattggctctaacctctcacta

SEQ ID NO: 168907 - DNA, 25 bp, Saccharomyces pastorianus
atttgtgcaatggttcccttcactg

SEQ ID NO: 168908 - DNA, 25 bp, Saccharomyces pastorianus
attccgttatgcaggtggatcctac

SEQ ID NO: 168909 - DNA, 25 bp, Saccharomyces pastorianus
cccttcactgaaccaatctctaatg

SEQ ID NO: 168910 - DNA, 25 bp, Saccharomyces pastorianus
gaaatggctcactataccctgacgg

SEQ ID NO: 168911 - DNA, 25 bp, Saccharomyces pastorianus
gcgcctttgataacggagaatatta

SEQ ID NO: 168912 - DNA, 25 bp, Saccharomyces pastorianus
ctaacctctcactacgatatcgttt

SEQ ID NO: 168913 - DNA, 25 bp, Saccharomyces pastorianus
tttttcgtagctgggcgtctatcag

SEQ ID NO: 168914 - DNA, 25 bp, Saccharomyces pastorianus
cgcaaacctaataccgcgcatgttt

SEQ ID NO: 168915 - DNA, 25 bp, Saccharomyces pastorianus
gcgcatgtttggtcgcatttatccg

SEQ ID NO: 168916 - DNA, 25 bp, Saccharomyces pastorianus
ttatccggcggtcatcgccaaaggg

SEQ ID NO: 168917 - DNA, 25 bp, Saccharomyces pastorianus
aataccgcgcatgtttggtcgcatt

SEQ ID NO: 168918 - DNA, 25 bp, Saccharomyces pastorianus
gcggtattctaaaagagcgcaaacc

SEQ ID NO: 168919 - DNA, 25 bp, Saccharomyces pastorianus
aagtgtgacctttttcgtagctggg

SEQ ID NO: 168920 - DNA, 25 bp, Saccharomyces pastorianus
ggcggacaggtcacgtcccggtctc

SEQ ID NO: 168921 - DNA, 25 bp, Saccharomyces pastorianus
cgtcccggtctctgcttcagcaaaa

SEQ ID NO: 168922 - DNA, 25 bp, Saccharomyces pastorianus
ttggtcgcatttatccggcggtcat

SEQ ID NO: 168923 - DNA, 25 bp, Saccharomyces pastorianus
cgccaaagggcggacaggtcacgtc

SEQ ID NO: 168924 - DNA, 25 bp, Saccharomyces pastorianus
gatagaaacgtaatggcccacatca

SEQ ID NO: 168925 - DNA, 25 bp, Saccharomyces pastorianus
gttaggatgactgtgctcctccaaa

SEQ ID NO: 168926 - DNA, 25 bp, Saccharomyces pastorianus
tgactgtgctcctccaaacactata

SEQ ID NO: 168927 - DNA, 25 bp, Saccharomyces pastorianus
atggagctgggatagaaacgtaatg

SEQ ID NO: 168928 - DNA, 25 bp, Saccharomyces pastorianus
atggccaacgttaggatgactgtgc

SEQ ID NO: 168929 - DNA, 25 bp, Saccharomyces pastorianus
aacatcatggccaacgttaggatga

SEQ ID NO: 168930 - DNA, 25 bp, Saccharomyces pastorianus
acgtaatggcccacatcaaaaacat

SEQ ID NO: 168931 - DNA, 25 bp, Saccharomyces pastorianus
tcaaaaacatcatggccaacgttag

SEQ ID NO: 168932 - DNA, 25 bp, Saccharomyces pastorianus
ggccaacgttaggatgactgtgctc

SEQ ID NO: 168933 - DNA, 25 bp, Saccharomyces pastorianus
taggatgactgtgctcctccaaaca

SEQ ID NO: 168934 - DNA, 25 bp, Saccharomyces pastorianus
aacgttaggatgactgtgctcctcc

SEQ ID NO: 168935 - DNA, 25 bp, Saccharomyces pastorianus
ttatccagaatagcacggacagtgc

SEQ ID NO: 168936 - DNA, 25 bp, Saccharomyces pastorianus
gactcttgcaaaactgtacatacgt

SEQ ID NO: 168937 - DNA, 25 bp, Saccharomyces pastorianus
tacatacgtttggttgttctttggg

SEQ ID NO: 168938 - DNA, 25 bp, Saccharomyces pastorianus
gtatagctaaattggtcacgcaaac

SEQ ID NO: 168939 - DNA, 25 bp, Saccharomyces pastorianus
acgggactcttgcaaaactgtacat

SEQ ID NO: 168940 - DNA, 25 bp, Saccharomyces pastorianus
aattggtcacgcaaacagacagatt

SEQ ID NO: 168941 - DNA, 25 bp, Saccharomyces pastorianus
cagacagattagttagtagaaggaa

SEQ ID NO: 168942 - DNA, 25 bp, Saccharomyces pastorianus
atagcacggacagtgcactaaccac

SEQ ID NO: 168943 - DNA, 25 bp, Saccharomyces pastorianus
tggcacgggactcttgcaaaactgt

SEQ ID NO: 168944 - DNA, 25 bp, Saccharomyces pastorianus
aactgtacatacgtttggttgttct

SEQ ID NO: 168945 - DNA, 25 bp, Saccharomyces pastorianus
ggtcacgcaaacagacagattagtt

SEQ ID NO: 168946 - DNA, 25 bp, Saccharomyces pastorianus
tgtatcatagcctttagcaacaata

SEQ ID NO: 168947 - DNA, 25 bp, Saccharomyces pastorianus
acctgtatcatagcctttagcaaca

SEQ ID NO: 168948 - DNA, 25 bp, Saccharomyces pastorianus
ctgtatcatagcctttagcaacaat

SEQ ID NO: 168949 - DNA, 25 bp, Saccharomyces pastorianus
atacctgtatcatagcctttagcaa

SEQ ID NO: 168950 - DNA, 25 bp, Saccharomyces pastorianus
ttttgtagaattatcgattcccttt

SEQ ID NO: 168951 - DNA, 25 bp, Saccharomyces pastorianus
catagcctttagcaacaatagaatc

SEQ ID NO: 168952 - DNA, 25 bp, Saccharomyces pastorianus
ccttttgtggatccctatatcctcg

SEQ ID NO: 168953 - DNA, 25 bp, Saccharomyces pastorianus
ttcccttttgtggatccctatatcc

SEQ ID NO: 168954 - DNA, 25 bp, Saccharomyces pastorianus
ttagcaacaatagaatcccaacaat

SEQ ID NO: 168955 - DNA, 25 bp, Saccharomyces pastorianus
gtatcatagcctttagcaacaatag

SEQ ID NO: 168956 - DNA, 25 bp, Saccharomyces pastorianus
tacctgtatcatagcctttagcaac

SEQ ID NO: 168957 - DNA, 25 bp, Saccharomyces pastorianus
gacctagaagtaacaacaccacaac

SEQ ID NO: 168958 - DNA, 25 bp, Saccharomyces pastorianus
gggccaccaggccagcaagtcacac

SEQ ID NO: 168959 - DNA, 25 bp, Saccharomyces pastorianus
agggccactcgctacacaggaccta

SEQ ID NO: 168960 - DNA, 25 bp, Saccharomyces pastorianus
ttcattcaccgggtggtgtgccggt

SEQ ID NO: 168961 - DNA, 25 bp, Saccharomyces pastorianus
atttttcattcaccgggtggtgtgc

SEQ ID NO: 168962 - DNA, 25 bp, Saccharomyces pastorianus
gcccagcgaaaatgcgcgcccatat

SEQ ID NO: 168963 - DNA, 25 bp, Saccharomyces pastorianus
cactcgctacacaggacctagaagt

SEQ ID NO: 168964 - DNA, 25 bp, Saccharomyces pastorianus
cgcatttttcattcaccgggtggtg

SEQ ID NO: 168965 - DNA, 25 bp, Saccharomyces pastorianus
ccacaacatgtcttttgacgaccta

SEQ ID NO: 168966 - DNA, 25 bp, Saccharomyces pastorianus
acaactcaccacaacatgtcttttg

SEQ ID NO: 168967 - DNA, 25 bp, Saccharomyces pastorianus
catataaatacccgccggtcacgac

SEQ ID NO: 168968 - DNA, 25 bp, Saccharomyces pastorianus
gtttctgttgtggtgttgcaacaca

SEQ ID NO: 168969 - DNA, 25 bp, Saccharomyces pastorianus
aacttttagggacacgtggcacgat

SEQ ID NO: 168970 - DNA, 25 bp, Saccharomyces pastorianus
cccactcaagtcaccaagctaaaag

SEQ ID NO: 168971 - DNA, 25 bp, Saccharomyces pastorianus
tctttctttaatatccagtttccaa

SEQ ID NO: 168972 - DNA, 25 bp, Saccharomyces pastorianus
tttttctctctcgtgcaaggtcgtc

SEQ ID NO: 168973 - DNA, 25 bp, Saccharomyces pastorianus
tttgccaccgtgtaagtttctgttg

SEQ ID NO: 168974 - DNA, 25 bp, Saccharomyces pastorianus
acgtggcacgattcttttctcgtca

SEQ ID NO: 168975 - DNA, 25 bp, Saccharomyces pastorianus
tgcaacacaacatatcctatctcac

SEQ ID NO: 168976 - DNA, 25 bp, Saccharomyces pastorianus
tcctatctcaccgttgtattacaca

SEQ ID NO: 168977 - DNA, 25 bp, Saccharomyces pastorianus
gattcttttctcgtcacgtgctcat

SEQ ID NO: 168978 - DNA, 25 bp, Saccharomyces pastorianus
gtatagttttttctctctcgtgcaa

SEQ ID NO: 168979 - DNA, 25 bp, Saccharomyces pastorianus
ccaatcatggtgtagtgtgtatcga

SEQ ID NO: 168980 - DNA, 25 bp, Saccharomyces pastorianus
gtgtcgacagattcaccatggatga

SEQ ID NO: 168981 - DNA, 25 bp, Saccharomyces pastorianus
agatgaccggtgtcgacagattcac

SEQ ID NO: 168982 - DNA, 25 bp, Saccharomyces pastorianus
aatcatggtgtagtgtgtatcgatg

SEQ ID NO: 168983 - DNA, 25 bp, Saccharomyces pastorianus
cgacagattcaccatggatgaagtt

SEQ ID NO: 168984 - DNA, 25 bp, Saccharomyces pastorianus
ggccaatcatggtgtagtgtgtatc

SEQ ID NO: 168985 - DNA, 25 bp, Saccharomyces pastorianus
atcggaggccactgccatggttgtg

SEQ ID NO: 168986 - DNA, 25 bp, Saccharomyces pastorianus
atggttgtggccaatcatggtgtag

SEQ ID NO: 168987 - DNA, 25 bp, Saccharomyces pastorianus
acaagatgaccggtgtcgacagatt

SEQ ID NO: 168988 - DNA, 25 bp, Saccharomyces pastorianus
gaccggtgtcgacagattcaccatg

SEQ ID NO: 168989 - DNA, 25 bp, Saccharomyces pastorianus
acatcggaggccactgccatggttg

SEQ ID NO: 168990 - DNA, 25 bp, Saccharomyces pastorianus
ttggttatttccacaaccggtagag

SEQ ID NO: 168991 - DNA, 25 bp, Saccharomyces pastorianus
ccctcaatcgccaaatctcaattgt

SEQ ID NO: 168992 - DNA, 25 bp, Saccharomyces pastorianus
gcatctttggttatttccacaaccg

SEQ ID NO: 168993 - DNA, 25 bp, Saccharomyces pastorianus
tccctcaatcgccaaatctcaattg

SEQ ID NO: 168994 - DNA, 25 bp, Saccharomyces pastorianus
caatcgccaaatctcaattgttgag

SEQ ID NO: 168995 - DNA, 25 bp, Saccharomyces pastorianus
acggcatctttggttatttccacaa

SEQ ID NO: 168996 - DNA, 25 bp, Saccharomyces pastorianus
atttttgttaaatacggcatctttg

SEQ ID NO: 168997 - DNA, 25 bp, Saccharomyces pastorianus
tggttatttccacaaccggtagagg

SEQ ID NO: 168998 - DNA, 25 bp, Saccharomyces pastorianus
ctcaattgttgagatttttgttaaa

SEQ ID NO: 168999 - DNA, 25 bp, Saccharomyces pastorianus
tacggcatctttggttatttccaca

SEQ ID NO: 169000 - DNA, 25 bp, Saccharomyces pastorianus
cggcatctttggttatttccacaac

SEQ ID NO: 169001 - DNA, 25 bp, Saccharomyces pastorianus
acctttcatttattggcatgaccat

SEQ ID NO: 169002 - DNA, 25 bp, Saccharomyces pastorianus
tggtatggagaaatttttagacacc

SEQ ID NO: 169003 - DNA, 25 bp, Saccharomyces pastorianus
gtccctgacacctttcatttattgg

SEQ ID NO: 169004 - DNA, 25 bp, Saccharomyces pastorianus
agtccctgacacctttcatttattg

SEQ ID NO: 169005 - DNA, 25 bp, Saccharomyces pastorianus
gacacctttcatttattggcatgac

SEQ ID NO: 169006 - DNA, 25 bp, Saccharomyces pastorianus
ttggcatgaccatatttagaagatc

SEQ ID NO: 169007 - DNA, 25 bp, Saccharomyces pastorianus
gaccatatttagaagatcatcgcat

SEQ ID NO: 169008 - DNA, 25 bp, Saccharomyces pastorianus
gaagatcatcgcattgatgctcatg

SEQ ID NO: 169009 - DNA, 25 bp, Saccharomyces pastorianus
ccctgacacctttcatttattggca

SEQ ID NO: 169010 - DNA, 25 bp, Saccharomyces pastorianus
ctgacacctttcatttattggcatg

SEQ ID NO: 169011 - DNA, 25 bp, Saccharomyces pastorianus
agatcatcgcattgatgctcatggg

SEQ ID NO: 169012 - DNA, 25 bp, Saccharomyces pastorianus
ggcaccgactgtaattcctttgaaa

SEQ ID NO: 169013 - DNA, 25 bp, Saccharomyces pastorianus
aacaggttacccatcgtctggtatt

SEQ ID NO: 169014 - DNA, 25 bp, Saccharomyces pastorianus
gtccaaccagcagccgtaaaactag

SEQ ID NO: 169015 - DNA, 25 bp, Saccharomyces pastorianus
agtgctgaaactgccggtacatttg

SEQ ID NO: 169016 - DNA, 25 bp, Saccharomyces pastorianus
gtacttctaatgttttcgtcacgga

SEQ ID NO: 169017 - DNA, 25 bp, Saccharomyces pastorianus
aaatccgtgtttatggcaccgactg

SEQ ID NO: 169018 - DNA, 25 bp, Saccharomyces pastorianus
actttgatactagcgccagtgctga

SEQ ID NO: 169019 - DNA, 25 bp, Saccharomyces pastorianus
gcggcgttgattccatagatgattc

SEQ ID NO: 169020 - DNA, 25 bp, Saccharomyces pastorianus
gcgaagctggctattctggccaaat

SEQ ID NO: 169021 - DNA, 25 bp, Saccharomyces pastorianus
aacccacatgcctactttgatacta

SEQ ID NO: 169022 - DNA, 25 bp, Saccharomyces pastorianus
attccatccactgctaaccaaatta

SEQ ID NO: 169023 - DNA, 25 bp, Saccharomyces pastorianus
gcacctattgtaagaagtcttcaga

SEQ ID NO: 169024 - DNA, 25 bp, Saccharomyces pastorianus
cgcacctattgtaagaagtcttcag

SEQ ID NO: 169025 - DNA, 25 bp, Saccharomyces pastorianus
ttctggcgcacctattgtaagaagt

SEQ ID NO: 169026 - DNA, 25 bp, Saccharomyces pastorianus
tttcactgactttgtttctggcgca

SEQ ID NO: 169027 - DNA, 25 bp, Saccharomyces pastorianus
cacctattgtaagaagtcttcagaa

SEQ ID NO: 169028 - DNA, 25 bp, Saccharomyces pastorianus
ggcgcacctattgtaagaagtcttc

SEQ ID NO: 169029 - DNA, 25 bp, Saccharomyces pastorianus
ctggcgcacctattgtaagaagtct

SEQ ID NO: 169030 - DNA, 25 bp, Saccharomyces pastorianus
tggcgcacctattgtaagaagtctt

SEQ ID NO: 169031 - DNA, 25 bp, Saccharomyces pastorianus
aagaagtcttcagaaaagcaccata

SEQ ID NO: 169032 - DNA, 25 bp, Saccharomyces pastorianus
gcgcacctattgtaagaagtcttca

SEQ ID NO: 169033 - DNA, 25 bp, Saccharomyces pastorianus
tctggcgcacctattgtaagaagtc

SEQ ID NO: 169034 - DNA, 25 bp, Saccharomyces pastorianus
gaagaatccctttagggtgccttca

SEQ ID NO: 169035 - DNA, 25 bp, Saccharomyces pastorianus
agggtgccttcagagatgcagctgc

SEQ ID NO: 169036 - DNA, 25 bp, Saccharomyces pastorianus
ggtgccttcagagatgcagctgcag

SEQ ID NO: 169037 - DNA, 25 bp, Saccharomyces pastorianus
cctttagggtgccttcagagatgca

SEQ ID NO: 169038 - DNA, 25 bp, Saccharomyces pastorianus
agagatgcagctgcagcttttggcc

SEQ ID NO: 169039 - DNA, 25 bp, Saccharomyces pastorianus
ttagggtgccttcagagatgcagct

SEQ ID NO: 169040 - DNA, 25 bp, Saccharomyces pastorianus
agaatccctttagggtgccttcaga

SEQ ID NO: 169041 - DNA, 25 bp, Saccharomyces pastorianus
aatccctttagggtgccttcagaga

SEQ ID NO: 169042 - DNA, 25 bp, Saccharomyces pastorianus
tccctttagggtgccttcagagatg

SEQ ID NO: 169043 - DNA, 25 bp, Saccharomyces pastorianus
agatgcagctgcagcttttggccaa

SEQ ID NO: 169044 - DNA, 25 bp, Saccharomyces pastorianus
gatgcagctgcagcttttggccaag

SEQ ID NO: 169045 - DNA, 25 bp, Saccharomyces pastorianus
ttgtctctgcgactacagcggcatg

SEQ ID NO: 169046 - DNA, 25 bp, Saccharomyces pastorianus
tcgtcacattgctgggactagctaa

SEQ ID NO: 169047 - DNA, 25 bp, Saccharomyces pastorianus
cagtattcattgatggattcttcca

SEQ ID NO: 169048 - DNA, 25 bp, Saccharomyces pastorianus
taatgttgtctctgcgactacagcg

SEQ ID NO: 169049 - DNA, 25 bp, Saccharomyces pastorianus
gcatgcctgccagcaaactcaagga

SEQ ID NO: 169050 - DNA, 25 bp, Saccharomyces pastorianus
gctgggactagctaatgttgtctct

SEQ ID NO: 169051 - DNA, 25 bp, Saccharomyces pastorianus
ctgccagcaaactcaaggaagaatg

SEQ ID NO: 169052 - DNA, 25 bp, Saccharomyces pastorianus
gccatcgtcacattgctgggactag

SEQ ID NO: 169053 - DNA, 25 bp, Saccharomyces pastorianus
actacagcggcatgcctgccagcaa

SEQ ID NO: 169054 - DNA, 25 bp, Saccharomyces pastorianus
actagctaatgttgtctctgcgact

SEQ ID NO: 169055 - DNA, 25 bp, Saccharomyces pastorianus
ggattcttccacgtattccaatgca

SEQ ID NO: 169056 - DNA, 25 bp, Saccharomyces pastorianus
attcaataccaattactcgtcacat

SEQ ID NO: 169057 - DNA, 25 bp, Saccharomyces pastorianus
aaaatgaaccatgtgcaaatcagaa

SEQ ID NO: 169058 - DNA, 25 bp, Saccharomyces pastorianus
aattactcgtcacattcttccaatc

SEQ ID NO: 169059 - DNA, 25 bp, Saccharomyces pastorianus
caattactcgtcacattcttccaat

SEQ ID NO: 169060 - DNA, 25 bp, Saccharomyces pastorianus
ataccaattactcgtcacattcttc

SEQ ID NO: 169061 - DNA, 25 bp, Saccharomyces pastorianus
gaaccatgtgcaaatcagaaacata

SEQ ID NO: 169062 - DNA, 25 bp, Saccharomyces pastorianus
tatcactttatttcatatggtttca

SEQ ID NO: 169063 - DNA, 25 bp, Saccharomyces pastorianus
cattcttccaatccgattaatattg

SEQ ID NO: 169064 - DNA, 25 bp, Saccharomyces pastorianus
tatttcatatggtttcatgcttaca

SEQ ID NO: 169065 - DNA, 25 bp, Saccharomyces pastorianus
gtcacattcttccaatccgattaat

SEQ ID NO: 169066 - DNA, 25 bp, Saccharomyces pastorianus
gaagtattcttcattcaataccaat

SEQ ID NO: 169067 - DNA, 25 bp, Saccharomyces pastorianus
gcataggtttattgtcccttggtta

SEQ ID NO: 169068 - DNA, 25 bp, Saccharomyces pastorianus
ggattttgccccttgcataaaagag

SEQ ID NO: 169069 - DNA, 25 bp, Saccharomyces pastorianus
tcttagcgtttcgtacctgggtaat

SEQ ID NO: 169070 - DNA, 25 bp, Saccharomyces pastorianus
gtgtccaaaacaattcttcttcaac

SEQ ID NO: 169071 - DNA, 25 bp, Saccharomyces pastorianus
ggttatctggaccttaatggcttgt

SEQ ID NO: 169072 - DNA, 25 bp, Saccharomyces pastorianus
aatggcttgtttgtacctcagaata

SEQ ID NO: 169073 - DNA, 25 bp, Saccharomyces pastorianus
gagtctttcaagttcttagcgtttc

SEQ ID NO: 169074 - DNA, 25 bp, Saccharomyces pastorianus
attcttcttcaaccattctctttga

SEQ ID NO: 169075 - DNA, 25 bp, Saccharomyces pastorianus
agtcatttcaggattttgccccttg

SEQ ID NO: 169076 - DNA, 25 bp, Saccharomyces pastorianus
tcagatacgggcatcaatgatcgga

SEQ ID NO: 169077 - DNA, 25 bp, Saccharomyces pastorianus
acctggaagttttatgagtctttca

SEQ ID NO: 169078 - DNA, 25 bp, Saccharomyces pastorianus
gttcatcctacgcatgtgtagagct

SEQ ID NO: 169079 - DNA, 25 bp, Saccharomyces pastorianus
ggatggcgaaacgttaggctcaagt

SEQ ID NO: 169080 - DNA, 25 bp, Saccharomyces pastorianus
gctcttatgatgtatggtgctccga

SEQ ID NO: 169081 - DNA, 25 bp, Saccharomyces pastorianus
tttacaaagacaccggttcatccta

SEQ ID NO: 169082 - DNA, 25 bp, Saccharomyces pastorianus
ttacggttcacattgcagacatttt

SEQ ID NO: 169083 - DNA, 25 bp, Saccharomyces pastorianus
gaaggtatttcttctactgctggaa

SEQ ID NO: 169084 - DNA, 25 bp, Saccharomyces pastorianus
aatcgtagacgttcatgagggcgac

SEQ ID NO: 169085 - DNA, 25 bp, Saccharomyces pastorianus
gtgctccgacgcataggcttgaaga

SEQ ID NO: 169086 - DNA, 25 bp, Saccharomyces pastorianus
aagacgtaccagttgccaagcgtag

SEQ ID NO: 169087 - DNA, 25 bp, Saccharomyces pastorianus
tatccgatctagctgatgcgtctaa

SEQ ID NO: 169088 - DNA, 25 bp, Saccharomyces pastorianus
ttcatccgacgataacgaagggttt

SEQ ID NO: 169089 - DNA, 25 bp, Saccharomyces pastorianus
ttggcagttacgtctcgagctattt

SEQ ID NO: 169090 - DNA, 25 bp, Saccharomyces pastorianus
attttggcagttacgtctcgagcta

SEQ ID NO: 169091 - DNA, 25 bp, Saccharomyces pastorianus
ttacaattttggcagttacgtctcg

SEQ ID NO: 169092 - DNA, 25 bp, Saccharomyces pastorianus
aattttggcagttacgtctcgagct

SEQ ID NO: 169093 - DNA, 25 bp, Saccharomyces pastorianus
tttggcagttacgtctcgagctatt

SEQ ID NO: 169094 - DNA, 25 bp, Saccharomyces pastorianus
caattttggcagttacgtctcgagc

SEQ ID NO: 169095 - DNA, 25 bp, Saccharomyces pastorianus
tggcagttacgtctcgagctattta

SEQ ID NO: 169096 - DNA, 25 bp, Saccharomyces pastorianus
acaattttggcagttacgtctcgag

SEQ ID NO: 169097 - DNA, 25 bp, Saccharomyces pastorianus
ttttggcagttacgtctcgagctat

SEQ ID NO: 169098 - DNA, 25 bp, Saccharomyces pastorianus
tacaattttggcagttacgtctcga

SEQ ID NO: 169099 - DNA, 25 bp, Saccharomyces pastorianus
ggcagttacgtctcgagctatttat

SEQ ID NO: 169100 - DNA, 25 bp, Saccharomyces pastorianus
gttcatctgcaccaagtgaaaccgt

SEQ ID NO: 169101 - DNA, 25 bp, Saccharomyces pastorianus
agccccaacaaagagacgtcgtcaa

SEQ ID NO: 169102 - DNA, 25 bp, Saccharomyces pastorianus
ttccggttcatctgcaccaagtgaa

SEQ ID NO: 169103 - DNA, 25 bp, Saccharomyces pastorianus
tgcaccaagtgaaaccgtcgaaaag

SEQ ID NO: 169104 - DNA, 25 bp, Saccharomyces pastorianus
tcaacttccggttcatctgcaccaa

SEQ ID NO: 169105 - DNA, 25 bp, Saccharomyces pastorianus
tatcgaagccgaagttagtgatgat

SEQ ID NO: 169106 - DNA, 25 bp, Saccharomyces pastorianus
gatgaagccccaacaaagagacgtc

SEQ ID NO: 169107 - DNA, 25 bp, Saccharomyces pastorianus
gccaaaaatggcgatgacgacaaca

SEQ ID NO: 169108 - DNA, 25 bp, Saccharomyces pastorianus
ataggttcttggatatcgaagccga

SEQ ID NO: 169109 - DNA, 25 bp, Saccharomyces pastorianus
acgtcgtcaagagaggaataggttc

SEQ ID NO: 169110 - DNA, 25 bp, Saccharomyces pastorianus
agagacctcgtgaagaggaagccaa

SEQ ID NO: 169111 - DNA, 25 bp, Saccharomyces pastorianus
tccggcttggttaacacaactgggt

SEQ ID NO: 169112 - DNA, 25 bp, Saccharomyces pastorianus
gaatggattctctctcaggcgaaga

SEQ ID NO: 169113 - DNA, 25 bp, Saccharomyces pastorianus
tggtccagacttacaatacatttta

SEQ ID NO: 169114 - DNA, 25 bp, Saccharomyces pastorianus
agagttgctcctaatgacgatcctt

SEQ ID NO: 169115 - DNA, 25 bp, Saccharomyces pastorianus
cagcctctaggttgcgaatttgttc

SEQ ID NO: 169116 - DNA, 25 bp, Saccharomyces pastorianus
aatgcacccaacttgctaatggata

SEQ ID NO: 169117 - DNA, 25 bp, Saccharomyces pastorianus
ttgttcctaacgactacttgcactg

SEQ ID NO: 169118 - DNA, 25 bp, Saccharomyces pastorianus
atattacatattcatccggcttggt

SEQ ID NO: 169119 - DNA, 25 bp, Saccharomyces pastorianus
aaacacgactttacgagacgatcat

SEQ ID NO: 169120 - DNA, 25 bp, Saccharomyces pastorianus
acaactgggtcaattgttttccaat

SEQ ID NO: 169121 - DNA, 25 bp, Saccharomyces pastorianus
ggaaagtccaaaacttgcacgcaat

SEQ ID NO: 169122 - DNA, 25 bp, Saccharomyces pastorianus
ataactgctcttttaggctcctcaa

SEQ ID NO: 169123 - DNA, 25 bp, Saccharomyces pastorianus
ctctcatgcctcaacagcaagcaaa

SEQ ID NO: 169124 - DNA, 25 bp, Saccharomyces pastorianus
tgatggtatccctataactgctctt

SEQ ID NO: 169125 - DNA, 25 bp, Saccharomyces pastorianus
aataccatctcgagctcaaactctt

SEQ ID NO: 169126 - DNA, 25 bp, Saccharomyces pastorianus
gcgatctctgaagctactgatggta

SEQ ID NO: 169127 - DNA, 25 bp, Saccharomyces pastorianus
ttaggctcctcaagttccgggaaca

SEQ ID NO: 169128 - DNA, 25 bp, Saccharomyces pastorianus
tggcgaactaagcacatcgacgagt

SEQ ID NO: 169129 - DNA, 25 bp, Saccharomyces pastorianus
gtgcaattgcatctgcgatctctga

SEQ ID NO: 169130 - DNA, 25 bp, Saccharomyces pastorianus
atcgacgagtcctgaattatccggg

SEQ ID NO: 169131 - DNA, 25 bp, Saccharomyces pastorianus
accacttcgaactcaacatctgttt

SEQ ID NO: 169132 - DNA, 25 bp, Saccharomyces pastorianus
atctgtttcctcttcgaattcagca

SEQ ID NO: 169133 - DNA, 25 bp, Saccharomyces pastorianus
tttgcggaactacttgacagctaaa

SEQ ID NO: 169134 - DNA, 25 bp, Saccharomyces pastorianus
aaatccctaagattgacttgcccaa

SEQ ID NO: 169135 - DNA, 25 bp, Saccharomyces pastorianus
gtaatgtactactttgttccgtctt

SEQ ID NO: 169136 - DNA, 25 bp, Saccharomyces pastorianus
gacattgatgttttgcgtttattta

SEQ ID NO: 169137 - DNA, 25 bp, Saccharomyces pastorianus
ctttcggcagttgcgattttcttcc

SEQ ID NO: 169138 - DNA, 25 bp, Saccharomyces pastorianus
ttgctattgctttgcggaactactt

SEQ ID NO: 169139 - DNA, 25 bp, Saccharomyces pastorianus
catcggtgatatactgaaggccaac

SEQ ID NO: 169140 - DNA, 25 bp, Saccharomyces pastorianus
ggccaacaaggagttctttccatcg

SEQ ID NO: 169141 - DNA, 25 bp, Saccharomyces pastorianus
acgggcccctttcggcagttgcgat

SEQ ID NO: 169142 - DNA, 25 bp, Saccharomyces pastorianus
gttccgtcttaaagttattgttcag

SEQ ID NO: 169143 - DNA, 25 bp, Saccharomyces pastorianus
gacttgcccaatgaacatcggtgat

SEQ ID NO: 169144 - DNA, 25 bp, Saccharomyces pastorianus
tatccggcggcaacattattactct

SEQ ID NO: 169145 - DNA, 25 bp, Saccharomyces pastorianus
gaaaacttcagtcgctcattattag

SEQ ID NO: 169146 - DNA, 25 bp, Saccharomyces pastorianus
aagaggaaacttcaacgcttcattt

SEQ ID NO: 169147 - DNA, 25 bp, Saccharomyces pastorianus
gaaccagggaggtccaggctttgct

SEQ ID NO: 169148 - DNA, 25 bp, Saccharomyces pastorianus
atcggcattattgtgtatggctcaa

SEQ ID NO: 169149 - DNA, 25 bp, Saccharomyces pastorianus
ataatatgccaccacttacctttaa

SEQ ID NO: 169150 - DNA, 25 bp, Saccharomyces pastorianus
gacatattcttaccaatcctttcat

SEQ ID NO: 169151 - DNA, 25 bp, Saccharomyces pastorianus
atacgggcgtaactccataatatgc

SEQ ID NO: 169152 - DNA, 25 bp, Saccharomyces pastorianus
gttgcagatttgtcgattggtcgcc

SEQ ID NO: 169153 - DNA, 25 bp, Saccharomyces pastorianus
gatcgatcctcagctgcaaatactt

SEQ ID NO: 169154 - DNA, 25 bp, Saccharomyces pastorianus
gaatactaccagatcgatcctcagc

SEQ ID NO: 169155 - DNA, 25 bp, Saccharomyces pastorianus
tcattttctttcactaaacctcctg

SEQ ID NO: 169156 - DNA, 25 bp, Saccharomyces pastorianus
gcgtttgcgtcttcaaaaacctcac

SEQ ID NO: 169157 - DNA, 25 bp, Saccharomyces pastorianus
taaacctcctgctaatgagacagat

SEQ ID NO: 169158 - DNA, 25 bp, Saccharomyces pastorianus
tcacctttggcggttccacaacaaa

SEQ ID NO: 169159 - DNA, 25 bp, Saccharomyces pastorianus
taaaaagccctcctttgcgtttgcg

SEQ ID NO: 169160 - DNA, 25 bp, Saccharomyces pastorianus
gataaaagacctacaccgccatctt

SEQ ID NO: 169161 - DNA, 25 bp, Saccharomyces pastorianus
gattcatctgttgtttcggaaccta

SEQ ID NO: 169162 - DNA, 25 bp, Saccharomyces pastorianus
ggctcccgagtcgatgaagtcgaca

SEQ ID NO: 169163 - DNA, 25 bp, Saccharomyces pastorianus
caaccactagcacaaaaccatcttt

SEQ ID NO: 169164 - DNA, 25 bp, Saccharomyces pastorianus
aacctgctcaaatagattcatctgt

SEQ ID NO: 169165 - DNA, 25 bp, Saccharomyces pastorianus
gcagctaaagaaccaccaggctcta

SEQ ID NO: 169166 - DNA, 25 bp, Saccharomyces pastorianus
tttgtttccacaccgttctgtgaga

SEQ ID NO: 169167 - DNA, 25 bp, Saccharomyces pastorianus
ttcaactactttgtttccacaccgt

SEQ ID NO: 169168 - DNA, 25 bp, Saccharomyces pastorianus
caccgttctgtgagattgatttgta

SEQ ID NO: 169169 - DNA, 25 bp, Saccharomyces pastorianus
attctcttcattgagatccttcaac

SEQ ID NO: 169170 - DNA, 25 bp, Saccharomyces pastorianus
tccacaccgttctgtgagattgatt

SEQ ID NO: 169171 - DNA, 25 bp, Saccharomyces pastorianus
atccttcaactactttgtttccaca

SEQ ID NO: 169172 - DNA, 25 bp, Saccharomyces pastorianus
ccacattctcttcattgagatcctt

SEQ ID NO: 169173 - DNA, 25 bp, Saccharomyces pastorianus
cattgagatccttcaactactttgt

SEQ ID NO: 169174 - DNA, 25 bp, Saccharomyces pastorianus
gagatccttcaactactttgtttcc

SEQ ID NO: 169175 - DNA, 25 bp, Saccharomyces pastorianus
actactttgtttccacaccgttctg

SEQ ID NO: 169176 - DNA, 25 bp, Saccharomyces pastorianus
gtttccacaccgttctgtgagattg

SEQ ID NO: 169177 - DNA, 25 bp, Saccharomyces pastorianus
gacttctttgtaagcgtacagctaa

SEQ ID NO: 169178 - DNA, 25 bp, Saccharomyces pastorianus
gagtataaacgcaaatagtaaagct

SEQ ID NO: 169179 - DNA, 25 bp, Saccharomyces pastorianus
attcatcacgtataattggacatcc

SEQ ID NO: 169180 - DNA, 25 bp, Saccharomyces pastorianus
gtacagctaaagtttaccgataagt

SEQ ID NO: 169181 - DNA, 25 bp, Saccharomyces pastorianus
aagcgtacagctaaagtttaccgat

SEQ ID NO: 169182 - DNA, 25 bp, Saccharomyces pastorianus
tataattggacatccgtggagttcc

SEQ ID NO: 169183 - DNA, 25 bp, Saccharomyces pastorianus
tttaccgataagttacgataagaag

SEQ ID NO: 169184 - DNA, 25 bp, Saccharomyces pastorianus
aaatgacttctttgtaagcgtacag

SEQ ID NO: 169185 - DNA, 25 bp, Saccharomyces pastorianus
gtagtgtctaagtaaatgacttctt

SEQ ID NO: 169186 - DNA, 25 bp, Saccharomyces pastorianus
atccgtggagttccaaaaggagtat

SEQ ID NO: 169187 - DNA, 25 bp, Saccharomyces pastorianus
ggacatccgtggagttccaaaagga

SEQ ID NO: 169188 - DNA, 25 bp, Saccharomyces pastorianus
ttatcggcgactcagcgtactgtag

SEQ ID NO: 169189 - DNA, 25 bp, Saccharomyces pastorianus
atccttcattttctgtcgcaattgg

SEQ ID NO: 169190 - DNA, 25 bp, Saccharomyces pastorianus
ggacggagagtgtcctttttctctc

SEQ ID NO: 169191 - DNA, 25 bp, Saccharomyces pastorianus
tgcctgttgggcctgcctaagtcag

SEQ ID NO: 169192 - DNA, 25 bp, Saccharomyces pastorianus
tcgcacccggaaagtaaagcttatt

SEQ ID NO: 169193 - DNA, 25 bp, Saccharomyces pastorianus
tagctctaggcggagggtctttatc

SEQ ID NO: 169194 - DNA, 25 bp, Saccharomyces pastorianus
acttttgaagatgggccttgcctgt

SEQ ID NO: 169195 - DNA, 25 bp, Saccharomyces pastorianus
ttggcatactccctcgaaggatcga

SEQ ID NO: 169196 - DNA, 25 bp, Saccharomyces pastorianus
gactcagcgtactgtagggaccacc

SEQ ID NO: 169197 - DNA, 25 bp, Saccharomyces pastorianus
gatcgactgtttgagtgcatccttc

SEQ ID NO: 169198 - DNA, 25 bp, Saccharomyces pastorianus
taatcgcactacatgcacgaggcct

SEQ ID NO: 169199 - DNA, 25 bp, Saccharomyces pastorianus
gttgttagagcctacaatattaggt

SEQ ID NO: 169200 - DNA, 25 bp, Saccharomyces pastorianus
agaacttcttctcgaggatgtagga

SEQ ID NO: 169201 - DNA, 25 bp, Saccharomyces pastorianus
tccattgttgttagagcctacaata

SEQ ID NO: 169202 - DNA, 25 bp, Saccharomyces pastorianus
gttagagcctacaatattaggtaca

SEQ ID NO: 169203 - DNA, 25 bp, Saccharomyces pastorianus
gcctacaatattaggtacacagaat

SEQ ID NO: 169204 - DNA, 25 bp, Saccharomyces pastorianus
ggattccattgttgttagagcctac

SEQ ID NO: 169205 - DNA, 25 bp, Saccharomyces pastorianus
cattgttgttagagcctacaatatt

SEQ ID NO: 169206 - DNA, 25 bp, Saccharomyces pastorianus
gattccattgttgttagagcctaca

SEQ ID NO: 169207 - DNA, 25 bp, Saccharomyces pastorianus
agagcctacaatattaggtacacag

SEQ ID NO: 169208 - DNA, 25 bp, Saccharomyces pastorianus
ttccattgttgttagagcctacaat

SEQ ID NO: 169209 - DNA, 25 bp, Saccharomyces pastorianus
attccattgttgttagagcctacaa

SEQ ID NO: 169210 - DNA, 25 bp, Saccharomyces pastorianus
tccctccctttcgtatgtttcatta

SEQ ID NO: 169211 - DNA, 25 bp, Saccharomyces pastorianus
gaatataatagaatttcccctgaga

SEQ ID NO: 169212 - DNA, 25 bp, Saccharomyces pastorianus
ttatttctccctccctttcgtatgt

SEQ ID NO: 169213 - DNA, 25 bp, Saccharomyces pastorianus
caattacaattatttctccctccct

SEQ ID NO: 169214 - DNA, 25 bp, Saccharomyces pastorianus
gattctattgttggcaagggcttta

SEQ ID NO: 169215 - DNA, 25 bp, Saccharomyces pastorianus
ctcaaattggaatcgatactcctat

SEQ ID NO: 169216 - DNA, 25 bp, Saccharomyces pastorianus
cgaatcctcaaattggaatcgatac

SEQ ID NO: 169217 - DNA, 25 bp, Saccharomyces pastorianus
gagagatatacgaatcctcaaattg

SEQ ID NO: 169218 - DNA, 25 bp, Saccharomyces pastorianus
atagaatttcccctgagagatatac

SEQ ID NO: 169219 - DNA, 25 bp, Saccharomyces pastorianus
gaatcgatactcctatataatacaa

SEQ ID NO: 169220 - DNA, 25 bp, Saccharomyces pastorianus
tattgttggcaagggctttatttta

SEQ ID NO: 169221 - DNA, 25 bp, Saccharomyces pastorianus
ataaatgctcttctgctgtgtgtgt

SEQ ID NO: 169222 - DNA, 25 bp, Saccharomyces pastorianus
gatcagtgattgttctttgtccttc

SEQ ID NO: 169223 - DNA, 25 bp, Saccharomyces pastorianus
atgctcttctgctgtgtgtgttgcg

SEQ ID NO: 169224 - DNA, 25 bp, Saccharomyces pastorianus
tacaccgtacgctcccacttaaatg

SEQ ID NO: 169225 - DNA, 25 bp, Saccharomyces pastorianus
cacttaaatgccacacacttaaatt

SEQ ID NO: 169226 - DNA, 25 bp, Saccharomyces pastorianus
tgctttgctagtatgaacaggatca

SEQ ID NO: 169227 - DNA, 25 bp, Saccharomyces pastorianus
tcgattccgagtttgacttcgtctt

SEQ ID NO: 169228 - DNA, 25 bp, Saccharomyces pastorianus
attccgagtttgacttcgtcttcgt

SEQ ID NO: 169229 - DNA, 25 bp, Saccharomyces pastorianus
gttgcgttttgctttgctagtatga

SEQ ID NO: 169230 - DNA, 25 bp, Saccharomyces pastorianus
cagtgattgttctttgtccttcctt

SEQ ID NO: 169231 - DNA, 25 bp, Saccharomyces pastorianus
tgtgttgcgttttgctttgctagta

SEQ ID NO: 169232 - DNA, 25 bp, Saccharomyces pastorianus
aattctgccgctaaagttttgtgct

SEQ ID NO: 169233 - DNA, 25 bp, Saccharomyces pastorianus
ggtctctcaagaacacgggatactg

SEQ ID NO: 169234 - DNA, 25 bp, Saccharomyces pastorianus
gtggatcctcagtttgatccttcta

SEQ ID NO: 169235 - DNA, 25 bp, Saccharomyces pastorianus
attaacactttctgtgggcgctact

SEQ ID NO: 169236 - DNA, 25 bp, Saccharomyces pastorianus
aaagttttgtgctctgtggatcctc

SEQ ID NO: 169237 - DNA, 25 bp, Saccharomyces pastorianus
gatcacgaattgtctggttttgtat

SEQ ID NO: 169238 - DNA, 25 bp, Saccharomyces pastorianus
ggcaacaggctgtgtccaagatcac

SEQ ID NO: 169239 - DNA, 25 bp, Saccharomyces pastorianus
atggtatgtagcaagggtctctcaa

SEQ ID NO: 169240 - DNA, 25 bp, Saccharomyces pastorianus
caggagtgatgtgtctaacgcgaga

SEQ ID NO: 169241 - DNA, 25 bp, Saccharomyces pastorianus
agtactatcatcttacccttctaga

SEQ ID NO: 169242 - DNA, 25 bp, Saccharomyces pastorianus
gtacgcttgaaatccactgtggtaa

SEQ ID NO: 169243 - DNA, 25 bp, Saccharomyces pastorianus
aaggacctctatgattggacaatgg

SEQ ID NO: 169244 - DNA, 25 bp, Saccharomyces pastorianus
atgtcgtttactgctccttcagatc

SEQ ID NO: 169245 - DNA, 25 bp, Saccharomyces pastorianus
ttctgcctcgtgttcgagacggaga

SEQ ID NO: 169246 - DNA, 25 bp, Saccharomyces pastorianus
gacggagatccataacactattgta

SEQ ID NO: 169247 - DNA, 25 bp, Saccharomyces pastorianus
gaagcttctgaatgaccgttacgat

SEQ ID NO: 169248 - DNA, 25 bp, Saccharomyces pastorianus
cagtacggccttcctttggagattt

SEQ ID NO: 169249 - DNA, 25 bp, Saccharomyces pastorianus
aggaatcagcagcagtacggccttc

SEQ ID NO: 169250 - DNA, 25 bp, Saccharomyces pastorianus
tttgcaaacaatgcttctgcctcgt

SEQ ID NO: 169251 - DNA, 25 bp, Saccharomyces pastorianus
gaaaggctctcattagaagacccaa

SEQ ID NO: 169252 - DNA, 25 bp, Saccharomyces pastorianus
gagattgtatccgttgctggtataa

SEQ ID NO: 169253 - DNA, 25 bp, Saccharomyces pastorianus
gactccacggtgttagcgcatatgc

SEQ ID NO: 169254 - DNA, 25 bp, Saccharomyces pastorianus
tacgtccacacttacgatgagtgat

SEQ ID NO: 169255 - DNA, 25 bp, Saccharomyces pastorianus
tcgagcagtaattaccattttaggt

SEQ ID NO: 169256 - DNA, 25 bp, Saccharomyces pastorianus
aaccctgataagaccttctgagaaa

SEQ ID NO: 169257 - DNA, 25 bp, Saccharomyces pastorianus
gagtgatatacctatcgctacgata

SEQ ID NO: 169258 - DNA, 25 bp, Saccharomyces pastorianus
cgagggtggtcaacggcagataaca

SEQ ID NO: 169259 - DNA, 25 bp, Saccharomyces pastorianus
ggcagataacaacgataccacataa

SEQ ID NO: 169260 - DNA, 25 bp, Saccharomyces pastorianus
acgttggcggcatcactacaagagt

SEQ ID NO: 169261 - DNA, 25 bp, Saccharomyces pastorianus
tgattacaatcacagcttcagcaga

SEQ ID NO: 169262 - DNA, 25 bp, Saccharomyces pastorianus
agtttgtccgtatcaaccctgataa

SEQ ID NO: 169263 - DNA, 25 bp, Saccharomyces pastorianus
taccacataattccacgttggcggc

SEQ ID NO: 169264 - DNA, 25 bp, Saccharomyces pastorianus
tggcctttacgttggttggaccgag

SEQ ID NO: 169265 - DNA, 25 bp, Saccharomyces pastorianus
ttccagccatttatccacttagaca

SEQ ID NO: 169266 - DNA, 25 bp, Saccharomyces pastorianus
gaaactcttcttctacacaatttta

SEQ ID NO: 169267 - DNA, 25 bp, Saccharomyces pastorianus
aagtgtaattggcagcttgtttgct

SEQ ID NO: 169268 - DNA, 25 bp, Saccharomyces pastorianus
tagctgtattatcatctgccctgtt

SEQ ID NO: 169269 - DNA, 25 bp, Saccharomyces pastorianus
attcctcaaagagcttccagccatt

SEQ ID NO: 169270 - DNA, 25 bp, Saccharomyces pastorianus
gaaagagttccattcctcaaagagc

SEQ ID NO: 169271 - DNA, 25 bp, Saccharomyces pastorianus
tcgccgtcggttctaaatcttcata

SEQ ID NO: 169272 - DNA, 25 bp, Saccharomyces pastorianus
ttatccacttagacactcaaccaaa

SEQ ID NO: 169273 - DNA, 25 bp, Saccharomyces pastorianus
ttgcaatttgtggtttaatcgttac

SEQ ID NO: 169274 - DNA, 25 bp, Saccharomyces pastorianus
gtggtttaatcgttacattagctgt

SEQ ID NO: 169275 - DNA, 25 bp, Saccharomyces pastorianus
agcttgtttgctggcttgaccactg

SEQ ID NO: 169276 - DNA, 25 bp, Saccharomyces pastorianus
cccacaggatgttcctactgtctaa

SEQ ID NO: 169277 - DNA, 25 bp, Saccharomyces pastorianus
agctgctatttcaaatataggccca

SEQ ID NO: 169278 - DNA, 25 bp, Saccharomyces pastorianus
aaaaagtgaggtctgacggatctga

SEQ ID NO: 169279 - DNA, 25 bp, Saccharomyces pastorianus
cacaggatgttcctactgtctaaaa

SEQ ID NO: 169280 - DNA, 25 bp, Saccharomyces pastorianus
taggcccacaggatgttcctactgt

SEQ ID NO: 169281 - DNA, 25 bp, Saccharomyces pastorianus
tatttcaaatataggcccacaggat

SEQ ID NO: 169282 - DNA, 25 bp, Saccharomyces pastorianus
caaatataggcccacaggatgttcc

SEQ ID NO: 169283 - DNA, 25 bp, Saccharomyces pastorianus
tttcagttcaaaagttagctgctat

SEQ ID NO: 169284 - DNA, 25 bp, Saccharomyces pastorianus
gttttcagttcaaaagttagctgct

SEQ ID NO: 169285 - DNA, 25 bp, Saccharomyces pastorianus
caggatgttcctactgtctaaaaaa

SEQ ID NO: 169286 - DNA, 25 bp, Saccharomyces pastorianus
tataggcccacaggatgttcctact

SEQ ID NO: 169287 - DNA, 25 bp, Saccharomyces pastorianus
gaatttagattaagatcctcgtaca

SEQ ID NO: 169288 - DNA, 25 bp, Saccharomyces pastorianus
agcctatgcccaagactgaattcag

SEQ ID NO: 169289 - DNA, 25 bp, Saccharomyces pastorianus
atccgaatttagattaagatcctcg

SEQ ID NO: 169290 - DNA, 25 bp, Saccharomyces pastorianus
agattaagatcctcgtacagaagcc

SEQ ID NO: 169291 - DNA, 25 bp, Saccharomyces pastorianus
gcctatgcccaagactgaattcagt

SEQ ID NO: 169292 - DNA, 25 bp, Saccharomyces pastorianus
acagaagcctatgcccaagactgaa

SEQ ID NO: 169293 - DNA, 25 bp, Saccharomyces pastorianus
gcccaagactgaattcagtctgctc

SEQ ID NO: 169294 - DNA, 25 bp, Saccharomyces pastorianus
gaagcctatgcccaagactgaattc

SEQ ID NO: 169295 - DNA, 25 bp, Saccharomyces pastorianus
aagcctatgcccaagactgaattca

SEQ ID NO: 169296 - DNA, 25 bp, Saccharomyces pastorianus
gtacagaagcctatgcccaagactg

SEQ ID NO: 169297 - DNA, 25 bp, Saccharomyces pastorianus
cgtacagaagcctatgcccaagact

SEQ ID NO: 169298 - DNA, 25 bp, Saccharomyces pastorianus
gaacattatttgaacttagccgact

SEQ ID NO: 169299 - DNA, 25 bp, Saccharomyces pastorianus
gtctaatccttctcgtgttgacgaa

SEQ ID NO: 169300 - DNA, 25 bp, Saccharomyces pastorianus
attgctgctacctcaggatggtata

SEQ ID NO: 169301 - DNA, 25 bp, Saccharomyces pastorianus
gactcgattctagttaccaattgca

SEQ ID NO: 169302 - DNA, 25 bp, Saccharomyces pastorianus
attaatttcaccattgctgctacct

SEQ ID NO: 169303 - DNA, 25 bp, Saccharomyces pastorianus
ttcatctccgacatcttcaactatc

SEQ ID NO: 169304 - DNA, 25 bp, Saccharomyces pastorianus
gctagagtccttattaatttcacca

SEQ ID NO: 169305 - DNA, 25 bp, Saccharomyces pastorianus
aactatcccctttgacgagttggag

SEQ ID NO: 169306 - DNA, 25 bp, Saccharomyces pastorianus
gcatcaaacctcttcgagccgacta

SEQ ID NO: 169307 - DNA, 25 bp, Saccharomyces pastorianus
ttagccgactctcttagactcgatt

SEQ ID NO: 169308 - DNA, 25 bp, Saccharomyces pastorianus
ggttacgaaaacaacttgccacgat

SEQ ID NO: 169309 - DNA, 25 bp, Saccharomyces pastorianus
taacttacgctgcttttgttcttct

SEQ ID NO: 169310 - DNA, 25 bp, Saccharomyces pastorianus
tgctttcgggttttgttctttatcg

SEQ ID NO: 169311 - DNA, 25 bp, Saccharomyces pastorianus
atcacggaaagaatcaccacaccaa

SEQ ID NO: 169312 - DNA, 25 bp, Saccharomyces pastorianus
ttttgttcttctcccttaagcgatt

SEQ ID NO: 169313 - DNA, 25 bp, Saccharomyces pastorianus
cattttattgcggtgcttgctttcg

SEQ ID NO: 169314 - DNA, 25 bp, Saccharomyces pastorianus
tagtctttactaacttacgctgctt

SEQ ID NO: 169315 - DNA, 25 bp, Saccharomyces pastorianus
atcaccacaccaaacgccgatagga

SEQ ID NO: 169316 - DNA, 25 bp, Saccharomyces pastorianus
cttctcccttaagcgattttttcag

SEQ ID NO: 169317 - DNA, 25 bp, Saccharomyces pastorianus
aacaggtttcattttattgcggtgc

SEQ ID NO: 169318 - DNA, 25 bp, Saccharomyces pastorianus
gttttgttctttatcgtaatagtct

SEQ ID NO: 169319 - DNA, 25 bp, Saccharomyces pastorianus
cttgccagtggatacaacaggtttc

SEQ ID NO: 169320 - DNA, 25 bp, Saccharomyces pastorianus
ggctgcattggtatacctgatgttt

SEQ ID NO: 169321 - DNA, 25 bp, Saccharomyces pastorianus
tgcattggtatacctgatgtttttc

SEQ ID NO: 169322 - DNA, 25 bp, Saccharomyces pastorianus
tggctgcattggtatacctgatgtt

SEQ ID NO: 169323 - DNA, 25 bp, Saccharomyces pastorianus
attctgcggattccaagtatacttg

SEQ ID NO: 169324 - DNA, 25 bp, Saccharomyces pastorianus
cgtattctgcggattccaagtatac

SEQ ID NO: 169325 - DNA, 25 bp, Saccharomyces pastorianus
tattctgcggattccaagtatactt

SEQ ID NO: 169326 - DNA, 25 bp, Saccharomyces pastorianus
gctgcattggtatacctgatgtttt

SEQ ID NO: 169327 - DNA, 25 bp, Saccharomyces pastorianus
tcgtattctgcggattccaagtata

SEQ ID NO: 169328 - DNA, 25 bp, Saccharomyces pastorianus
gtattctgcggattccaagtatact

SEQ ID NO: 169329 - DNA, 25 bp, Saccharomyces pastorianus
cattggtatacctgatgtttttcgt

SEQ ID NO: 169330 - DNA, 25 bp, Saccharomyces pastorianus
attggtatacctgatgtttttcgta

SEQ ID NO: 169331 - DNA, 25 bp, Saccharomyces pastorianus
cattgtcactggtggtaatggacca

SEQ ID NO: 169332 - DNA, 25 bp, Saccharomyces pastorianus
gccactaccccatatatgaccaaat

SEQ ID NO: 169333 - DNA, 25 bp, Saccharomyces pastorianus
acaattcaaggagggcgaagccact

SEQ ID NO: 169334 - DNA, 25 bp, Saccharomyces pastorianus
gagcatttctctgatgaagagacct

SEQ ID NO: 169335 - DNA, 25 bp, Saccharomyces pastorianus
cactgatgcggacggtaagaccatt

SEQ ID NO: 169336 - DNA, 25 bp, Saccharomyces pastorianus
aaggaagaaagagccactaccccat

SEQ ID NO: 169337 - DNA, 25 bp, Saccharomyces pastorianus
gagacctacggagaaaaaccacaat

SEQ ID NO: 169338 - DNA, 25 bp, Saccharomyces pastorianus
gaagatttccaacaacaagagcaaa

SEQ ID NO: 169339 - DNA, 25 bp, Saccharomyces pastorianus
gcgaagccactgatgcggacggtaa

SEQ ID NO: 169340 - DNA, 25 bp, Saccharomyces pastorianus
aatggaccagaagatttccaacaac

SEQ ID NO: 169341 - DNA, 25 bp, Saccharomyces pastorianus
gaaagagccactaccccatatatga

SEQ ID NO: 169342 - DNA, 25 bp, Saccharomyces pastorianus
taatttggcaaaagcactatcgaag

SEQ ID NO: 169343 - DNA, 25 bp, Saccharomyces pastorianus
ggcaaaaagaggctgatgaatcatc

SEQ ID NO: 169344 - DNA, 25 bp, Saccharomyces pastorianus
cagcgattgttctaaaatttcattt

SEQ ID NO: 169345 - DNA, 25 bp, Saccharomyces pastorianus
gaatagggccctgaatgatcatact

SEQ ID NO: 169346 - DNA, 25 bp, Saccharomyces pastorianus
cttggtggcgtatcaaccgctaatt

SEQ ID NO: 169347 - DNA, 25 bp, Saccharomyces pastorianus
gcgtatcaaccgctaatttgaataa

SEQ ID NO: 169348 - DNA, 25 bp, Saccharomyces pastorianus
tagtgaaaatatatccaagtggcaa

SEQ ID NO: 169349 - DNA, 25 bp, Saccharomyces pastorianus
gtgtgggcagttgaaccatgaatca

SEQ ID NO: 169350 - DNA, 25 bp, Saccharomyces pastorianus
agagatgtccttggtggcgtatcaa

SEQ ID NO: 169351 - DNA, 25 bp, Saccharomyces pastorianus
gcactatcgaagaatagggccctga

SEQ ID NO: 169352 - DNA, 25 bp, Saccharomyces pastorianus
aaacgctagccattttttcgccaca

SEQ ID NO: 169353 - DNA, 25 bp, Saccharomyces pastorianus
agattcggacgacgttctattcact

SEQ ID NO: 169354 - DNA, 25 bp, Saccharomyces pastorianus
agcaagccttcatatcacgatcatt

SEQ ID NO: 169355 - DNA, 25 bp, Saccharomyces pastorianus
tggctccactagtacggttcaacat

SEQ ID NO: 169356 - DNA, 25 bp, Saccharomyces pastorianus
aacggctatacaaggcgtggctcca

SEQ ID NO: 169357 - DNA, 25 bp, Saccharomyces pastorianus
tctaaatttatcttccggaccagtt

SEQ ID NO: 169358 - DNA, 25 bp, Saccharomyces pastorianus
catacatgatcacttgccaccaata

SEQ ID NO: 169359 - DNA, 25 bp, Saccharomyces pastorianus
taaaatcaccagcatcttccgaagc

SEQ ID NO: 169360 - DNA, 25 bp, Saccharomyces pastorianus
gtgcccaaagcggtatttttgctca

SEQ ID NO: 169361 - DNA, 25 bp, Saccharomyces pastorianus
ttaagggttccacaatctactgctc

SEQ ID NO: 169362 - DNA, 25 bp, Saccharomyces pastorianus
attggcaacagatattcacgctcat

SEQ ID NO: 169363 - DNA, 25 bp, Saccharomyces pastorianus
gtcagccctagcaatcatcttttaa

SEQ ID NO: 169364 - DNA, 25 bp, Saccharomyces pastorianus
agatatgtttcgaccgcaacaccct

SEQ ID NO: 169365 - DNA, 25 bp, Saccharomyces pastorianus
gttccacgctctgtccacggagata

SEQ ID NO: 169366 - DNA, 25 bp, Saccharomyces pastorianus
gtccacggagatatgtttcgaccgc

SEQ ID NO: 169367 - DNA, 25 bp, Saccharomyces pastorianus
tctgtccacggagatatgtttcgac

SEQ ID NO: 169368 - DNA, 25 bp, Saccharomyces pastorianus
ggagatatgtttcgaccgcaacacc

SEQ ID NO: 169369 - DNA, 25 bp, Saccharomyces pastorianus
tccacgctctgtccacggagatatg

SEQ ID NO: 169370 - DNA, 25 bp, Saccharomyces pastorianus
cacgctctgtccacggagatatgtt

SEQ ID NO: 169371 - DNA, 25 bp, Saccharomyces pastorianus
acgctctgtccacggagatatgttt

SEQ ID NO: 169372 - DNA, 25 bp, Saccharomyces pastorianus
gctctgtccacggagatatgtttcg

SEQ ID NO: 169373 - DNA, 25 bp, Saccharomyces pastorianus
acggagatatgtttcgaccgcaaca

SEQ ID NO: 169374 - DNA, 25 bp, Saccharomyces pastorianus
gatatgtttcgaccgcaacaccctc

SEQ ID NO: 169375 - DNA, 25 bp, Saccharomyces pastorianus
gagtctctttacaggcgatcctgtg

SEQ ID NO: 169376 - DNA, 25 bp, Saccharomyces pastorianus
tgttggagtctctttacaggcgatc

SEQ ID NO: 169377 - DNA, 25 bp, Saccharomyces pastorianus
aaaagagaagtggtctctagcggga

SEQ ID NO: 169378 - DNA, 25 bp, Saccharomyces pastorianus
caggaatttctgttggagtctcttt

SEQ ID NO: 169379 - DNA, 25 bp, Saccharomyces pastorianus
gagaccaggaatttctgttggagtc

SEQ ID NO: 169380 - DNA, 25 bp, Saccharomyces pastorianus
gttggagtctctttacaggcgatcc

SEQ ID NO: 169381 - DNA, 25 bp, Saccharomyces pastorianus
gaccaggaatttctgttggagtctc

SEQ ID NO: 169382 - DNA, 25 bp, Saccharomyces pastorianus
tttctgttggagtctctttacaggc

SEQ ID NO: 169383 - DNA, 25 bp, Saccharomyces pastorianus
ggaatttctgttggagtctctttac

SEQ ID NO: 169384 - DNA, 25 bp, Saccharomyces pastorianus
tggagtctctttacaggcgatcctg

SEQ ID NO: 169385 - DNA, 25 bp, Saccharomyces pastorianus
gaatttctgttggagtctctttaca

SEQ ID NO: 169386 - DNA, 25 bp, Saccharomyces pastorianus
gatggatacgaattgacatttacaa

SEQ ID NO: 169387 - DNA, 25 bp, Saccharomyces pastorianus
ggtccaaagggattgcaatcctcca

SEQ ID NO: 169388 - DNA, 25 bp, Saccharomyces pastorianus
atcgatggatacgaattgacattta

SEQ ID NO: 169389 - DNA, 25 bp, Saccharomyces pastorianus
acaagcggtcggataagtcgataat

SEQ ID NO: 169390 - DNA, 25 bp, Saccharomyces pastorianus
agtcgataatgtcggaaaaggtcca

SEQ ID NO: 169391 - DNA, 25 bp, Saccharomyces pastorianus
ggatacgaattgacatttacaaaca

SEQ ID NO: 169392 - DNA, 25 bp, Saccharomyces pastorianus
tttacaaacaacaagcggtcggata

SEQ ID NO: 169393 - DNA, 25 bp, Saccharomyces pastorianus
gggattgcaatcctccaataacaca

SEQ ID NO: 169394 - DNA, 25 bp, Saccharomyces pastorianus
acgaattgacatttacaaacaacaa

SEQ ID NO: 169395 - DNA, 25 bp, Saccharomyces pastorianus
tcgataatgtcggaaaaggtccaaa

SEQ ID NO: 169396 - DNA, 25 bp, Saccharomyces pastorianus
gataatgtcggaaaaggtccaaagg

SEQ ID NO: 169397 - DNA, 25 bp, Saccharomyces pastorianus
tctcttcctcttttgtacgttattg

SEQ ID NO: 169398 - DNA, 25 bp, Saccharomyces pastorianus
cgcaaaaaggaatcttcaatcttgc

SEQ ID NO: 169399 - DNA, 25 bp, Saccharomyces pastorianus
atcttcaatcttgcataatgttaca

SEQ ID NO: 169400 - DNA, 25 bp, Saccharomyces pastorianus
tcttttgtacgttattgttcattga

SEQ ID NO: 169401 - DNA, 25 bp, Saccharomyces pastorianus
ttcctcttttgtacgttattgttca

SEQ ID NO: 169402 - DNA, 25 bp, Saccharomyces pastorianus
tcttcctcttttgtacgttattgtt

SEQ ID NO: 169403 - DNA, 25 bp, Saccharomyces pastorianus
ctcttcctcttttgtacgttattgt

SEQ ID NO: 169404 - DNA, 25 bp, Saccharomyces pastorianus
tcctcttttgtacgttattgttcat

SEQ ID NO: 169405 - DNA, 25 bp, Saccharomyces pastorianus
ctcttttgtacgttattgttcattg

SEQ ID NO: 169406 - DNA, 25 bp, Saccharomyces pastorianus
cctcttttgtacgttattgttcatt

SEQ ID NO: 169407 - DNA, 25 bp, Saccharomyces pastorianus
aactatgtatatagattgtactaga

SEQ ID NO: 169408 - DNA, 25 bp, Saccharomyces pastorianus
acactctcgttatataaaactgcga

SEQ ID NO: 169409 - DNA, 25 bp, Saccharomyces pastorianus
gtaaacttgaagacacactctcgtt

SEQ ID NO: 169410 - DNA, 25 bp, Saccharomyces pastorianus
gtctttgtgcgtccaagtaaacttg

SEQ ID NO: 169411 - DNA, 25 bp, Saccharomyces pastorianus
aaaactgcgaagaacactaacaaag

SEQ ID NO: 169412 - DNA, 25 bp, Saccharomyces pastorianus
agaaggtgacttgcgcttaattagt

SEQ ID NO: 169413 - DNA, 25 bp, Saccharomyces pastorianus
ctaacaaagaaggtgacttgcgctt

SEQ ID NO: 169414 - DNA, 25 bp, Saccharomyces pastorianus
taaggatggatagcacataaacata

SEQ ID NO: 169415 - DNA, 25 bp, Saccharomyces pastorianus
tagttttattcccttgcttctaaag

SEQ ID NO: 169416 - DNA, 25 bp, Saccharomyces pastorianus
gaagacacactctcgttatataaaa

SEQ ID NO: 169417 - DNA, 25 bp, Saccharomyces pastorianus
taaaaacgtctttgtgcgtccaagt

SEQ ID NO: 169418 - DNA, 25 bp, Saccharomyces pastorianus
gcgcttaattagttttattcccttg

SEQ ID NO: 169419 - DNA, 25 bp, Saccharomyces pastorianus
aggttacgcttacgtctcttgatca

SEQ ID NO: 169420 - DNA, 25 bp, Saccharomyces pastorianus
tcttacgagcgataccagagaggtt

SEQ ID NO: 169421 - DNA, 25 bp, Saccharomyces pastorianus
gagaggttacgcttacgtctcttga

SEQ ID NO: 169422 - DNA, 25 bp, Saccharomyces pastorianus
gattggtcttacgagcgataccaga

SEQ ID NO: 169423 - DNA, 25 bp, Saccharomyces pastorianus
catggattggtcttacgagcgatac

SEQ ID NO: 169424 - DNA, 25 bp, Saccharomyces pastorianus
tacgcttacgtctcttgatcatggt

SEQ ID NO: 169425 - DNA, 25 bp, Saccharomyces pastorianus
gtctcttgatcatggtacaatgttc

SEQ ID NO: 169426 - DNA, 25 bp, Saccharomyces pastorianus
caattggacatggattggtcttacg

SEQ ID NO: 169427 - DNA, 25 bp, Saccharomyces pastorianus
gcttacgtctcttgatcatggtaca

SEQ ID NO: 169428 - DNA, 25 bp, Saccharomyces pastorianus
taccagagaggttacgcttacgtct

SEQ ID NO: 169429 - DNA, 25 bp, Saccharomyces pastorianus
tacgtctcttgatcatggtacaatg

SEQ ID NO: 169430 - DNA, 25 bp, Saccharomyces pastorianus
tccccatctgaatttgttgatgtcg

SEQ ID NO: 169431 - DNA, 25 bp, Saccharomyces pastorianus
gattggttattgttaccgacccaag

SEQ ID NO: 169432 - DNA, 25 bp, Saccharomyces pastorianus
gaatttgttgatgtcgccatcccat

SEQ ID NO: 169433 - DNA, 25 bp, Saccharomyces pastorianus
taagaggtgctttggtcgacagaac

SEQ ID NO: 169434 - DNA, 25 bp, Saccharomyces pastorianus
ggtgctttggtcgacagaactcaac

SEQ ID NO: 169435 - DNA, 25 bp, Saccharomyces pastorianus
atttgttgatgtcgccatcccatgt

SEQ ID NO: 169436 - DNA, 25 bp, Saccharomyces pastorianus
tgttggctagagaagttttgagact

SEQ ID NO: 169437 - DNA, 25 bp, Saccharomyces pastorianus
ggtcgacagaactcaaccatggtcc

SEQ ID NO: 169438 - DNA, 25 bp, Saccharomyces pastorianus
cggtttaatctggtacttgttggct

SEQ ID NO: 169439 - DNA, 25 bp, Saccharomyces pastorianus
aatctggtacttgttggctagagaa

SEQ ID NO: 169440 - DNA, 25 bp, Saccharomyces pastorianus
tggttattgttaccgacccaagatt

SEQ ID NO: 169441 - DNA, 25 bp, Saccharomyces pastorianus
tagtatgcggacactgctacagaat

SEQ ID NO: 169442 - DNA, 25 bp, Saccharomyces pastorianus
tgaggcctttaataacacccttgaa

SEQ ID NO: 169443 - DNA, 25 bp, Saccharomyces pastorianus
gtattgaaggtgtaagtctctctaa

SEQ ID NO: 169444 - DNA, 25 bp, Saccharomyces pastorianus
gatatatcccttattcaggctatgt

SEQ ID NO: 169445 - DNA, 25 bp, Saccharomyces pastorianus
aaattctgcggtatttggtcaatca

SEQ ID NO: 169446 - DNA, 25 bp, Saccharomyces pastorianus
atagcacttcggcaaattctgcggt

SEQ ID NO: 169447 - DNA, 25 bp, Saccharomyces pastorianus
ggcagctatgcgtgtctcgaaaata

SEQ ID NO: 169448 - DNA, 25 bp, Saccharomyces pastorianus
gaagaattcttcgtatccagatact

SEQ ID NO: 169449 - DNA, 25 bp, Saccharomyces pastorianus
taggtacgtttctatcgggcagcta

SEQ ID NO: 169450 - DNA, 25 bp, Saccharomyces pastorianus
ggtcaatcagatgctctttcaatga

SEQ ID NO: 169451 - DNA, 25 bp, Saccharomyces pastorianus
tatcaccaatgctactgaggccttt

SEQ ID NO: 169452 - DNA, 25 bp, Saccharomyces pastorianus
gcgctacgcaattttgatcttctat

SEQ ID NO: 169453 - DNA, 25 bp, Saccharomyces pastorianus
gttattgaataattctgcccatttt

SEQ ID NO: 169454 - DNA, 25 bp, Saccharomyces pastorianus
gcccattttattggagaagcactac

SEQ ID NO: 169455 - DNA, 25 bp, Saccharomyces pastorianus
tggagaagcactacaagcttattct

SEQ ID NO: 169456 - DNA, 25 bp, Saccharomyces pastorianus
gatcttctatgttatcttccgtcta

SEQ ID NO: 169457 - DNA, 25 bp, Saccharomyces pastorianus
tccggagccattcctcttgaagaag

SEQ ID NO: 169458 - DNA, 25 bp, Saccharomyces pastorianus
taggaggcttttttctcgaaacact

SEQ ID NO: 169459 - DNA, 25 bp, Saccharomyces pastorianus
ttctgagaggtgagctggaatcaca

SEQ ID NO: 169460 - DNA, 25 bp, Saccharomyces pastorianus
tgaattgtatctttgcgctacgcaa

SEQ ID NO: 169461 - DNA, 25 bp, Saccharomyces pastorianus
gttatcttccgtctataggaggctt

SEQ ID NO: 169462 - DNA, 25 bp, Saccharomyces pastorianus
aaaatgcttttcttatcaagtacta

SEQ ID NO: 169463 - DNA, 25 bp, Saccharomyces pastorianus
tctaccaaggtttccgttgaaggtg

SEQ ID NO: 169464 - DNA, 25 bp, Saccharomyces pastorianus
caaagctttattggccgaattcaag

SEQ ID NO: 169465 - DNA, 25 bp, Saccharomyces pastorianus
gctcgtccacaaaagttacgtgctt

SEQ ID NO: 169466 - DNA, 25 bp, Saccharomyces pastorianus
agttacgtgcttctttgattccagg

SEQ ID NO: 169467 - DNA, 25 bp, Saccharomyces pastorianus
attaatcaccggtccattcaaggtc

SEQ ID NO: 169468 - DNA, 25 bp, Saccharomyces pastorianus
gaactagaaagactgctcgtccaca

SEQ ID NO: 169469 - DNA, 25 bp, Saccharomyces pastorianus
gaagacaacaccctattaatcaccg

SEQ ID NO: 169470 - DNA, 25 bp, Saccharomyces pastorianus
ggttgttgacaaagctttattggcc

SEQ ID NO: 169471 - DNA, 25 bp, Saccharomyces pastorianus
aagacgttgctatcccaaagagaac

SEQ ID NO: 169472 - DNA, 25 bp, Saccharomyces pastorianus
gttcaacgtcgaatacttcgccaag

SEQ ID NO: 169473 - DNA, 25 bp, Saccharomyces pastorianus
gcttctttgattccaggtaccgtct

SEQ ID NO: 169474 - DNA, 25 bp, Saccharomyces pastorianus
gatgcatccattttaaggctaattt

SEQ ID NO: 169475 - DNA, 25 bp, Saccharomyces pastorianus
gcgatgcatccattttaaggctaat

SEQ ID NO: 169476 - DNA, 25 bp, Saccharomyces pastorianus
aaggctaatttgtatcataacgtca

SEQ ID NO: 169477 - DNA, 25 bp, Saccharomyces pastorianus
gtgggcgatgcatccattttaaggc

SEQ ID NO: 169478 - DNA, 25 bp, Saccharomyces pastorianus
acaagtgggcgatgcatccatttta

SEQ ID NO: 169479 - DNA, 25 bp, Saccharomyces pastorianus
gaacaagtgggcgatgcatccattt

SEQ ID NO: 169480 - DNA, 25 bp, Saccharomyces pastorianus
ggctaatttgtatcataacgtcact

SEQ ID NO: 169481 - DNA, 25 bp, Saccharomyces pastorianus
aagtgggcgatgcatccattttaag

SEQ ID NO: 169482 - DNA, 25 bp, Saccharomyces pastorianus
ggcgatgcatccattttaaggctaa

SEQ ID NO: 169483 - DNA, 25 bp, Saccharomyces pastorianus
gcatccattttaaggctaatttgta

SEQ ID NO: 169484 - DNA, 25 bp, Saccharomyces pastorianus
gggcgatgcatccattttaaggcta

SEQ ID NO: 169485 - DNA, 25 bp, Saccharomyces pastorianus
aagctagttgcagtttcgtttgtat

SEQ ID NO: 169486 - DNA, 25 bp, Saccharomyces pastorianus
ccacacctggtgcttattgtatttc

SEQ ID NO: 169487 - DNA, 25 bp, Saccharomyces pastorianus
acccgtgcatttcgaaaggccagtc

SEQ ID NO: 169488 - DNA, 25 bp, Saccharomyces pastorianus
gaattcgatattgtcttgcccgagg

SEQ ID NO: 169489 - DNA, 25 bp, Saccharomyces pastorianus
ctatttatgagtccctagtggcaaa

SEQ ID NO: 169490 - DNA, 25 bp, Saccharomyces pastorianus
gaactactcttatgtttgggaacga

SEQ ID NO: 169491 - DNA, 25 bp, Saccharomyces pastorianus
attgtatttctaccaaggacccata

SEQ ID NO: 169492 - DNA, 25 bp, Saccharomyces pastorianus
ttgcccgaggttttcgagattttca

SEQ ID NO: 169493 - DNA, 25 bp, Saccharomyces pastorianus
ttgctgttctcatgcgtgtaagcta

SEQ ID NO: 169494 - DNA, 25 bp, Saccharomyces pastorianus
agattttcacagttccattttgccc

SEQ ID NO: 169495 - DNA, 25 bp, Saccharomyces pastorianus
aggccagtcctgcaaaaagaatttc

SEQ ID NO: 169496 - DNA, 25 bp, Saccharomyces pastorianus
aacccaaacaaagtctgatgctgtg

SEQ ID NO: 169497 - DNA, 25 bp, Saccharomyces pastorianus
gttaattgagagactaacccaaaca

SEQ ID NO: 169498 - DNA, 25 bp, Saccharomyces pastorianus
gtaagggccaagtaaattcacaatt

SEQ ID NO: 169499 - DNA, 25 bp, Saccharomyces pastorianus
ataattgcagaattgcttgcggatt

SEQ ID NO: 169500 - DNA, 25 bp, Saccharomyces pastorianus
aagattaagagagttacgagctaaa

SEQ ID NO: 169501 - DNA, 25 bp, Saccharomyces pastorianus
caaagtctgatgctgtgagagttgt

SEQ ID NO: 169502 - DNA, 25 bp, Saccharomyces pastorianus
gaagaagttgtcgaccctggtttgg

SEQ ID NO: 169503 - DNA, 25 bp, Saccharomyces pastorianus
tgttgagggtctttgcagaagaaat

SEQ ID NO: 169504 - DNA, 25 bp, Saccharomyces pastorianus
agaggaaaatccatatgccttttat

SEQ ID NO: 169505 - DNA, 25 bp, Saccharomyces pastorianus
attgcttgcggattgtaagggccaa

SEQ ID NO: 169506 - DNA, 25 bp, Saccharomyces pastorianus
tgggtgaaggtttcggtataattgc

SEQ ID NO: 169507 - DNA, 25 bp, Saccharomyces pastorianus
ttcttgtggagtggcaacaccttca

SEQ ID NO: 169508 - DNA, 25 bp, Saccharomyces pastorianus
accgtgagttctggtgactttgccc

SEQ ID NO: 169509 - DNA, 25 bp, Saccharomyces pastorianus
gagtggcaacaccttcaatcttaat

SEQ ID NO: 169510 - DNA, 25 bp, Saccharomyces pastorianus
gtggcaacaccttcaatcttaatca

SEQ ID NO: 169511 - DNA, 25 bp, Saccharomyces pastorianus
gaattgagcttcttgtggagtggca

SEQ ID NO: 169512 - DNA, 25 bp, Saccharomyces pastorianus
ggcaacaccttcaatcttaatcaaa

SEQ ID NO: 169513 - DNA, 25 bp, Saccharomyces pastorianus
tgagttctggtgactttgccccaca

SEQ ID NO: 169514 - DNA, 25 bp, Saccharomyces pastorianus
gcttcttgtggagtggcaacacctt

SEQ ID NO: 169515 - DNA, 25 bp, Saccharomyces pastorianus
gtggagtggcaacaccttcaatctt

SEQ ID NO: 169516 - DNA, 25 bp, Saccharomyces pastorianus
agttctggtgactttgccccacata

SEQ ID NO: 169517 - DNA, 25 bp, Saccharomyces pastorianus
ttgagcttcttgtggagtggcaaca

SEQ ID NO: 169518 - DNA, 25 bp, Saccharomyces pastorianus
gttcgaactctcgaccttcagatta

SEQ ID NO: 169519 - DNA, 25 bp, Saccharomyces pastorianus
gaactctcgaccttcagattatgag

SEQ ID NO: 169520 - DNA, 25 bp, Saccharomyces pastorianus
ctcgaccttcagattatgagactga

SEQ ID NO: 169521 - DNA, 25 bp, Saccharomyces pastorianus
ttcgaactctcgaccttcagattat

SEQ ID NO: 169522 - DNA, 25 bp, Saccharomyces pastorianus
cgaactctcgaccttcagattatga

SEQ ID NO: 169523 - DNA, 25 bp, Saccharomyces pastorianus
tcgaccttcagattatgagactgac

SEQ ID NO: 169524 - DNA, 25 bp, Saccharomyces pastorianus
tctcgaccttcagattatgagactg

SEQ ID NO: 169525 - DNA, 25 bp, Saccharomyces pastorianus
gggaggttcgaactctcgaccttca

SEQ ID NO: 169526 - DNA, 25 bp, Saccharomyces pastorianus
ctctcgaccttcagattatgagact

SEQ ID NO: 169527 - DNA, 25 bp, Saccharomyces pastorianus
aggttcgaactctcgaccttcagat

SEQ ID NO: 169528 - DNA, 25 bp, Saccharomyces pastorianus
tcgaactctcgaccttcagattatg

SEQ ID NO: 169529 - DNA, 25 bp, Saccharomyces pastorianus
ttttcacttttactgcttagatgca

SEQ ID NO: 169530 - DNA, 25 bp, Saccharomyces pastorianus
gaatagtaattgacaggccgcctac

SEQ ID NO: 169531 - DNA, 25 bp, Saccharomyces pastorianus
taacctgttacggtgcttgtgggtt

SEQ ID NO: 169532 - DNA, 25 bp, Saccharomyces pastorianus
tagatgcagcgcagcttaggttggc

SEQ ID NO: 169533 - DNA, 25 bp, Saccharomyces pastorianus
gaactagcaccacccttggaaagag

SEQ ID NO: 169534 - DNA, 25 bp, Saccharomyces pastorianus
taggttggcggcgaactagcaccac

SEQ ID NO: 169535 - DNA, 25 bp, Saccharomyces pastorianus
tttcgggtacccagataactcagta

SEQ ID NO: 169536 - DNA, 25 bp, Saccharomyces pastorianus
gtaccgatgccattaacctgttacg

SEQ ID NO: 169537 - DNA, 25 bp, Saccharomyces pastorianus
aaggtagccattcattgtctctcac

SEQ ID NO: 169538 - DNA, 25 bp, Saccharomyces pastorianus
gttcaggatgaaataccggtcttag

SEQ ID NO: 169539 - DNA, 25 bp, Saccharomyces pastorianus
gagacaatactactcgtaccgatgc

SEQ ID NO: 169540 - DNA, 25 bp, Saccharomyces pastorianus
aatataatcaaacttcttccggata

SEQ ID NO: 169541 - DNA, 25 bp, Saccharomyces pastorianus
caaacttcttccggataacacagaa

SEQ ID NO: 169542 - DNA, 25 bp, Saccharomyces pastorianus
gaaacaagttctacaccgagaatta

SEQ ID NO: 169543 - DNA, 25 bp, Saccharomyces pastorianus
cacagaaacaagttctacaccgaga

SEQ ID NO: 169544 - DNA, 25 bp, Saccharomyces pastorianus
aaatataatcaaacttcttccggat

SEQ ID NO: 169545 - DNA, 25 bp, Saccharomyces pastorianus
taatcaaacttcttccggataacac

SEQ ID NO: 169546 - DNA, 25 bp, Saccharomyces pastorianus
cagaaacaagttctacaccgagaat

SEQ ID NO: 169547 - DNA, 25 bp, Saccharomyces pastorianus
taacacagaaacaagttctacaccg

SEQ ID NO: 169548 - DNA, 25 bp, Saccharomyces pastorianus
gaattaaaaccgtcctctacaatga

SEQ ID NO: 169549 - DNA, 25 bp, Saccharomyces pastorianus
tataatcaaacttcttccggataac

SEQ ID NO: 169550 - DNA, 25 bp, Saccharomyces pastorianus
atcaaacttcttccggataacacag

SEQ ID NO: 169551 - DNA, 25 bp, Saccharomyces pastorianus
ctccagttaagtcaactgaagattc

SEQ ID NO: 169552 - DNA, 25 bp, Saccharomyces pastorianus
gtcatcatcacttcttgaaaagacc

SEQ ID NO: 169553 - DNA, 25 bp, Saccharomyces pastorianus
atatctattttgaaactgtctcctc

SEQ ID NO: 169554 - DNA, 25 bp, Saccharomyces pastorianus
ttggtcatcatcacttcttgaaaag

SEQ ID NO: 169555 - DNA, 25 bp, Saccharomyces pastorianus
ggtcatcatcacttcttgaaaagac

SEQ ID NO: 169556 - DNA, 25 bp, Saccharomyces pastorianus
tggtcatcatcacttcttgaaaaga

SEQ ID NO: 169557 - DNA, 25 bp, Saccharomyces pastorianus
aactgaagattcagagaacaccacc

SEQ ID NO: 169558 - DNA, 25 bp, Saccharomyces pastorianus
tctattttgaaactgtctcctcagc

SEQ ID NO: 169559 - DNA, 25 bp, Saccharomyces pastorianus
atcacttcttgaaaagaccatatct

SEQ ID NO: 169560 - DNA, 25 bp, Saccharomyces pastorianus
aagaccatatctattttgaaactgt

SEQ ID NO: 169561 - DNA, 25 bp, Saccharomyces pastorianus
atctattttgaaactgtctcctcag

SEQ ID NO: 169562 - DNA, 25 bp, Saccharomyces pastorianus
tttacctagactactaacacaccct

SEQ ID NO: 169563 - DNA, 25 bp, Saccharomyces pastorianus
atgcgtcaaaacacaccacacatta

SEQ ID NO: 169564 - DNA, 25 bp, Saccharomyces pastorianus
gatcgactattcaccttgggaaaac

SEQ ID NO: 169565 - DNA, 25 bp, Saccharomyces pastorianus
aaaaatcccgatcgactattcacct

SEQ ID NO: 169566 - DNA, 25 bp, Saccharomyces pastorianus
gggagatttcaacagctgacatatt

SEQ ID NO: 169567 - DNA, 25 bp, Saccharomyces pastorianus
ggagacttgtacaccaacacatcgg

SEQ ID NO: 169568 - DNA, 25 bp, Saccharomyces pastorianus
aattgcagaatacccttttacctag

SEQ ID NO: 169569 - DNA, 25 bp, Saccharomyces pastorianus
acattacacaatgcactttctgcta

SEQ ID NO: 169570 - DNA, 25 bp, Saccharomyces pastorianus
tgcactttctgctaaaaatcccgat

SEQ ID NO: 169571 - DNA, 25 bp, Saccharomyces pastorianus
tactaacacaccctatgcgtcaaaa

SEQ ID NO: 169572 - DNA, 25 bp, Saccharomyces pastorianus
agctgacatatttagttcgtggaaa

SEQ ID NO: 169573 - DNA, 25 bp, Saccharomyces pastorianus
agagacgccaaatttacaccacaag

SEQ ID NO: 169574 - DNA, 25 bp, Saccharomyces pastorianus
tgaagaccagaagagacgccaaatt

SEQ ID NO: 169575 - DNA, 25 bp, Saccharomyces pastorianus
gccaaatttacaccacaagctcggg

SEQ ID NO: 169576 - DNA, 25 bp, Saccharomyces pastorianus
gttaagaccatagtgaagaccagaa

SEQ ID NO: 169577 - DNA, 25 bp, Saccharomyces pastorianus
ctgacggctctgaggaccacgggtt

SEQ ID NO: 169578 - DNA, 25 bp, Saccharomyces pastorianus
ggtattgcatccatttacatagtta

SEQ ID NO: 169579 - DNA, 25 bp, Saccharomyces pastorianus
tattatgataatttggcgcaggtga

SEQ ID NO: 169580 - DNA, 25 bp, Saccharomyces pastorianus
aaacctgctttacatttctgcagca

SEQ ID NO: 169581 - DNA, 25 bp, Saccharomyces pastorianus
tttctgcagcaggtattgcatccat

SEQ ID NO: 169582 - DNA, 25 bp, Saccharomyces pastorianus
ataacaacgctgacggctctgagga

SEQ ID NO: 169583 - DNA, 25 bp, Saccharomyces pastorianus
ggtagtggacttagtgcggcaacaa

SEQ ID NO: 169584 - DNA, 25 bp, Saccharomyces pastorianus
caatggcattgtcgttctgtggtgt

SEQ ID NO: 169585 - DNA, 25 bp, Saccharomyces pastorianus
accgctggccaacttcacgagagag

SEQ ID NO: 169586 - DNA, 25 bp, Saccharomyces pastorianus
gttgttttctattgccttttacgtg

SEQ ID NO: 169587 - DNA, 25 bp, Saccharomyces pastorianus
tagcaggtacacttgcctattgtat

SEQ ID NO: 169588 - DNA, 25 bp, Saccharomyces pastorianus
gggtctcttatgttcacaatggcat

SEQ ID NO: 169589 - DNA, 25 bp, Saccharomyces pastorianus
tcaagaactttttcgtgggtcgcgt

SEQ ID NO: 169590 - DNA, 25 bp, Saccharomyces pastorianus
tgttatggctactcctagtgctatg

SEQ ID NO: 169591 - DNA, 25 bp, Saccharomyces pastorianus
ttattcgaatgcttcaaccgctggc

SEQ ID NO: 169592 - DNA, 25 bp, Saccharomyces pastorianus
cgctgacctatctgatcgatgcatt

SEQ ID NO: 169593 - DNA, 25 bp, Saccharomyces pastorianus
atgtatagagtgtctccgctgacct

SEQ ID NO: 169594 - DNA, 25 bp, Saccharomyces pastorianus
tcgcgttcttcgtatcccaaatcat

SEQ ID NO: 169595 - DNA, 25 bp, Saccharomyces pastorianus
caggctctaaggtagtgagcactgt

SEQ ID NO: 169596 - DNA, 25 bp, Saccharomyces pastorianus
aggcggagactttgaccactacata

SEQ ID NO: 169597 - DNA, 25 bp, Saccharomyces pastorianus
ttgaccactacatataagaccacgg

SEQ ID NO: 169598 - DNA, 25 bp, Saccharomyces pastorianus
gtcaaatcagcttatgtaaccacct

SEQ ID NO: 169599 - DNA, 25 bp, Saccharomyces pastorianus
atcagcttatgtaaccacctctggc

SEQ ID NO: 169600 - DNA, 25 bp, Saccharomyces pastorianus
tccaaggcggagactttgaccacta

SEQ ID NO: 169601 - DNA, 25 bp, Saccharomyces pastorianus
tataagaccacggttaacgctaaag

SEQ ID NO: 169602 - DNA, 25 bp, Saccharomyces pastorianus
tatgtaaccacctctggctccaagg

SEQ ID NO: 169603 - DNA, 25 bp, Saccharomyces pastorianus
gcggagactttgaccactacatata

SEQ ID NO: 169604 - DNA, 25 bp, Saccharomyces pastorianus
gagcactgtcaaatcagcttatgta

SEQ ID NO: 169605 - DNA, 25 bp, Saccharomyces pastorianus
gtagtgagcactgtcaaatcagctt

SEQ ID NO: 169606 - DNA, 25 bp, Saccharomyces pastorianus
tagtatactgactacagttgccatg

SEQ ID NO: 169607 - DNA, 25 bp, Saccharomyces pastorianus
gtccattaactaatccattcaccta

SEQ ID NO: 169608 - DNA, 25 bp, Saccharomyces pastorianus
aatccattcacctatacagtagtat

SEQ ID NO: 169609 - DNA, 25 bp, Saccharomyces pastorianus
tggttgacctaatagtccattaact

SEQ ID NO: 169610 - DNA, 25 bp, Saccharomyces pastorianus
agttgccatgacatatcctttcctt

SEQ ID NO: 169611 - DNA, 25 bp, Saccharomyces pastorianus
cccttcgtaatggttgacctaatag

SEQ ID NO: 169612 - DNA, 25 bp, Saccharomyces pastorianus
acatatcctttccttttcggactat

SEQ ID NO: 169613 - DNA, 25 bp, Saccharomyces pastorianus
tgggcctacataaggtacttcaccc

SEQ ID NO: 169614 - DNA, 25 bp, Saccharomyces pastorianus
cttttcggactatattaggcggaag

SEQ ID NO: 169615 - DNA, 25 bp, Saccharomyces pastorianus
gtacttcaccccaatttggaaagag

SEQ ID NO: 169616 - DNA, 25 bp, Saccharomyces pastorianus
acattataaatcatgctttgtcgca

SEQ ID NO: 169617 - DNA, 25 bp, Saccharomyces pastorianus
gtaaagacaaggatggctgccccaa

SEQ ID NO: 169618 - DNA, 25 bp, Saccharomyces pastorianus
ttttactgttgggaatgctgccgcc

SEQ ID NO: 169619 - DNA, 25 bp, Saccharomyces pastorianus
tcggtatcaacgatgccttttactg

SEQ ID NO: 169620 - DNA, 25 bp, Saccharomyces pastorianus
atggctgccccaagattctaaatct

SEQ ID NO: 169621 - DNA, 25 bp, Saccharomyces pastorianus
ggctaaaaactgtattatttgcaac

SEQ ID NO: 169622 - DNA, 25 bp, Saccharomyces pastorianus
aatgctgccgcctgggtaaagacaa

SEQ ID NO: 169623 - DNA, 25 bp, Saccharomyces pastorianus
aacgatgccttttactgttgggaat

SEQ ID NO: 169624 - DNA, 25 bp, Saccharomyces pastorianus
gtatgcgaaaactgctcgtttggca

SEQ ID NO: 169625 - DNA, 25 bp, Saccharomyces pastorianus
aactgctcgtttggcaaaaaggcta

SEQ ID NO: 169626 - DNA, 25 bp, Saccharomyces pastorianus
gattctaaatctaggtagcaataag

SEQ ID NO: 169627 - DNA, 25 bp, Saccharomyces pastorianus
atttgcaacttaaacatcggtatca

SEQ ID NO: 169628 - DNA, 25 bp, Saccharomyces pastorianus
taatgtacaacagccataagtggta

SEQ ID NO: 169629 - DNA, 25 bp, Saccharomyces pastorianus
aaaaatgtgccatcttcaataatgt

SEQ ID NO: 169630 - DNA, 25 bp, Saccharomyces pastorianus
gtttgctgtctttacaactatccct

SEQ ID NO: 169631 - DNA, 25 bp, Saccharomyces pastorianus
aggatgtggatcttgctactttgtt

SEQ ID NO: 169632 - DNA, 25 bp, Saccharomyces pastorianus
ataccacctagcaagtagacggcga

SEQ ID NO: 169633 - DNA, 25 bp, Saccharomyces pastorianus
aagctagtcattgaggtcttgtaag

SEQ ID NO: 169634 - DNA, 25 bp, Saccharomyces pastorianus
cttgctactttgttgtttgctgtct

SEQ ID NO: 169635 - DNA, 25 bp, Saccharomyces pastorianus
gggcaaaaacgtgataccacctagc

SEQ ID NO: 169636 - DNA, 25 bp, Saccharomyces pastorianus
gacggcgaaaaacaccttcaagcta

SEQ ID NO: 169637 - DNA, 25 bp, Saccharomyces pastorianus
tgtctttacaactatccctttctta

SEQ ID NO: 169638 - DNA, 25 bp, Saccharomyces pastorianus
atccctttcttaattattctcttga

SEQ ID NO: 169639 - DNA, 25 bp, Saccharomyces pastorianus
ggttagacccaaacgaagcttctga

SEQ ID NO: 169640 - DNA, 25 bp, Saccharomyces pastorianus
cagaactagagcacatgcccaatcc

SEQ ID NO: 169641 - DNA, 25 bp, Saccharomyces pastorianus
aatccagaactagagcacatgccca

SEQ ID NO: 169642 - DNA, 25 bp, Saccharomyces pastorianus
atccagaactagagcacatgcccaa

SEQ ID NO: 169643 - DNA, 25 bp, Saccharomyces pastorianus
aaatccagaactagagcacatgccc

SEQ ID NO: 169644 - DNA, 25 bp, Saccharomyces pastorianus
aagcccgtttgccatcccaagttgt

SEQ ID NO: 169645 - DNA, 25 bp, Saccharomyces pastorianus
ccagaactagagcacatgcccaatc

SEQ ID NO: 169646 - DNA, 25 bp, Saccharomyces pastorianus
gagagccttggttgaacacatcatc

SEQ ID NO: 169647 - DNA, 25 bp, Saccharomyces pastorianus
tccagaactagagcacatgcccaat

SEQ ID NO: 169648 - DNA, 25 bp, Saccharomyces pastorianus
ggtaccagagaagcccgtttgccat

SEQ ID NO: 169649 - DNA, 25 bp, Saccharomyces pastorianus
taaatccagaactagagcacatgcc

SEQ ID NO: 169650 - DNA, 25 bp, Saccharomyces pastorianus
atatctagccttcactatcactatc

SEQ ID NO: 169651 - DNA, 25 bp, Saccharomyces pastorianus
gtactactccactacataccaccta

SEQ ID NO: 169652 - DNA, 25 bp, Saccharomyces pastorianus
tacataccacctaactactaccgtt

SEQ ID NO: 169653 - DNA, 25 bp, Saccharomyces pastorianus
atctagccttcactatcactatcca

SEQ ID NO: 169654 - DNA, 25 bp, Saccharomyces pastorianus
ttcactatcactatccacggccctt

SEQ ID NO: 169655 - DNA, 25 bp, Saccharomyces pastorianus
cgttaccctccacatattataccat

SEQ ID NO: 169656 - DNA, 25 bp, Saccharomyces pastorianus
taccgttaccctccacatattatac

SEQ ID NO: 169657 - DNA, 25 bp, Saccharomyces pastorianus
tagccttcactatcactatccacgg

SEQ ID NO: 169658 - DNA, 25 bp, Saccharomyces pastorianus
actaccgttaccctccacatattat

SEQ ID NO: 169659 - DNA, 25 bp, Saccharomyces pastorianus
caatatctagccttcactatcacta

SEQ ID NO: 169660 - DNA, 25 bp, Saccharomyces pastorianus
tatctagccttcactatcactatcc

SEQ ID NO: 169661 - DNA, 25 bp, Saccharomyces pastorianus
tatgttgttctttgttgtgggtgat

SEQ ID NO: 169662 - DNA, 25 bp, Saccharomyces pastorianus
gaatcggattttcttccattacaaa

SEQ ID NO: 169663 - DNA, 25 bp, Saccharomyces pastorianus
ccgtgagctgcaggtgttggatttc

SEQ ID NO: 169664 - DNA, 25 bp, Saccharomyces pastorianus
gttggatttccatcttcattggaca

SEQ ID NO: 169665 - DNA, 25 bp, Saccharomyces pastorianus
tgattccggttcaattacacccttt

SEQ ID NO: 169666 - DNA, 25 bp, Saccharomyces pastorianus
aagcaataaagtctgattccggttc

SEQ ID NO: 169667 - DNA, 25 bp, Saccharomyces pastorianus
ggtattctccatatgttgttctttg

SEQ ID NO: 169668 - DNA, 25 bp, Saccharomyces pastorianus
agaattcattatgggtctacgaagc

SEQ ID NO: 169669 - DNA, 25 bp, Saccharomyces pastorianus
gcatattttgtgctgttcagtaaaa

SEQ ID NO: 169670 - DNA, 25 bp, Saccharomyces pastorianus
agacggagtccaacgggatcgccca

SEQ ID NO: 169671 - DNA, 25 bp, Saccharomyces pastorianus
ggaaagatacatggtattctccata

SEQ ID NO: 169672 - DNA, 25 bp, Saccharomyces pastorianus
aaagcacttcacacttcgatttatg

SEQ ID NO: 169673 - DNA, 25 bp, Saccharomyces pastorianus
gcctggcaccataaaagcacttcac

SEQ ID NO: 169674 - DNA, 25 bp, Saccharomyces pastorianus
taccctgccggtcaattaaaactgc

SEQ ID NO: 169675 - DNA, 25 bp, Saccharomyces pastorianus
gctcacggagcattttcattacgaa

SEQ ID NO: 169676 - DNA, 25 bp, Saccharomyces pastorianus
tcagaaaaaactaccctgccggtca

SEQ ID NO: 169677 - DNA, 25 bp, Saccharomyces pastorianus
gaaactcgtaggtgtcgttggtcat

SEQ ID NO: 169678 - DNA, 25 bp, Saccharomyces pastorianus
gtcaattaaaactgcctggcaccat

SEQ ID NO: 169679 - DNA, 25 bp, Saccharomyces pastorianus
cggagcattttcattacgaacaggc

SEQ ID NO: 169680 - DNA, 25 bp, Saccharomyces pastorianus
acttcacacttcgatttatgctcac

SEQ ID NO: 169681 - DNA, 25 bp, Saccharomyces pastorianus
acacttcgatttatgctcacggagc

SEQ ID NO: 169682 - DNA, 25 bp, Saccharomyces pastorianus
taggtgtcgttggtcattttctaaa

SEQ ID NO: 169683 - DNA, 25 bp, Saccharomyces pastorianus
ttttacattacgacacaggccacac

SEQ ID NO: 169684 - DNA, 25 bp, Saccharomyces pastorianus
aaagaagtttctattgtcggagact

SEQ ID NO: 169685 - DNA, 25 bp, Saccharomyces pastorianus
aaaaacgaacccgtgcccagtgctg

SEQ ID NO: 169686 - DNA, 25 bp, Saccharomyces pastorianus
gccctgttatgctacgctgattcat

SEQ ID NO: 169687 - DNA, 25 bp, Saccharomyces pastorianus
tatgtccgctttccgaagttaccaa

SEQ ID NO: 169688 - DNA, 25 bp, Saccharomyces pastorianus
gacgcaacacaacatcaatccctag

SEQ ID NO: 169689 - DNA, 25 bp, Saccharomyces pastorianus
taactgactgcaattacgatccgcc

SEQ ID NO: 169690 - DNA, 25 bp, Saccharomyces pastorianus
tgcaattacgatccgccctgttatg

SEQ ID NO: 169691 - DNA, 25 bp, Saccharomyces pastorianus
caatccctaggatatgtccgctttc

SEQ ID NO: 169692 - DNA, 25 bp, Saccharomyces pastorianus
gccacacagtctactgccattgtag

SEQ ID NO: 169693 - DNA, 25 bp, Saccharomyces pastorianus
aaaacacctagtccaatcggcccag

SEQ ID NO: 169694 - DNA, 25 bp, Saccharomyces pastorianus
tgatgagcctgaagcacgaatcgtt

SEQ ID NO: 169695 - DNA, 25 bp, Saccharomyces pastorianus
atttactctgatgagcctgaagcac

SEQ ID NO: 169696 - DNA, 25 bp, Saccharomyces pastorianus
actctgatgagcctgaagcacgaat

SEQ ID NO: 169697 - DNA, 25 bp, Saccharomyces pastorianus
tgagcctgaagcacgaatcgttaag

SEQ ID NO: 169698 - DNA, 25 bp, Saccharomyces pastorianus
aaatttactctgatgagcctgaagc

SEQ ID NO: 169699 - DNA, 25 bp, Saccharomyces pastorianus
ttactctgatgagcctgaagcacga

SEQ ID NO: 169700 - DNA, 25 bp, Saccharomyces pastorianus
gcctgaagcacgaatcgttaagact

SEQ ID NO: 169701 - DNA, 25 bp, Saccharomyces pastorianus
agcacgaatcgttaagactcttttc

SEQ ID NO: 169702 - DNA, 25 bp, Saccharomyces pastorianus
atgagcctgaagcacgaatcgttaa

SEQ ID NO: 169703 - DNA, 25 bp, Saccharomyces pastorianus
gaatcgttaagactcttttcgaacg

SEQ ID NO: 169704 - DNA, 25 bp, Saccharomyces pastorianus
tctgatgagcctgaagcacgaatcg

SEQ ID NO: 169705 - DNA, 25 bp, Saccharomyces pastorianus
gtatcgtacctgtcacctcgttttg

SEQ ID NO: 169706 - DNA, 25 bp, Saccharomyces pastorianus
acctcgttttgcagacgtcaaagaa

SEQ ID NO: 169707 - DNA, 25 bp, Saccharomyces pastorianus
atggtatcgtacctgtcacctcgtt

SEQ ID NO: 169708 - DNA, 25 bp, Saccharomyces pastorianus
tgtcacctcgttttgcagacgtcaa

SEQ ID NO: 169709 - DNA, 25 bp, Saccharomyces pastorianus
agaatcctagatgcccaaactttgt

SEQ ID NO: 169710 - DNA, 25 bp, Saccharomyces pastorianus
gtacctgtcacctcgttttgcagac

SEQ ID NO: 169711 - DNA, 25 bp, Saccharomyces pastorianus
aaacatggtatcgtacctgtcacct

SEQ ID NO: 169712 - DNA, 25 bp, Saccharomyces pastorianus
gacgtcaaagaatcctagatgccca

SEQ ID NO: 169713 - DNA, 25 bp, Saccharomyces pastorianus
gtgtgtaaacatggtatcgtacctg

SEQ ID NO: 169714 - DNA, 25 bp, Saccharomyces pastorianus
tgcagacgtcaaagaatcctagatg

SEQ ID NO: 169715 - DNA, 25 bp, Saccharomyces pastorianus
tcacctcgttttgcagacgtcaaag

SEQ ID NO: 169716 - DNA, 25 bp, Saccharomyces pastorianus
cactgacgctgttggaatctataaa

SEQ ID NO: 169717 - DNA, 25 bp, Saccharomyces pastorianus
tagaaccggccgtctacaccctgga

SEQ ID NO: 169718 - DNA, 25 bp, Saccharomyces pastorianus
aacgtatcggaaaggcattgagcca

SEQ ID NO: 169719 - DNA, 25 bp, Saccharomyces pastorianus
gacagacaagtactccgctcagata

SEQ ID NO: 169720 - DNA, 25 bp, Saccharomyces pastorianus
gtactccgctcagataaaggtctca

SEQ ID NO: 169721 - DNA, 25 bp, Saccharomyces pastorianus
tggaactgcccagcgtcattgacac

SEQ ID NO: 169722 - DNA, 25 bp, Saccharomyces pastorianus
agataaaggtctcagccactccagc

SEQ ID NO: 169723 - DNA, 25 bp, Saccharomyces pastorianus
tcattgacactgacgctgttggaat

SEQ ID NO: 169724 - DNA, 25 bp, Saccharomyces pastorianus
cactccagcagcagggccagacgtg

SEQ ID NO: 169725 - DNA, 25 bp, Saccharomyces pastorianus
ggcattgagccacatcaagtaacag

SEQ ID NO: 169726 - DNA, 25 bp, Saccharomyces pastorianus
gagagctgaaaatttcctgacagac

SEQ ID NO: 169727 - DNA, 25 bp, Saccharomyces pastorianus
cattgcctgtgtcttgaccatcatc

SEQ ID NO: 169728 - DNA, 25 bp, Saccharomyces pastorianus
aagagcattgcctgtgtcttgacca

SEQ ID NO: 169729 - DNA, 25 bp, Saccharomyces pastorianus
tggcttcccaattggttgacttgaa

SEQ ID NO: 169730 - DNA, 25 bp, Saccharomyces pastorianus
gagcattgcctgtgtcttgaccatc

SEQ ID NO: 169731 - DNA, 25 bp, Saccharomyces pastorianus
gcattgcctgtgtcttgaccatcat

SEQ ID NO: 169732 - DNA, 25 bp, Saccharomyces pastorianus
agcattgcctgtgtcttgaccatca

SEQ ID NO: 169733 - DNA, 25 bp, Saccharomyces pastorianus
aaagttgtccaagccatctttgcca

SEQ ID NO: 169734 - DNA, 25 bp, Saccharomyces pastorianus
tcccaagttactgaaaagcaaaaga

SEQ ID NO: 169735 - DNA, 25 bp, Saccharomyces pastorianus
tccaaggaacaattggcttcccaat

SEQ ID NO: 169736 - DNA, 25 bp, Saccharomyces pastorianus
agagcattgcctgtgtcttgaccat

SEQ ID NO: 169737 - DNA, 25 bp, Saccharomyces pastorianus
ccaagttactgaaaagcaaaagaag

SEQ ID NO: 169738 - DNA, 25 bp, Saccharomyces pastorianus
accgccagcgagagtggaatttcca

SEQ ID NO: 169739 - DNA, 25 bp, Saccharomyces pastorianus
tgtttgatcttttagcagccatatt

SEQ ID NO: 169740 - DNA, 25 bp, Saccharomyces pastorianus
atatggatcggtctcatccctacta

SEQ ID NO: 169741 - DNA, 25 bp, Saccharomyces pastorianus
tattttgctaaatcacagtgctcta

SEQ ID NO: 169742 - DNA, 25 bp, Saccharomyces pastorianus
gggccttgcttctgtttgatctttt

SEQ ID NO: 169743 - DNA, 25 bp, Saccharomyces pastorianus
cctcctcatcttctaataatgggtc

SEQ ID NO: 169744 - DNA, 25 bp, Saccharomyces pastorianus
gggtcatcgtcatcattgttagcac

SEQ ID NO: 169745 - DNA, 25 bp, Saccharomyces pastorianus
atcattgttagcaccgccagcgaga

SEQ ID NO: 169746 - DNA, 25 bp, Saccharomyces pastorianus
atatgcctattctcttttgtaaatc

SEQ ID NO: 169747 - DNA, 25 bp, Saccharomyces pastorianus
atcgtcaacttcgttcaagccatat

SEQ ID NO: 169748 - DNA, 25 bp, Saccharomyces pastorianus
agtgctctacagtaaatatgcctat

SEQ ID NO: 169749 - DNA, 25 bp, Saccharomyces pastorianus
cttagctcgatccttaaaaaagtat

SEQ ID NO: 169750 - DNA, 25 bp, Saccharomyces pastorianus
ttgaatgtgtcgaaaaccttagctc

SEQ ID NO: 169751 - DNA, 25 bp, Saccharomyces pastorianus
ataaggtccatcgaagctgtatttg

SEQ ID NO: 169752 - DNA, 25 bp, Saccharomyces pastorianus
gaaaacgtttctcttgcattcaata

SEQ ID NO: 169753 - DNA, 25 bp, Saccharomyces pastorianus
gggcgaactcaacctttcgcttgaa

SEQ ID NO: 169754 - DNA, 25 bp, Saccharomyces pastorianus
gaactcaacctttcgcttgaacaag

SEQ ID NO: 169755 - DNA, 25 bp, Saccharomyces pastorianus
gcttgaacaagcttgaatgtgtcga

SEQ ID NO: 169756 - DNA, 25 bp, Saccharomyces pastorianus
gaagctgtatttggaacttccgatt

SEQ ID NO: 169757 - DNA, 25 bp, Saccharomyces pastorianus
tcttgcattcaataaggtccatcga

SEQ ID NO: 169758 - DNA, 25 bp, Saccharomyces pastorianus
gtcgaaaaccttagctcgatcctta

SEQ ID NO: 169759 - DNA, 25 bp, Saccharomyces pastorianus
aaaaagtatttgcattatcagtaat

SEQ ID NO: 169760 - DNA, 25 bp, Saccharomyces pastorianus
ctatttctcatcatttgcatcatct

SEQ ID NO: 169761 - DNA, 25 bp, Saccharomyces pastorianus
gaatctgcaattctacacaattcta

SEQ ID NO: 169762 - DNA, 25 bp, Saccharomyces pastorianus
actatttctcatcatttgcatcatc

SEQ ID NO: 169763 - DNA, 25 bp, Saccharomyces pastorianus
tatttctcatcatttgcatcatctt

SEQ ID NO: 169764 - DNA, 25 bp, Saccharomyces pastorianus
tttctcatcatttgcatcatcttct

SEQ ID NO: 169765 - DNA, 25 bp, Saccharomyces pastorianus
atgactatttctcatcatttgcatc

SEQ ID NO: 169766 - DNA, 25 bp, Saccharomyces pastorianus
atttctcatcatttgcatcatcttc

SEQ ID NO: 169767 - DNA, 25 bp, Saccharomyces pastorianus
gcgtttcagcttccactaatttaga

SEQ ID NO: 169768 - DNA, 25 bp, Saccharomyces pastorianus
gactatttctcatcatttgcatcat

SEQ ID NO: 169769 - DNA, 25 bp, Saccharomyces pastorianus
tgactatttctcatcatttgcatca

SEQ ID NO: 169770 - DNA, 25 bp, Saccharomyces pastorianus
gatgactatttctcatcatttgcat

SEQ ID NO: 169771 - DNA, 25 bp, Saccharomyces pastorianus
cataaatatgattctgttggtgttg

SEQ ID NO: 169772 - DNA, 25 bp, Saccharomyces pastorianus
atggattatcagcttgatttacgaa

SEQ ID NO: 169773 - DNA, 25 bp, Saccharomyces pastorianus
tcagcttgatttacgaaatgttact

SEQ ID NO: 169774 - DNA, 25 bp, Saccharomyces pastorianus
aatatgattctgttggtgttggaac

SEQ ID NO: 169775 - DNA, 25 bp, Saccharomyces pastorianus
tacttatcctatatactacataaat

SEQ ID NO: 169776 - DNA, 25 bp, Saccharomyces pastorianus
accagttgtcaaaatggattatcag

SEQ ID NO: 169777 - DNA, 25 bp, Saccharomyces pastorianus
attctgttggtgttggaacgagagt

SEQ ID NO: 169778 - DNA, 25 bp, Saccharomyces pastorianus
gaaatgttacttatcctatatacta

SEQ ID NO: 169779 - DNA, 25 bp, Saccharomyces pastorianus
tgatttacgaaatgttacttatcct

SEQ ID NO: 169780 - DNA, 25 bp, Saccharomyces pastorianus
ttatcagcttgatttacgaaatgtt

SEQ ID NO: 169781 - DNA, 25 bp, Saccharomyces pastorianus
gttacttatcctatatactacataa

SEQ ID NO: 169782 - DNA, 25 bp, Saccharomyces pastorianus
ctatttctcatcatttgcgtcatct

SEQ ID NO: 169783 - DNA, 25 bp, Saccharomyces pastorianus
accttgcgtttcagcttccactaat

SEQ ID NO: 169784 - DNA, 25 bp, Saccharomyces pastorianus
gaatctgcaattctacacaattcta

SEQ ID NO: 169785 - DNA, 25 bp, Saccharomyces pastorianus
tatttctcatcatttgcgtcatctt

SEQ ID NO: 169786 - DNA, 25 bp, Saccharomyces pastorianus
tttctcatcatttgcgtcatcttct

SEQ ID NO: 169787 - DNA, 25 bp, Saccharomyces pastorianus
atttctcatcatttgcgtcatcttc

SEQ ID NO: 169788 - DNA, 25 bp, Saccharomyces pastorianus
gcgtttcagcttccactaatttaga

SEQ ID NO: 169789 - DNA, 25 bp, Saccharomyces pastorianus
tgcgtttcagcttccactaatttag

SEQ ID NO: 169790 - DNA, 25 bp, Saccharomyces pastorianus
gtttcagcttccactaatttagatg

SEQ ID NO: 169791 - DNA, 25 bp, Saccharomyces pastorianus
atctgcaattctacacaattctata

SEQ ID NO: 169792 - DNA, 25 bp, Saccharomyces pastorianus
cactaatttagatgactatttctca

SEQ ID NO: 169793 - DNA, 25 bp, Saccharomyces pastorianus
ttcgaattacgaaatcggtgatagt

SEQ ID NO: 169794 - DNA, 25 bp, Saccharomyces pastorianus
cctgcagcgaaatactcctgttcga

SEQ ID NO: 169795 - DNA, 25 bp, Saccharomyces pastorianus
acagtaattcccctgcagcgaaata

SEQ ID NO: 169796 - DNA, 25 bp, Saccharomyces pastorianus
ctttccctcgtctacaaacagtaat

SEQ ID NO: 169797 - DNA, 25 bp, Saccharomyces pastorianus
gaaatactcctgttcgaattacgaa

SEQ ID NO: 169798 - DNA, 25 bp, Saccharomyces pastorianus
caaacagtaattcccctgcagcgaa

SEQ ID NO: 169799 - DNA, 25 bp, Saccharomyces pastorianus
actcctgttcgaattacgaaatcgg

SEQ ID NO: 169800 - DNA, 25 bp, Saccharomyces pastorianus
gcagcgaaatactcctgttcgaatt

SEQ ID NO: 169801 - DNA, 25 bp, Saccharomyces pastorianus
tacaaacagtaattcccctgcagcg

SEQ ID NO: 169802 - DNA, 25 bp, Saccharomyces pastorianus
gtaattcccctgcagcgaaatactc

SEQ ID NO: 169803 - DNA, 25 bp, Saccharomyces pastorianus
attgctttccctcgtctacaaacag

SEQ ID NO: 169804 - DNA, 25 bp, Saccharomyces pastorianus
agatgcttcatctagtccaacaact

SEQ ID NO: 169805 - DNA, 25 bp, Saccharomyces pastorianus
gtctcaaccacctctgttacattaa

SEQ ID NO: 169806 - DNA, 25 bp, Saccharomyces pastorianus
gtaactggttcaactgctttaacga

SEQ ID NO: 169807 - DNA, 25 bp, Saccharomyces pastorianus
taaaaccagttcgatttcttcaatt

SEQ ID NO: 169808 - DNA, 25 bp, Saccharomyces pastorianus
ccattggccacatctaacgtaactg

SEQ ID NO: 169809 - DNA, 25 bp, Saccharomyces pastorianus
gctcagtttccccaattagatcagt

SEQ ID NO: 169810 - DNA, 25 bp, Saccharomyces pastorianus
attaaccagttcagtcatcccattg

SEQ ID NO: 169811 - DNA, 25 bp, Saccharomyces pastorianus
gagttcagctaatccagatgcttca

SEQ ID NO: 169812 - DNA, 25 bp, Saccharomyces pastorianus
agttcagctgctcaaacgacttcag

SEQ ID NO: 169813 - DNA, 25 bp, Saccharomyces pastorianus
aagtatttcaactgtctcaaccacc

SEQ ID NO: 169814 - DNA, 25 bp, Saccharomyces pastorianus
gttgagtcaaccacaactcttcatg

SEQ ID NO: 169815 - DNA, 25 bp, Saccharomyces pastorianus
tcacttctactgatatgtcatacgc

SEQ ID NO: 169816 - DNA, 25 bp, Saccharomyces pastorianus
accttcacttctactgatatgtcat

SEQ ID NO: 169817 - DNA, 25 bp, Saccharomyces pastorianus
acttctactgatatgtcatacgcac

SEQ ID NO: 169818 - DNA, 25 bp, Saccharomyces pastorianus
ccttcacttctactgatatgtcata

SEQ ID NO: 169819 - DNA, 25 bp, Saccharomyces pastorianus
ctcaccttcacttctactgatatgt

SEQ ID NO: 169820 - DNA, 25 bp, Saccharomyces pastorianus
ttcacttctactgatatgtcatacg

SEQ ID NO: 169821 - DNA, 25 bp, Saccharomyces pastorianus
cattcttaagttaccctactctcac

SEQ ID NO: 169822 - DNA, 25 bp, Saccharomyces pastorianus
cacttctactgatatgtcatacgca

SEQ ID NO: 169823 - DNA, 25 bp, Saccharomyces pastorianus
taccattcttaagttaccctactct

SEQ ID NO: 169824 - DNA, 25 bp, Saccharomyces pastorianus
ccattcttaagttaccctactctca

SEQ ID NO: 169825 - DNA, 25 bp, Saccharomyces pastorianus
ttctactgatatgtcatacgcacac

SEQ ID NO: 169826 - DNA, 25 bp, Saccharomyces pastorianus
taagatgcacttgttcctgaacgag

SEQ ID NO: 169827 - DNA, 25 bp, Saccharomyces pastorianus
agatgctcatttatcacttcacacc

SEQ ID NO: 169828 - DNA, 25 bp, Saccharomyces pastorianus
atcacttcacacctttcatgtttca

SEQ ID NO: 169829 - DNA, 25 bp, Saccharomyces pastorianus
ctatggtgcctatgtgtattcgtat

SEQ ID NO: 169830 - DNA, 25 bp, Saccharomyces pastorianus
ggtattgttctatggtgcctatgtg

SEQ ID NO: 169831 - DNA, 25 bp, Saccharomyces pastorianus
attccttcatcaaccatcactactt

SEQ ID NO: 169832 - DNA, 25 bp, Saccharomyces pastorianus
atcatgaatttcttatgcgaaggta

SEQ ID NO: 169833 - DNA, 25 bp, Saccharomyces pastorianus
tttcatgtttcatctttcgcaccat

SEQ ID NO: 169834 - DNA, 25 bp, Saccharomyces pastorianus
ctttcgcaccatcttcatcattaaa

SEQ ID NO: 169835 - DNA, 25 bp, Saccharomyces pastorianus
tttatacccattccttcatcaacca

SEQ ID NO: 169836 - DNA, 25 bp, Saccharomyces pastorianus
gttcctgaacgaggcatgcatatat

SEQ ID NO: 169837 - DNA, 25 bp, Saccharomyces pastorianus
agaaatccctgtcgcctagatcatt

SEQ ID NO: 169838 - DNA, 25 bp, Saccharomyces pastorianus
aagagtttctctatagtggggctgg

SEQ ID NO: 169839 - DNA, 25 bp, Saccharomyces pastorianus
tctttgaacggagctttcgtggcct

SEQ ID NO: 169840 - DNA, 25 bp, Saccharomyces pastorianus
ttgaacggagctttcgtggcctttt

SEQ ID NO: 169841 - DNA, 25 bp, Saccharomyces pastorianus
gaacggagctttcgtggccttttgt

SEQ ID NO: 169842 - DNA, 25 bp, Saccharomyces pastorianus
tcaaagaaatccctgtcgcctagat

SEQ ID NO: 169843 - DNA, 25 bp, Saccharomyces pastorianus
ttctcaaagaaatccctgtcgccta

SEQ ID NO: 169844 - DNA, 25 bp, Saccharomyces pastorianus
attctttgaacggagctttcgtggc

SEQ ID NO: 169845 - DNA, 25 bp, Saccharomyces pastorianus
tgttctcaaagaaatccctgtcgcc

SEQ ID NO: 169846 - DNA, 25 bp, Saccharomyces pastorianus
agctttcgtggccttttgttctcaa

SEQ ID NO: 169847 - DNA, 25 bp, Saccharomyces pastorianus
aaagaaatccctgtcgcctagatca

SEQ ID NO: 169848 - DNA, 25 bp, Saccharomyces pastorianus
gccaacaacagagttttctcagtca

SEQ ID NO: 169849 - DNA, 25 bp, Saccharomyces pastorianus
gcttctttctaaaaatggccaacaa

SEQ ID NO: 169850 - DNA, 25 bp, Saccharomyces pastorianus
ccaacaacagagttttctcagtcaa

SEQ ID NO: 169851 - DNA, 25 bp, Saccharomyces pastorianus
atggccaacaacagagttttctcag

SEQ ID NO: 169852 - DNA, 25 bp, Saccharomyces pastorianus
aaatggccaacaacagagttttctc

SEQ ID NO: 169853 - DNA, 25 bp, Saccharomyces pastorianus
tggccaacaacagagttttctcagt

SEQ ID NO: 169854 - DNA, 25 bp, Saccharomyces pastorianus
ggccaacaacagagttttctcagtc

SEQ ID NO: 169855 - DNA, 25 bp, Saccharomyces pastorianus
tctttctaaaaatggccaacaacag

SEQ ID NO: 169856 - DNA, 25 bp, Saccharomyces pastorianus
aatggccaacaacagagttttctca

SEQ ID NO: 169857 - DNA, 25 bp, Saccharomyces pastorianus
caacaacagagttttctcagtcaaa

SEQ ID NO: 169858 - DNA, 25 bp, Saccharomyces pastorianus
ttctttctaaaaatggccaacaaca

SEQ ID NO: 169859 - DNA, 25 bp, Saccharomyces pastorianus
ggatcgtcgattattctatagaata

SEQ ID NO: 169860 - DNA, 25 bp, Saccharomyces pastorianus
gaagttcttctcagatatatagcaa

SEQ ID NO: 169861 - DNA, 25 bp, Saccharomyces pastorianus
tagcaattcatgaaggatcgtcgat

SEQ ID NO: 169862 - DNA, 25 bp, Saccharomyces pastorianus
caattcatgaaggatcgtcgattat

SEQ ID NO: 169863 - DNA, 25 bp, Saccharomyces pastorianus
tagatatgcagaatatgctagaagt

SEQ ID NO: 169864 - DNA, 25 bp, Saccharomyces pastorianus
aaggatcgtcgattattctatagaa

SEQ ID NO: 169865 - DNA, 25 bp, Saccharomyces pastorianus
gttcttctcagatatatagcaattc

SEQ ID NO: 169866 - DNA, 25 bp, Saccharomyces pastorianus
tagaagttcttctcagatatatagc

SEQ ID NO: 169867 - DNA, 25 bp, Saccharomyces pastorianus
gcaattcatgaaggatcgtcgatta

SEQ ID NO: 169868 - DNA, 25 bp, Saccharomyces pastorianus
ggattttcattattattgaaggcta

SEQ ID NO: 169869 - DNA, 25 bp, Saccharomyces pastorianus
cttctcagatatatagcaattcatg

SEQ ID NO: 169870 - DNA, 25 bp, Saccharomyces pastorianus
caaaaaggcgtcgataaatctccat

SEQ ID NO: 169871 - DNA, 25 bp, Saccharomyces pastorianus
tccactgttgaagaaaggctataat

SEQ ID NO: 169872 - DNA, 25 bp, Saccharomyces pastorianus
ggcgtcgataaatctccataactat

SEQ ID NO: 169873 - DNA, 25 bp, Saccharomyces pastorianus
aaaggcgtcgataaatctccataac

SEQ ID NO: 169874 - DNA, 25 bp, Saccharomyces pastorianus
gtcgataaatctccataactatatt

SEQ ID NO: 169875 - DNA, 25 bp, Saccharomyces pastorianus
cgtacacagagtatactagaagttc

SEQ ID NO: 169876 - DNA, 25 bp, Saccharomyces pastorianus
gaaatccactgttgaagaaaggcta

SEQ ID NO: 169877 - DNA, 25 bp, Saccharomyces pastorianus
ctatattactttatgttctttcctt

SEQ ID NO: 169878 - DNA, 25 bp, Saccharomyces pastorianus
aattgtttgaaatccactgttgaag

SEQ ID NO: 169879 - DNA, 25 bp, Saccharomyces pastorianus
aaggctataatattcgtacacagag

SEQ ID NO: 169880 - DNA, 25 bp, Saccharomyces pastorianus
atattcgtacacagagtatactaga

SEQ ID NO: 169881 - DNA, 25 bp, Saccharomyces pastorianus
tgcttacctttactttgtttccaat

SEQ ID NO: 169882 - DNA, 25 bp, Saccharomyces pastorianus
ttactttgtttccaatgttcttctt

SEQ ID NO: 169883 - DNA, 25 bp, Saccharomyces pastorianus
tttactttgtttccaatgttcttct

SEQ ID NO: 169884 - DNA, 25 bp, Saccharomyces pastorianus
tgtttccaatgttcttctttaacac

SEQ ID NO: 169885 - DNA, 25 bp, Saccharomyces pastorianus
tactttgtttccaatgttcttcttt

SEQ ID NO: 169886 - DNA, 25 bp, Saccharomyces pastorianus
ttgtttccaatgttcttctttaaca

SEQ ID NO: 169887 - DNA, 25 bp, Saccharomyces pastorianus
tttccaatgttcttctttaacacca

SEQ ID NO: 169888 - DNA, 25 bp, Saccharomyces pastorianus
gcttacctttactttgtttccaatg

SEQ ID NO: 169889 - DNA, 25 bp, Saccharomyces pastorianus
tccaatgttcttctttaacaccaaa

SEQ ID NO: 169890 - DNA, 25 bp, Saccharomyces pastorianus
aacaccaaaacatactatttgagaa

SEQ ID NO: 169891 - DNA, 25 bp, Saccharomyces pastorianus
tctttaacaccaaaacatactattt

SEQ ID NO: 169892 - DNA, 25 bp, Saccharomyces pastorianus
gtacaccttcttactttatatcgtt

SEQ ID NO: 169893 - DNA, 25 bp, Saccharomyces pastorianus
gctcgcgttctagttatccagatgg

SEQ ID NO: 169894 - DNA, 25 bp, Saccharomyces pastorianus
gatgctgcggtgactctagaggatc

SEQ ID NO: 169895 - DNA, 25 bp, Saccharomyces pastorianus
agaggatccccatattgaatggtct

SEQ ID NO: 169896 - DNA, 25 bp, Saccharomyces pastorianus
ggtcctgtacatcacttaccgagaa

SEQ ID NO: 169897 - DNA, 25 bp, Saccharomyces pastorianus
catattgaatggtctaacgctagca

SEQ ID NO: 169898 - DNA, 25 bp, Saccharomyces pastorianus
tagaggatccccatattgaatggtc

SEQ ID NO: 169899 - DNA, 25 bp, Saccharomyces pastorianus
ctagaggatccccatattgaatggt

SEQ ID NO: 169900 - DNA, 25 bp, Saccharomyces pastorianus
agaatctatcctcaatgtttttaca

SEQ ID NO: 169901 - DNA, 25 bp, Saccharomyces pastorianus
aaccaattcaatgctcgcgttctag

SEQ ID NO: 169902 - DNA, 25 bp, Saccharomyces pastorianus
gaggatccccatattgaatggtcta

SEQ ID NO: 169903 - DNA, 25 bp, Saccharomyces pastorianus
aagtgttgagcttgcctgtcaaatc

SEQ ID NO: 169904 - DNA, 25 bp, Saccharomyces pastorianus
tcttcactggatatacgctttttgc

SEQ ID NO: 169905 - DNA, 25 bp, Saccharomyces pastorianus
gctgcttcgccctttgtattactca

SEQ ID NO: 169906 - DNA, 25 bp, Saccharomyces pastorianus
tttcgtctttttcttcactggatat

SEQ ID NO: 169907 - DNA, 25 bp, Saccharomyces pastorianus
ggatatacgctttttgcatttgcaa

SEQ ID NO: 169908 - DNA, 25 bp, Saccharomyces pastorianus
gcatttgcaatagcacatatgtgta

SEQ ID NO: 169909 - DNA, 25 bp, Saccharomyces pastorianus
ttttcacttgccatattcgttcacc

SEQ ID NO: 169910 - DNA, 25 bp, Saccharomyces pastorianus
cttgccatattcgttcaccggtttt

SEQ ID NO: 169911 - DNA, 25 bp, Saccharomyces pastorianus
tgagcttgcctgtcaaatcctccat

SEQ ID NO: 169912 - DNA, 25 bp, Saccharomyces pastorianus
cactttttcacttgccatattcgtt

SEQ ID NO: 169913 - DNA, 25 bp, Saccharomyces pastorianus
tgtcaaatcctccatgtgtccttct

SEQ ID NO: 169914 - DNA, 25 bp, Saccharomyces pastorianus
gggattccctctgtgttgaaggcaa

SEQ ID NO: 169915 - DNA, 25 bp, Saccharomyces pastorianus
tgttgggattccctctgtgttgaag

SEQ ID NO: 169916 - DNA, 25 bp, Saccharomyces pastorianus
tatactagaagatttcctcgagatt

SEQ ID NO: 169917 - DNA, 25 bp, Saccharomyces pastorianus
ttgggattccctctgtgttgaaggc

SEQ ID NO: 169918 - DNA, 25 bp, Saccharomyces pastorianus
ccctctgtgttgaaggcaataatat

SEQ ID NO: 169919 - DNA, 25 bp, Saccharomyces pastorianus
tatacaggatatactagaagatttc

SEQ ID NO: 169920 - DNA, 25 bp, Saccharomyces pastorianus
ttccctctgtgttgaaggcaataat

SEQ ID NO: 169921 - DNA, 25 bp, Saccharomyces pastorianus
ttcctcgagattatagaaatgccca

SEQ ID NO: 169922 - DNA, 25 bp, Saccharomyces pastorianus
gattccctctgtgttgaaggcaata

SEQ ID NO: 169923 - DNA, 25 bp, Saccharomyces pastorianus
tagaagatttcctcgagattataga

SEQ ID NO: 169924 - DNA, 25 bp, Saccharomyces pastorianus
aattgttgggattccctctgtgttg

SEQ ID NO: 169925 - DNA, 25 bp, Saccharomyces pastorianus
taaactgtctttaagggtaggcgat

SEQ ID NO: 169926 - DNA, 25 bp, Saccharomyces pastorianus
ggcgatttgatttacgtactcacta

SEQ ID NO: 169927 - DNA, 25 bp, Saccharomyces pastorianus
gtgggatggtgttcttatcagacac

SEQ ID NO: 169928 - DNA, 25 bp, Saccharomyces pastorianus
tacgtactcactaaaggttctaatg

SEQ ID NO: 169929 - DNA, 25 bp, Saccharomyces pastorianus
gtggaatgtacctatcaatatttta

SEQ ID NO: 169930 - DNA, 25 bp, Saccharomyces pastorianus
atcgatgtagtggaatgtacctatc

SEQ ID NO: 169931 - DNA, 25 bp, Saccharomyces pastorianus
ctgtctttaagggtaggcgatttga

SEQ ID NO: 169932 - DNA, 25 bp, Saccharomyces pastorianus
cagacacagcgctaataataataat

SEQ ID NO: 169933 - DNA, 25 bp, Saccharomyces pastorianus
tgcttacaacctatcgatgtagtgg

SEQ ID NO: 169934 - DNA, 25 bp, Saccharomyces pastorianus
tgttcttatcagacacagcgctaat

SEQ ID NO: 169935 - DNA, 25 bp, Saccharomyces pastorianus
actaaaggttctaatggctggtggg

SEQ ID NO: 169936 - DNA, 25 bp, Saccharomyces pastorianus
agtcgcactgcgtcatatgccggca

SEQ ID NO: 169937 - DNA, 25 bp, Saccharomyces pastorianus
ggcatgacaactccggtgaaagata

SEQ ID NO: 169938 - DNA, 25 bp, Saccharomyces pastorianus
actgcgtcatatgccggcatgacaa

SEQ ID NO: 169939 - DNA, 25 bp, Saccharomyces pastorianus
acgggattccatgcttacaacctat

SEQ ID NO: 169940 - DNA, 25 bp, Saccharomyces pastorianus
cgggattccatgcttacaacctatc

SEQ ID NO: 169941 - DNA, 25 bp, Saccharomyces pastorianus
gacaactccggtgaaagataaggaa

SEQ ID NO: 169942 - DNA, 25 bp, Saccharomyces pastorianus
tatgccggcatgacaactccggtga

SEQ ID NO: 169943 - DNA, 25 bp, Saccharomyces pastorianus
atgagtcgcactgcgtcatatgccg

SEQ ID NO: 169944 - DNA, 25 bp, Saccharomyces pastorianus
ggaaggccacgggattccatgctta

SEQ ID NO: 169945 - DNA, 25 bp, Saccharomyces pastorianus
aggccacgggattccatgcttacaa

SEQ ID NO: 169946 - DNA, 25 bp, Saccharomyces pastorianus
gataaggaaggccacgggattccat

SEQ ID NO: 169947 - DNA, 25 bp, Saccharomyces pastorianus
tatctccttttgatttttattaacg

SEQ ID NO: 169948 - DNA, 25 bp, Saccharomyces pastorianus
tggtttaggtttcgcttatctcctt

SEQ ID NO: 169949 - DNA, 25 bp, Saccharomyces pastorianus
gttgctggtttaggtttcgcttatc

SEQ ID NO: 169950 - DNA, 25 bp, Saccharomyces pastorianus
tgatttttattaacgtcggaggtgt

SEQ ID NO: 169951 - DNA, 25 bp, Saccharomyces pastorianus
caattttgctgggtttgtgttgcca

SEQ ID NO: 169952 - DNA, 25 bp, Saccharomyces pastorianus
taaaactaatttgcctaaatcttat

SEQ ID NO: 169953 - DNA, 25 bp, Saccharomyces pastorianus
gaaattctttccaattttgctgggt

SEQ ID NO: 169954 - DNA, 25 bp, Saccharomyces pastorianus
gctgggtttgtgttgccagcatatt

SEQ ID NO: 169955 - DNA, 25 bp, Saccharomyces pastorianus
aaatcttatttagttgctggtttag

SEQ ID NO: 169956 - DNA, 25 bp, Saccharomyces pastorianus
gaggtgtaggtgaaattctttccaa

SEQ ID NO: 169957 - DNA, 25 bp, Saccharomyces pastorianus
acgtcggaggtgtaggtgaaattct

SEQ ID NO: 169958 - DNA, 25 bp, Saccharomyces pastorianus
gatattgtagtttttattattctta

SEQ ID NO: 169959 - DNA, 25 bp, Saccharomyces pastorianus
tattattcttatttggatcctcctc

SEQ ID NO: 169960 - DNA, 25 bp, Saccharomyces pastorianus
tatttggatcctcctctcttaccgc

SEQ ID NO: 169961 - DNA, 25 bp, Saccharomyces pastorianus
tacagcactaccaacatattatctt

SEQ ID NO: 169962 - DNA, 25 bp, Saccharomyces pastorianus
ttaccgcccgtcttcaatctacctt

SEQ ID NO: 169963 - DNA, 25 bp, Saccharomyces pastorianus
caatctaccttcgaacccggctctt

SEQ ID NO: 169964 - DNA, 25 bp, Saccharomyces pastorianus
gtacagcactaccaacatattatct

SEQ ID NO: 169965 - DNA, 25 bp, Saccharomyces pastorianus
ctttggtacagcactaccaacatat

SEQ ID NO: 169966 - DNA, 25 bp, Saccharomyces pastorianus
ttatttggatcctcctctcttaccg

SEQ ID NO: 169967 - DNA, 25 bp, Saccharomyces pastorianus
tattcttatttggatcctcctctct

SEQ ID NO: 169968 - DNA, 25 bp, Saccharomyces pastorianus
ttcttatttggatcctcctctctta

SEQ ID NO: 169969 - DNA, 25 bp, Saccharomyces pastorianus
atattcgttcatccagtactgttag

SEQ ID NO: 169970 - DNA, 25 bp, Saccharomyces pastorianus
agtactgttagtggcaccgctttag

SEQ ID NO: 169971 - DNA, 25 bp, Saccharomyces pastorianus
gcaactccatatattcgttcatcca

SEQ ID NO: 169972 - DNA, 25 bp, Saccharomyces pastorianus
tatactacatcggatgatccacatg

SEQ ID NO: 169973 - DNA, 25 bp, Saccharomyces pastorianus
gatataactacttcgactgttcaga

SEQ ID NO: 169974 - DNA, 25 bp, Saccharomyces pastorianus
acatcagtttatccaactagctcaa

SEQ ID NO: 169975 - DNA, 25 bp, Saccharomyces pastorianus
gcctcatctagtttagcgggtatgt

SEQ ID NO: 169976 - DNA, 25 bp, Saccharomyces pastorianus
ttcgactgttcagactacttcagct

SEQ ID NO: 169977 - DNA, 25 bp, Saccharomyces pastorianus
gatccacatgcctcatctagtttag

SEQ ID NO: 169978 - DNA, 25 bp, Saccharomyces pastorianus
actagctcaagcgatataactactt

SEQ ID NO: 169979 - DNA, 25 bp, Saccharomyces pastorianus
gtggcaccgctttagcagatcaaac

SEQ ID NO: 169980 - DNA, 25 bp, Saccharomyces pastorianus
tgaggacaatatttctgcagctgcc

SEQ ID NO: 169981 - DNA, 25 bp, Saccharomyces pastorianus
caccactactaacgcatttatcaca

SEQ ID NO: 169982 - DNA, 25 bp, Saccharomyces pastorianus
tctcctgcatcaacgtctactataa

SEQ ID NO: 169983 - DNA, 25 bp, Saccharomyces pastorianus
gaaagtgtttctggtacctcaacta

SEQ ID NO: 169984 - DNA, 25 bp, Saccharomyces pastorianus
tgcagctgcctctctagaaagtgtt

SEQ ID NO: 169985 - DNA, 25 bp, Saccharomyces pastorianus
atctgccagcatttcattaatcatg

SEQ ID NO: 169986 - DNA, 25 bp, Saccharomyces pastorianus
cgttcaatcaactgcttccgtaatg

SEQ ID NO: 169987 - DNA, 25 bp, Saccharomyces pastorianus
gcattccattgctgctgtatcaaca

SEQ ID NO: 169988 - DNA, 25 bp, Saccharomyces pastorianus
tattctagtcaatccagtgccattc

SEQ ID NO: 169989 - DNA, 25 bp, Saccharomyces pastorianus
aggagccattacatcatctgccagc

SEQ ID NO: 169990 - DNA, 25 bp, Saccharomyces pastorianus
attaatcatggaaggcagcgcaaac

SEQ ID NO: 169991 - DNA, 25 bp, Saccharomyces pastorianus
gttgaaggtgacgatccagaagaat

SEQ ID NO: 169992 - DNA, 25 bp, Saccharomyces pastorianus
tctgtcagccaattaaatacggtgc

SEQ ID NO: 169993 - DNA, 25 bp, Saccharomyces pastorianus
gtcgttgacaacacatttggtgccg

SEQ ID NO: 169994 - DNA, 25 bp, Saccharomyces pastorianus
tgctttggctgtttcctccggtcaa

SEQ ID NO: 169995 - DNA, 25 bp, Saccharomyces pastorianus
aaagatttggtatcgaggctagatt

SEQ ID NO: 169996 - DNA, 25 bp, Saccharomyces pastorianus
taaccagttcaaaatctcgttcaaa

SEQ ID NO: 169997 - DNA, 25 bp, Saccharomyces pastorianus
ggtaatccaaagtacaatgttccgg

SEQ ID NO: 169998 - DNA, 25 bp, Saccharomyces pastorianus
cacggtattccagttgtcgttgaca

SEQ ID NO: 169999 - DNA, 25 bp, Saccharomyces pastorianus
aacacatttggtgccggtggttact

SEQ ID NO: 170000 - DNA, 25 bp, Saccharomyces pastorianus
aacccttgccatccaaggtttggca

SEQ ID NO: 170001 - DNA, 25 bp, Saccharomyces pastorianus
ggtggttacttctgtcagccaatta

SEQ ID NO: 170002 - DNA, 25 bp, Saccharomyces pastorianus
gtctctaaacaattccaacggttca

SEQ ID NO: 170003 - DNA, 25 bp, Saccharomyces pastorianus
actagtacgaacacttcgggcggag

SEQ ID NO: 170004 - DNA, 25 bp, Saccharomyces pastorianus
ggaaacaataacaactcgtctctaa

SEQ ID NO: 170005 - DNA, 25 bp, Saccharomyces pastorianus
gagcttctacaagtgctggaggact

SEQ ID NO: 170006 - DNA, 25 bp, Saccharomyces pastorianus
tccaacggttcaacgggcctgtttg

SEQ ID NO: 170007 - DNA, 25 bp, Saccharomyces pastorianus
ggaggcttatttcagaataacacta

SEQ ID NO: 170008 - DNA, 25 bp, Saccharomyces pastorianus
ccagccaatggcacaatcacaaaat

SEQ ID NO: 170009 - DNA, 25 bp, Saccharomyces pastorianus
tttgggtccaataatgcatctaaca

SEQ ID NO: 170010 - DNA, 25 bp, Saccharomyces pastorianus
gccaccaccaattctactggtttat

SEQ ID NO: 170011 - DNA, 25 bp, Saccharomyces pastorianus
ataatgcatctaacacggcggccac

SEQ ID NO: 170012 - DNA, 25 bp, Saccharomyces pastorianus
gtgctggaggactatttggaaacaa

SEQ ID NO: 170013 - DNA, 25 bp, Saccharomyces pastorianus
gtaacacgaatactactaaaagatg

SEQ ID NO: 170014 - DNA, 25 bp, Saccharomyces pastorianus
tttagagcttcaatccaacaacttc

SEQ ID NO: 170015 - DNA, 25 bp, Saccharomyces pastorianus
cgaatactactaaaagatgacattt

SEQ ID NO: 170016 - DNA, 25 bp, Saccharomyces pastorianus
ctttacgtcatctttttacaccgca

SEQ ID NO: 170017 - DNA, 25 bp, Saccharomyces pastorianus
tccataacagttgatgactgtttct

SEQ ID NO: 170018 - DNA, 25 bp, Saccharomyces pastorianus
agcttccataacagttgatgactgt

SEQ ID NO: 170019 - DNA, 25 bp, Saccharomyces pastorianus
gacattttagagcttcaatccaaca

SEQ ID NO: 170020 - DNA, 25 bp, Saccharomyces pastorianus
attttagagcttcaatccaacaact

SEQ ID NO: 170021 - DNA, 25 bp, Saccharomyces pastorianus
acattttagagcttcaatccaacaa

SEQ ID NO: 170022 - DNA, 25 bp, Saccharomyces pastorianus
gatgacattttagagcttcaatcca

SEQ ID NO: 170023 - DNA, 25 bp, Saccharomyces pastorianus
tgacattttagagcttcaatccaac

SEQ ID NO: 170024 - DNA, 25 bp, Saccharomyces pastorianus
gcagaaggctcctatgcagacagct

SEQ ID NO: 170025 - DNA, 25 bp, Saccharomyces pastorianus
gctcctatgcagacagctaagcagt

SEQ ID NO: 170026 - DNA, 25 bp, Saccharomyces pastorianus
tgatatgtcgtcctttttctctcta

SEQ ID NO: 170027 - DNA, 25 bp, Saccharomyces pastorianus
taccttcccttttatttcttgatat

SEQ ID NO: 170028 - DNA, 25 bp, Saccharomyces pastorianus
gaaggctcctatgcagacagctaag

SEQ ID NO: 170029 - DNA, 25 bp, Saccharomyces pastorianus
taagcagtgcttaattgaattacct

SEQ ID NO: 170030 - DNA, 25 bp, Saccharomyces pastorianus
ttcccttttatttcttgatatgtcg

SEQ ID NO: 170031 - DNA, 25 bp, Saccharomyces pastorianus
gtgcttaattgaattaccttccctt

SEQ ID NO: 170032 - DNA, 25 bp, Saccharomyces pastorianus
atttcttgatatgtcgtcctttttc

SEQ ID NO: 170033 - DNA, 25 bp, Saccharomyces pastorianus
gtaattgcagaaggctcctatgcag

SEQ ID NO: 170034 - DNA, 25 bp, Saccharomyces pastorianus
atgcagacagctaagcagtgcttaa

SEQ ID NO: 170035 - DNA, 25 bp, Saccharomyces pastorianus
gtttgttgtactttcgaactctcga

SEQ ID NO: 170036 - DNA, 25 bp, Saccharomyces pastorianus
gcgtgaacattcaaatcgacagcgt

SEQ ID NO: 170037 - DNA, 25 bp, Saccharomyces pastorianus
catagaggaactattagtctccata

SEQ ID NO: 170038 - DNA, 25 bp, Saccharomyces pastorianus
ttcccttttctaaaatttcacagca

SEQ ID NO: 170039 - DNA, 25 bp, Saccharomyces pastorianus
ttatttctgtttgttgtactttcga

SEQ ID NO: 170040 - DNA, 25 bp, Saccharomyces pastorianus
atcgacagcgtaaccttctgtattt

SEQ ID NO: 170041 - DNA, 25 bp, Saccharomyces pastorianus
aatttcacagcaaagaagctttaga

SEQ ID NO: 170042 - DNA, 25 bp, Saccharomyces pastorianus
actattagtctccataatgtcacag

SEQ ID NO: 170043 - DNA, 25 bp, Saccharomyces pastorianus
taccaaggcgacaattcccttttct

SEQ ID NO: 170044 - DNA, 25 bp, Saccharomyces pastorianus
gtgcagtaaatctacaactcataag

SEQ ID NO: 170045 - DNA, 25 bp, Saccharomyces pastorianus
aaccttctgtatttatttctgtttg

SEQ ID NO: 170046 - DNA, 25 bp, Saccharomyces pastorianus
ggcgaaaaatatgagcggtacgaga

SEQ ID NO: 170047 - DNA, 25 bp, Saccharomyces pastorianus
actaaccgcccggagaatgtcttgt

SEQ ID NO: 170048 - DNA, 25 bp, Saccharomyces pastorianus
taaccgcccggagaatgtcttgttg

SEQ ID NO: 170049 - DNA, 25 bp, Saccharomyces pastorianus
accgcccggagaatgtcttgttgag

SEQ ID NO: 170050 - DNA, 25 bp, Saccharomyces pastorianus
aaccgcccggagaatgtcttgttga

SEQ ID NO: 170051 - DNA, 25 bp, Saccharomyces pastorianus
ctaaccgcccggagaatgtcttgtt

SEQ ID NO: 170052 - DNA, 25 bp, Saccharomyces pastorianus
gcccggagaatgtcttgttgagcta

SEQ ID NO: 170053 - DNA, 25 bp, Saccharomyces pastorianus
ggaaggcgaaaaatatgagcggtac

SEQ ID NO: 170054 - DNA, 25 bp, Saccharomyces pastorianus
ccggagaatgtcttgttgagctata

SEQ ID NO: 170055 - DNA, 25 bp, Saccharomyces pastorianus
ggagaatgtcttgttgagctatagc

SEQ ID NO: 170056 - DNA, 25 bp, Saccharomyces pastorianus
ccgcccggagaatgtcttgttgagc

SEQ ID NO: 170057 - DNA, 25 bp, Saccharomyces pastorianus
tagtgttgtaataaccatttatatt

SEQ ID NO: 170058 - DNA, 25 bp, Saccharomyces pastorianus
tgattagtgttgtaataaccattta

SEQ ID NO: 170059 - DNA, 25 bp, Saccharomyces pastorianus
attgattagtgttgtaataaccatt

SEQ ID NO: 170060 - DNA, 25 bp, Saccharomyces pastorianus
gttgtaataaccatttatattgtat

SEQ ID NO: 170061 - DNA, 25 bp, Saccharomyces pastorianus
aattgattagtgttgtaataaccat

SEQ ID NO: 170062 - DNA, 25 bp, Saccharomyces pastorianus
gtgttgtaataaccatttatattgt

SEQ ID NO: 170063 - DNA, 25 bp, Saccharomyces pastorianus
agtgttgtaataaccatttatattg

SEQ ID NO: 170064 - DNA, 25 bp, Saccharomyces pastorianus
tattccaacataattgattagtgtt

SEQ ID NO: 170065 - DNA, 25 bp, Saccharomyces pastorianus
ttgattagtgttgtaataaccattt

SEQ ID NO: 170066 - DNA, 25 bp, Saccharomyces pastorianus
attagtgttgtaataaccatttata

SEQ ID NO: 170067 - DNA, 25 bp, Saccharomyces pastorianus
gattagtgttgtaataaccatttat

SEQ ID NO: 170068 - DNA, 25 bp, Saccharomyces pastorianus
ttaaacactgtctcgcaacaacctc

SEQ ID NO: 170069 - DNA, 25 bp, Saccharomyces pastorianus
gggccgctaacaccaaggaccatac

SEQ ID NO: 170070 - DNA, 25 bp, Saccharomyces pastorianus
tggtattgccaacggtctactggct

SEQ ID NO: 170071 - DNA, 25 bp, Saccharomyces pastorianus
actactgctcatgcgattggctata

SEQ ID NO: 170072 - DNA, 25 bp, Saccharomyces pastorianus
cagtagtgttgcttcagtcccaggg

SEQ ID NO: 170073 - DNA, 25 bp, Saccharomyces pastorianus
accaccggcgttactggtaactcag

SEQ ID NO: 170074 - DNA, 25 bp, Saccharomyces pastorianus
ggtctactggctaatagtgctctaa

SEQ ID NO: 170075 - DNA, 25 bp, Saccharomyces pastorianus
gtagtaggatctagtaccgtttctt

SEQ ID NO: 170076 - DNA, 25 bp, Saccharomyces pastorianus
gtagcacttccataagcggtgtagt

SEQ ID NO: 170077 - DNA, 25 bp, Saccharomyces pastorianus
aactcagtaaactccgaagctgctg

SEQ ID NO: 170078 - DNA, 25 bp, Saccharomyces pastorianus
acggcaacggtgtgccttcgatttc

SEQ ID NO: 170079 - DNA, 25 bp, Saccharomyces pastorianus
acaccgtcctgcacgagtttgttaa

SEQ ID NO: 170080 - DNA, 25 bp, Saccharomyces pastorianus
tgactgcgtgcttaattactctcgt

SEQ ID NO: 170081 - DNA, 25 bp, Saccharomyces pastorianus
tttccgaacctgaaggacctgctac

SEQ ID NO: 170082 - DNA, 25 bp, Saccharomyces pastorianus
aaggcagttccagcctttggacgac

SEQ ID NO: 170083 - DNA, 25 bp, Saccharomyces pastorianus
aatagagactttggccacctggagt

SEQ ID NO: 170084 - DNA, 25 bp, Saccharomyces pastorianus
aatcccgtggtgatatcgttgcctt

SEQ ID NO: 170085 - DNA, 25 bp, Saccharomyces pastorianus
aggagttccgaactgcgttcaacaa

SEQ ID NO: 170086 - DNA, 25 bp, Saccharomyces pastorianus
atcaaagaaatcgtccaccactggg

SEQ ID NO: 170087 - DNA, 25 bp, Saccharomyces pastorianus
ggcaccacctttttggatatccatc

SEQ ID NO: 170088 - DNA, 25 bp, Saccharomyces pastorianus
ttaattactctcgtctgcaagccat

SEQ ID NO: 170089 - DNA, 25 bp, Saccharomyces pastorianus
tcgctcccatgaccgttatcaaaga

SEQ ID NO: 170090 - DNA, 25 bp, Saccharomyces pastorianus
cattctagccctaatgagattggaa

SEQ ID NO: 170091 - DNA, 25 bp, Saccharomyces pastorianus
gatgcttcaacgcttaacactgaat

SEQ ID NO: 170092 - DNA, 25 bp, Saccharomyces pastorianus
atgctctcattctagccctaatgag

SEQ ID NO: 170093 - DNA, 25 bp, Saccharomyces pastorianus
gctctcattctagccctaatgagat

SEQ ID NO: 170094 - DNA, 25 bp, Saccharomyces pastorianus
tgcttcaacgcttaacactgaatgg

SEQ ID NO: 170095 - DNA, 25 bp, Saccharomyces pastorianus
gcttcaacgcttaacactgaatggt

SEQ ID NO: 170096 - DNA, 25 bp, Saccharomyces pastorianus
ttcaacgcttaacactgaatggtcg

SEQ ID NO: 170097 - DNA, 25 bp, Saccharomyces pastorianus
accgatgcttcaacgcttaacactg

SEQ ID NO: 170098 - DNA, 25 bp, Saccharomyces pastorianus
atgcttcaacgcttaacactgaatg

SEQ ID NO: 170099 - DNA, 25 bp, Saccharomyces pastorianus
aaccgatgcttcaacgcttaacact

SEQ ID NO: 170100 - DNA, 25 bp, Saccharomyces pastorianus
ccgatgcttcaacgcttaacactga

SEQ ID NO: 170101 - DNA, 25 bp, Saccharomyces pastorianus
cataataaactagccttgttggcgc

SEQ ID NO: 170102 - DNA, 25 bp, Saccharomyces pastorianus
gagagtaggctttcataataaacta

SEQ ID NO: 170103 - DNA, 25 bp, Saccharomyces pastorianus
agagagtaggctttcataataaact

SEQ ID NO: 170104 - DNA, 25 bp, Saccharomyces pastorianus
agagtaggctttcataataaactag

SEQ ID NO: 170105 - DNA, 25 bp, Saccharomyces pastorianus
gagtaggctttcataataaactagc

SEQ ID NO: 170106 - DNA, 25 bp, Saccharomyces pastorianus
tttcataataaactagccttgttgg

SEQ ID NO: 170107 - DNA, 25 bp, Saccharomyces pastorianus
ctttcataataaactagccttgttg

SEQ ID NO: 170108 - DNA, 25 bp, Saccharomyces pastorianus
gctttcataataaactagccttgtt

SEQ ID NO: 170109 - DNA, 25 bp, Saccharomyces pastorianus
ggctttcataataaactagccttgt

SEQ ID NO: 170110 - DNA, 25 bp, Saccharomyces pastorianus
aagagagtaggctttcataataaac

SEQ ID NO: 170111 - DNA, 25 bp, Saccharomyces pastorianus
tcataataaactagccttgttggcg

SEQ ID NO: 170112 - DNA, 25 bp, Saccharomyces pastorianus
tcgttccactgagaactacggtttt

SEQ ID NO: 170113 - DNA, 25 bp, Saccharomyces pastorianus
gtatgcattggtaaacttgaaacca

SEQ ID NO: 170114 - DNA, 25 bp, Saccharomyces pastorianus
gacatgtactgatcgttccactgag

SEQ ID NO: 170115 - DNA, 25 bp, Saccharomyces pastorianus
gtactgatcgttccactgagaacta

SEQ ID NO: 170116 - DNA, 25 bp, Saccharomyces pastorianus
aacttatcagatctgaccatgcctg

SEQ ID NO: 170117 - DNA, 25 bp, Saccharomyces pastorianus
agatctgaccatgcctgaatctcaa

SEQ ID NO: 170118 - DNA, 25 bp, Saccharomyces pastorianus
ttgaaaccaattgtacccggacatg

SEQ ID NO: 170119 - DNA, 25 bp, Saccharomyces pastorianus
ttgtacccggacatgtactgatcgt

SEQ ID NO: 170120 - DNA, 25 bp, Saccharomyces pastorianus
tataatctctgcttctttacagaag

SEQ ID NO: 170121 - DNA, 25 bp, Saccharomyces pastorianus
tctgaccatgcctgaatctcaagat

SEQ ID NO: 170122 - DNA, 25 bp, Saccharomyces pastorianus
cagaagtcaaaatatacgtatgcat

SEQ ID NO: 170123 - DNA, 25 bp, Saccharomyces pastorianus
aaataactctacatcggccactgta

SEQ ID NO: 170124 - DNA, 25 bp, Saccharomyces pastorianus
gggatgaactctcacaaggtcctaa

SEQ ID NO: 170125 - DNA, 25 bp, Saccharomyces pastorianus
ggatggtaatgggactttgactgat

SEQ ID NO: 170126 - DNA, 25 bp, Saccharomyces pastorianus
taatgtcttgaagccagacagtcaa

SEQ ID NO: 170127 - DNA, 25 bp, Saccharomyces pastorianus
gcatacacacattattccacgttat

SEQ ID NO: 170128 - DNA, 25 bp, Saccharomyces pastorianus
cacttgcatacacacattattccac

SEQ ID NO: 170129 - DNA, 25 bp, Saccharomyces pastorianus
ggacagtcggtaccccacttgcata

SEQ ID NO: 170130 - DNA, 25 bp, Saccharomyces pastorianus
gaaggttcgagctttaaccgaaatg

SEQ ID NO: 170131 - DNA, 25 bp, Saccharomyces pastorianus
aaggtcctaatgtcttgaagccaga

SEQ ID NO: 170132 - DNA, 25 bp, Saccharomyces pastorianus
gacagtcaaaggaaggttcgagctt

SEQ ID NO: 170133 - DNA, 25 bp, Saccharomyces pastorianus
gggactttgactgattggcaaggaa

SEQ ID NO: 170134 - DNA, 25 bp, Saccharomyces pastorianus
gaacttgccgacttagcagaattga

SEQ ID NO: 170135 - DNA, 25 bp, Saccharomyces pastorianus
aaagacaccgaacttgccgacttag

SEQ ID NO: 170136 - DNA, 25 bp, Saccharomyces pastorianus
acttgccgacttagcagaattgagc

SEQ ID NO: 170137 - DNA, 25 bp, Saccharomyces pastorianus
gtcttctacattactagattgtgat

SEQ ID NO: 170138 - DNA, 25 bp, Saccharomyces pastorianus
accgaacttgccgacttagcagaat

SEQ ID NO: 170139 - DNA, 25 bp, Saccharomyces pastorianus
aagacaccgaacttgccgacttagc

SEQ ID NO: 170140 - DNA, 25 bp, Saccharomyces pastorianus
ccgacttagcagaattgagcattga

SEQ ID NO: 170141 - DNA, 25 bp, Saccharomyces pastorianus
ggcacgtcttctacattactagatt

SEQ ID NO: 170142 - DNA, 25 bp, Saccharomyces pastorianus
acaaaagacaccgaacttgccgact

SEQ ID NO: 170143 - DNA, 25 bp, Saccharomyces pastorianus
gacaccgaacttgccgacttagcag

SEQ ID NO: 170144 - DNA, 25 bp, Saccharomyces pastorianus
acgtcttctacattactagattgtg

SEQ ID NO: 170145 - DNA, 25 bp, Saccharomyces pastorianus
aatacatcgatttggtgggtgcaac

SEQ ID NO: 170146 - DNA, 25 bp, Saccharomyces pastorianus
aagttggtaactcgcgcaatacatc

SEQ ID NO: 170147 - DNA, 25 bp, Saccharomyces pastorianus
ggtaactcgcgcaatacatcgattt

SEQ ID NO: 170148 - DNA, 25 bp, Saccharomyces pastorianus
gaagttggtaactcgcgcaatacat

SEQ ID NO: 170149 - DNA, 25 bp, Saccharomyces pastorianus
gtaactcgcgcaatacatcgatttg

SEQ ID NO: 170150 - DNA, 25 bp, Saccharomyces pastorianus
cgcgcaatacatcgatttggtgggt

SEQ ID NO: 170151 - DNA, 25 bp, Saccharomyces pastorianus
tggtaactcgcgcaatacatcgatt

SEQ ID NO: 170152 - DNA, 25 bp, Saccharomyces pastorianus
caatacatcgatttggtgggtgcaa

SEQ ID NO: 170153 - DNA, 25 bp, Saccharomyces pastorianus
aactcgcgcaatacatcgatttggt

SEQ ID NO: 170154 - DNA, 25 bp, Saccharomyces pastorianus
ctcgcgcaatacatcgatttggtgg

SEQ ID NO: 170155 - DNA, 25 bp, Saccharomyces pastorianus
tggaagttggtaactcgcgcaatac

SEQ ID NO: 170156 - DNA, 25 bp, Saccharomyces pastorianus
gttctaaatctcatccattcggtca

SEQ ID NO: 170157 - DNA, 25 bp, Saccharomyces pastorianus
caagaaggtcgctaagagaactaaa

SEQ ID NO: 170158 - DNA, 25 bp, Saccharomyces pastorianus
gaaggtcgctaagagaactaaaatc

SEQ ID NO: 170159 - DNA, 25 bp, Saccharomyces pastorianus
taaatctcatccattcggtcacgct

SEQ ID NO: 170160 - DNA, 25 bp, Saccharomyces pastorianus
tttcaagagcgttgtatctacagag

SEQ ID NO: 170161 - DNA, 25 bp, Saccharomyces pastorianus
agggttctaaatctcatccattcgg

SEQ ID NO: 170162 - DNA, 25 bp, Saccharomyces pastorianus
tctaaatctcatccattcggtcacg

SEQ ID NO: 170163 - DNA, 25 bp, Saccharomyces pastorianus
ccaagaaggttgtaaagaaggcatt

SEQ ID NO: 170164 - DNA, 25 bp, Saccharomyces pastorianus
acacgatgagggttctaaatctcat

SEQ ID NO: 170165 - DNA, 25 bp, Saccharomyces pastorianus
gagcgttgtatctacagagactttt

SEQ ID NO: 170166 - DNA, 25 bp, Saccharomyces pastorianus
atctacagagacttttgaacaacca

SEQ ID NO: 170167 - DNA, 25 bp, Saccharomyces pastorianus
atacgtttccactattattactttg

SEQ ID NO: 170168 - DNA, 25 bp, Saccharomyces pastorianus
ctcaaggatggcgtcatcttcttca

SEQ ID NO: 170169 - DNA, 25 bp, Saccharomyces pastorianus
gtacgaaaacactcagtccacttct

SEQ ID NO: 170170 - DNA, 25 bp, Saccharomyces pastorianus
catcctcttctccttcatcgatttt

SEQ ID NO: 170171 - DNA, 25 bp, Saccharomyces pastorianus
cttctcctcttcatcatcggattat

SEQ ID NO: 170172 - DNA, 25 bp, Saccharomyces pastorianus
agtccacttctagctcaaggatggc

SEQ ID NO: 170173 - DNA, 25 bp, Saccharomyces pastorianus
atcggattattcctcgtttccatct

SEQ ID NO: 170174 - DNA, 25 bp, Saccharomyces pastorianus
tcgatttttgtgtcatcgtccttct

SEQ ID NO: 170175 - DNA, 25 bp, Saccharomyces pastorianus
atctttcacagggatcatcctcttc

SEQ ID NO: 170176 - DNA, 25 bp, Saccharomyces pastorianus
tggagtcatcaagctcagagtacga

SEQ ID NO: 170177 - DNA, 25 bp, Saccharomyces pastorianus
tcggcatcatacgtttccactatta

SEQ ID NO: 170178 - DNA, 25 bp, Saccharomyces pastorianus
ttacttgaactctccctctgatatt

SEQ ID NO: 170179 - DNA, 25 bp, Saccharomyces pastorianus
agccctctgccgcattgcaggactt

SEQ ID NO: 170180 - DNA, 25 bp, Saccharomyces pastorianus
tgccgcattgcaggacttaattaaa

SEQ ID NO: 170181 - DNA, 25 bp, Saccharomyces pastorianus
agaaatactcatcacgcgggcttac

SEQ ID NO: 170182 - DNA, 25 bp, Saccharomyces pastorianus
taataataacccttacttgaactct

SEQ ID NO: 170183 - DNA, 25 bp, Saccharomyces pastorianus
gcattgcaggacttaattaaacata

SEQ ID NO: 170184 - DNA, 25 bp, Saccharomyces pastorianus
tccctctgatattctgggcacaggt

SEQ ID NO: 170185 - DNA, 25 bp, Saccharomyces pastorianus
ctctgatattctgggcacaggtact

SEQ ID NO: 170186 - DNA, 25 bp, Saccharomyces pastorianus
taccgcaaaggtctaatagcatggc

SEQ ID NO: 170187 - DNA, 25 bp, Saccharomyces pastorianus
gaaagaaatactcatcacgcgggct

SEQ ID NO: 170188 - DNA, 25 bp, Saccharomyces pastorianus
gcgggcttaccgcaaaggtctaata

SEQ ID NO: 170189 - DNA, 25 bp, Saccharomyces pastorianus
ctcataaataggtaagtgttggaat

SEQ ID NO: 170190 - DNA, 25 bp, Saccharomyces pastorianus
taggtaagtgttggaattaaaatca

SEQ ID NO: 170191 - DNA, 25 bp, Saccharomyces pastorianus
tttccttcttagtaatgacactcat

SEQ ID NO: 170192 - DNA, 25 bp, Saccharomyces pastorianus
taatgacactcataaataggtaagt

SEQ ID NO: 170193 - DNA, 25 bp, Saccharomyces pastorianus
catacacggtgttaaacgatgacat

SEQ ID NO: 170194 - DNA, 25 bp, Saccharomyces pastorianus
ttccttcttagtaatgacactcata

SEQ ID NO: 170195 - DNA, 25 bp, Saccharomyces pastorianus
tccttcttagtaatgacactcataa

SEQ ID NO: 170196 - DNA, 25 bp, Saccharomyces pastorianus
aatttccttcttagtaatgacactc

SEQ ID NO: 170197 - DNA, 25 bp, Saccharomyces pastorianus
aaatttccttcttagtaatgacact

SEQ ID NO: 170198 - DNA, 25 bp, Saccharomyces pastorianus
ttatcatacacggtgttaaacgatg

SEQ ID NO: 170199 - DNA, 25 bp, Saccharomyces pastorianus
atttccttcttagtaatgacactca

SEQ ID NO: 170200 - DNA, 25 bp, Saccharomyces pastorianus
gattcgtggtgtcagattacatggc

SEQ ID NO: 170201 - DNA, 25 bp, Saccharomyces pastorianus
ctggtgacttagaaagagcccaatt

SEQ ID NO: 170202 - DNA, 25 bp, Saccharomyces pastorianus
ggaagaatttccatatgttgattgt

SEQ ID NO: 170203 - DNA, 25 bp, Saccharomyces pastorianus
tttcgcgccattcaaaggtgctgct

SEQ ID NO: 170204 - DNA, 25 bp, Saccharomyces pastorianus
gcagttttcaaggttaagttgcaac

SEQ ID NO: 170205 - DNA, 25 bp, Saccharomyces pastorianus
aaaggtctacaatctggtgacttag

SEQ ID NO: 170206 - DNA, 25 bp, Saccharomyces pastorianus
gctgaagcccttgaaaatgctaacg

SEQ ID NO: 170207 - DNA, 25 bp, Saccharomyces pastorianus
gaacttgctcaggatttgattcgtg

SEQ ID NO: 170208 - DNA, 25 bp, Saccharomyces pastorianus
ctactggttacgcagttttcaaggt

SEQ ID NO: 170209 - DNA, 25 bp, Saccharomyces pastorianus
atcaatgattttggtgcttttacaa

SEQ ID NO: 170210 - DNA, 25 bp, Saccharomyces pastorianus
atgctaacgacatatcagaaggttt

SEQ ID NO: 170211 - DNA, 25 bp, Saccharomyces pastorianus
gaaatcgatatctctacatagtaat

SEQ ID NO: 170212 - DNA, 25 bp, Saccharomyces pastorianus
atagtagaagttctccccaagaata

SEQ ID NO: 170213 - DNA, 25 bp, Saccharomyces pastorianus
aatatagtagaagttctccccaaga

SEQ ID NO: 170214 - DNA, 25 bp, Saccharomyces pastorianus
gaggctattatatcatgtatacaga

SEQ ID NO: 170215 - DNA, 25 bp, Saccharomyces pastorianus
tagtagaagttctccccaagaatat

SEQ ID NO: 170216 - DNA, 25 bp, Saccharomyces pastorianus
agtagaagttctccccaagaatata

SEQ ID NO: 170217 - DNA, 25 bp, Saccharomyces pastorianus
gtagaggctattatatcatgtatac

SEQ ID NO: 170218 - DNA, 25 bp, Saccharomyces pastorianus
gatatctctacatagtaatacaacg

SEQ ID NO: 170219 - DNA, 25 bp, Saccharomyces pastorianus
atgaaatcgatatctctacatagta

SEQ ID NO: 170220 - DNA, 25 bp, Saccharomyces pastorianus
tggtagaggctattatatcatgtat

SEQ ID NO: 170221 - DNA, 25 bp, Saccharomyces pastorianus
tatagtagaagttctccccaagaat

SEQ ID NO: 170222 - DNA, 25 bp, Saccharomyces pastorianus
agttgatgccggtgacttgaataag

SEQ ID NO: 170223 - DNA, 25 bp, Saccharomyces pastorianus
gatgatatcgagttagtcgttcaac

SEQ ID NO: 170224 - DNA, 25 bp, Saccharomyces pastorianus
aaggatgatatcgagttagtcgttc

SEQ ID NO: 170225 - DNA, 25 bp, Saccharomyces pastorianus
aaagccctgaaagctcacaatggtg

SEQ ID NO: 170226 - DNA, 25 bp, Saccharomyces pastorianus
gatatcgagttagtcgttcaacaaa

SEQ ID NO: 170227 - DNA, 25 bp, Saccharomyces pastorianus
aaggtgaagttgatgccggtgactt

SEQ ID NO: 170228 - DNA, 25 bp, Saccharomyces pastorianus
gccggtgacttgaataaggatgata

SEQ ID NO: 170229 - DNA, 25 bp, Saccharomyces pastorianus
tgatgccggtgacttgaataaggat

SEQ ID NO: 170230 - DNA, 25 bp, Saccharomyces pastorianus
atcaaagccctgaaagctcacaatg

SEQ ID NO: 170231 - DNA, 25 bp, Saccharomyces pastorianus
agccctgaaagctcacaatggtgac

SEQ ID NO: 170232 - DNA, 25 bp, Saccharomyces pastorianus
atcgagttagtcgttcaacaaacta

SEQ ID NO: 170233 - DNA, 25 bp, Saccharomyces pastorianus
atgtgttgtcagtcattaacctatc

SEQ ID NO: 170234 - DNA, 25 bp, Saccharomyces pastorianus
gtgctcttcttacaccattgagaaa

SEQ ID NO: 170235 - DNA, 25 bp, Saccharomyces pastorianus
cactgcattcagattccattagatt

SEQ ID NO: 170236 - DNA, 25 bp, Saccharomyces pastorianus
tttatgtgctcttcttacaccattg

SEQ ID NO: 170237 - DNA, 25 bp, Saccharomyces pastorianus
gtcagtcattaacctatcatattat

SEQ ID NO: 170238 - DNA, 25 bp, Saccharomyces pastorianus
ataggaatctgcacaagggaattga

SEQ ID NO: 170239 - DNA, 25 bp, Saccharomyces pastorianus
tagatttgatggcagtttctcaatc

SEQ ID NO: 170240 - DNA, 25 bp, Saccharomyces pastorianus
atctgcacaagggaattgacatttc

SEQ ID NO: 170241 - DNA, 25 bp, Saccharomyces pastorianus
ttttcttttcattttatgtgttgtc

SEQ ID NO: 170242 - DNA, 25 bp, Saccharomyces pastorianus
tgacatttcaaacatttcaagtaat

SEQ ID NO: 170243 - DNA, 25 bp, Saccharomyces pastorianus
tcatattatcaatcactgcattcag

SEQ ID NO: 170244 - DNA, 25 bp, Saccharomyces pastorianus
aggagcgacatagaatcggacgctg

SEQ ID NO: 170245 - DNA, 25 bp, Saccharomyces pastorianus
aaggagcgacatagaatcggacgct

SEQ ID NO: 170246 - DNA, 25 bp, Saccharomyces pastorianus
tacaaggagcgacatagaatcggac

SEQ ID NO: 170247 - DNA, 25 bp, Saccharomyces pastorianus
agatatgatttacaaggagcgacat

SEQ ID NO: 170248 - DNA, 25 bp, Saccharomyces pastorianus
acaaggagcgacatagaatcggacg

SEQ ID NO: 170249 - DNA, 25 bp, Saccharomyces pastorianus
gatttacaaggagcgacatagaatc

SEQ ID NO: 170250 - DNA, 25 bp, Saccharomyces pastorianus
atgatttacaaggagcgacatagaa

SEQ ID NO: 170251 - DNA, 25 bp, Saccharomyces pastorianus
tttacaaggagcgacatagaatcgg

SEQ ID NO: 170252 - DNA, 25 bp, Saccharomyces pastorianus
caaggagcgacatagaatcggacgc

SEQ ID NO: 170253 - DNA, 25 bp, Saccharomyces pastorianus
gatatgatttacaaggagcgacata

SEQ ID NO: 170254 - DNA, 25 bp, Saccharomyces pastorianus
tgatttacaaggagcgacatagaat

SEQ ID NO: 170255 - DNA, 25 bp, Saccharomyces pastorianus
tattaactacgacttaccagctaac

SEQ ID NO: 170256 - DNA, 25 bp, Saccharomyces pastorianus
taactacgacttaccagctaacaaa

SEQ ID NO: 170257 - DNA, 25 bp, Saccharomyces pastorianus
ttaactacgacttaccagctaacaa

SEQ ID NO: 170258 - DNA, 25 bp, Saccharomyces pastorianus
gttattaactacgacttaccagcta

SEQ ID NO: 170259 - DNA, 25 bp, Saccharomyces pastorianus
ggttattaactacgacttaccagct

SEQ ID NO: 170260 - DNA, 25 bp, Saccharomyces pastorianus
gacttaccagctaacaaagaaaact

SEQ ID NO: 170261 - DNA, 25 bp, Saccharomyces pastorianus
acgttggcgctatgagagaactaga

SEQ ID NO: 170262 - DNA, 25 bp, Saccharomyces pastorianus
tacgacttaccagctaacaaagaaa

SEQ ID NO: 170263 - DNA, 25 bp, Saccharomyces pastorianus
attaactacgacttaccagctaaca

SEQ ID NO: 170264 - DNA, 25 bp, Saccharomyces pastorianus
actacgacttaccagctaacaaaga

SEQ ID NO: 170265 - DNA, 25 bp, Saccharomyces pastorianus
ttggcgctatgagagaactagaaaa

SEQ ID NO: 170266 - DNA, 25 bp, Saccharomyces pastorianus
tcgagattccctccgattaattatg

SEQ ID NO: 170267 - DNA, 25 bp, Saccharomyces pastorianus
ttcaacgaggctatgcatgcccagt

SEQ ID NO: 170268 - DNA, 25 bp, Saccharomyces pastorianus
atgcatgcccagtgtcattcttgaa

SEQ ID NO: 170269 - DNA, 25 bp, Saccharomyces pastorianus
aggcacacacagacgcgcttcaatt

SEQ ID NO: 170270 - DNA, 25 bp, Saccharomyces pastorianus
caattttattgaaagtccgcccgct

SEQ ID NO: 170271 - DNA, 25 bp, Saccharomyces pastorianus
gtcattcttgaagcaggcacacaca

SEQ ID NO: 170272 - DNA, 25 bp, Saccharomyces pastorianus
gcaagtggacttttcaacgaggcta

SEQ ID NO: 170273 - DNA, 25 bp, Saccharomyces pastorianus
gacgcgcttcaattagttttcttta

SEQ ID NO: 170274 - DNA, 25 bp, Saccharomyces pastorianus
tcctctttcgtcgtattgcaagtgg

SEQ ID NO: 170275 - DNA, 25 bp, Saccharomyces pastorianus
tccgcccgctctgttaaaaaaggcg

SEQ ID NO: 170276 - DNA, 25 bp, Saccharomyces pastorianus
tctttactagatgcatcatttgggc

SEQ ID NO: 170277 - DNA, 25 bp, Saccharomyces pastorianus
acgagattgctcatttttcgttccg

SEQ ID NO: 170278 - DNA, 25 bp, Saccharomyces pastorianus
gtttccgcaggttttgcaaatcatt

SEQ ID NO: 170279 - DNA, 25 bp, Saccharomyces pastorianus
accggaacgagattgctcatttttc

SEQ ID NO: 170280 - DNA, 25 bp, Saccharomyces pastorianus
gaaccggaacgagattgctcatttt

SEQ ID NO: 170281 - DNA, 25 bp, Saccharomyces pastorianus
ttccgcaggttttgcaaatcattaa

SEQ ID NO: 170282 - DNA, 25 bp, Saccharomyces pastorianus
cggaacgagattgctcatttttcgt

SEQ ID NO: 170283 - DNA, 25 bp, Saccharomyces pastorianus
ccgtttccgcaggttttgcaaatca

SEQ ID NO: 170284 - DNA, 25 bp, Saccharomyces pastorianus
cggaaccggaacgagattgctcatt

SEQ ID NO: 170285 - DNA, 25 bp, Saccharomyces pastorianus
gagattgctcatttttcgttccgtt

SEQ ID NO: 170286 - DNA, 25 bp, Saccharomyces pastorianus
ttccgtttccgcaggttttgcaaat

SEQ ID NO: 170287 - DNA, 25 bp, Saccharomyces pastorianus
ccgcaggttttgcaaatcattaagc

SEQ ID NO: 170288 - DNA, 25 bp, Saccharomyces pastorianus
tattctggcttcaatgtcccacgaa

SEQ ID NO: 170289 - DNA, 25 bp, Saccharomyces pastorianus
gtgctagcttataaatactattctg

SEQ ID NO: 170290 - DNA, 25 bp, Saccharomyces pastorianus
tgtacagggacattgctgaacagct

SEQ ID NO: 170291 - DNA, 25 bp, Saccharomyces pastorianus
tactattctggcttcaatgtcccac

SEQ ID NO: 170292 - DNA, 25 bp, Saccharomyces pastorianus
gtcccacgaaattttcataaatctt

SEQ ID NO: 170293 - DNA, 25 bp, Saccharomyces pastorianus
ggctgcccaactagggaatttaaag

SEQ ID NO: 170294 - DNA, 25 bp, Saccharomyces pastorianus
ctggcttcaatgtcccacgaaattt

SEQ ID NO: 170295 - DNA, 25 bp, Saccharomyces pastorianus
ttaaaggctaagcaagtgctagctt

SEQ ID NO: 170296 - DNA, 25 bp, Saccharomyces pastorianus
gtattgtacagggacattgctgaac

SEQ ID NO: 170297 - DNA, 25 bp, Saccharomyces pastorianus
gcttcaatgtcccacgaaattttca

SEQ ID NO: 170298 - DNA, 25 bp, Saccharomyces pastorianus
tctgctaaagcactgctatattacc

SEQ ID NO: 170299 - DNA, 25 bp, Saccharomyces pastorianus
gtagctactattttcaatatttcaa

SEQ ID NO: 170300 - DNA, 25 bp, Saccharomyces pastorianus
taacaattcatattcaactcatgga

SEQ ID NO: 170301 - DNA, 25 bp, Saccharomyces pastorianus
aattacatcaattcttcggccaagg

SEQ ID NO: 170302 - DNA, 25 bp, Saccharomyces pastorianus
ggcaatgtagctactattttcaata

SEQ ID NO: 170303 - DNA, 25 bp, Saccharomyces pastorianus
caactcatggaagttttgatggcaa

SEQ ID NO: 170304 - DNA, 25 bp, Saccharomyces pastorianus
aaagcattaccttcttttgtccaag

SEQ ID NO: 170305 - DNA, 25 bp, Saccharomyces pastorianus
gggtcacttctaacttataaaagca

SEQ ID NO: 170306 - DNA, 25 bp, Saccharomyces pastorianus
gttttgatggcaatgtagctactat

SEQ ID NO: 170307 - DNA, 25 bp, Saccharomyces pastorianus
attacatcaattcttcggccaaggg

SEQ ID NO: 170308 - DNA, 25 bp, Saccharomyces pastorianus
gcattaccttcttttgtccaagata

SEQ ID NO: 170309 - DNA, 25 bp, Saccharomyces pastorianus
accttcttttgtccaagatatttca

SEQ ID NO: 170310 - DNA, 25 bp, Saccharomyces pastorianus
ttatatatatatgtccggaaaattg

SEQ ID NO: 170311 - DNA, 25 bp, Saccharomyces pastorianus
gaaaaacatatcaccatatcagtaa

SEQ ID NO: 170312 - DNA, 25 bp, Saccharomyces pastorianus
gtgttaaatggtgacgcaagttatg

SEQ ID NO: 170313 - DNA, 25 bp, Saccharomyces pastorianus
gattagcttgatttgtatagaaaaa

SEQ ID NO: 170314 - DNA, 25 bp, Saccharomyces pastorianus
atggtgacgcaagttatgagaagct

SEQ ID NO: 170315 - DNA, 25 bp, Saccharomyces pastorianus
ctacatcggatttgattagcttgat

SEQ ID NO: 170316 - DNA, 25 bp, Saccharomyces pastorianus
aacatatcaccatatcagtaaatat

SEQ ID NO: 170317 - DNA, 25 bp, Saccharomyces pastorianus
tgtaggaataaaaatctgttggagt

SEQ ID NO: 170318 - DNA, 25 bp, Saccharomyces pastorianus
cggatttgattagcttgatttgtat

SEQ ID NO: 170319 - DNA, 25 bp, Saccharomyces pastorianus
tacactacatcggatttgattagct

SEQ ID NO: 170320 - DNA, 25 bp, Saccharomyces pastorianus
cgttacactacatcggatttgatta

SEQ ID NO: 170321 - DNA, 25 bp, Saccharomyces pastorianus
gtttatctaggctaccgtcttcaag

SEQ ID NO: 170322 - DNA, 25 bp, Saccharomyces pastorianus
caaggaatctggtgccaagttggtc

SEQ ID NO: 170323 - DNA, 25 bp, Saccharomyces pastorianus
atccagaaattagtcagttgtgcgc

SEQ ID NO: 170324 - DNA, 25 bp, Saccharomyces pastorianus
gggctctactaaggataccttgaaa

SEQ ID NO: 170325 - DNA, 25 bp, Saccharomyces pastorianus
gagcgcgatgggacgacattatatt

SEQ ID NO: 170326 - DNA, 25 bp, Saccharomyces pastorianus
gaagccattcttggtggttatccaa

SEQ ID NO: 170327 - DNA, 25 bp, Saccharomyces pastorianus
gaaatacattgttgcggcccttcaa

SEQ ID NO: 170328 - DNA, 25 bp, Saccharomyces pastorianus
agttgtgcgcactatcgaaggccac

SEQ ID NO: 170329 - DNA, 25 bp, Saccharomyces pastorianus
agttggtcgttatcccagaagccat

SEQ ID NO: 170330 - DNA, 25 bp, Saccharomyces pastorianus
gagtatgctaagtatcttgccgaag

SEQ ID NO: 170331 - DNA, 25 bp, Saccharomyces pastorianus
aggccaccgacgcatccttatgtgt

SEQ ID NO: 170332 - DNA, 25 bp, Saccharomyces pastorianus
gtggagcatccttacatttatgtta

SEQ ID NO: 170333 - DNA, 25 bp, Saccharomyces pastorianus
gatcaagacgttctggcaacatgct

SEQ ID NO: 170334 - DNA, 25 bp, Saccharomyces pastorianus
tcgttattataatcgcatgcggtgg

SEQ ID NO: 170335 - DNA, 25 bp, Saccharomyces pastorianus
aagtgttgcaacttctttgggctcc

SEQ ID NO: 170336 - DNA, 25 bp, Saccharomyces pastorianus
ggaaccagcctgtggagcatcctta

SEQ ID NO: 170337 - DNA, 25 bp, Saccharomyces pastorianus
gaaactgccggttgtgacgtattgc

SEQ ID NO: 170338 - DNA, 25 bp, Saccharomyces pastorianus
atgcttgagatatgccgatgactac

SEQ ID NO: 170339 - DNA, 25 bp, Saccharomyces pastorianus
gcatcattcgcgtttgagagtttta

SEQ ID NO: 170340 - DNA, 25 bp, Saccharomyces pastorianus
tgggctccccatacatagcatcatt

SEQ ID NO: 170341 - DNA, 25 bp, Saccharomyces pastorianus
ggtagtccagttactcttgaaaaat

SEQ ID NO: 170342 - DNA, 25 bp, Saccharomyces pastorianus
gtgacgtattgcataagtctctcaa

SEQ ID NO: 170343 - DNA, 25 bp, Saccharomyces pastorianus
gaagcatcttattattcgttgtgat

SEQ ID NO: 170344 - DNA, 25 bp, Saccharomyces pastorianus
gatcccttccgtgggcatgatagag

SEQ ID NO: 170345 - DNA, 25 bp, Saccharomyces pastorianus
gtcgagataagttttgatgctggag

SEQ ID NO: 170346 - DNA, 25 bp, Saccharomyces pastorianus
gattcaaacactttgatcagagcag

SEQ ID NO: 170347 - DNA, 25 bp, Saccharomyces pastorianus
ttgctttcgtgaaaacggcaccaaa

SEQ ID NO: 170348 - DNA, 25 bp, Saccharomyces pastorianus
gcctttgactatacccatttctgag

SEQ ID NO: 170349 - DNA, 25 bp, Saccharomyces pastorianus
gaagagcctatcgagtcatttgttg

SEQ ID NO: 170350 - DNA, 25 bp, Saccharomyces pastorianus
ggcaccaaaattttacgtcacggat

SEQ ID NO: 170351 - DNA, 25 bp, Saccharomyces pastorianus
gtaaatcgtggaggcctttgactat

SEQ ID NO: 170352 - DNA, 25 bp, Saccharomyces pastorianus
gatagagcttttgctttcgtgaaaa

SEQ ID NO: 170353 - DNA, 25 bp, Saccharomyces pastorianus
gagtcatttgttgttgatcccttcc

SEQ ID NO: 170354 - DNA, 25 bp, Saccharomyces pastorianus
ggtagccatttgttctcaaaggaat

SEQ ID NO: 170355 - DNA, 25 bp, Saccharomyces pastorianus
tttggtagccatttgttctcaaagg

SEQ ID NO: 170356 - DNA, 25 bp, Saccharomyces pastorianus
agccatttgttctcaaaggaatctg

SEQ ID NO: 170357 - DNA, 25 bp, Saccharomyces pastorianus
atttgttctcaaaggaatctgtgtt

SEQ ID NO: 170358 - DNA, 25 bp, Saccharomyces pastorianus
ggaatctgtgttggctgggttatta

SEQ ID NO: 170359 - DNA, 25 bp, Saccharomyces pastorianus
aatctgtgttggctgggttattaaa

SEQ ID NO: 170360 - DNA, 25 bp, Saccharomyces pastorianus
gttctcaaaggaatctgtgttggct

SEQ ID NO: 170361 - DNA, 25 bp, Saccharomyces pastorianus
tctgtgttggctgggttattaaacg

SEQ ID NO: 170362 - DNA, 25 bp, Saccharomyces pastorianus
tttgaatgaaactttggtagccatt

SEQ ID NO: 170363 - DNA, 25 bp, Saccharomyces pastorianus
gaaactttggtagccatttgttctc

SEQ ID NO: 170364 - DNA, 25 bp, Saccharomyces pastorianus
aaggaatctgtgttggctgggttat

SEQ ID NO: 170365 - DNA, 25 bp, Saccharomyces pastorianus
gagtctccaccgaagttgatgctag

SEQ ID NO: 170366 - DNA, 25 bp, Saccharomyces pastorianus
taacccatcattgatcttggctgct

SEQ ID NO: 170367 - DNA, 25 bp, Saccharomyces pastorianus
aagattgttccaggcagagtctcca

SEQ ID NO: 170368 - DNA, 25 bp, Saccharomyces pastorianus
gttgatcgatgttgccgtggaatac

SEQ ID NO: 170369 - DNA, 25 bp, Saccharomyces pastorianus
tggctgctgccaagcaaccaactta

SEQ ID NO: 170370 - DNA, 25 bp, Saccharomyces pastorianus
ttccccatttgttggtagaattcta

SEQ ID NO: 170371 - DNA, 25 bp, Saccharomyces pastorianus
gacagattgttagtcgaattcggta

SEQ ID NO: 170372 - DNA, 25 bp, Saccharomyces pastorianus
gccgaggcccaagttactttgattt

SEQ ID NO: 170373 - DNA, 25 bp, Saccharomyces pastorianus
gaagccgacccaggtgttatttccg

SEQ ID NO: 170374 - DNA, 25 bp, Saccharomyces pastorianus
aagactccacaactaacccatcatt

SEQ ID NO: 170375 - DNA, 25 bp, Saccharomyces pastorianus
ctattattctccttcgttcaagcag

SEQ ID NO: 170376 - DNA, 25 bp, Saccharomyces pastorianus
gactctattactaggtctccaatct

SEQ ID NO: 170377 - DNA, 25 bp, Saccharomyces pastorianus
tcccacattaatcaatgccgcattg

SEQ ID NO: 170378 - DNA, 25 bp, Saccharomyces pastorianus
tttgggtggccttgcaacggttaga

SEQ ID NO: 170379 - DNA, 25 bp, Saccharomyces pastorianus
ctgagaacataaagggagttgcgtc

SEQ ID NO: 170380 - DNA, 25 bp, Saccharomyces pastorianus
aagagactttgggtggccttgcaac

SEQ ID NO: 170381 - DNA, 25 bp, Saccharomyces pastorianus
gttgcgtcgtttagactctattact

SEQ ID NO: 170382 - DNA, 25 bp, Saccharomyces pastorianus
tctactctcatttccaagagacttt

SEQ ID NO: 170383 - DNA, 25 bp, Saccharomyces pastorianus
gaggttattctcaacagaaaaggtt

SEQ ID NO: 170384 - DNA, 25 bp, Saccharomyces pastorianus
gcaacggttagaggttattctcaac

SEQ ID NO: 170385 - DNA, 25 bp, Saccharomyces pastorianus
tactaggtctccaatctactctcat

SEQ ID NO: 170386 - DNA, 25 bp, Saccharomyces pastorianus
aaaggttttcccacattaatcaatg

SEQ ID NO: 170387 - DNA, 25 bp, Saccharomyces pastorianus
atcgattcgcttctgtgggttccca

SEQ ID NO: 170388 - DNA, 25 bp, Saccharomyces pastorianus
gtagaaacatcgattcgcttctgtg

SEQ ID NO: 170389 - DNA, 25 bp, Saccharomyces pastorianus
tcgattcgcttctgtgggttcccat

SEQ ID NO: 170390 - DNA, 25 bp, Saccharomyces pastorianus
attcgcttctgtgggttcccatatc

SEQ ID NO: 170391 - DNA, 25 bp, Saccharomyces pastorianus
acatcgattcgcttctgtgggttcc

SEQ ID NO: 170392 - DNA, 25 bp, Saccharomyces pastorianus
gaaacatcgattcgcttctgtgggt

SEQ ID NO: 170393 - DNA, 25 bp, Saccharomyces pastorianus
gattcgcttctgtgggttcccatat

SEQ ID NO: 170394 - DNA, 25 bp, Saccharomyces pastorianus
agaaacatcgattcgcttctgtggg

SEQ ID NO: 170395 - DNA, 25 bp, Saccharomyces pastorianus
gcttctgtgggttcccatatcctcg

SEQ ID NO: 170396 - DNA, 25 bp, Saccharomyces pastorianus
ttatgtagaaacatcgattcgcttc

SEQ ID NO: 170397 - DNA, 25 bp, Saccharomyces pastorianus
aacatcgattcgcttctgtgggttc

SEQ ID NO: 170398 - DNA, 25 bp, Saccharomyces pastorianus
gtgaagcgagtacgttctcttatcg

SEQ ID NO: 170399 - DNA, 25 bp, Saccharomyces pastorianus
cgaatctcgttacggtctttgggat

SEQ ID NO: 170400 - DNA, 25 bp, Saccharomyces pastorianus
tctcgttacggtctttgggatttga

SEQ ID NO: 170401 - DNA, 25 bp, Saccharomyces pastorianus
tcgttacggtctttgggatttgaag

SEQ ID NO: 170402 - DNA, 25 bp, Saccharomyces pastorianus
atcgaatctcgttacggtctttggg

SEQ ID NO: 170403 - DNA, 25 bp, Saccharomyces pastorianus
atctcgttacggtctttgggatttg

SEQ ID NO: 170404 - DNA, 25 bp, Saccharomyces pastorianus
acgtatcgaatctcgttacggtctt

SEQ ID NO: 170405 - DNA, 25 bp, Saccharomyces pastorianus
tctatacgtatcgaatctcgttacg

SEQ ID NO: 170406 - DNA, 25 bp, Saccharomyces pastorianus
gtatcgaatctcgttacggtctttg

SEQ ID NO: 170407 - DNA, 25 bp, Saccharomyces pastorianus
atacgtatcgaatctcgttacggtc

SEQ ID NO: 170408 - DNA, 25 bp, Saccharomyces pastorianus
gaagcgagtacgttctcttatcgtc

SEQ ID NO: 170409 - DNA, 25 bp, Saccharomyces pastorianus
gcccataggtttgctagccgggaaa

SEQ ID NO: 170410 - DNA, 25 bp, Saccharomyces pastorianus
aatgttctggtgcagagccttgcgt

SEQ ID NO: 170411 - DNA, 25 bp, Saccharomyces pastorianus
attatcagtggcaatccatgctaat

SEQ ID NO: 170412 - DNA, 25 bp, Saccharomyces pastorianus
gtctttggagctgggcccataggtt

SEQ ID NO: 170413 - DNA, 25 bp, Saccharomyces pastorianus
ctcccacatggcgttactgtagata

SEQ ID NO: 170414 - DNA, 25 bp, Saccharomyces pastorianus
tagccagtgtctttggtgctgcaga

SEQ ID NO: 170415 - DNA, 25 bp, Saccharomyces pastorianus
agccttgcgttcgagcaggcatcga

SEQ ID NO: 170416 - DNA, 25 bp, Saccharomyces pastorianus
gtcaactcaggtgatctcccacatg

SEQ ID NO: 170417 - DNA, 25 bp, Saccharomyces pastorianus
gggctaggcagtttggtgccaccca

SEQ ID NO: 170418 - DNA, 25 bp, Saccharomyces pastorianus
aaaggtgctgacgttgtgtttgaat

SEQ ID NO: 170419 - DNA, 25 bp, Saccharomyces pastorianus
agatcaagtttggagcccgttgcgt

SEQ ID NO: 170420 - DNA, 25 bp, Saccharomyces pastorianus
gacttccaagatgatgctaaccggg

SEQ ID NO: 170421 - DNA, 25 bp, Saccharomyces pastorianus
ccaagatgatgctaaccgggaacta

SEQ ID NO: 170422 - DNA, 25 bp, Saccharomyces pastorianus
cggaagacttccaagatgatgctaa

SEQ ID NO: 170423 - DNA, 25 bp, Saccharomyces pastorianus
gaactagtgagcaggaaattgaaac

SEQ ID NO: 170424 - DNA, 25 bp, Saccharomyces pastorianus
ttagtttttgtttaagttgcaatca

SEQ ID NO: 170425 - DNA, 25 bp, Saccharomyces pastorianus
ttgtttaagttgcaatcatggtatg

SEQ ID NO: 170426 - DNA, 25 bp, Saccharomyces pastorianus
atacggccggaagacttccaagatg

SEQ ID NO: 170427 - DNA, 25 bp, Saccharomyces pastorianus
aggaaattgaaactgaacgaatggt

SEQ ID NO: 170428 - DNA, 25 bp, Saccharomyces pastorianus
accgggaactagtgagcaggaaatt

SEQ ID NO: 170429 - DNA, 25 bp, Saccharomyces pastorianus
ctaaccgggaactagtgagcaggaa

SEQ ID NO: 170430 - DNA, 25 bp, Saccharomyces pastorianus
agatgatgctaaccgggaactagtg

SEQ ID NO: 170431 - DNA, 25 bp, Saccharomyces pastorianus
attcaccacgttctgcatattaggt

SEQ ID NO: 170432 - DNA, 25 bp, Saccharomyces pastorianus
gagccattatattcatgttttttgt

SEQ ID NO: 170433 - DNA, 25 bp, Saccharomyces pastorianus
aatccggtcatatcaaatcacaagt

SEQ ID NO: 170434 - DNA, 25 bp, Saccharomyces pastorianus
tgtacattcaccacgttctgcatat

SEQ ID NO: 170435 - DNA, 25 bp, Saccharomyces pastorianus
ttttgtacattcaccacgttctgca

SEQ ID NO: 170436 - DNA, 25 bp, Saccharomyces pastorianus
acattcaccacgttctgcatattag

SEQ ID NO: 170437 - DNA, 25 bp, Saccharomyces pastorianus
atcacaagttgagccattatattca

SEQ ID NO: 170438 - DNA, 25 bp, Saccharomyces pastorianus
ttttcaatccggtcatatcaaatca

SEQ ID NO: 170439 - DNA, 25 bp, Saccharomyces pastorianus
tccggtcatatcaaatcacaagttg

SEQ ID NO: 170440 - DNA, 25 bp, Saccharomyces pastorianus
agttgagccattatattcatgtttt

SEQ ID NO: 170441 - DNA, 25 bp, Saccharomyces pastorianus
gttttttgtacattcaccacgttct

SEQ ID NO: 170442 - DNA, 25 bp, Saccharomyces pastorianus
tacgtgttacgagggggctcattgt

SEQ ID NO: 170443 - DNA, 25 bp, Saccharomyces pastorianus
gggctcattgtaagccgataatgat

SEQ ID NO: 170444 - DNA, 25 bp, Saccharomyces pastorianus
tcattgtaagccgataatgattatg

SEQ ID NO: 170445 - DNA, 25 bp, Saccharomyces pastorianus
gctcattgtaagccgataatgatta

SEQ ID NO: 170446 - DNA, 25 bp, Saccharomyces pastorianus
ttacgtgttacgagggggctcattg

SEQ ID NO: 170447 - DNA, 25 bp, Saccharomyces pastorianus
tcactttacgtgttacgagggggct

SEQ ID NO: 170448 - DNA, 25 bp, Saccharomyces pastorianus
ctcattgtaagccgataatgattat

SEQ ID NO: 170449 - DNA, 25 bp, Saccharomyces pastorianus
ggctcattgtaagccgataatgatt

SEQ ID NO: 170450 - DNA, 25 bp, Saccharomyces pastorianus
cgtgttacgagggggctcattgtaa

SEQ ID NO: 170451 - DNA, 25 bp, Saccharomyces pastorianus
ctttacgtgttacgagggggctcat

SEQ ID NO: 170452 - DNA, 25 bp, Saccharomyces pastorianus
acgtgttacgagggggctcattgta

SEQ ID NO: 170453 - DNA, 25 bp, Saccharomyces pastorianus
tctccattccagaccaaactttata

SEQ ID NO: 170454 - DNA, 25 bp, Saccharomyces pastorianus
gaacaacaatcccaagacgaatatt

SEQ ID NO: 170455 - DNA, 25 bp, Saccharomyces pastorianus
gtcttaccaaggcagcggaaatcga

SEQ ID NO: 170456 - DNA, 25 bp, Saccharomyces pastorianus
taaagtgtcttaccaaggcagcgga

SEQ ID NO: 170457 - DNA, 25 bp, Saccharomyces pastorianus
aagtgtcttaccaaggcagcggaaa

SEQ ID NO: 170458 - DNA, 25 bp, Saccharomyces pastorianus
accaaggcagcggaaatcgaacaac

SEQ ID NO: 170459 - DNA, 25 bp, Saccharomyces pastorianus
attccagaccaaactttataaagtg

SEQ ID NO: 170460 - DNA, 25 bp, Saccharomyces pastorianus
tactctccattccagaccaaacttt

SEQ ID NO: 170461 - DNA, 25 bp, Saccharomyces pastorianus
gaaatcgaacaacaatcccaagacg

SEQ ID NO: 170462 - DNA, 25 bp, Saccharomyces pastorianus
gtgtcttaccaaggcagcggaaatc

SEQ ID NO: 170463 - DNA, 25 bp, Saccharomyces pastorianus
ttataaagtgtcttaccaaggcagc

SEQ ID NO: 170464 - DNA, 25 bp, Saccharomyces pastorianus
aaaacaccacggaacctcatctgtt

SEQ ID NO: 170465 - DNA, 25 bp, Saccharomyces pastorianus
acggaacctcatctgttctcgtact

SEQ ID NO: 170466 - DNA, 25 bp, Saccharomyces pastorianus
aaaaacaccacggaacctcatctgt

SEQ ID NO: 170467 - DNA, 25 bp, Saccharomyces pastorianus
aacaccacggaacctcatctgttct

SEQ ID NO: 170468 - DNA, 25 bp, Saccharomyces pastorianus
accacggaacctcatctgttctcgt

SEQ ID NO: 170469 - DNA, 25 bp, Saccharomyces pastorianus
gtgacaaagtagctcactgccttat

SEQ ID NO: 170470 - DNA, 25 bp, Saccharomyces pastorianus
tgacaaagtagctcactgccttatt

SEQ ID NO: 170471 - DNA, 25 bp, Saccharomyces pastorianus
gacaaagtagctcactgccttatta

SEQ ID NO: 170472 - DNA, 25 bp, Saccharomyces pastorianus
tgttctcgtactttgttgtgacaaa

SEQ ID NO: 170473 - DNA, 25 bp, Saccharomyces pastorianus
ttgtgacaaagtagctcactgcctt

SEQ ID NO: 170474 - DNA, 25 bp, Saccharomyces pastorianus
gttgtgacaaagtagctcactgcct

SEQ ID NO: 170475 - DNA, 25 bp, Saccharomyces pastorianus
gaaattccctgaccgtcatgttatt

SEQ ID NO: 170476 - DNA, 25 bp, Saccharomyces pastorianus
tttgactgctgttcacgacaaggtt

SEQ ID NO: 170477 - DNA, 25 bp, Saccharomyces pastorianus
attccctgaccgtcatgttattttc

SEQ ID NO: 170478 - DNA, 25 bp, Saccharomyces pastorianus
taccataaggtccaaaccaaattga

SEQ ID NO: 170479 - DNA, 25 bp, Saccharomyces pastorianus
gcataccataaggtccaaaccaaat

SEQ ID NO: 170480 - DNA, 25 bp, Saccharomyces pastorianus
aaagaaattccctgaccgtcatgtt

SEQ ID NO: 170481 - DNA, 25 bp, Saccharomyces pastorianus
ggtggtaagaaagcactagtccttt

SEQ ID NO: 170482 - DNA, 25 bp, Saccharomyces pastorianus
gtaagaaagcactagtcctttttgt

SEQ ID NO: 170483 - DNA, 25 bp, Saccharomyces pastorianus
ttgatgtcaccggtggtaagaaagc

SEQ ID NO: 170484 - DNA, 25 bp, Saccharomyces pastorianus
tgtcaccggtggtaagaaagcacta

SEQ ID NO: 170485 - DNA, 25 bp, Saccharomyces pastorianus
agaaattccctgaccgtcatgttat

SEQ ID NO: 170486 - DNA, 25 bp, Saccharomyces pastorianus
tgcgcacttgtcactcttattgaag

SEQ ID NO: 170487 - DNA, 25 bp, Saccharomyces pastorianus
gttccagcgtctccaatataggttc

SEQ ID NO: 170488 - DNA, 25 bp, Saccharomyces pastorianus
actactttgaatattgcgaacagcc

SEQ ID NO: 170489 - DNA, 25 bp, Saccharomyces pastorianus
gaatactgattccttgtgtatagca

SEQ ID NO: 170490 - DNA, 25 bp, Saccharomyces pastorianus
gacaagattaacttctccaagaaca

SEQ ID NO: 170491 - DNA, 25 bp, Saccharomyces pastorianus
cattgttccatggtccacagggtat

SEQ ID NO: 170492 - DNA, 25 bp, Saccharomyces pastorianus
ataccgtatgtggagtagacctata

SEQ ID NO: 170493 - DNA, 25 bp, Saccharomyces pastorianus
gttaaccaggcgttttgcgcacttg

SEQ ID NO: 170494 - DNA, 25 bp, Saccharomyces pastorianus
gcgaacagccttgtagtattttacg

SEQ ID NO: 170495 - DNA, 25 bp, Saccharomyces pastorianus
gaaaccggttcatttactctctatc

SEQ ID NO: 170496 - DNA, 25 bp, Saccharomyces pastorianus
ggtagactcggaagcgttccagcgt

SEQ ID NO: 170497 - DNA, 25 bp, Saccharomyces pastorianus
atcgattcttattccctattaaggc

SEQ ID NO: 170498 - DNA, 25 bp, Saccharomyces pastorianus
agttatcgattcttattccctatta

SEQ ID NO: 170499 - DNA, 25 bp, Saccharomyces pastorianus
ttcaaccactcttgtgcaattgaat

SEQ ID NO: 170500 - DNA, 25 bp, Saccharomyces pastorianus
ttcttattccctattaaggcattag

SEQ ID NO: 170501 - DNA, 25 bp, Saccharomyces pastorianus
gattcttattccctattaaggcatt

SEQ ID NO: 170502 - DNA, 25 bp, Saccharomyces pastorianus
accactcttgtgcaattgaataccc

SEQ ID NO: 170503 - DNA, 25 bp, Saccharomyces pastorianus
gttatcgattcttattccctattaa

SEQ ID NO: 170504 - DNA, 25 bp, Saccharomyces pastorianus
ccaagttatcgattcttattcccta

SEQ ID NO: 170505 - DNA, 25 bp, Saccharomyces pastorianus
attccctattaaggcattaggtatg

SEQ ID NO: 170506 - DNA, 25 bp, Saccharomyces pastorianus
gaatacccaagttatcgattcttat

SEQ ID NO: 170507 - DNA, 25 bp, Saccharomyces pastorianus
cactcttgtgcaattgaatacccaa

SEQ ID NO: 170508 - DNA, 25 bp, Saccharomyces pastorianus
cctcagaaaagatcgggcgtgtggt

SEQ ID NO: 170509 - DNA, 25 bp, Saccharomyces pastorianus
ataaattctgagttgtcatggtcct

SEQ ID NO: 170510 - DNA, 25 bp, Saccharomyces pastorianus
gtcctcagaaaagatcgggcgtgtg

SEQ ID NO: 170511 - DNA, 25 bp, Saccharomyces pastorianus
gtgtattataaattctgagttgtca

SEQ ID NO: 170512 - DNA, 25 bp, Saccharomyces pastorianus
gttgtcatggtcctcagaaaagatc

SEQ ID NO: 170513 - DNA, 25 bp, Saccharomyces pastorianus
gtcatggtcctcagaaaagatcggg

SEQ ID NO: 170514 - DNA, 25 bp, Saccharomyces pastorianus
ggtcctcagaaaagatcgggcgtgt

SEQ ID NO: 170515 - DNA, 25 bp, Saccharomyces pastorianus
aaattctgagttgtcatggtcctca

SEQ ID NO: 170516 - DNA, 25 bp, Saccharomyces pastorianus
gagttgtcatggtcctcagaaaaga

SEQ ID NO: 170517 - DNA, 25 bp, Saccharomyces pastorianus
attctgagttgtcatggtcctcaga

SEQ ID NO: 170518 - DNA, 25 bp, Saccharomyces pastorianus
atggtcctcagaaaagatcgggcgt

SEQ ID NO: 170519 - DNA, 25 bp, Saccharomyces pastorianus
aatactagcatgtgagatatatgtg

SEQ ID NO: 170520 - DNA, 25 bp, Saccharomyces pastorianus
taatactagcatgtgagatatatgt

SEQ ID NO: 170521 - DNA, 25 bp, Saccharomyces pastorianus
tttgtaatactagcatgtgagatat

SEQ ID NO: 170522 - DNA, 25 bp, Saccharomyces pastorianus
tatttgtaatactagcatgtgagat

SEQ ID NO: 170523 - DNA, 25 bp, Saccharomyces pastorianus
atttgtaatactagcatgtgagata

SEQ ID NO: 170524 - DNA, 25 bp, Saccharomyces pastorianus
gtaatactagcatgtgagatatatg

SEQ ID NO: 170525 - DNA, 25 bp, Saccharomyces pastorianus
ttatttgtaatactagcatgtgaga

SEQ ID NO: 170526 - DNA, 25 bp, Saccharomyces pastorianus
tattatttgtaatactagcatgtga

SEQ ID NO: 170527 - DNA, 25 bp, Saccharomyces pastorianus
ttgtaatactagcatgtgagatata

SEQ ID NO: 170528 - DNA, 25 bp, Saccharomyces pastorianus
attatttgtaatactagcatgtgag

SEQ ID NO: 170529 - DNA, 25 bp, Saccharomyces pastorianus
tgtaatactagcatgtgagatatat

SEQ ID NO: 170530 - DNA, 25 bp, Saccharomyces pastorianus
ttcaaggcttatcatccggcatcac

SEQ ID NO: 170531 - DNA, 25 bp, Saccharomyces pastorianus
aaaattgctacttttgactcctcca

SEQ ID NO: 170532 - DNA, 25 bp, Saccharomyces pastorianus
gtgtgatggatttacgccgagatct

SEQ ID NO: 170533 - DNA, 25 bp, Saccharomyces pastorianus
gaaggagcactaattccaaccggta

SEQ ID NO: 170534 - DNA, 25 bp, Saccharomyces pastorianus
gatggcccgatttatgactacgctt

SEQ ID NO: 170535 - DNA, 25 bp, Saccharomyces pastorianus
gagatctggctttgccgttgaacaa

SEQ ID NO: 170536 - DNA, 25 bp, Saccharomyces pastorianus
taagtgtaaacaagctcgtccctgc

SEQ ID NO: 170537 - DNA, 25 bp, Saccharomyces pastorianus
ggcatcacgactttcattggaggtt

SEQ ID NO: 170538 - DNA, 25 bp, Saccharomyces pastorianus
agaaccaactgtcctattttacaca

SEQ ID NO: 170539 - DNA, 25 bp, Saccharomyces pastorianus
atgactacgctttcattgttgatga

SEQ ID NO: 170540 - DNA, 25 bp, Saccharomyces pastorianus
gagagactgcgttcttttgagacgt

SEQ ID NO: 170541 - DNA, 25 bp, Saccharomyces pastorianus
tttccattcaaccaatttttaccag

SEQ ID NO: 170542 - DNA, 25 bp, Saccharomyces pastorianus
ggacaagagatctcaatctcacgat

SEQ ID NO: 170543 - DNA, 25 bp, Saccharomyces pastorianus
aaactcaaaccaagctacctcattt

SEQ ID NO: 170544 - DNA, 25 bp, Saccharomyces pastorianus
aagaacttatatgcggctttcaaaa

SEQ ID NO: 170545 - DNA, 25 bp, Saccharomyces pastorianus
gaaactttacatattctcttagagc

SEQ ID NO: 170546 - DNA, 25 bp, Saccharomyces pastorianus
tttttaccagagatgggccactaaa

SEQ ID NO: 170547 - DNA, 25 bp, Saccharomyces pastorianus
aacgggattttcaaaagctctgaag

SEQ ID NO: 170548 - DNA, 25 bp, Saccharomyces pastorianus
gggcagacatacaatccagtacgtt

SEQ ID NO: 170549 - DNA, 25 bp, Saccharomyces pastorianus
tttaccttgctactgttgtttccat

SEQ ID NO: 170550 - DNA, 25 bp, Saccharomyces pastorianus
gatttcggaaaaccaacttgaacat

SEQ ID NO: 170551 - DNA, 25 bp, Saccharomyces pastorianus
gacgacaataataccagcaacaata

SEQ ID NO: 170552 - DNA, 25 bp, Saccharomyces pastorianus
atttaaaattgtactgatcggtgat

SEQ ID NO: 170553 - DNA, 25 bp, Saccharomyces pastorianus
ggtatgattacgacctactatttaa

SEQ ID NO: 170554 - DNA, 25 bp, Saccharomyces pastorianus
cgggtatgattacgacctactattt

SEQ ID NO: 170555 - DNA, 25 bp, Saccharomyces pastorianus
acgggtatgattacgacctactatt

SEQ ID NO: 170556 - DNA, 25 bp, Saccharomyces pastorianus
ctacgggtatgattacgacctacta

SEQ ID NO: 170557 - DNA, 25 bp, Saccharomyces pastorianus
ggactacgggtatgattacgaccta

SEQ ID NO: 170558 - DNA, 25 bp, Saccharomyces pastorianus
gactacgggtatgattacgacctac

SEQ ID NO: 170559 - DNA, 25 bp, Saccharomyces pastorianus
gggtatgattacgacctactattta

SEQ ID NO: 170560 - DNA, 25 bp, Saccharomyces pastorianus
tgattacgacctactatttaaaatt

SEQ ID NO: 170561 - DNA, 25 bp, Saccharomyces pastorianus
ctatttaaaattgtactgatcggtg

SEQ ID NO: 170562 - DNA, 25 bp, Saccharomyces pastorianus
tacgggtatgattacgacctactat

SEQ ID NO: 170563 - DNA, 25 bp, Saccharomyces pastorianus
gtataggaacacgaataggaacacg

SEQ ID NO: 170564 - DNA, 25 bp, Saccharomyces pastorianus
gaacacgaataggaacacgaatatt

SEQ ID NO: 170565 - DNA, 25 bp, Saccharomyces pastorianus
gaataggaacacgaatatttattgt

SEQ ID NO: 170566 - DNA, 25 bp, Saccharomyces pastorianus
ctactaggaacacgtataggaacac

SEQ ID NO: 170567 - DNA, 25 bp, Saccharomyces pastorianus
gctactaggaacacgtataggaaca

SEQ ID NO: 170568 - DNA, 25 bp, Saccharomyces pastorianus
actaggaacacgtataggaacacga

SEQ ID NO: 170569 - DNA, 25 bp, Saccharomyces pastorianus
aggaacacgaatatttattgttcat

SEQ ID NO: 170570 - DNA, 25 bp, Saccharomyces pastorianus
aacacgtataggaacacgaatagga

SEQ ID NO: 170571 - DNA, 25 bp, Saccharomyces pastorianus
cacgtataggaacacgaataggaac

SEQ ID NO: 170572 - DNA, 25 bp, Saccharomyces pastorianus
tataggaacacgaataggaacacga

SEQ ID NO: 170573 - DNA, 25 bp, Saccharomyces pastorianus
ttgctactaggaacacgtataggaa

SEQ ID NO: 170574 - DNA, 25 bp, Saccharomyces pastorianus
agcgggtactgcgattctttgactt

SEQ ID NO: 170575 - DNA, 25 bp, Saccharomyces pastorianus
gatccaacaccagtaaatccttagt

SEQ ID NO: 170576 - DNA, 25 bp, Saccharomyces pastorianus
agtcatcgcatgcatgtttaccaca

SEQ ID NO: 170577 - DNA, 25 bp, Saccharomyces pastorianus
gtctccttccatttactaacatacg

SEQ ID NO: 170578 - DNA, 25 bp, Saccharomyces pastorianus
ctttgttttctactgtatcactgga

SEQ ID NO: 170579 - DNA, 25 bp, Saccharomyces pastorianus
gatggtgatcatgcaatctttgact

SEQ ID NO: 170580 - DNA, 25 bp, Saccharomyces pastorianus
gtaattgctcctactgccgttcagc

SEQ ID NO: 170581 - DNA, 25 bp, Saccharomyces pastorianus
taaaccataatgctggtctccttcc

SEQ ID NO: 170582 - DNA, 25 bp, Saccharomyces pastorianus
gtttaccacacattcactactattt

SEQ ID NO: 170583 - DNA, 25 bp, Saccharomyces pastorianus
ctaacctactcacacattctgatgg

SEQ ID NO: 170584 - DNA, 25 bp, Saccharomyces pastorianus
ttttttggcgtgaccagcgggtact

SEQ ID NO: 170585 - DNA, 25 bp, Saccharomyces pastorianus
aaaccttatgtcttgtccggtagtg

SEQ ID NO: 170586 - DNA, 25 bp, Saccharomyces pastorianus
ttgggctctcgaacagacctttgag

SEQ ID NO: 170587 - DNA, 25 bp, Saccharomyces pastorianus
cagagtcttcaattataacaccggt

SEQ ID NO: 170588 - DNA, 25 bp, Saccharomyces pastorianus
gtacacccaacaaaaccttatgtct

SEQ ID NO: 170589 - DNA, 25 bp, Saccharomyces pastorianus
caagtcaccgaaactcctgtaagag

SEQ ID NO: 170590 - DNA, 25 bp, Saccharomyces pastorianus
tgggaaaacaattgggctctcgaac

SEQ ID NO: 170591 - DNA, 25 bp, Saccharomyces pastorianus
gaacattttgttatgtgcgtagcat

SEQ ID NO: 170592 - DNA, 25 bp, Saccharomyces pastorianus
aggaagtgacgatttcaggatcaga

SEQ ID NO: 170593 - DNA, 25 bp, Saccharomyces pastorianus
gaggtcagatccattcaagtcaccg

SEQ ID NO: 170594 - DNA, 25 bp, Saccharomyces pastorianus
acctttgagggtcatgaacattttg

SEQ ID NO: 170595 - DNA, 25 bp, Saccharomyces pastorianus
gtccggtagtgacgatttaacagtc

SEQ ID NO: 170596 - DNA, 25 bp, Saccharomyces pastorianus
gcaatcggtagcgcgtatgactctt

SEQ ID NO: 170597 - DNA, 25 bp, Saccharomyces pastorianus
agagccttgttggcgcaatcggtag

SEQ ID NO: 170598 - DNA, 25 bp, Saccharomyces pastorianus
agccttgttggcgcaatcggtagcg

SEQ ID NO: 170599 - DNA, 25 bp, Saccharomyces pastorianus
aagagccttgttggcgcaatcggta

SEQ ID NO: 170600 - DNA, 25 bp, Saccharomyces pastorianus
ggcgcaatcggtagcgcgtatgact

SEQ ID NO: 170601 - DNA, 25 bp, Saccharomyces pastorianus
gcgcaatcggtagcgcgtatgactc

SEQ ID NO: 170602 - DNA, 25 bp, Saccharomyces pastorianus
ttgttggcgcaatcggtagcgcgta

SEQ ID NO: 170603 - DNA, 25 bp, Saccharomyces pastorianus
gaaagagccttgttggcgcaatcgg

SEQ ID NO: 170604 - DNA, 25 bp, Saccharomyces pastorianus
aaagagccttgttggcgcaatcggt

SEQ ID NO: 170605 - DNA, 25 bp, Saccharomyces pastorianus
gagccttgttggcgcaatcggtagc

SEQ ID NO: 170606 - DNA, 25 bp, Saccharomyces pastorianus
ggtagcgcgtatgactcttaatcat

SEQ ID NO: 170607 - DNA, 25 bp, Saccharomyces pastorianus
caactggatctgtaacccagttcac

SEQ ID NO: 170608 - DNA, 25 bp, Saccharomyces pastorianus
aactggatctgtaacccagttcaca

SEQ ID NO: 170609 - DNA, 25 bp, Saccharomyces pastorianus
agatgcgcgttacaactggatctgt

SEQ ID NO: 170610 - DNA, 25 bp, Saccharomyces pastorianus
tgcgcgttacaactggatctgtaac

SEQ ID NO: 170611 - DNA, 25 bp, Saccharomyces pastorianus
actggatctgtaacccagttcacaa

SEQ ID NO: 170612 - DNA, 25 bp, Saccharomyces pastorianus
aggtctatcagaagagatgcgcgtt

SEQ ID NO: 170613 - DNA, 25 bp, Saccharomyces pastorianus
ctggatctgtaacccagttcacaaa

SEQ ID NO: 170614 - DNA, 25 bp, Saccharomyces pastorianus
ggatctgtaacccagttcacaaaca

SEQ ID NO: 170615 - DNA, 25 bp, Saccharomyces pastorianus
ctgtaacccagttcacaaacaccgt

SEQ ID NO: 170616 - DNA, 25 bp, Saccharomyces pastorianus
tctgtaacccagttcacaaacaccg

SEQ ID NO: 170617 - DNA, 25 bp, Saccharomyces pastorianus
gatctgtaacccagttcacaaacac

SEQ ID NO: 170618 - DNA, 25 bp, Saccharomyces pastorianus
tgctaaaggtttggttgcttaccac

SEQ ID NO: 170619 - DNA, 25 bp, Saccharomyces pastorianus
ttaccaccaaaagtatgtcgatgaa

SEQ ID NO: 170620 - DNA, 25 bp, Saccharomyces pastorianus
aaagtatgtcgatgaacaatccaag

SEQ ID NO: 170621 - DNA, 25 bp, Saccharomyces pastorianus
aagccattgctaaaggtttggttgc

SEQ ID NO: 170622 - DNA, 25 bp, Saccharomyces pastorianus
actgctgttgcccacgtcaagactg

SEQ ID NO: 170623 - DNA, 25 bp, Saccharomyces pastorianus
tgttgttggtcggtttggacaaatt

SEQ ID NO: 170624 - DNA, 25 bp, Saccharomyces pastorianus
tttacgaaccattgttgttggtcgg

SEQ ID NO: 170625 - DNA, 25 bp, Saccharomyces pastorianus
cagacaagccattgctaaaggtttg

SEQ ID NO: 170626 - DNA, 25 bp, Saccharomyces pastorianus
gtttacgaaccattgttgttggtcg

SEQ ID NO: 170627 - DNA, 25 bp, Saccharomyces pastorianus
ttacgaaccattgttgttggtcggt

SEQ ID NO: 170628 - DNA, 25 bp, Saccharomyces pastorianus
cgtcaagactggtaagggtttgatc

SEQ ID NO: 170629 - DNA, 25 bp, Saccharomyces pastorianus
aacggagaagagtcgcggtctccct

SEQ ID NO: 170630 - DNA, 25 bp, Saccharomyces pastorianus
gcgaaatgcgctaaggtgattgacc

SEQ ID NO: 170631 - DNA, 25 bp, Saccharomyces pastorianus
agaagagtcgcggtctccctgttgt

SEQ ID NO: 170632 - DNA, 25 bp, Saccharomyces pastorianus
caactctacgtctgttgttcaaggt

SEQ ID NO: 170633 - DNA, 25 bp, Saccharomyces pastorianus
caaggttctacaaggataacggaga

SEQ ID NO: 170634 - DNA, 25 bp, Saccharomyces pastorianus
ctgttgttcaaggttctacaaggat

SEQ ID NO: 170635 - DNA, 25 bp, Saccharomyces pastorianus
gtgattgaccaactctacgtctgtt

SEQ ID NO: 170636 - DNA, 25 bp, Saccharomyces pastorianus
gaccaactctacgtctgttgttcaa

SEQ ID NO: 170637 - DNA, 25 bp, Saccharomyces pastorianus
ttgtcagattgtctactatcgaacc

SEQ ID NO: 170638 - DNA, 25 bp, Saccharomyces pastorianus
aaccagtacgatgatgcgaaatgcg

SEQ ID NO: 170639 - DNA, 25 bp, Saccharomyces pastorianus
ctatcgaaccagtacgatgatgcga

SEQ ID NO: 170640 - DNA, 25 bp, Saccharomyces pastorianus
gtatgtcatcaaggctttgcaatct

SEQ ID NO: 170641 - DNA, 25 bp, Saccharomyces pastorianus
atggcaatattactactacaccttg

SEQ ID NO: 170642 - DNA, 25 bp, Saccharomyces pastorianus
aatattactactacaccttgactga

SEQ ID NO: 170643 - DNA, 25 bp, Saccharomyces pastorianus
tattactactacaccttgactgaag

SEQ ID NO: 170644 - DNA, 25 bp, Saccharomyces pastorianus
ggcaatattactactacaccttgac

SEQ ID NO: 170645 - DNA, 25 bp, Saccharomyces pastorianus
tcatggcaatattactactacacct

SEQ ID NO: 170646 - DNA, 25 bp, Saccharomyces pastorianus
catggcaatattactactacacctt

SEQ ID NO: 170647 - DNA, 25 bp, Saccharomyces pastorianus
aattgacaccaagaatttgtatgtc

SEQ ID NO: 170648 - DNA, 25 bp, Saccharomyces pastorianus
tttgcaatctttgacttccaagggt

SEQ ID NO: 170649 - DNA, 25 bp, Saccharomyces pastorianus
attactactacaccttgactgaaga

SEQ ID NO: 170650 - DNA, 25 bp, Saccharomyces pastorianus
caccaagaatttgtatgtcatcaag

SEQ ID NO: 170651 - DNA, 25 bp, Saccharomyces pastorianus
gccagaccggctgcattgggtacga

SEQ ID NO: 170652 - DNA, 25 bp, Saccharomyces pastorianus
gtgtctttgattcatctctaaggtg

SEQ ID NO: 170653 - DNA, 25 bp, Saccharomyces pastorianus
ttgggtacgacggtaaattctctat

SEQ ID NO: 170654 - DNA, 25 bp, Saccharomyces pastorianus
taaccgagttgagtgtctttgattc

SEQ ID NO: 170655 - DNA, 25 bp, Saccharomyces pastorianus
gcgtatacgagccaagaaaaacctt

SEQ ID NO: 170656 - DNA, 25 bp, Saccharomyces pastorianus
ttatttcccagtttggccagaccgg

SEQ ID NO: 170657 - DNA, 25 bp, Saccharomyces pastorianus
aaattctctataggcatcaccattg

SEQ ID NO: 170658 - DNA, 25 bp, Saccharomyces pastorianus
gtatgtccttaatttagtcgtgaga

SEQ ID NO: 170659 - DNA, 25 bp, Saccharomyces pastorianus
aggagctttttgaaggcgtatacga

SEQ ID NO: 170660 - DNA, 25 bp, Saccharomyces pastorianus
aatcatcattgtgttcgccctttgt

SEQ ID NO: 170661 - DNA, 25 bp, Saccharomyces pastorianus
tcgccctttgtcgtataaccgagtt

SEQ ID NO: 170662 - DNA, 25 bp, Saccharomyces pastorianus
ggagacaagctatcttaaggcaaca

SEQ ID NO: 170663 - DNA, 25 bp, Saccharomyces pastorianus
gtcttccagttaagaattttcgtca

SEQ ID NO: 170664 - DNA, 25 bp, Saccharomyces pastorianus
gatgcttccaagactaatctaagac

SEQ ID NO: 170665 - DNA, 25 bp, Saccharomyces pastorianus
acgggctgacaccaactgcaaagga

SEQ ID NO: 170666 - DNA, 25 bp, Saccharomyces pastorianus
gacaccgttgacagactgatcatca

SEQ ID NO: 170667 - DNA, 25 bp, Saccharomyces pastorianus
gactgacggatgtaacaaattcttt

SEQ ID NO: 170668 - DNA, 25 bp, Saccharomyces pastorianus
ttgcaccacaagtttacatcattac

SEQ ID NO: 170669 - DNA, 25 bp, Saccharomyces pastorianus
aatgcgaacaatattgctactcagc

SEQ ID NO: 170670 - DNA, 25 bp, Saccharomyces pastorianus
ctaatgctcctgttaccggcaataa

SEQ ID NO: 170671 - DNA, 25 bp, Saccharomyces pastorianus
ataacaacaacaccgctaatgctcc

SEQ ID NO: 170672 - DNA, 25 bp, Saccharomyces pastorianus
gcaattgtcgttagatgcttccaag

SEQ ID NO: 170673 - DNA, 25 bp, Saccharomyces pastorianus
aattttgatcgagactgtcatcaag

SEQ ID NO: 170674 - DNA, 25 bp, Saccharomyces pastorianus
gacaagataagttgaagcaagccaa

SEQ ID NO: 170675 - DNA, 25 bp, Saccharomyces pastorianus
gcagccaaggaaatcgactcataca

SEQ ID NO: 170676 - DNA, 25 bp, Saccharomyces pastorianus
gtgcaaggtgaattagctgagatta

SEQ ID NO: 170677 - DNA, 25 bp, Saccharomyces pastorianus
aaagaaagcagaggctggtgtgcaa

SEQ ID NO: 170678 - DNA, 25 bp, Saccharomyces pastorianus
ggatgacgttgtcaaaattttgatc

SEQ ID NO: 170679 - DNA, 25 bp, Saccharomyces pastorianus
aaaggctagaaagtacagacaagat

SEQ ID NO: 170680 - DNA, 25 bp, Saccharomyces pastorianus
actgatgcagccaaggaaatcgact

SEQ ID NO: 170681 - DNA, 25 bp, Saccharomyces pastorianus
ggaaatcgactcatacaaaattcaa

SEQ ID NO: 170682 - DNA, 25 bp, Saccharomyces pastorianus
gtttgaacaaaagaatgccggtggt

SEQ ID NO: 170683 - DNA, 25 bp, Saccharomyces pastorianus
agaatgccggtggtgttggtgaatt

SEQ ID NO: 170684 - DNA, 25 bp, Saccharomyces pastorianus
ttgttgggatcccattgtgcacaaa

SEQ ID NO: 170685 - DNA, 25 bp, Saccharomyces pastorianus
tcccattgtgcacaaaggccataat

SEQ ID NO: 170686 - DNA, 25 bp, Saccharomyces pastorianus
gttgggatcccattgtgcacaaagg

SEQ ID NO: 170687 - DNA, 25 bp, Saccharomyces pastorianus
gggatcccattgtgcacaaaggcca

SEQ ID NO: 170688 - DNA, 25 bp, Saccharomyces pastorianus
tgttgggatcccattgtgcacaaag

SEQ ID NO: 170689 - DNA, 25 bp, Saccharomyces pastorianus
tgggatcccattgtgcacaaaggcc

SEQ ID NO: 170690 - DNA, 25 bp, Saccharomyces pastorianus
ggatcccattgtgcacaaaggccat

SEQ ID NO: 170691 - DNA, 25 bp, Saccharomyces pastorianus
ttgggatcccattgtgcacaaaggc

SEQ ID NO: 170692 - DNA, 25 bp, Saccharomyces pastorianus
cccattgtgcacaaaggccataata

SEQ ID NO: 170693 - DNA, 25 bp, Saccharomyces pastorianus
gatcccattgtgcacaaaggccata

SEQ ID NO: 170694 - DNA, 25 bp, Saccharomyces pastorianus
atcccattgtgcacaaaggccataa

SEQ ID NO: 170695 - DNA, 25 bp, Saccharomyces pastorianus
cctagcacactatcaatctttgcat

SEQ ID NO: 170696 - DNA, 25 bp, Saccharomyces pastorianus
atcctagcacactatcaatctttgc

SEQ ID NO: 170697 - DNA, 25 bp, Saccharomyces pastorianus
tatcctagcacactatcaatctttg

SEQ ID NO: 170698 - DNA, 25 bp, Saccharomyces pastorianus
tagcacactatcaatctttgcattt

SEQ ID NO: 170699 - DNA, 25 bp, Saccharomyces pastorianus
ctagcacactatcaatctttgcatt

SEQ ID NO: 170700 - DNA, 25 bp, Saccharomyces pastorianus
agcacactatcaatctttgcatttc

SEQ ID NO: 170701 - DNA, 25 bp, Saccharomyces pastorianus
agcttccattagatttgatgactat

SEQ ID NO: 170702 - DNA, 25 bp, Saccharomyces pastorianus
cacactatcaatctttgcatttcag

SEQ ID NO: 170703 - DNA, 25 bp, Saccharomyces pastorianus
aatggaaccgatatttctacataat

SEQ ID NO: 170704 - DNA, 25 bp, Saccharomyces pastorianus
gcacactatcaatctttgcatttca

SEQ ID NO: 170705 - DNA, 25 bp, Saccharomyces pastorianus
tcctagcacactatcaatctttgca

SEQ ID NO: 170706 - DNA, 25 bp, Saccharomyces pastorianus
ttgattaaggtcaacggttctccaa

SEQ ID NO: 170707 - DNA, 25 bp, Saccharomyces pastorianus
tgctaagggtttagtcgcttaccac

SEQ ID NO: 170708 - DNA, 25 bp, Saccharomyces pastorianus
ggtctacgaaccattattgttggtt

SEQ ID NO: 170709 - DNA, 25 bp, Saccharomyces pastorianus
tattgttggttggtttggacaagtt

SEQ ID NO: 170710 - DNA, 25 bp, Saccharomyces pastorianus
taaggtcaacggttctccaatcact

SEQ ID NO: 170711 - DNA, 25 bp, Saccharomyces pastorianus
gtacgttgacgaacaatccaagaac

SEQ ID NO: 170712 - DNA, 25 bp, Saccharomyces pastorianus
ggacaagttctccaacatcgatatc

SEQ ID NO: 170713 - DNA, 25 bp, Saccharomyces pastorianus
aagtacgttgacgaacaatccaaga

SEQ ID NO: 170714 - DNA, 25 bp, Saccharomyces pastorianus
ggccttcacctcttacgacagaact

SEQ ID NO: 170715 - DNA, 25 bp, Saccharomyces pastorianus
cttcacctcttacgacagaactttg

SEQ ID NO: 170716 - DNA, 25 bp, Saccharomyces pastorianus
gtcgcttaccaccaaaagtacgttg

SEQ ID NO: 170717 - DNA, 25 bp, Saccharomyces pastorianus
aatcccatgaaacattaactttgga

SEQ ID NO: 170718 - DNA, 25 bp, Saccharomyces pastorianus
actttggaagaaaacgtgccaccat

SEQ ID NO: 170719 - DNA, 25 bp, Saccharomyces pastorianus
taagcaagcagacgatgatcaggac

SEQ ID NO: 170720 - DNA, 25 bp, Saccharomyces pastorianus
cggtaggtacttctgacactggcac

SEQ ID NO: 170721 - DNA, 25 bp, Saccharomyces pastorianus
agaaaacgtgccaccattgagtaca

SEQ ID NO: 170722 - DNA, 25 bp, Saccharomyces pastorianus
aatacaactctacctcgctttcaat

SEQ ID NO: 170723 - DNA, 25 bp, Saccharomyces pastorianus
gatgatcaggacatggaggtagacc

SEQ ID NO: 170724 - DNA, 25 bp, Saccharomyces pastorianus
gtacatcaacttatataccgcctcc

SEQ ID NO: 170725 - DNA, 25 bp, Saccharomyces pastorianus
ctccatcctcggtaggtacttctga

SEQ ID NO: 170726 - DNA, 25 bp, Saccharomyces pastorianus
tacctcgctttcaatcccatgaaac

SEQ ID NO: 170727 - DNA, 25 bp, Saccharomyces pastorianus
gaactgaatacaactctacctcgct

SEQ ID NO: 170728 - DNA, 25 bp, Saccharomyces pastorianus
cgttgatctcctccgtgaaattcag

SEQ ID NO: 170729 - DNA, 25 bp, Saccharomyces pastorianus
aatgtgatccctatgtgttctctat

SEQ ID NO: 170730 - DNA, 25 bp, Saccharomyces pastorianus
aaaaatgtagcaccagaggcagcag

SEQ ID NO: 170731 - DNA, 25 bp, Saccharomyces pastorianus
atgattcacacgttcgtggctccaa

SEQ ID NO: 170732 - DNA, 25 bp, Saccharomyces pastorianus
agttgagcaactaagggtccatgtt

SEQ ID NO: 170733 - DNA, 25 bp, Saccharomyces pastorianus
gaatactgctcgtgaatctttaaca

SEQ ID NO: 170734 - DNA, 25 bp, Saccharomyces pastorianus
aaagctagcgttttggttactgcaa

SEQ ID NO: 170735 - DNA, 25 bp, Saccharomyces pastorianus
caaattggaccagtgttgagaatac

SEQ ID NO: 170736 - DNA, 25 bp, Saccharomyces pastorianus
taacgcctggtgtatccgttgatct

SEQ ID NO: 170737 - DNA, 25 bp, Saccharomyces pastorianus
gatacgtttaggtctggtgcagttg

SEQ ID NO: 170738 - DNA, 25 bp, Saccharomyces pastorianus
gaggcagcagactatttaacacagc

SEQ ID NO: 170739 - DNA, 25 bp, Saccharomyces pastorianus
tcaagacatttttttcgaatcgttt

SEQ ID NO: 170740 - DNA, 25 bp, Saccharomyces pastorianus
ttttcgaatcgttttttagagagat

SEQ ID NO: 170741 - DNA, 25 bp, Saccharomyces pastorianus
ttggatctgtcaacttcagccagga

SEQ ID NO: 170742 - DNA, 25 bp, Saccharomyces pastorianus
ggatctgtcaacttcagccaggaaa

SEQ ID NO: 170743 - DNA, 25 bp, Saccharomyces pastorianus
taccaaagcccacttcaagacattt

SEQ ID NO: 170744 - DNA, 25 bp, Saccharomyces pastorianus
cttcagccaggaaagttctaccaaa

SEQ ID NO: 170745 - DNA, 25 bp, Saccharomyces pastorianus
atctgtcaacttcagccaggaaagt

SEQ ID NO: 170746 - DNA, 25 bp, Saccharomyces pastorianus
gccaggaaagttctaccaaagccca

SEQ ID NO: 170747 - DNA, 25 bp, Saccharomyces pastorianus
gtcaacttcagccaggaaagttcta

SEQ ID NO: 170748 - DNA, 25 bp, Saccharomyces pastorianus
gtttggatctgtcaacttcagccag

SEQ ID NO: 170749 - DNA, 25 bp, Saccharomyces pastorianus
tttagagagataactggttttgtca

SEQ ID NO: 170750 - DNA, 25 bp, Saccharomyces pastorianus
gggtgaccctcaaattcaacaagat

SEQ ID NO: 170751 - DNA, 25 bp, Saccharomyces pastorianus
gatcttggtattgctcaaatctact

SEQ ID NO: 170752 - DNA, 25 bp, Saccharomyces pastorianus
ggtgcaatttcccatcttagactat

SEQ ID NO: 170753 - DNA, 25 bp, Saccharomyces pastorianus
ttctcccgaagcctatttggtactg

SEQ ID NO: 170754 - DNA, 25 bp, Saccharomyces pastorianus
gctcaaatctacttgggtgaccctc

SEQ ID NO: 170755 - DNA, 25 bp, Saccharomyces pastorianus
aatttcccatcttagactatcgagg

SEQ ID NO: 170756 - DNA, 25 bp, Saccharomyces pastorianus
gactatcgagggactaagatcttgg

SEQ ID NO: 170757 - DNA, 25 bp, Saccharomyces pastorianus
ggtactgggtgcaatttcccatctt

SEQ ID NO: 170758 - DNA, 25 bp, Saccharomyces pastorianus
aagcctatttggtactgggtgcaat

SEQ ID NO: 170759 - DNA, 25 bp, Saccharomyces pastorianus
caacaagatgtccaaatttctgtaa

SEQ ID NO: 170760 - DNA, 25 bp, Saccharomyces pastorianus
gagtgctcgttcaaggcttctcccg

SEQ ID NO: 170761 - DNA, 25 bp, Saccharomyces pastorianus
tagggcagccttgatcatctacatt

SEQ ID NO: 170762 - DNA, 25 bp, Saccharomyces pastorianus
gcagccttgatcatctacatttgag

SEQ ID NO: 170763 - DNA, 25 bp, Saccharomyces pastorianus
ggcagccttgatcatctacatttga

SEQ ID NO: 170764 - DNA, 25 bp, Saccharomyces pastorianus
tctacatttgagattatgcttcatt

SEQ ID NO: 170765 - DNA, 25 bp, Saccharomyces pastorianus
aatagggcagccttgatcatctaca

SEQ ID NO: 170766 - DNA, 25 bp, Saccharomyces pastorianus
attcatataaatagggcagccttga

SEQ ID NO: 170767 - DNA, 25 bp, Saccharomyces pastorianus
agggcagccttgatcatctacattt

SEQ ID NO: 170768 - DNA, 25 bp, Saccharomyces pastorianus
gggcagccttgatcatctacatttg

SEQ ID NO: 170769 - DNA, 25 bp, Saccharomyces pastorianus
gatcatctacatttgagattatgct

SEQ ID NO: 170770 - DNA, 25 bp, Saccharomyces pastorianus
atagggcagccttgatcatctacat

SEQ ID NO: 170771 - DNA, 25 bp, Saccharomyces pastorianus
gccttgatcatctacatttgagatt

SEQ ID NO: 170772 - DNA, 25 bp, Saccharomyces pastorianus
gtttggtgaatttctccatcaaatt

SEQ ID NO: 170773 - DNA, 25 bp, Saccharomyces pastorianus
gataaagtcttctagtttggtgaat

SEQ ID NO: 170774 - DNA, 25 bp, Saccharomyces pastorianus
gatcgataaagtcttctagtttggt

SEQ ID NO: 170775 - DNA, 25 bp, Saccharomyces pastorianus
ttctccatcaaattagccttgttgg

SEQ ID NO: 170776 - DNA, 25 bp, Saccharomyces pastorianus
ctgttacttgtaggaattattttga

SEQ ID NO: 170777 - DNA, 25 bp, Saccharomyces pastorianus
aagatcatactgttacttgtaggaa

SEQ ID NO: 170778 - DNA, 25 bp, Saccharomyces pastorianus
gtacataagatcatactgttacttg

SEQ ID NO: 170779 - DNA, 25 bp, Saccharomyces pastorianus
gtgatgatactttgtacataagatc

SEQ ID NO: 170780 - DNA, 25 bp, Saccharomyces pastorianus
gaatttctccatcaaattagccttg

SEQ ID NO: 170781 - DNA, 25 bp, Saccharomyces pastorianus
aaacagtgatgatactttgtacata

SEQ ID NO: 170782 - DNA, 25 bp, Saccharomyces pastorianus
tttcgatcgataaagtcttctagtt

SEQ ID NO: 170783 - DNA, 25 bp, Saccharomyces pastorianus
gtgagcttcttgaaccagatccctg

SEQ ID NO: 170784 - DNA, 25 bp, Saccharomyces pastorianus
gccagtcgtagtgtatattgtaaac

SEQ ID NO: 170785 - DNA, 25 bp, Saccharomyces pastorianus
aaatatgtgcttgatccactggcca

SEQ ID NO: 170786 - DNA, 25 bp, Saccharomyces pastorianus
gtgcttgatccactggccaaatgaa

SEQ ID NO: 170787 - DNA, 25 bp, Saccharomyces pastorianus
accagatccctggaggaggcatcta

SEQ ID NO: 170788 - DNA, 25 bp, Saccharomyces pastorianus
ggaggaggcatctacccagagctat

SEQ ID NO: 170789 - DNA, 25 bp, Saccharomyces pastorianus
agaatgtctttctatcttcccgatc

SEQ ID NO: 170790 - DNA, 25 bp, Saccharomyces pastorianus
tacccagagctatccttagaatgtc

SEQ ID NO: 170791 - DNA, 25 bp, Saccharomyces pastorianus
aaccttccttgaccttcagatgtaa

SEQ ID NO: 170792 - DNA, 25 bp, Saccharomyces pastorianus
gccaaatgaagccagtcgtagtgta

SEQ ID NO: 170793 - DNA, 25 bp, Saccharomyces pastorianus
gacacttattgaaccaagctgctca

SEQ ID NO: 170794 - DNA, 25 bp, Saccharomyces pastorianus
gatgccttctagaattcaaggcacg

SEQ ID NO: 170795 - DNA, 25 bp, Saccharomyces pastorianus
atcggagaggagatgccttctagaa

SEQ ID NO: 170796 - DNA, 25 bp, Saccharomyces pastorianus
aagccatcggagaggagatgccttc

SEQ ID NO: 170797 - DNA, 25 bp, Saccharomyces pastorianus
cggagaggagatgccttctagaatt

SEQ ID NO: 170798 - DNA, 25 bp, Saccharomyces pastorianus
ttctagaattcaaggcacgtaaggg

SEQ ID NO: 170799 - DNA, 25 bp, Saccharomyces pastorianus
ggagatgccttctagaattcaaggc

SEQ ID NO: 170800 - DNA, 25 bp, Saccharomyces pastorianus
gagaggagatgccttctagaattca

SEQ ID NO: 170801 - DNA, 25 bp, Saccharomyces pastorianus
gaggagatgccttctagaattcaag

SEQ ID NO: 170802 - DNA, 25 bp, Saccharomyces pastorianus
tcggaacgggccgaaggccgaatag

SEQ ID NO: 170803 - DNA, 25 bp, Saccharomyces pastorianus
gccatcggagaggagatgccttcta

SEQ ID NO: 170804 - DNA, 25 bp, Saccharomyces pastorianus
ccaagccatcggagaggagatgcct

SEQ ID NO: 170805 - DNA, 25 bp, Saccharomyces pastorianus
tattaatagtttacccggattccag

SEQ ID NO: 170806 - DNA, 25 bp, Saccharomyces pastorianus
agtttggctcaagctgcaggtgaaa

SEQ ID NO: 170807 - DNA, 25 bp, Saccharomyces pastorianus
cacttcgcaatatcatttcattccc

SEQ ID NO: 170808 - DNA, 25 bp, Saccharomyces pastorianus
aagtcgattcttgacgtcacttcgc

SEQ ID NO: 170809 - DNA, 25 bp, Saccharomyces pastorianus
tcggctttcttgacttcggatatag

SEQ ID NO: 170810 - DNA, 25 bp, Saccharomyces pastorianus
tttggtttccgaccgcatgtaaggt

SEQ ID NO: 170811 - DNA, 25 bp, Saccharomyces pastorianus
aaactggcgtatggactttgcgatc

SEQ ID NO: 170812 - DNA, 25 bp, Saccharomyces pastorianus
aagtcgtattccctacgtatgaaga

SEQ ID NO: 170813 - DNA, 25 bp, Saccharomyces pastorianus
gcatgtaaggttcggctttcttgac

SEQ ID NO: 170814 - DNA, 25 bp, Saccharomyces pastorianus
caatctaatctcctcgtttggtttc

SEQ ID NO: 170815 - DNA, 25 bp, Saccharomyces pastorianus
cggattccagttttagtttggctca

SEQ ID NO: 170816 - DNA, 25 bp, Saccharomyces pastorianus
aagatcaatgtcagacacgacgaca

SEQ ID NO: 170817 - DNA, 25 bp, Saccharomyces pastorianus
ttccctatcaagatcaatgtcagac

SEQ ID NO: 170818 - DNA, 25 bp, Saccharomyces pastorianus
tattacggtgcattcaccgatgaaa

SEQ ID NO: 170819 - DNA, 25 bp, Saccharomyces pastorianus
ggtgcattcaccgatgaaatagcaa

SEQ ID NO: 170820 - DNA, 25 bp, Saccharomyces pastorianus
ggattattacggtgcattcaccgat

SEQ ID NO: 170821 - DNA, 25 bp, Saccharomyces pastorianus
gacacgacgacaaggattattacgg

SEQ ID NO: 170822 - DNA, 25 bp, Saccharomyces pastorianus
gcattcaccgatgaaatagcaaaaa

SEQ ID NO: 170823 - DNA, 25 bp, Saccharomyces pastorianus
tatcaagatcaatgtcagacacgac

SEQ ID NO: 170824 - DNA, 25 bp, Saccharomyces pastorianus
gatcaatgtcagacacgacgacaag

SEQ ID NO: 170825 - DNA, 25 bp, Saccharomyces pastorianus
aatgtcagacacgacgacaaggatt

SEQ ID NO: 170826 - DNA, 25 bp, Saccharomyces pastorianus
cagacacgacgacaaggattattac

SEQ ID NO: 170827 - DNA, 25 bp, Saccharomyces pastorianus
tgttgagatttgttgcttgcgcttc

SEQ ID NO: 170828 - DNA, 25 bp, Saccharomyces pastorianus
accccattcatgtggtttacacttg

SEQ ID NO: 170829 - DNA, 25 bp, Saccharomyces pastorianus
agatttgttgcttgcgcttctttta

SEQ ID NO: 170830 - DNA, 25 bp, Saccharomyces pastorianus
ggcatttaaccccattcatgtggtt

SEQ ID NO: 170831 - DNA, 25 bp, Saccharomyces pastorianus
gaagaaggcatttaaccccattcat

SEQ ID NO: 170832 - DNA, 25 bp, Saccharomyces pastorianus
acttgtgttgagatttgttgcttgc

SEQ ID NO: 170833 - DNA, 25 bp, Saccharomyces pastorianus
gggctatcttttttaggctcaaatc

SEQ ID NO: 170834 - DNA, 25 bp, Saccharomyces pastorianus
gatacatattattttctacttcctt

SEQ ID NO: 170835 - DNA, 25 bp, Saccharomyces pastorianus
ttcatgtggtttacacttgtgttga

SEQ ID NO: 170836 - DNA, 25 bp, Saccharomyces pastorianus
tttctacttcctttttatatctcaa

SEQ ID NO: 170837 - DNA, 25 bp, Saccharomyces pastorianus
gaaggcatttaaccccattcatgtg

SEQ ID NO: 170838 - DNA, 25 bp, Saccharomyces pastorianus
tgattggattgtgcgttgcctcatt

SEQ ID NO: 170839 - DNA, 25 bp, Saccharomyces pastorianus
gcctcatttcttgagcttcttggaa

SEQ ID NO: 170840 - DNA, 25 bp, Saccharomyces pastorianus
tttgattggattgtgcgttgcctca

SEQ ID NO: 170841 - DNA, 25 bp, Saccharomyces pastorianus
ctcatttcttgagcttcttggaaag

SEQ ID NO: 170842 - DNA, 25 bp, Saccharomyces pastorianus
tggattgtgcgttgcctcatttctt

SEQ ID NO: 170843 - DNA, 25 bp, Saccharomyces pastorianus
acatttgattggattgtgcgttgcc

SEQ ID NO: 170844 - DNA, 25 bp, Saccharomyces pastorianus
attgtgcgttgcctcatttcttgag

SEQ ID NO: 170845 - DNA, 25 bp, Saccharomyces pastorianus
attggattgtgcgttgcctcatttc

SEQ ID NO: 170846 - DNA, 25 bp, Saccharomyces pastorianus
gttgcctcatttcttgagcttcttg

SEQ ID NO: 170847 - DNA, 25 bp, Saccharomyces pastorianus
tatcggctcacatttgattggattg

SEQ ID NO: 170848 - DNA, 25 bp, Saccharomyces pastorianus
gtgcgttgcctcatttcttgagctt

SEQ ID NO: 170849 - DNA, 25 bp, Saccharomyces pastorianus
cagcatccagctctagtgttgtaac

SEQ ID NO: 170850 - DNA, 25 bp, Saccharomyces pastorianus
cagtgttgaaacttcatctactcca

SEQ ID NO: 170851 - DNA, 25 bp, Saccharomyces pastorianus
gtgttgtaacttcatctaccccagt

SEQ ID NO: 170852 - DNA, 25 bp, Saccharomyces pastorianus
tcatcactagctcctcgtagtagaa

SEQ ID NO: 170853 - DNA, 25 bp, Saccharomyces pastorianus
tacgacagttactactgctaccacc

SEQ ID NO: 170854 - DNA, 25 bp, Saccharomyces pastorianus
tagaaacgaaaccactgttgtccca

SEQ ID NO: 170855 - DNA, 25 bp, Saccharomyces pastorianus
atcttcaaccttctcatcactagct

SEQ ID NO: 170856 - DNA, 25 bp, Saccharomyces pastorianus
gttggcacaaccactcttgtctcat

SEQ ID NO: 170857 - DNA, 25 bp, Saccharomyces pastorianus
tgttgtcccaactacgacagttact

SEQ ID NO: 170858 - DNA, 25 bp, Saccharomyces pastorianus
gaaagttcttctgttggcacaacca

SEQ ID NO: 170859 - DNA, 25 bp, Saccharomyces pastorianus
acaccatccggcttcagtgttgaaa

SEQ ID NO: 170860 - DNA, 25 bp, Saccharomyces pastorianus
gaaagctacttaatgaaggatcttc

SEQ ID NO: 170861 - DNA, 25 bp, Saccharomyces pastorianus
atcactaatttatctaaggccaagg

SEQ ID NO: 170862 - DNA, 25 bp, Saccharomyces pastorianus
cagaatctgagttgtctagattgaa

SEQ ID NO: 170863 - DNA, 25 bp, Saccharomyces pastorianus
ggaagatgaattaattaggctacaa

SEQ ID NO: 170864 - DNA, 25 bp, Saccharomyces pastorianus
gaactctaaatatttggagctacag

SEQ ID NO: 170865 - DNA, 25 bp, Saccharomyces pastorianus
taaggccaaggagaaatcagaatct

SEQ ID NO: 170866 - DNA, 25 bp, Saccharomyces pastorianus
aactagatgctaaaacgactgaact

SEQ ID NO: 170867 - DNA, 25 bp, Saccharomyces pastorianus
tggaagacaaactcaaggcctcaga

SEQ ID NO: 170868 - DNA, 25 bp, Saccharomyces pastorianus
atttggagctacagaaggaatcgga

SEQ ID NO: 170869 - DNA, 25 bp, Saccharomyces pastorianus
gaaggatcttcaacaattacacaag

SEQ ID NO: 170870 - DNA, 25 bp, Saccharomyces pastorianus
aaggcctcagaagataagaactcta

SEQ ID NO: 170871 - DNA, 25 bp, Saccharomyces pastorianus
agttggctctaaatgacttatacga

SEQ ID NO: 170872 - DNA, 25 bp, Saccharomyces pastorianus
agtttctgaccttcgttgaagacga

SEQ ID NO: 170873 - DNA, 25 bp, Saccharomyces pastorianus
ggctctaaatgacttatacgacttg

SEQ ID NO: 170874 - DNA, 25 bp, Saccharomyces pastorianus
ctctaaatgacttatacgacttggt

SEQ ID NO: 170875 - DNA, 25 bp, Saccharomyces pastorianus
aaaattgtcattcccgtcgtggtca

SEQ ID NO: 170876 - DNA, 25 bp, Saccharomyces pastorianus
attgccactcaataactttatgtga

SEQ ID NO: 170877 - DNA, 25 bp, Saccharomyces pastorianus
atgcacaaaagtttctgaccttcgt

SEQ ID NO: 170878 - DNA, 25 bp, Saccharomyces pastorianus
ctttatgtgaatcgatgcgcacgga

SEQ ID NO: 170879 - DNA, 25 bp, Saccharomyces pastorianus
tgtcattcccgtcgtggtcaagaaa

SEQ ID NO: 170880 - DNA, 25 bp, Saccharomyces pastorianus
gagttggctctaaatgacttatacg

SEQ ID NO: 170881 - DNA, 25 bp, Saccharomyces pastorianus
aatgacttatacgacttggtacatt

SEQ ID NO: 170882 - DNA, 25 bp, Saccharomyces pastorianus
gctcacgagggaattcttcatgcta

SEQ ID NO: 170883 - DNA, 25 bp, Saccharomyces pastorianus
ttccacgttcgctcacgagggaatt

SEQ ID NO: 170884 - DNA, 25 bp, Saccharomyces pastorianus
ggaattcttcatgctaatactatgg

SEQ ID NO: 170885 - DNA, 25 bp, Saccharomyces pastorianus
acgagggaattcttcatgctaatac

SEQ ID NO: 170886 - DNA, 25 bp, Saccharomyces pastorianus
tcgctcacgagggaattcttcatgc

SEQ ID NO: 170887 - DNA, 25 bp, Saccharomyces pastorianus
cacgttcgctcacgagggaattctt

SEQ ID NO: 170888 - DNA, 25 bp, Saccharomyces pastorianus
attcttcatgctaatactatgggat

SEQ ID NO: 170889 - DNA, 25 bp, Saccharomyces pastorianus
tactatgggattgagaactgtgttc

SEQ ID NO: 170890 - DNA, 25 bp, Saccharomyces pastorianus
tcacgagggaattcttcatgctaat

SEQ ID NO: 170891 - DNA, 25 bp, Saccharomyces pastorianus
gttcgctcacgagggaattcttcat

SEQ ID NO: 170892 - DNA, 25 bp, Saccharomyces pastorianus
gagggaattcttcatgctaatacta

SEQ ID NO: 170893 - DNA, 25 bp, Saccharomyces pastorianus
gaggagaccttagtatacgtgacac

SEQ ID NO: 170894 - DNA, 25 bp, Saccharomyces pastorianus
agaccttagtatacgtgacactcgt

SEQ ID NO: 170895 - DNA, 25 bp, Saccharomyces pastorianus
cggactgggagatgagagcactaca

SEQ ID NO: 170896 - DNA, 25 bp, Saccharomyces pastorianus
gatgagagcactacacgagaacagt

SEQ ID NO: 170897 - DNA, 25 bp, Saccharomyces pastorianus
gagaaacgatacactaaatacatta

SEQ ID NO: 170898 - DNA, 25 bp, Saccharomyces pastorianus
actacacgagaacagtggcagagaa

SEQ ID NO: 170899 - DNA, 25 bp, Saccharomyces pastorianus
tttggagtacgtttcattgagccga

SEQ ID NO: 170900 - DNA, 25 bp, Saccharomyces pastorianus
aaggccactccgcatctttggagta

SEQ ID NO: 170901 - DNA, 25 bp, Saccharomyces pastorianus
aaatacattacaaggccactccgca

SEQ ID NO: 170902 - DNA, 25 bp, Saccharomyces pastorianus
tgacactcgtattcacctcctgaaa

SEQ ID NO: 170903 - DNA, 25 bp, Saccharomyces pastorianus
acgtttcattgagccgaggagacct

SEQ ID NO: 170904 - DNA, 25 bp, Saccharomyces pastorianus
gtcttggtgagccatgtttcgacaa

SEQ ID NO: 170905 - DNA, 25 bp, Saccharomyces pastorianus
gtagccacaatttcccaagaacaaa

SEQ ID NO: 170906 - DNA, 25 bp, Saccharomyces pastorianus
ccattcaagtccgtagccacaattt

SEQ ID NO: 170907 - DNA, 25 bp, Saccharomyces pastorianus
cggtgaaaacatctacttctccgtc

SEQ ID NO: 170908 - DNA, 25 bp, Saccharomyces pastorianus
ctgtaccagggtccaagcacaacga

SEQ ID NO: 170909 - DNA, 25 bp, Saccharomyces pastorianus
agatcggctcgggtttccaaggtgt

SEQ ID NO: 170910 - DNA, 25 bp, Saccharomyces pastorianus
ttccaaggtgtctctgtaccagggt

SEQ ID NO: 170911 - DNA, 25 bp, Saccharomyces pastorianus
caataactctggtggtgtgcaaggt

SEQ ID NO: 170912 - DNA, 25 bp, Saccharomyces pastorianus
gcaaggtggtatctccaacggtgaa

SEQ ID NO: 170913 - DNA, 25 bp, Saccharomyces pastorianus
ttggaagccatgctggctcacgcca

SEQ ID NO: 170914 - DNA, 25 bp, Saccharomyces pastorianus
cacaacgacccattctacttcgaaa

SEQ ID NO: 170915 - DNA, 25 bp, Saccharomyces pastorianus
cgcttccctagtggctggaattaat

SEQ ID NO: 170916 - DNA, 25 bp, Saccharomyces pastorianus
cggacgcttccctagtggctggaat

SEQ ID NO: 170917 - DNA, 25 bp, Saccharomyces pastorianus
ccattaagatgtccggacgcttccc

SEQ ID NO: 170918 - DNA, 25 bp, Saccharomyces pastorianus
ccctagtggctggaattaatgcgtc

SEQ ID NO: 170919 - DNA, 25 bp, Saccharomyces pastorianus
taagatgtccggacgcttccctagt

SEQ ID NO: 170920 - DNA, 25 bp, Saccharomyces pastorianus
tagtggctggaattaatgcgtcaag

SEQ ID NO: 170921 - DNA, 25 bp, Saccharomyces pastorianus
gacgcttccctagtggctggaatta

SEQ ID NO: 170922 - DNA, 25 bp, Saccharomyces pastorianus
ttaagatgtccggacgcttccctag

SEQ ID NO: 170923 - DNA, 25 bp, Saccharomyces pastorianus
atgtccggacgcttccctagtggct

SEQ ID NO: 170924 - DNA, 25 bp, Saccharomyces pastorianus
aagatgtccggacgcttccctagtg

SEQ ID NO: 170925 - DNA, 25 bp, Saccharomyces pastorianus
acgcttccctagtggctggaattaa

SEQ ID NO: 170926 - DNA, 25 bp, Saccharomyces pastorianus
tctcatagtggttaaaatcccttac

SEQ ID NO: 170927 - DNA, 25 bp, Saccharomyces pastorianus
catagtggttaaaatcccttactcg

SEQ ID NO: 170928 - DNA, 25 bp, Saccharomyces pastorianus
aagactggtatccaagctaaccctc

SEQ ID NO: 170929 - DNA, 25 bp, Saccharomyces pastorianus
acgtccaggtgctgtgtacaccgta

SEQ ID NO: 170930 - DNA, 25 bp, Saccharomyces pastorianus
gtgtacaccgtaggaaataatatgt

SEQ ID NO: 170931 - DNA, 25 bp, Saccharomyces pastorianus
ctaatatgttggatacaagactggt

SEQ ID NO: 170932 - DNA, 25 bp, Saccharomyces pastorianus
gtatccaagctaaccctcaagtagg

SEQ ID NO: 170933 - DNA, 25 bp, Saccharomyces pastorianus
caggtgctgtgtacaccgtaggaaa

SEQ ID NO: 170934 - DNA, 25 bp, Saccharomyces pastorianus
gaaaacgtccaggtgctgtgtacac

SEQ ID NO: 170935 - DNA, 25 bp, Saccharomyces pastorianus
tcaagtaggaaaacgtccaggtgct

SEQ ID NO: 170936 - DNA, 25 bp, Saccharomyces pastorianus
atcccttactcgttaaatattgtat

SEQ ID NO: 170937 - DNA, 25 bp, Saccharomyces pastorianus
attgaaactgcttcgctaggtgcga

SEQ ID NO: 170938 - DNA, 25 bp, Saccharomyces pastorianus
attgggttatccgacacatcatcag

SEQ ID NO: 170939 - DNA, 25 bp, Saccharomyces pastorianus
tggtggtataccaacaattcttgaa

SEQ ID NO: 170940 - DNA, 25 bp, Saccharomyces pastorianus
aagattccattgaaactgcttcgct

SEQ ID NO: 170941 - DNA, 25 bp, Saccharomyces pastorianus
ttccattgaaactgcttcgctaggt

SEQ ID NO: 170942 - DNA, 25 bp, Saccharomyces pastorianus
gctaggtgcgacgacgactgattct

SEQ ID NO: 170943 - DNA, 25 bp, Saccharomyces pastorianus
gattccattgaaactgcttcgctag

SEQ ID NO: 170944 - DNA, 25 bp, Saccharomyces pastorianus
gggttatccgacacatcatcagaag

SEQ ID NO: 170945 - DNA, 25 bp, Saccharomyces pastorianus
gttatccgacacatcatcagaagat

SEQ ID NO: 170946 - DNA, 25 bp, Saccharomyces pastorianus
aaactgcttcgctaggtgcgacgac

SEQ ID NO: 170947 - DNA, 25 bp, Saccharomyces pastorianus
gactgattctattgggttatccgac

SEQ ID NO: 170948 - DNA, 25 bp, Saccharomyces pastorianus
gaatcttccgataccatcgacaacg

SEQ ID NO: 170949 - DNA, 25 bp, Saccharomyces pastorianus
aaccataacattggaagttgaatct

SEQ ID NO: 170950 - DNA, 25 bp, Saccharomyces pastorianus
aagttgaatcttccgataccatcga

SEQ ID NO: 170951 - DNA, 25 bp, Saccharomyces pastorianus
tccgataccatcgacaacgttaagt

SEQ ID NO: 170952 - DNA, 25 bp, Saccharomyces pastorianus
caacattcagaaggaatctactctt

SEQ ID NO: 170953 - DNA, 25 bp, Saccharomyces pastorianus
cttccgataccatcgacaacgttaa

SEQ ID NO: 170954 - DNA, 25 bp, Saccharomyces pastorianus
atcttccgataccatcgacaacgtt

SEQ ID NO: 170955 - DNA, 25 bp, Saccharomyces pastorianus
cgataccatcgacaacgttaagtcg

SEQ ID NO: 170956 - DNA, 25 bp, Saccharomyces pastorianus
gttgaatcttccgataccatcgaca

SEQ ID NO: 170957 - DNA, 25 bp, Saccharomyces pastorianus
ttgaccggtaaaaccataacattgg

SEQ ID NO: 170958 - DNA, 25 bp, Saccharomyces pastorianus
gtctgattacaacattcagaaggaa

SEQ ID NO: 170959 - DNA, 25 bp, Saccharomyces pastorianus
gagctggctgtaagcgtgtatctta

SEQ ID NO: 170960 - DNA, 25 bp, Saccharomyces pastorianus
gtttaccctggtcgaaatagaatag

SEQ ID NO: 170961 - DNA, 25 bp, Saccharomyces pastorianus
aatagtcgtacatcagagctggctg

SEQ ID NO: 170962 - DNA, 25 bp, Saccharomyces pastorianus
aagcgtgtatcttatgccctacgta

SEQ ID NO: 170963 - DNA, 25 bp, Saccharomyces pastorianus
gatttttgtctgcatacacaagcaa

SEQ ID NO: 170964 - DNA, 25 bp, Saccharomyces pastorianus
gtacaatgttggcaccgccacatgt

SEQ ID NO: 170965 - DNA, 25 bp, Saccharomyces pastorianus
acaagcaatgtttaccctggtcgaa

SEQ ID NO: 170966 - DNA, 25 bp, Saccharomyces pastorianus
agtcttctagaaaagcaccattaag

SEQ ID NO: 170967 - DNA, 25 bp, Saccharomyces pastorianus
gcaccgccacatgtttgttgttaca

SEQ ID NO: 170968 - DNA, 25 bp, Saccharomyces pastorianus
atgccctacgtaaatctcactgagt

SEQ ID NO: 170969 - DNA, 25 bp, Saccharomyces pastorianus
tacatacactgtagatgagctatcg

SEQ ID NO: 170970 - DNA, 25 bp, Saccharomyces pastorianus
gtgattttgcataatactgtaagtg

SEQ ID NO: 170971 - DNA, 25 bp, Saccharomyces pastorianus
aatcttcggtattccattatgtctt

SEQ ID NO: 170972 - DNA, 25 bp, Saccharomyces pastorianus
tatgcactccgttcattgatcctat

SEQ ID NO: 170973 - DNA, 25 bp, Saccharomyces pastorianus
ggatttgggaatccacaaactataa

SEQ ID NO: 170974 - DNA, 25 bp, Saccharomyces pastorianus
ttgatgataatcttcggtattccat

SEQ ID NO: 170975 - DNA, 25 bp, Saccharomyces pastorianus
tcttactttttatgcactccgttca

SEQ ID NO: 170976 - DNA, 25 bp, Saccharomyces pastorianus
gtagatattcttctcatggatttgg

SEQ ID NO: 170977 - DNA, 25 bp, Saccharomyces pastorianus
actttttatgcactccgttcattga

SEQ ID NO: 170978 - DNA, 25 bp, Saccharomyces pastorianus
cttcggtattccattatgtcttaat

SEQ ID NO: 170979 - DNA, 25 bp, Saccharomyces pastorianus
cggattatagtagatattcttctca

SEQ ID NO: 170980 - DNA, 25 bp, Saccharomyces pastorianus
tgggaatccacaaactataataagt

SEQ ID NO: 170981 - DNA, 25 bp, Saccharomyces pastorianus
gtgacgcaatgagctaatgatatgt

SEQ ID NO: 170982 - DNA, 25 bp, Saccharomyces pastorianus
taagctgataccaacttcggagaac

SEQ ID NO: 170983 - DNA, 25 bp, Saccharomyces pastorianus
aactaagctgataccaacttcggag

SEQ ID NO: 170984 - DNA, 25 bp, Saccharomyces pastorianus
ataccaacttcggagaacgtgacgc

SEQ ID NO: 170985 - DNA, 25 bp, Saccharomyces pastorianus
agctaatgatatgtctgcttattgg

SEQ ID NO: 170986 - DNA, 25 bp, Saccharomyces pastorianus
gaaactaagctgataccaacttcgg

SEQ ID NO: 170987 - DNA, 25 bp, Saccharomyces pastorianus
ccaacttcggagaacgtgacgcaat

SEQ ID NO: 170988 - DNA, 25 bp, Saccharomyces pastorianus
atgagctaatgatatgtctgcttat

SEQ ID NO: 170989 - DNA, 25 bp, Saccharomyces pastorianus
gctgataccaacttcggagaacgtg

SEQ ID NO: 170990 - DNA, 25 bp, Saccharomyces pastorianus
ttcggagaacgtgacgcaatgagct

SEQ ID NO: 170991 - DNA, 25 bp, Saccharomyces pastorianus
gaacgtgacgcaatgagctaatgat

SEQ ID NO: 170992 - DNA, 25 bp, Saccharomyces pastorianus
gatgctcccctttcaattaacgaat

SEQ ID NO: 170993 - DNA, 25 bp, Saccharomyces pastorianus
tttgatgctcccctttcaattaacg

SEQ ID NO: 170994 - DNA, 25 bp, Saccharomyces pastorianus
gaatatctattgactggtatttata

SEQ ID NO: 170995 - DNA, 25 bp, Saccharomyces pastorianus
tgatgctcccctttcaattaacgaa

SEQ ID NO: 170996 - DNA, 25 bp, Saccharomyces pastorianus
gctcccctttcaattaacgaatatc

SEQ ID NO: 170997 - DNA, 25 bp, Saccharomyces pastorianus
aacgaatatctattgactggtattt

SEQ ID NO: 170998 - DNA, 25 bp, Saccharomyces pastorianus
ttgatgctcccctttcaattaacga

SEQ ID NO: 170999 - DNA, 25 bp, Saccharomyces pastorianus
atgctcccctttcaattaacgaata

SEQ ID NO: 171000 - DNA, 25 bp, Saccharomyces pastorianus
tcccctttcaattaacgaatatcta

SEQ ID NO: 171001 - DNA, 25 bp, Saccharomyces pastorianus
tgctcccctttcaattaacgaatat

SEQ ID NO: 171002 - DNA, 25 bp, Saccharomyces pastorianus
tatctattgactggtatttatatta

SEQ ID NO: 171003 - DNA, 25 bp, Saccharomyces pastorianus
ccttctattttacatgcttcattat

SEQ ID NO: 171004 - DNA, 25 bp, Saccharomyces pastorianus
ttctccttctattttacatgcttca

SEQ ID NO: 171005 - DNA, 25 bp, Saccharomyces pastorianus
attatttctccttctattttacatg

SEQ ID NO: 171006 - DNA, 25 bp, Saccharomyces pastorianus
tgactgtttttcaattgttgtataa

SEQ ID NO: 171007 - DNA, 25 bp, Saccharomyces pastorianus
ggatcttgggatccaaaatagggaa

SEQ ID NO: 171008 - DNA, 25 bp, Saccharomyces pastorianus
caattcagctctcattaagtctaat

SEQ ID NO: 171009 - DNA, 25 bp, Saccharomyces pastorianus
ggatccaaaatagggaatcggtatt

SEQ ID NO: 171010 - DNA, 25 bp, Saccharomyces pastorianus
ctagctatgcaattcagctctcatt

SEQ ID NO: 171011 - DNA, 25 bp, Saccharomyces pastorianus
cggtatttctgcataatattgctat

SEQ ID NO: 171012 - DNA, 25 bp, Saccharomyces pastorianus
gctctcattaagtctaatgactgtt

SEQ ID NO: 171013 - DNA, 25 bp, Saccharomyces pastorianus
tcctattacattatctagctatgca

SEQ ID NO: 171014 - DNA, 25 bp, Saccharomyces pastorianus
gcaaacctcataagcacttctacac

SEQ ID NO: 171015 - DNA, 25 bp, Saccharomyces pastorianus
agcagcatcagttcttcagctagat

SEQ ID NO: 171016 - DNA, 25 bp, Saccharomyces pastorianus
aagttcgaatttggcttccaccact

SEQ ID NO: 171017 - DNA, 25 bp, Saccharomyces pastorianus
ccaccactgattctacttctgtaag

SEQ ID NO: 171018 - DNA, 25 bp, Saccharomyces pastorianus
gattatccaacactaccagatcgtc

SEQ ID NO: 171019 - DNA, 25 bp, Saccharomyces pastorianus
gttgaacgcgtcaccagatctggat

SEQ ID NO: 171020 - DNA, 25 bp, Saccharomyces pastorianus
attggcttccaactctgcaagcatt

SEQ ID NO: 171021 - DNA, 25 bp, Saccharomyces pastorianus
tctgcttcaagttcggcacacactt

SEQ ID NO: 171022 - DNA, 25 bp, Saccharomyces pastorianus
agatctggatcatcctccgatgtct

SEQ ID NO: 171023 - DNA, 25 bp, Saccharomyces pastorianus
acttctgcgcccgtggatatcacta

SEQ ID NO: 171024 - DNA, 25 bp, Saccharomyces pastorianus
tcactagcgccattgatgcaaacct

SEQ ID NO: 171025 - DNA, 25 bp, Saccharomyces pastorianus
gcagtgtgccacaccatctactgag

SEQ ID NO: 171026 - DNA, 25 bp, Saccharomyces pastorianus
ctgagtgtacattgcgatgcgactt

SEQ ID NO: 171027 - DNA, 25 bp, Saccharomyces pastorianus
agtgtacattgcgatgcgacttcca

SEQ ID NO: 171028 - DNA, 25 bp, Saccharomyces pastorianus
attgcgatgcgacttccactaccga

SEQ ID NO: 171029 - DNA, 25 bp, Saccharomyces pastorianus
gtacattgcgatgcgacttccacta

SEQ ID NO: 171030 - DNA, 25 bp, Saccharomyces pastorianus
tccactaccgactactccagcagtg

SEQ ID NO: 171031 - DNA, 25 bp, Saccharomyces pastorianus
gatgcgacttccactaccgactact

SEQ ID NO: 171032 - DNA, 25 bp, Saccharomyces pastorianus
tactgagtgtacattgcgatgcgac

SEQ ID NO: 171033 - DNA, 25 bp, Saccharomyces pastorianus
atactccagcagtgtgccacaccat

SEQ ID NO: 171034 - DNA, 25 bp, Saccharomyces pastorianus
accatctactgagtgtacattgcga

SEQ ID NO: 171035 - DNA, 25 bp, Saccharomyces pastorianus
atctactgagtgtacattgcgatgc

SEQ ID NO: 171036 - DNA, 25 bp, Saccharomyces pastorianus
tactgaggcatgtttgccatcaggt

SEQ ID NO: 171037 - DNA, 25 bp, Saccharomyces pastorianus
taacttcaggaagtactgaggcatg

SEQ ID NO: 171038 - DNA, 25 bp, Saccharomyces pastorianus
attttcgacggtactcgccttcctg

SEQ ID NO: 171039 - DNA, 25 bp, Saccharomyces pastorianus
aggcatgtttgccatcaggtgaaaa

SEQ ID NO: 171040 - DNA, 25 bp, Saccharomyces pastorianus
gacggtactcgccttcctggctcta

SEQ ID NO: 171041 - DNA, 25 bp, Saccharomyces pastorianus
gtcattacatattttcgacggtact

SEQ ID NO: 171042 - DNA, 25 bp, Saccharomyces pastorianus
gaatattaatttttaccagtatacg

SEQ ID NO: 171043 - DNA, 25 bp, Saccharomyces pastorianus
gcatgtttgccatcaggtgaaaaaa

SEQ ID NO: 171044 - DNA, 25 bp, Saccharomyces pastorianus
caggaagtactgaggcatgtttgcc

SEQ ID NO: 171045 - DNA, 25 bp, Saccharomyces pastorianus
aagtactgaggcatgtttgccatca

SEQ ID NO: 171046 - DNA, 25 bp, Saccharomyces pastorianus
acatattttcgacggtactcgcctt

SEQ ID NO: 171047 - DNA, 25 bp, Saccharomyces pastorianus
ccaacatcgactaaaggtacctaga

SEQ ID NO: 171048 - DNA, 25 bp, Saccharomyces pastorianus
ctagagtcccgcagagatgtaaaaa

SEQ ID NO: 171049 - DNA, 25 bp, Saccharomyces pastorianus
atgctggacgataccaacatcgact

SEQ ID NO: 171050 - DNA, 25 bp, Saccharomyces pastorianus
ggtacctagagtcccgcagagatgt

SEQ ID NO: 171051 - DNA, 25 bp, Saccharomyces pastorianus
gattttgcagccttctccagtgaga

SEQ ID NO: 171052 - DNA, 25 bp, Saccharomyces pastorianus
gaacagcaactagaatccgcgcaaa

SEQ ID NO: 171053 - DNA, 25 bp, Saccharomyces pastorianus
gatgtaaaaaacactgaacgggaca

SEQ ID NO: 171054 - DNA, 25 bp, Saccharomyces pastorianus
actacagctcgtcaaggagaagtgc

SEQ ID NO: 171055 - DNA, 25 bp, Saccharomyces pastorianus
aaaggccaccgggattttgcagcct

SEQ ID NO: 171056 - DNA, 25 bp, Saccharomyces pastorianus
gctgcaatcgatgctggacgatacc

SEQ ID NO: 171057 - DNA, 25 bp, Saccharomyces pastorianus
gcaaaaggaactacagctcgtcaag

SEQ ID NO: 171058 - DNA, 25 bp, Saccharomyces pastorianus
aacgttgccagagttgacgaagaag

SEQ ID NO: 171059 - DNA, 25 bp, Saccharomyces pastorianus
aatcaacgttgccagagttgacgaa

SEQ ID NO: 171060 - DNA, 25 bp, Saccharomyces pastorianus
gtgccattccaggtgaatacgttac

SEQ ID NO: 171061 - DNA, 25 bp, Saccharomyces pastorianus
gaaccgtttggctcaaaacgatggt

SEQ ID NO: 171062 - DNA, 25 bp, Saccharomyces pastorianus
tcgaactttacgttccaagaaaatg

SEQ ID NO: 171063 - DNA, 25 bp, Saccharomyces pastorianus
gagttgacgaagaaggccgtgccat

SEQ ID NO: 171064 - DNA, 25 bp, Saccharomyces pastorianus
ttacgttccaagaaaatgttctgct

SEQ ID NO: 171065 - DNA, 25 bp, Saccharomyces pastorianus
ccgatgactctttgaaccgtttggc

SEQ ID NO: 171066 - DNA, 25 bp, Saccharomyces pastorianus
tgactctttgaaccgtttggctcaa

SEQ ID NO: 171067 - DNA, 25 bp, Saccharomyces pastorianus
agttgacgaagaaggccgtgccatt

SEQ ID NO: 171068 - DNA, 25 bp, Saccharomyces pastorianus
gatgactctttgaaccgtttggctc

SEQ ID NO: 171069 - DNA, 25 bp, Saccharomyces pastorianus
gggcttttcatcctgttcaatcacg

SEQ ID NO: 171070 - DNA, 25 bp, Saccharomyces pastorianus
gcggcatgcatggaacgttagattt

SEQ ID NO: 171071 - DNA, 25 bp, Saccharomyces pastorianus
tgttcaatcacgttaggcccgttga

SEQ ID NO: 171072 - DNA, 25 bp, Saccharomyces pastorianus
ttctttactacttgactctggtctt

SEQ ID NO: 171073 - DNA, 25 bp, Saccharomyces pastorianus
gggctatctgtttcattattagaat

SEQ ID NO: 171074 - DNA, 25 bp, Saccharomyces pastorianus
tctggttccccttcttgagtgtagc

SEQ ID NO: 171075 - DNA, 25 bp, Saccharomyces pastorianus
tggatcgggttatgttttccggaat

SEQ ID NO: 171076 - DNA, 25 bp, Saccharomyces pastorianus
taggcccgttgacgaatgtccttgt

SEQ ID NO: 171077 - DNA, 25 bp, Saccharomyces pastorianus
tagatttgtttagcggtgcctctgt

SEQ ID NO: 171078 - DNA, 25 bp, Saccharomyces pastorianus
tagtggtgaacacttctggttcccc

SEQ ID NO: 171079 - DNA, 25 bp, Saccharomyces pastorianus
gactctggtctttggtagggtgtat

SEQ ID NO: 171080 - DNA, 25 bp, Saccharomyces pastorianus
ggtatatatacatccaacgccagtc

SEQ ID NO: 171081 - DNA, 25 bp, Saccharomyces pastorianus
caggatgtggtgcttggtatatata

SEQ ID NO: 171082 - DNA, 25 bp, Saccharomyces pastorianus
gcaatcaggatgtggtgcttggtat

SEQ ID NO: 171083 - DNA, 25 bp, Saccharomyces pastorianus
gttccttgaaaagctgatgtctcat

SEQ ID NO: 171084 - DNA, 25 bp, Saccharomyces pastorianus
ttttgggctgttccttgaaaagctg

SEQ ID NO: 171085 - DNA, 25 bp, Saccharomyces pastorianus
gtcagtgtttggaggcaattgtaat

SEQ ID NO: 171086 - DNA, 25 bp, Saccharomyces pastorianus
ggcatccctgggttgcaatcaggat

SEQ ID NO: 171087 - DNA, 25 bp, Saccharomyces pastorianus
tacatccaacgccagtcagtgtttg

SEQ ID NO: 171088 - DNA, 25 bp, Saccharomyces pastorianus
attgttgttgtgaaattttgggctg

SEQ ID NO: 171089 - DNA, 25 bp, Saccharomyces pastorianus
gatgtctcataatatatttgttgta

SEQ ID NO: 171090 - DNA, 25 bp, Saccharomyces pastorianus
aacgccagtcagtgtttggaggcaa

SEQ ID NO: 171091 - DNA, 25 bp, Saccharomyces pastorianus
ttcacccgcttgtcgttgataacga

SEQ ID NO: 171092 - DNA, 25 bp, Saccharomyces pastorianus
tcaaacagcaaagaacgtttcattg

SEQ ID NO: 171093 - DNA, 25 bp, Saccharomyces pastorianus
tttgggccttatcgcttatcaccag

SEQ ID NO: 171094 - DNA, 25 bp, Saccharomyces pastorianus
ttatcaccagtgctaatcaaacagc

SEQ ID NO: 171095 - DNA, 25 bp, Saccharomyces pastorianus
ataacgagtttgggccttatcgctt

SEQ ID NO: 171096 - DNA, 25 bp, Saccharomyces pastorianus
atcgcttatcaccagtgctaatcaa

SEQ ID NO: 171097 - DNA, 25 bp, Saccharomyces pastorianus
gttgataacgagtttgggccttatc

SEQ ID NO: 171098 - DNA, 25 bp, Saccharomyces pastorianus
ccttatcgcttatcaccagtgctaa

SEQ ID NO: 171099 - DNA, 25 bp, Saccharomyces pastorianus
acagggctgtagcaatcttcacccg

SEQ ID NO: 171100 - DNA, 25 bp, Saccharomyces pastorianus
cgagtttgggccttatcgcttatca

SEQ ID NO: 171101 - DNA, 25 bp, Saccharomyces pastorianus
aatcttcacccgcttgtcgttgata

SEQ ID NO: 171102 - DNA, 25 bp, Saccharomyces pastorianus
gatcaagacgattgccttcgaacga

SEQ ID NO: 171103 - DNA, 25 bp, Saccharomyces pastorianus
gacgattgccttcgaacgacgttta

SEQ ID NO: 171104 - DNA, 25 bp, Saccharomyces pastorianus
aaaaagatcaagacgattgccttcg

SEQ ID NO: 171105 - DNA, 25 bp, Saccharomyces pastorianus
caagacgattgccttcgaacgacgt

SEQ ID NO: 171106 - DNA, 25 bp, Saccharomyces pastorianus
aagacgattgccttcgaacgacgtt

SEQ ID NO: 171107 - DNA, 25 bp, Saccharomyces pastorianus
cgattgccttcgaacgacgtttacg

SEQ ID NO: 171108 - DNA, 25 bp, Saccharomyces pastorianus
aaagatcaagacgattgccttcgaa

SEQ ID NO: 171109 - DNA, 25 bp, Saccharomyces pastorianus
atcaagacgattgccttcgaacgac

SEQ ID NO: 171110 - DNA, 25 bp, Saccharomyces pastorianus
gattgccttcgaacgacgtttacgt

SEQ ID NO: 171111 - DNA, 25 bp, Saccharomyces pastorianus
agacgattgccttcgaacgacgttt

SEQ ID NO: 171112 - DNA, 25 bp, Saccharomyces pastorianus
agatcaagacgattgccttcgaacg

SEQ ID NO: 171113 - DNA, 25 bp, Saccharomyces pastorianus
ttataaaagagaatgccgccagctt

SEQ ID NO: 171114 - DNA, 25 bp, Saccharomyces pastorianus
tataaaagagaatgccgccagcttt

SEQ ID NO: 171115 - DNA, 25 bp, Saccharomyces pastorianus
caattataaaagagaatgccgccag

SEQ ID NO: 171116 - DNA, 25 bp, Saccharomyces pastorianus
gagaatgccgccagcttttttctct

SEQ ID NO: 171117 - DNA, 25 bp, Saccharomyces pastorianus
aattataaaagagaatgccgccagc

SEQ ID NO: 171118 - DNA, 25 bp, Saccharomyces pastorianus
attataaaagagaatgccgccagct

SEQ ID NO: 171119 - DNA, 25 bp, Saccharomyces pastorianus
ataaaagagaatgccgccagctttt

SEQ ID NO: 171120 - DNA, 25 bp, Saccharomyces pastorianus
aaaagagaatgccgccagctttttt

SEQ ID NO: 171121 - DNA, 25 bp, Saccharomyces pastorianus
taaaagagaatgccgccagcttttt

SEQ ID NO: 171122 - DNA, 25 bp, Saccharomyces pastorianus
agagaatgccgccagcttttttctc

SEQ ID NO: 171123 - DNA, 25 bp, Saccharomyces pastorianus
ccgtgagagggcaattataaaagag

SEQ ID NO: 171124 - DNA, 25 bp, Saccharomyces pastorianus
tacattattgatccttgtatttcag

SEQ ID NO: 171125 - DNA, 25 bp, Saccharomyces pastorianus
gaggatataggcatccccaaaaagg

SEQ ID NO: 171126 - DNA, 25 bp, Saccharomyces pastorianus
tattgatccttgtatttcagctttc

SEQ ID NO: 171127 - DNA, 25 bp, Saccharomyces pastorianus
cgaggatataggcatccccaaaaag

SEQ ID NO: 171128 - DNA, 25 bp, Saccharomyces pastorianus
ttgatccttgtatttcagctttctc

SEQ ID NO: 171129 - DNA, 25 bp, Saccharomyces pastorianus
tgatccttgtatttcagctttctct

SEQ ID NO: 171130 - DNA, 25 bp, Saccharomyces pastorianus
gcatccccaaaaaggaatcgatatt

SEQ ID NO: 171131 - DNA, 25 bp, Saccharomyces pastorianus
taggcatccccaaaaaggaatcgat

SEQ ID NO: 171132 - DNA, 25 bp, Saccharomyces pastorianus
tataggcatccccaaaaaggaatcg

SEQ ID NO: 171133 - DNA, 25 bp, Saccharomyces pastorianus
ggatataggcatccccaaaaaggaa

SEQ ID NO: 171134 - DNA, 25 bp, Saccharomyces pastorianus
aggatataggcatccccaaaaagga

SEQ ID NO: 171135 - DNA, 25 bp, Saccharomyces pastorianus
tagtccaaggtccaagatcgtactt

SEQ ID NO: 171136 - DNA, 25 bp, Saccharomyces pastorianus
aactgcagttacctgcgaatcctgc

SEQ ID NO: 171137 - DNA, 25 bp, Saccharomyces pastorianus
tgctcaacaattttgtgcaccccaa

SEQ ID NO: 171138 - DNA, 25 bp, Saccharomyces pastorianus
gcaccccaactggtggtaaggcaaa

SEQ ID NO: 171139 - DNA, 25 bp, Saccharomyces pastorianus
ggtccaagatcgtacttcctagacg

SEQ ID NO: 171140 - DNA, 25 bp, Saccharomyces pastorianus
ctagacgttaagtgcccaggttgtt

SEQ ID NO: 171141 - DNA, 25 bp, Saccharomyces pastorianus
gtacttcctagacgttaagtgccca

SEQ ID NO: 171142 - DNA, 25 bp, Saccharomyces pastorianus
ttttgtgcaccccaactggtggtaa

SEQ ID NO: 171143 - DNA, 25 bp, Saccharomyces pastorianus
ttctcacacgcccaaactgcagtta

SEQ ID NO: 171144 - DNA, 25 bp, Saccharomyces pastorianus
ctgcgaatcctgctcaacaattttg

SEQ ID NO: 171145 - DNA, 25 bp, Saccharomyces pastorianus
taaagacattagtccaaggtccaag

SEQ ID NO: 171146 - DNA, 25 bp, Saccharomyces pastorianus
caaagtccaaagcaacctatccaga

SEQ ID NO: 171147 - DNA, 25 bp, Saccharomyces pastorianus
agataccgaatttaacatctccggt

SEQ ID NO: 171148 - DNA, 25 bp, Saccharomyces pastorianus
agcaacctatccagataccgaattt

SEQ ID NO: 171149 - DNA, 25 bp, Saccharomyces pastorianus
ggcaaagtccaaagcaacctatcca

SEQ ID NO: 171150 - DNA, 25 bp, Saccharomyces pastorianus
gtttacgctgaatagctggtggcaa

SEQ ID NO: 171151 - DNA, 25 bp, Saccharomyces pastorianus
acgctgaatagctggtggcaaagtc

SEQ ID NO: 171152 - DNA, 25 bp, Saccharomyces pastorianus
tcaaagtttacgctgaatagctggt

SEQ ID NO: 171153 - DNA, 25 bp, Saccharomyces pastorianus
ggtggcaaagtccaaagcaacctat

SEQ ID NO: 171154 - DNA, 25 bp, Saccharomyces pastorianus
atagctggtggcaaagtccaaagca

SEQ ID NO: 171155 - DNA, 25 bp, Saccharomyces pastorianus
acctatccagataccgaatttaaca

SEQ ID NO: 171156 - DNA, 25 bp, Saccharomyces pastorianus
ctgaatagctggtggcaaagtccaa

SEQ ID NO: 171157 - DNA, 25 bp, Saccharomyces pastorianus
agcccaactttcctattaagctgcg

SEQ ID NO: 171158 - DNA, 25 bp, Saccharomyces pastorianus
accatttgccttatttgtttctctg

SEQ ID NO: 171159 - DNA, 25 bp, Saccharomyces pastorianus
tacacttttttccattgcatgttac

SEQ ID NO: 171160 - DNA, 25 bp, Saccharomyces pastorianus
gtttcgctgaagtagcctcattttt

SEQ ID NO: 171161 - DNA, 25 bp, Saccharomyces pastorianus
ggtcttgaatcactacttctggttc

SEQ ID NO: 171162 - DNA, 25 bp, Saccharomyces pastorianus
agctgcgtatgtgtggtcttgaatc

SEQ ID NO: 171163 - DNA, 25 bp, Saccharomyces pastorianus
cttatttgtttctctgtcagctggt

SEQ ID NO: 171164 - DNA, 25 bp, Saccharomyces pastorianus
tgatccaaattatataccacgcaga

SEQ ID NO: 171165 - DNA, 25 bp, Saccharomyces pastorianus
acgcagacgtgctagtttcgctgaa

SEQ ID NO: 171166 - DNA, 25 bp, Saccharomyces pastorianus
gctactgttactagacggtttcccg

SEQ ID NO: 171167 - DNA, 25 bp, Saccharomyces pastorianus
gattatgtgctaccaacgactagtg

SEQ ID NO: 171168 - DNA, 25 bp, Saccharomyces pastorianus
gcgactataagcacaaatccgaact

SEQ ID NO: 171169 - DNA, 25 bp, Saccharomyces pastorianus
gaacttgaattctaatgtgatgcag

SEQ ID NO: 171170 - DNA, 25 bp, Saccharomyces pastorianus
agcactggtgccatattgaataaca

SEQ ID NO: 171171 - DNA, 25 bp, Saccharomyces pastorianus
aacctaatatttcctgactcctcca

SEQ ID NO: 171172 - DNA, 25 bp, Saccharomyces pastorianus
gcacaaatccgaacttgaattctaa

SEQ ID NO: 171173 - DNA, 25 bp, Saccharomyces pastorianus
ggcagctaattcgactaaaaaccta

SEQ ID NO: 171174 - DNA, 25 bp, Saccharomyces pastorianus
agcaacaaaatcatggaataacctc

SEQ ID NO: 171175 - DNA, 25 bp, Saccharomyces pastorianus
attcaagacatattagcactggtgc

SEQ ID NO: 171176 - DNA, 25 bp, Saccharomyces pastorianus
gataagcgccccattgctaaacaat

SEQ ID NO: 171177 - DNA, 25 bp, Saccharomyces pastorianus
gaataacacaatcgcgactataagc

SEQ ID NO: 171178 - DNA, 25 bp, Saccharomyces pastorianus
taacctcaaagataagcgccccatt

SEQ ID NO: 171179 - DNA, 25 bp, Saccharomyces pastorianus
gtccgcctctaagcaagtacatcat

SEQ ID NO: 171180 - DNA, 25 bp, Saccharomyces pastorianus
aagcaagtacatcattggttgtctg

SEQ ID NO: 171181 - DNA, 25 bp, Saccharomyces pastorianus
tacatcattggttgtctgggagact

SEQ ID NO: 171182 - DNA, 25 bp, Saccharomyces pastorianus
atcatcaccggacggtattgttggt

SEQ ID NO: 171183 - DNA, 25 bp, Saccharomyces pastorianus
tacagttacatcatcaccggacggt

SEQ ID NO: 171184 - DNA, 25 bp, Saccharomyces pastorianus
gtctcatacaagtacaacgatcaat

SEQ ID NO: 171185 - DNA, 25 bp, Saccharomyces pastorianus
gtctgggagactacagttacatcat

SEQ ID NO: 171186 - DNA, 25 bp, Saccharomyces pastorianus
gagactacagttacatcatcaccgg

SEQ ID NO: 171187 - DNA, 25 bp, Saccharomyces pastorianus
aatttgtcggtggtttattcaacag

SEQ ID NO: 171188 - DNA, 25 bp, Saccharomyces pastorianus
agttacatcatcaccggacggtatt

SEQ ID NO: 171189 - DNA, 25 bp, Saccharomyces pastorianus
aaagtctcatacaagtacaacgatc

SEQ ID NO: 171190 - DNA, 25 bp, Saccharomyces pastorianus
aaaaaggaacactttcacacaagca

SEQ ID NO: 171191 - DNA, 25 bp, Saccharomyces pastorianus
ggaacactttcacacaagcaagtat

SEQ ID NO: 171192 - DNA, 25 bp, Saccharomyces pastorianus
aggaacactttcacacaagcaagta

SEQ ID NO: 171193 - DNA, 25 bp, Saccharomyces pastorianus
gaacactttcacacaagcaagtata

SEQ ID NO: 171194 - DNA, 25 bp, Saccharomyces pastorianus
aaaggaacactttcacacaagcaag

SEQ ID NO: 171195 - DNA, 25 bp, Saccharomyces pastorianus
caagcaagtatatctcatgagaatt

SEQ ID NO: 171196 - DNA, 25 bp, Saccharomyces pastorianus
aaaaggaacactttcacacaagcaa

SEQ ID NO: 171197 - DNA, 25 bp, Saccharomyces pastorianus
cacaagcaagtatatctcatgagaa

SEQ ID NO: 171198 - DNA, 25 bp, Saccharomyces pastorianus
agcaagtatatctcatgagaatttt

SEQ ID NO: 171199 - DNA, 25 bp, Saccharomyces pastorianus
aaggaacactttcacacaagcaagt

SEQ ID NO: 171200 - DNA, 25 bp, Saccharomyces pastorianus
acaagcaagtatatctcatgagaat

SEQ ID NO: 171201 - DNA, 25 bp, Saccharomyces pastorianus
tcaattgctctcgtttaatttcagc

SEQ ID NO: 171202 - DNA, 25 bp, Saccharomyces pastorianus
tcgttttgattatccctggttccat

SEQ ID NO: 171203 - DNA, 25 bp, Saccharomyces pastorianus
tccctggttccatcttcataataag

SEQ ID NO: 171204 - DNA, 25 bp, Saccharomyces pastorianus
taggttttcttttcctgataacaag

SEQ ID NO: 171205 - DNA, 25 bp, Saccharomyces pastorianus
gggctggcaatctcttctaaattta

SEQ ID NO: 171206 - DNA, 25 bp, Saccharomyces pastorianus
attggaattgtcacttgggccttcg

SEQ ID NO: 171207 - DNA, 25 bp, Saccharomyces pastorianus
tatctatttctttagggctggcaat

SEQ ID NO: 171208 - DNA, 25 bp, Saccharomyces pastorianus
gtcattctctgtctattattcgttt

SEQ ID NO: 171209 - DNA, 25 bp, Saccharomyces pastorianus
tgggccttcgtaattctttcttttg

SEQ ID NO: 171210 - DNA, 25 bp, Saccharomyces pastorianus
gacagacacgccacaattttcaaaa

SEQ ID NO: 171211 - DNA, 25 bp, Saccharomyces pastorianus
gaatggtgtctgttctcagtagtaa

SEQ ID NO: 171212 - DNA, 25 bp, Saccharomyces pastorianus
attagtcacaattaataatgttgga

SEQ ID NO: 171213 - DNA, 25 bp, Saccharomyces pastorianus
ccagagaacttgttatattagtcac

SEQ ID NO: 171214 - DNA, 25 bp, Saccharomyces pastorianus
gtgtcatgcaagtctttacattaaa

SEQ ID NO: 171215 - DNA, 25 bp, Saccharomyces pastorianus
accaccagagaacttgttatattag

SEQ ID NO: 171216 - DNA, 25 bp, Saccharomyces pastorianus
tatggtaaccaccagagaacttgtt

SEQ ID NO: 171217 - DNA, 25 bp, Saccharomyces pastorianus
gtaaccaccagagaacttgttatat

SEQ ID NO: 171218 - DNA, 25 bp, Saccharomyces pastorianus
tacattaaatatatggtaaccacca

SEQ ID NO: 171219 - DNA, 25 bp, Saccharomyces pastorianus
tggtaaccaccagagaacttgttat

SEQ ID NO: 171220 - DNA, 25 bp, Saccharomyces pastorianus
atgtgtcatgcaagtctttacatta

SEQ ID NO: 171221 - DNA, 25 bp, Saccharomyces pastorianus
gagaacttgttatattagtcacaat

SEQ ID NO: 171222 - DNA, 25 bp, Saccharomyces pastorianus
tatatggtaaccaccagagaacttg

SEQ ID NO: 171223 - DNA, 25 bp, Saccharomyces pastorianus
gaacggatccggacatcagccaaat

SEQ ID NO: 171224 - DNA, 25 bp, Saccharomyces pastorianus
acacttaccctatccgagcgaaata

SEQ ID NO: 171225 - DNA, 25 bp, Saccharomyces pastorianus
gacatcagccaaatatactccggga

SEQ ID NO: 171226 - DNA, 25 bp, Saccharomyces pastorianus
cctatccgagcgaaatacactaatt

SEQ ID NO: 171227 - DNA, 25 bp, Saccharomyces pastorianus
attaccattcactcggaacggatcc

SEQ ID NO: 171228 - DNA, 25 bp, Saccharomyces pastorianus
gacactgatagtgatatacagcaac

SEQ ID NO: 171229 - DNA, 25 bp, Saccharomyces pastorianus
tggagcgattaccattcactcggaa

SEQ ID NO: 171230 - DNA, 25 bp, Saccharomyces pastorianus
gccaaatatactccgggatccctaa

SEQ ID NO: 171231 - DNA, 25 bp, Saccharomyces pastorianus
tatacagcaacacaatggagcgatt

SEQ ID NO: 171232 - DNA, 25 bp, Saccharomyces pastorianus
ataacagggtaaaaaggtgcgcaag

SEQ ID NO: 171233 - DNA, 25 bp, Saccharomyces pastorianus
gatccctaaaaggtccgtacacact

SEQ ID NO: 171234 - DNA, 25 bp, Saccharomyces pastorianus
ctaaaacgagtgtgtgtttcgtatt

SEQ ID NO: 171235 - DNA, 25 bp, Saccharomyces pastorianus
cgtccgtacgctttactgtaaatga

SEQ ID NO: 171236 - DNA, 25 bp, Saccharomyces pastorianus
tgaattctttctaccttttatccct

SEQ ID NO: 171237 - DNA, 25 bp, Saccharomyces pastorianus
ttcgtccgtacgctttactgtaaat

SEQ ID NO: 171238 - DNA, 25 bp, Saccharomyces pastorianus
ttttatccctcactatgcctttctt

SEQ ID NO: 171239 - DNA, 25 bp, Saccharomyces pastorianus
tttctaccttttatccctcactatg

SEQ ID NO: 171240 - DNA, 25 bp, Saccharomyces pastorianus
gttactacttagtgtgcgtgctcaa

SEQ ID NO: 171241 - DNA, 25 bp, Saccharomyces pastorianus
cctcactatgcctttcttttatttg

SEQ ID NO: 171242 - DNA, 25 bp, Saccharomyces pastorianus
aaatgaacgttgttactacttagtg

SEQ ID NO: 171243 - DNA, 25 bp, Saccharomyces pastorianus
tttgtttcgtccgtacgctttactg

SEQ ID NO: 171244 - DNA, 25 bp, Saccharomyces pastorianus
tactacttagtgtgcgtgctcaagt

SEQ ID NO: 171245 - DNA, 25 bp, Saccharomyces pastorianus
aatactcctaccttctgtttcttat

SEQ ID NO: 171246 - DNA, 25 bp, Saccharomyces pastorianus
ccttctgtttcttatgtttcattat

SEQ ID NO: 171247 - DNA, 25 bp, Saccharomyces pastorianus
ttaggtttgatgactgtatctcaat

SEQ ID NO: 171248 - DNA, 25 bp, Saccharomyces pastorianus
ctaccttctgtttcttatgtttcat

SEQ ID NO: 171249 - DNA, 25 bp, Saccharomyces pastorianus
actcctaccttctgtttcttatgtt

SEQ ID NO: 171250 - DNA, 25 bp, Saccharomyces pastorianus
tacataataatactcctaccttctg

SEQ ID NO: 171251 - DNA, 25 bp, Saccharomyces pastorianus
aataatactcctaccttctgtttct

SEQ ID NO: 171252 - DNA, 25 bp, Saccharomyces pastorianus
attatcaatccctgcatttcgcttc

SEQ ID NO: 171253 - DNA, 25 bp, Saccharomyces pastorianus
ttcgcttccattaggtttgatgact

SEQ ID NO: 171254 - DNA, 25 bp, Saccharomyces pastorianus
gcatttcgcttccattaggtttgat

SEQ ID NO: 171255 - DNA, 25 bp, Saccharomyces pastorianus
aatccctgcatttcgcttccattag

SEQ ID NO: 171256 - DNA, 25 bp, Saccharomyces pastorianus
gtaactagaaccattttccgtcatt

SEQ ID NO: 171257 - DNA, 25 bp, Saccharomyces pastorianus
ttaacagtaacggatgcacatctag

SEQ ID NO: 171258 - DNA, 25 bp, Saccharomyces pastorianus
gtagagggaatgcaactccacttgg

SEQ ID NO: 171259 - DNA, 25 bp, Saccharomyces pastorianus
agggaatgcaactccacttggtatt

SEQ ID NO: 171260 - DNA, 25 bp, Saccharomyces pastorianus
taacactaagaggtggtaactagaa

SEQ ID NO: 171261 - DNA, 25 bp, Saccharomyces pastorianus
aactccacttggtattaacactaag

SEQ ID NO: 171262 - DNA, 25 bp, Saccharomyces pastorianus
gaaccattttccgtcatttatggaa

SEQ ID NO: 171263 - DNA, 25 bp, Saccharomyces pastorianus
gaacataagttcacttggactttgg

SEQ ID NO: 171264 - DNA, 25 bp, Saccharomyces pastorianus
tccgtcatttatggaattttatcga

SEQ ID NO: 171265 - DNA, 25 bp, Saccharomyces pastorianus
ggaattttatcgaaggtgttcatta

SEQ ID NO: 171266 - DNA, 25 bp, Saccharomyces pastorianus
acggatgcacatctagtagagggaa

SEQ ID NO: 171267 - DNA, 25 bp, Saccharomyces pastorianus
agacaagaccatcgccacgtcgggt

SEQ ID NO: 171268 - DNA, 25 bp, Saccharomyces pastorianus
cgggtcacgatttgtacgggcgcaa

SEQ ID NO: 171269 - DNA, 25 bp, Saccharomyces pastorianus
tggcgaaagagctgtgtatgagaac

SEQ ID NO: 171270 - DNA, 25 bp, Saccharomyces pastorianus
ctattaacaagatcatacacggtgg

SEQ ID NO: 171271 - DNA, 25 bp, Saccharomyces pastorianus
acgagaccggtgtcattaagaactt

SEQ ID NO: 171272 - DNA, 25 bp, Saccharomyces pastorianus
gtatgagaacaacgagaccggtgtc

SEQ ID NO: 171273 - DNA, 25 bp, Saccharomyces pastorianus
cttggaattgcaaaagcccaccatc

SEQ ID NO: 171274 - DNA, 25 bp, Saccharomyces pastorianus
accggtgtcattaagaacttggaat

SEQ ID NO: 171275 - DNA, 25 bp, Saccharomyces pastorianus
ggaacgcagacaagaccatcgccac

SEQ ID NO: 171276 - DNA, 25 bp, Saccharomyces pastorianus
gtacgggcgcaagaacactattaac

SEQ ID NO: 171277 - DNA, 25 bp, Saccharomyces pastorianus
tcgccacgtcgggtcacgatttgta

SEQ ID NO: 171278 - DNA, 25 bp, Saccharomyces pastorianus
agtagctgaaacaggcaccaggcca

SEQ ID NO: 171279 - DNA, 25 bp, Saccharomyces pastorianus
gactcatacattaccatcactgaag

SEQ ID NO: 171280 - DNA, 25 bp, Saccharomyces pastorianus
tcgtctgtatcttcgtctggttcat

SEQ ID NO: 171281 - DNA, 25 bp, Saccharomyces pastorianus
gggtaccacagttacattgactcaa

SEQ ID NO: 171282 - DNA, 25 bp, Saccharomyces pastorianus
gtgcgccaacgtccatgtgggtcac

SEQ ID NO: 171283 - DNA, 25 bp, Saccharomyces pastorianus
tgtctgctgtcactagtctatctat

SEQ ID NO: 171284 - DNA, 25 bp, Saccharomyces pastorianus
acagacttcacagaacctcctgtgt

SEQ ID NO: 171285 - DNA, 25 bp, Saccharomyces pastorianus
gaccacatcgacagggagcgcagta

SEQ ID NO: 171286 - DNA, 25 bp, Saccharomyces pastorianus
aaacgttcacacattctagcaccag

SEQ ID NO: 171287 - DNA, 25 bp, Saccharomyces pastorianus
gaaggtacaacctccacttacacaa

SEQ ID NO: 171288 - DNA, 25 bp, Saccharomyces pastorianus
ggttcatcctccagtgtaaagacga

SEQ ID NO: 171289 - DNA, 25 bp, Saccharomyces pastorianus
gctagcaccagtgaacatcaattta

SEQ ID NO: 171290 - DNA, 25 bp, Saccharomyces pastorianus
actgctacggtggttctgcaagaaa

SEQ ID NO: 171291 - DNA, 25 bp, Saccharomyces pastorianus
gaaagattttctggcatttgcttat

SEQ ID NO: 171292 - DNA, 25 bp, Saccharomyces pastorianus
aaatgtgccagaaaacttttgaaag

SEQ ID NO: 171293 - DNA, 25 bp, Saccharomyces pastorianus
gaaagcgtcttcaattatattaaaa

SEQ ID NO: 171294 - DNA, 25 bp, Saccharomyces pastorianus
aatcgactccaaatcaaactcagaa

SEQ ID NO: 171295 - DNA, 25 bp, Saccharomyces pastorianus
agcgccactttaacaaatgtgccag

SEQ ID NO: 171296 - DNA, 25 bp, Saccharomyces pastorianus
gaaagaagcaatcgactccaaatca

SEQ ID NO: 171297 - DNA, 25 bp, Saccharomyces pastorianus
gcatttgcttattgaaagcgtcttc

SEQ ID NO: 171298 - DNA, 25 bp, Saccharomyces pastorianus
aactcagaaactgctacggtggttc

SEQ ID NO: 171299 - DNA, 25 bp, Saccharomyces pastorianus
atttactgctattaagcgccacttt

SEQ ID NO: 171300 - DNA, 25 bp, Saccharomyces pastorianus
caccaagtcctgtgcgagtgctgca

SEQ ID NO: 171301 - DNA, 25 bp, Saccharomyces pastorianus
attagtgaccgaacttcttgcacca

SEQ ID NO: 171302 - DNA, 25 bp, Saccharomyces pastorianus
agtgaccgaacttcttgcaccaagt

SEQ ID NO: 171303 - DNA, 25 bp, Saccharomyces pastorianus
tgaccgaacttcttgcaccaagtcc

SEQ ID NO: 171304 - DNA, 25 bp, Saccharomyces pastorianus
cattagtgaccgaacttcttgcacc

SEQ ID NO: 171305 - DNA, 25 bp, Saccharomyces pastorianus
gtgaccgaacttcttgcaccaagtc

SEQ ID NO: 171306 - DNA, 25 bp, Saccharomyces pastorianus
gcaccaagtcctgtgcgagtgctgc

SEQ ID NO: 171307 - DNA, 25 bp, Saccharomyces pastorianus
tagtgaccgaacttcttgcaccaag

SEQ ID NO: 171308 - DNA, 25 bp, Saccharomyces pastorianus
ttagtgaccgaacttcttgcaccaa

SEQ ID NO: 171309 - DNA, 25 bp, Saccharomyces pastorianus
tcattagtgaccgaacttcttgcac

SEQ ID NO: 171310 - DNA, 25 bp, Saccharomyces pastorianus
tgcaccaagtcctgtgcgagtgctg

SEQ ID NO: 171311 - DNA, 25 bp, Saccharomyces pastorianus
tgtgttcctaattatatttgcgcac

SEQ ID NO: 171312 - DNA, 25 bp, Saccharomyces pastorianus
attatatttgcgcacagtgacagtg

SEQ ID NO: 171313 - DNA, 25 bp, Saccharomyces pastorianus
cctgtgttcctaattatatttgcgc

SEQ ID NO: 171314 - DNA, 25 bp, Saccharomyces pastorianus
acagtgcggcaattgatatgtcagg

SEQ ID NO: 171315 - DNA, 25 bp, Saccharomyces pastorianus
gtgttcctaattatatttgcgcaca

SEQ ID NO: 171316 - DNA, 25 bp, Saccharomyces pastorianus
cacagtgacagtgcggcaattgata

SEQ ID NO: 171317 - DNA, 25 bp, Saccharomyces pastorianus
ctaattatatttgcgcacagtgaca

SEQ ID NO: 171318 - DNA, 25 bp, Saccharomyces pastorianus
atttgcgcacagtgacagtgcggca

SEQ ID NO: 171319 - DNA, 25 bp, Saccharomyces pastorianus
ctgtgttcctaattatatttgcgca

SEQ ID NO: 171320 - DNA, 25 bp, Saccharomyces pastorianus
gttcctaattatatttgcgcacagt

SEQ ID NO: 171321 - DNA, 25 bp, Saccharomyces pastorianus
tcctaattatatttgcgcacagtga

SEQ ID NO: 171322 - DNA, 25 bp, Saccharomyces pastorianus
ggcaatccagagcatagcacaatct

SEQ ID NO: 171323 - DNA, 25 bp, Saccharomyces pastorianus
gcggaagcattcttgctccgtcata

SEQ ID NO: 171324 - DNA, 25 bp, Saccharomyces pastorianus
tttacatccgcggaagcattcttgc

SEQ ID NO: 171325 - DNA, 25 bp, Saccharomyces pastorianus
agcacaatcttttacatccgcggaa

SEQ ID NO: 171326 - DNA, 25 bp, Saccharomyces pastorianus
tacatccgcggaagcattcttgctc

SEQ ID NO: 171327 - DNA, 25 bp, Saccharomyces pastorianus
gagggcaatccagagcatagcacaa

SEQ ID NO: 171328 - DNA, 25 bp, Saccharomyces pastorianus
acaatcttttacatccgcggaagca

SEQ ID NO: 171329 - DNA, 25 bp, Saccharomyces pastorianus
atagcacaatcttttacatccgcgg

SEQ ID NO: 171330 - DNA, 25 bp, Saccharomyces pastorianus
ttgctccgtcatatttccttccgga

SEQ ID NO: 171331 - DNA, 25 bp, Saccharomyces pastorianus
tccgtcatatttccttccggacttc

SEQ ID NO: 171332 - DNA, 25 bp, Saccharomyces pastorianus
aagcattcttgctccgtcatatttc

SEQ ID NO: 171333 - DNA, 25 bp, Saccharomyces pastorianus
aaaattccaacccacaggcaacatt

SEQ ID NO: 171334 - DNA, 25 bp, Saccharomyces pastorianus
gaagcccttcacgtagttgaaacag

SEQ ID NO: 171335 - DNA, 25 bp, Saccharomyces pastorianus
ttttgatacaccaatcacgtctcgc

SEQ ID NO: 171336 - DNA, 25 bp, Saccharomyces pastorianus
gcttacgccagcaatactgtggtag

SEQ ID NO: 171337 - DNA, 25 bp, Saccharomyces pastorianus
agcagtgaacactctgacctacaga

SEQ ID NO: 171338 - DNA, 25 bp, Saccharomyces pastorianus
cttggtattcaagccatctacgagg

SEQ ID NO: 171339 - DNA, 25 bp, Saccharomyces pastorianus
atttttcaccgccacacattctgtg

SEQ ID NO: 171340 - DNA, 25 bp, Saccharomyces pastorianus
cggagaattcagttgcttacgccag

SEQ ID NO: 171341 - DNA, 25 bp, Saccharomyces pastorianus
aatcacgtctcgcaatttttcaccg

SEQ ID NO: 171342 - DNA, 25 bp, Saccharomyces pastorianus
gaagaatacttctacttggactaaa

SEQ ID NO: 171343 - DNA, 25 bp, Saccharomyces pastorianus
atatcaccattgagaagcccttcac

SEQ ID NO: 171344 - DNA, 25 bp, Saccharomyces pastorianus
tgtacccaaaagtttagctcaccta

SEQ ID NO: 171345 - DNA, 25 bp, Saccharomyces pastorianus
ttcgtcatcatcgtcgacattatcg

SEQ ID NO: 171346 - DNA, 25 bp, Saccharomyces pastorianus
tacccaaaagtttagctcacctatt

SEQ ID NO: 171347 - DNA, 25 bp, Saccharomyces pastorianus
gtacccaaaagtttagctcacctat

SEQ ID NO: 171348 - DNA, 25 bp, Saccharomyces pastorianus
tctgtacccaaaagtttagctcacc

SEQ ID NO: 171349 - DNA, 25 bp, Saccharomyces pastorianus
ctgtacccaaaagtttagctcacct

SEQ ID NO: 171350 - DNA, 25 bp, Saccharomyces pastorianus
gacctctgtacccaaaagtttagct

SEQ ID NO: 171351 - DNA, 25 bp, Saccharomyces pastorianus
cctctgtacccaaaagtttagctca

SEQ ID NO: 171352 - DNA, 25 bp, Saccharomyces pastorianus
cttcgtcatcatcgtcgacattatc

SEQ ID NO: 171353 - DNA, 25 bp, Saccharomyces pastorianus
ctctgtacccaaaagtttagctcac

SEQ ID NO: 171354 - DNA, 25 bp, Saccharomyces pastorianus
aagacccgaagtgcggaccggcatg

SEQ ID NO: 171355 - DNA, 25 bp, Saccharomyces pastorianus
ggactttaccccagatttgtagttg

SEQ ID NO: 171356 - DNA, 25 bp, Saccharomyces pastorianus
gtttcccttgtttcggcattagaag

SEQ ID NO: 171357 - DNA, 25 bp, Saccharomyces pastorianus
atgcagtaacacacggcgggccgaa

SEQ ID NO: 171358 - DNA, 25 bp, Saccharomyces pastorianus
agaggcatttcgcacgttttaccgg

SEQ ID NO: 171359 - DNA, 25 bp, Saccharomyces pastorianus
agctgactcatctgtgattttccgt

SEQ ID NO: 171360 - DNA, 25 bp, Saccharomyces pastorianus
ggaaatcacgaagctgactcatctg

SEQ ID NO: 171361 - DNA, 25 bp, Saccharomyces pastorianus
ttccgtccccaccatagtgatgtaa

SEQ ID NO: 171362 - DNA, 25 bp, Saccharomyces pastorianus
gaagtatactgcaagcatcaccgaa

SEQ ID NO: 171363 - DNA, 25 bp, Saccharomyces pastorianus
atcctattggatcacgggcgacaga

SEQ ID NO: 171364 - DNA, 25 bp, Saccharomyces pastorianus
accggcatggtcagcttgcacggaa

SEQ ID NO: 171365 - DNA, 25 bp, Saccharomyces pastorianus
tgcgaggccacgaagtaatctgtct

SEQ ID NO: 171366 - DNA, 25 bp, Saccharomyces pastorianus
aacgaccatcccaacagagttttgg

SEQ ID NO: 171367 - DNA, 25 bp, Saccharomyces pastorianus
gaaaacgaccatcccaacagagttt

SEQ ID NO: 171368 - DNA, 25 bp, Saccharomyces pastorianus
gaggccacgaagtaatctgtcttga

SEQ ID NO: 171369 - DNA, 25 bp, Saccharomyces pastorianus
tatgcttcttctaacttgcgaggcc

SEQ ID NO: 171370 - DNA, 25 bp, Saccharomyces pastorianus
gaagtaatctgtcttgaagcaagtt

SEQ ID NO: 171371 - DNA, 25 bp, Saccharomyces pastorianus
ggccacgaagtaatctgtcttgaag

SEQ ID NO: 171372 - DNA, 25 bp, Saccharomyces pastorianus
ttctaacttgcgaggccacgaagta

SEQ ID NO: 171373 - DNA, 25 bp, Saccharomyces pastorianus
ttcttctaacttgcgaggccacgaa

SEQ ID NO: 171374 - DNA, 25 bp, Saccharomyces pastorianus
gaagaaaacgaccatcccaacagag

SEQ ID NO: 171375 - DNA, 25 bp, Saccharomyces pastorianus
caacagagttttgggacatttacac

SEQ ID NO: 171376 - DNA, 25 bp, Saccharomyces pastorianus
actagcgaggctcactcttccagtg

SEQ ID NO: 171377 - DNA, 25 bp, Saccharomyces pastorianus
tagcaaggcttgttccaccgaatcc

SEQ ID NO: 171378 - DNA, 25 bp, Saccharomyces pastorianus
gccgttatttctactttctctgaag

SEQ ID NO: 171379 - DNA, 25 bp, Saccharomyces pastorianus
aagaatcctcttccacttatgtctc

SEQ ID NO: 171380 - DNA, 25 bp, Saccharomyces pastorianus
tgccccatcttctagcaaggcttgt

SEQ ID NO: 171381 - DNA, 25 bp, Saccharomyces pastorianus
tatgtctcttcgagcaagcaagctt

SEQ ID NO: 171382 - DNA, 25 bp, Saccharomyces pastorianus
tcttcgaccgtgtcccaagaaacag

SEQ ID NO: 171383 - DNA, 25 bp, Saccharomyces pastorianus
accaaggctccttccagtgaagaat

SEQ ID NO: 171384 - DNA, 25 bp, Saccharomyces pastorianus
tctaccaacttctaccgccgttatt

SEQ ID NO: 171385 - DNA, 25 bp, Saccharomyces pastorianus
caagaaacagtctcctctgctctac

SEQ ID NO: 171386 - DNA, 25 bp, Saccharomyces pastorianus
aagcaagcttcctccactagcgagg

SEQ ID NO: 171387 - DNA, 25 bp, Saccharomyces pastorianus
tattgctctcaaaactgtatctcat

SEQ ID NO: 171388 - DNA, 25 bp, Saccharomyces pastorianus
tgcaatccttgctttcgtaatctaa

SEQ ID NO: 171389 - DNA, 25 bp, Saccharomyces pastorianus
gtgacatgctaaatccgcggctttc

SEQ ID NO: 171390 - DNA, 25 bp, Saccharomyces pastorianus
ttcgtaatctaagtgtgggtgacat

SEQ ID NO: 171391 - DNA, 25 bp, Saccharomyces pastorianus
ttaagctttttcacaaaccatctat

SEQ ID NO: 171392 - DNA, 25 bp, Saccharomyces pastorianus
taaatccgcggctttccttaagctt

SEQ ID NO: 171393 - DNA, 25 bp, Saccharomyces pastorianus
ttttttctgcaatccttgctttcgt

SEQ ID NO: 171394 - DNA, 25 bp, Saccharomyces pastorianus
aaaccatctattatgtccagaagct

SEQ ID NO: 171395 - DNA, 25 bp, Saccharomyces pastorianus
gcggctttccttaagctttttcaca

SEQ ID NO: 171396 - DNA, 25 bp, Saccharomyces pastorianus
tgggtgacatgctaaatccgcggct

SEQ ID NO: 171397 - DNA, 25 bp, Saccharomyces pastorianus
gctctcaaaactgtatctcatcttt

SEQ ID NO: 171398 - DNA, 25 bp, Saccharomyces pastorianus
tatttcactgctccatcctctgaac

SEQ ID NO: 171399 - DNA, 25 bp, Saccharomyces pastorianus
ttatttcactgctccatcctctgaa

SEQ ID NO: 171400 - DNA, 25 bp, Saccharomyces pastorianus
ctgaacgtcgtgttttgttatctgc

SEQ ID NO: 171401 - DNA, 25 bp, Saccharomyces pastorianus
actgctccatcctctgaacgtcgtg

SEQ ID NO: 171402 - DNA, 25 bp, Saccharomyces pastorianus
tggtatcaaggctttgccaatcaga

SEQ ID NO: 171403 - DNA, 25 bp, Saccharomyces pastorianus
tcaatagacgtttcctctgacagaa

SEQ ID NO: 171404 - DNA, 25 bp, Saccharomyces pastorianus
atttcactgctccatcctctgaacg

SEQ ID NO: 171405 - DNA, 25 bp, Saccharomyces pastorianus
atccaaggaattgagagctcaatat

SEQ ID NO: 171406 - DNA, 25 bp, Saccharomyces pastorianus
aggccagaaaggcttatttcactgc

SEQ ID NO: 171407 - DNA, 25 bp, Saccharomyces pastorianus
ctgctccatcctctgaacgtcgtgt

SEQ ID NO: 171408 - DNA, 25 bp, Saccharomyces pastorianus
tttcactgctccatcctctgaacgt

SEQ ID NO: 171409 - DNA, 25 bp, Saccharomyces pastorianus
tatttcgcattgtggcattgcccat

SEQ ID NO: 171410 - DNA, 25 bp, Saccharomyces pastorianus
tttcccgatgaagtggttgccgcaa

SEQ ID NO: 171411 - DNA, 25 bp, Saccharomyces pastorianus
gaaatcgacctttacaatcttaata

SEQ ID NO: 171412 - DNA, 25 bp, Saccharomyces pastorianus
ttctggtaatgtcttggctgccgca

SEQ ID NO: 171413 - DNA, 25 bp, Saccharomyces pastorianus
aagacgtgcaaattgtcatccacat

SEQ ID NO: 171414 - DNA, 25 bp, Saccharomyces pastorianus
gatacaagcattgaactcgggtaca

SEQ ID NO: 171415 - DNA, 25 bp, Saccharomyces pastorianus
tatgcacttcttctcattttcccga

SEQ ID NO: 171416 - DNA, 25 bp, Saccharomyces pastorianus
gggtacaacctcgatttccatgtat

SEQ ID NO: 171417 - DNA, 25 bp, Saccharomyces pastorianus
agaacctgccctttatttcgcattg

SEQ ID NO: 171418 - DNA, 25 bp, Saccharomyces pastorianus
aaggctcttatggtctgctatgcac

SEQ ID NO: 171419 - DNA, 25 bp, Saccharomyces pastorianus
tcatccacataactcagatccatct

SEQ ID NO: 171420 - DNA, 25 bp, Saccharomyces pastorianus
gtccatctaataccatatattttga

SEQ ID NO: 171421 - DNA, 25 bp, Saccharomyces pastorianus
ttctgaagttttgtacttttaccag

SEQ ID NO: 171422 - DNA, 25 bp, Saccharomyces pastorianus
gtctttgacagtaacttatcatcag

SEQ ID NO: 171423 - DNA, 25 bp, Saccharomyces pastorianus
taccagtccatctaataccatatat

SEQ ID NO: 171424 - DNA, 25 bp, Saccharomyces pastorianus
agtaacttatcatcaggactgttgg

SEQ ID NO: 171425 - DNA, 25 bp, Saccharomyces pastorianus
cttatcatcaggactgttggaataa

SEQ ID NO: 171426 - DNA, 25 bp, Saccharomyces pastorianus
gttttgtacttttaccagtccatct

SEQ ID NO: 171427 - DNA, 25 bp, Saccharomyces pastorianus
tgataataattatgtctttgacagt

SEQ ID NO: 171428 - DNA, 25 bp, Saccharomyces pastorianus
ttgacagtaacttatcatcaggact

SEQ ID NO: 171429 - DNA, 25 bp, Saccharomyces pastorianus
gtacttttaccagtccatctaatac

SEQ ID NO: 171430 - DNA, 25 bp, Saccharomyces pastorianus
ttttaccagtccatctaataccata

SEQ ID NO: 171431 - DNA, 25 bp, Saccharomyces pastorianus
aagggagtcgataaatctatataat

SEQ ID NO: 171432 - DNA, 25 bp, Saccharomyces pastorianus
tacgttgtcgtttattatcctatta

SEQ ID NO: 171433 - DNA, 25 bp, Saccharomyces pastorianus
cacaaaagggagtcgataaatctat

SEQ ID NO: 171434 - DNA, 25 bp, Saccharomyces pastorianus
atcattcttcgcatttcagctttca

SEQ ID NO: 171435 - DNA, 25 bp, Saccharomyces pastorianus
cgttatcattcttcgcatttcagct

SEQ ID NO: 171436 - DNA, 25 bp, Saccharomyces pastorianus
tcttctttcgttttatacgttgtcg

SEQ ID NO: 171437 - DNA, 25 bp, Saccharomyces pastorianus
atacgttgtcgtttattatcctatt

SEQ ID NO: 171438 - DNA, 25 bp, Saccharomyces pastorianus
acgttatcattcttcgcatttcagc

SEQ ID NO: 171439 - DNA, 25 bp, Saccharomyces pastorianus
cctattacgttatcattcttcgcat

SEQ ID NO: 171440 - DNA, 25 bp, Saccharomyces pastorianus
ttacgttatcattcttcgcatttca

SEQ ID NO: 171441 - DNA, 25 bp, Saccharomyces pastorianus
tacgttatcattcttcgcatttcag

SEQ ID NO: 171442 - DNA, 25 bp, Saccharomyces pastorianus
tggaaaagattcacggtcaccctgc

SEQ ID NO: 171443 - DNA, 25 bp, Saccharomyces pastorianus
gatgatgctaaatgcgctaaagtta

SEQ ID NO: 171444 - DNA, 25 bp, Saccharomyces pastorianus
gttatagatcagctgtacatctgct

SEQ ID NO: 171445 - DNA, 25 bp, Saccharomyces pastorianus
atgtctaatccatgccagaaggagg

SEQ ID NO: 171446 - DNA, 25 bp, Saccharomyces pastorianus
ttcactaacgttttttcacattaat

SEQ ID NO: 171447 - DNA, 25 bp, Saccharomyces pastorianus
attgccttctatcacatcagtacga

SEQ ID NO: 171448 - DNA, 25 bp, Saccharomyces pastorianus
agaaggaggcctgcgccatccaagg

SEQ ID NO: 171449 - DNA, 25 bp, Saccharomyces pastorianus
tcacattaattttagattgccttct

SEQ ID NO: 171450 - DNA, 25 bp, Saccharomyces pastorianus
ctgcgccatccaaggtttgtaatat

SEQ ID NO: 171451 - DNA, 25 bp, Saccharomyces pastorianus
gctaccttcgcttcttgagttgaag

SEQ ID NO: 171452 - DNA, 25 bp, Saccharomyces pastorianus
gctgtacatctgctgctcaaaattt

SEQ ID NO: 171453 - DNA, 25 bp, Saccharomyces pastorianus
ggccaagaaatcgatggacatcaac

SEQ ID NO: 171454 - DNA, 25 bp, Saccharomyces pastorianus
agcaatctttttgagcggcacagcc

SEQ ID NO: 171455 - DNA, 25 bp, Saccharomyces pastorianus
ctttttgagcggcacagcccctgag

SEQ ID NO: 171456 - DNA, 25 bp, Saccharomyces pastorianus
ctggccaagaaatcgatggacatca

SEQ ID NO: 171457 - DNA, 25 bp, Saccharomyces pastorianus
gcaatctttttgagcggcacagccc

SEQ ID NO: 171458 - DNA, 25 bp, Saccharomyces pastorianus
ttttgagcggcacagcccctgaggc

SEQ ID NO: 171459 - DNA, 25 bp, Saccharomyces pastorianus
tgggcttacgggactggccaagaaa

SEQ ID NO: 171460 - DNA, 25 bp, Saccharomyces pastorianus
gcacagcccctgaggctgtagctga

SEQ ID NO: 171461 - DNA, 25 bp, Saccharomyces pastorianus
ccctgaggctgtagctgatgctgcg

SEQ ID NO: 171462 - DNA, 25 bp, Saccharomyces pastorianus
tttttgagcggcacagcccctgagg

SEQ ID NO: 171463 - DNA, 25 bp, Saccharomyces pastorianus
tacgggactggccaagaaatcgatg

SEQ ID NO: 171464 - DNA, 25 bp, Saccharomyces pastorianus
ttgtctcaatatttacctatttctc

SEQ ID NO: 171465 - DNA, 25 bp, Saccharomyces pastorianus
tttacctatttctcacattgtcacc

SEQ ID NO: 171466 - DNA, 25 bp, Saccharomyces pastorianus
gctcgaaagtgcattttgttggaat

SEQ ID NO: 171467 - DNA, 25 bp, Saccharomyces pastorianus
ttgtcaccgctcgaaagtgcatttt

SEQ ID NO: 171468 - DNA, 25 bp, Saccharomyces pastorianus
tatttctcacattgtcaccgctcga

SEQ ID NO: 171469 - DNA, 25 bp, Saccharomyces pastorianus
tctcacattgtcaccgctcgaaagt

SEQ ID NO: 171470 - DNA, 25 bp, Saccharomyces pastorianus
ttacctatttctcacattgtcaccg

SEQ ID NO: 171471 - DNA, 25 bp, Saccharomyces pastorianus
tttctcacattgtcaccgctcgaaa

SEQ ID NO: 171472 - DNA, 25 bp, Saccharomyces pastorianus
gtcaccgctcgaaagtgcattttgt

SEQ ID NO: 171473 - DNA, 25 bp, Saccharomyces pastorianus
acattgtcaccgctcgaaagtgcat

SEQ ID NO: 171474 - DNA, 25 bp, Saccharomyces pastorianus
accgctcgaaagtgcattttgttgg

SEQ ID NO: 171475 - DNA, 25 bp, Saccharomyces pastorianus
tggtgctactccaattgccggtaga

SEQ ID NO: 171476 - DNA, 25 bp, Saccharomyces pastorianus
gattagacgctcaagccatcaagga

SEQ ID NO: 171477 - DNA, 25 bp, Saccharomyces pastorianus
tgctttgactgatttggactcccca

SEQ ID NO: 171478 - DNA, 25 bp, Saccharomyces pastorianus
catcccagtcattgctttgactgat

SEQ ID NO: 171479 - DNA, 25 bp, Saccharomyces pastorianus
atacgttttcaatgctagaccagac

SEQ ID NO: 171480 - DNA, 25 bp, Saccharomyces pastorianus
gaagcttcttacgttaacatcccag

SEQ ID NO: 171481 - DNA, 25 bp, Saccharomyces pastorianus
tgtcactgacccaagattagacgct

SEQ ID NO: 171482 - DNA, 25 bp, Saccharomyces pastorianus
tagttattgtcactgacccaagatt

SEQ ID NO: 171483 - DNA, 25 bp, Saccharomyces pastorianus
ggactccccatctggattcgttgat

SEQ ID NO: 171484 - DNA, 25 bp, Saccharomyces pastorianus
gctgtcttgaagtttgctgctcaca

SEQ ID NO: 171485 - DNA, 25 bp, Saccharomyces pastorianus
tgctagaccagacggtgttcacgtt

SEQ ID NO: 171486 - DNA, 25 bp, Saccharomyces pastorianus
atttaccatgattctacgtttttgc

SEQ ID NO: 171487 - DNA, 25 bp, Saccharomyces pastorianus
gaattcttcatgtgatttaccatga

SEQ ID NO: 171488 - DNA, 25 bp, Saccharomyces pastorianus
tttaccatgattctacgtttttgca

SEQ ID NO: 171489 - DNA, 25 bp, Saccharomyces pastorianus
gtgatttaccatgattctacgtttt

SEQ ID NO: 171490 - DNA, 25 bp, Saccharomyces pastorianus
gagaattcttcatgtgatttaccat

SEQ ID NO: 171491 - DNA, 25 bp, Saccharomyces pastorianus
taccatgattctacgtttttgcaag

SEQ ID NO: 171492 - DNA, 25 bp, Saccharomyces pastorianus
aagagaattcttcatgtgatttacc

SEQ ID NO: 171493 - DNA, 25 bp, Saccharomyces pastorianus
ccatgattctacgtttttgcaagca

SEQ ID NO: 171494 - DNA, 25 bp, Saccharomyces pastorianus
gatttaccatgattctacgtttttg

SEQ ID NO: 171495 - DNA, 25 bp, Saccharomyces pastorianus
tgtgatttaccatgattctacgttt

SEQ ID NO: 171496 - DNA, 25 bp, Saccharomyces pastorianus
accatgattctacgtttttgcaagc

SEQ ID NO: 171497 - DNA, 25 bp, Saccharomyces pastorianus
tggtaccgccggttacaacgataat

SEQ ID NO: 171498 - DNA, 25 bp, Saccharomyces pastorianus
gaagtcaggaaactcgactgctcct

SEQ ID NO: 171499 - DNA, 25 bp, Saccharomyces pastorianus
atcgaagtcggatttactatttgta

SEQ ID NO: 171500 - DNA, 25 bp, Saccharomyces pastorianus
tactatttgtatccgtctgctgttt

SEQ ID NO: 171501 - DNA, 25 bp, Saccharomyces pastorianus
ggaaactcgactgctcctggtaccg

SEQ ID NO: 171502 - DNA, 25 bp, Saccharomyces pastorianus
gctaaacccgtctcaagttacattt

SEQ ID NO: 171503 - DNA, 25 bp, Saccharomyces pastorianus
agttacatttcccatgaaggccctc

SEQ ID NO: 171504 - DNA, 25 bp, Saccharomyces pastorianus
aatttggcacaagctaaacccgtct

SEQ ID NO: 171505 - DNA, 25 bp, Saccharomyces pastorianus
agcttcagaaggaggttgacaacca

SEQ ID NO: 171506 - DNA, 25 bp, Saccharomyces pastorianus
ccgtctgctgtttgatggttgcttt

SEQ ID NO: 171507 - DNA, 25 bp, Saccharomyces pastorianus
tgaaggccctcccaaagacgaactg

SEQ ID NO: 171508 - DNA, 25 bp, Saccharomyces pastorianus
acttctgacatatctttttctgtta

SEQ ID NO: 171509 - DNA, 25 bp, Saccharomyces pastorianus
gatattttacatccgctcctaatct

SEQ ID NO: 171510 - DNA, 25 bp, Saccharomyces pastorianus
gagacacgtctcatactgttaaata

SEQ ID NO: 171511 - DNA, 25 bp, Saccharomyces pastorianus
atagctggccactttgaaacttctg

SEQ ID NO: 171512 - DNA, 25 bp, Saccharomyces pastorianus
gaaccattttcaccaacgacatgtg

SEQ ID NO: 171513 - DNA, 25 bp, Saccharomyces pastorianus
tcgttagtcgagtgttctgaagata

SEQ ID NO: 171514 - DNA, 25 bp, Saccharomyces pastorianus
acatgtgaaactgtaccgttgtacc

SEQ ID NO: 171515 - DNA, 25 bp, Saccharomyces pastorianus
taacgttcgactttcgagacacgtc

SEQ ID NO: 171516 - DNA, 25 bp, Saccharomyces pastorianus
ttctgttagtttattcgttagtcga

SEQ ID NO: 171517 - DNA, 25 bp, Saccharomyces pastorianus
tccgtgccgtgtcgcaaatcattaa

SEQ ID NO: 171518 - DNA, 25 bp, Saccharomyces pastorianus
taatctgcacatgcggagggcttaa

SEQ ID NO: 171519 - DNA, 25 bp, Saccharomyces pastorianus
agaagcaaaaccataaacgcaaatt

SEQ ID NO: 171520 - DNA, 25 bp, Saccharomyces pastorianus
gcaaagcgtcaatcaagtaagagaa

SEQ ID NO: 171521 - DNA, 25 bp, Saccharomyces pastorianus
taaacgcaaatttctcggcagggcc

SEQ ID NO: 171522 - DNA, 25 bp, Saccharomyces pastorianus
ggctccattgcaaagcgtcaatcaa

SEQ ID NO: 171523 - DNA, 25 bp, Saccharomyces pastorianus
acgcaaatttctcggcagggccagg

SEQ ID NO: 171524 - DNA, 25 bp, Saccharomyces pastorianus
aacgcatattggctccattgcaaag

SEQ ID NO: 171525 - DNA, 25 bp, Saccharomyces pastorianus
aatttctcggcagggccaggaacaa

SEQ ID NO: 171526 - DNA, 25 bp, Saccharomyces pastorianus
ggccaggaacaactgccttgcttat

SEQ ID NO: 171527 - DNA, 25 bp, Saccharomyces pastorianus
atattggctccattgcaaagcgtca

SEQ ID NO: 171528 - DNA, 25 bp, Saccharomyces pastorianus
attggctccattgcaaagcgtcaat

SEQ ID NO: 171529 - DNA, 25 bp, Saccharomyces pastorianus
agggccaggaacaactgccttgctt

SEQ ID NO: 171530 - DNA, 25 bp, Saccharomyces pastorianus
tccacagagcgcgaaaagggatgcg

SEQ ID NO: 171531 - DNA, 25 bp, Saccharomyces pastorianus
ggatgcgcgaacacggcacccaaag

SEQ ID NO: 171532 - DNA, 25 bp, Saccharomyces pastorianus
aaagggatgcgcgaacacggcaccc

SEQ ID NO: 171533 - DNA, 25 bp, Saccharomyces pastorianus
aaaggcaattccacagagcgcgaaa

SEQ ID NO: 171534 - DNA, 25 bp, Saccharomyces pastorianus
gatgcgcgaacacggcacccaaagg

SEQ ID NO: 171535 - DNA, 25 bp, Saccharomyces pastorianus
caattccacagagcgcgaaaaggga

SEQ ID NO: 171536 - DNA, 25 bp, Saccharomyces pastorianus
aaggcaattccacagagcgcgaaaa

SEQ ID NO: 171537 - DNA, 25 bp, Saccharomyces pastorianus
agggatgcgcgaacacggcacccaa

SEQ ID NO: 171538 - DNA, 25 bp, Saccharomyces pastorianus
gcgcgaacacggcacccaaaggtgc

SEQ ID NO: 171539 - DNA, 25 bp, Saccharomyces pastorianus
ggcaattccacagagcgcgaaaagg

SEQ ID NO: 171540 - DNA, 25 bp, Saccharomyces pastorianus
gaacacggcacccaaaggtgcgctg

SEQ ID NO: 171541 - DNA, 25 bp, Saccharomyces pastorianus
agtaatgtcttctaatccccgacga

SEQ ID NO: 171542 - DNA, 25 bp, Saccharomyces pastorianus
ttccccaccagtaatgtcttctaat

SEQ ID NO: 171543 - DNA, 25 bp, Saccharomyces pastorianus
atcatcaagggttccccaccagtaa

SEQ ID NO: 171544 - DNA, 25 bp, Saccharomyces pastorianus
cgtgtgcgggtatggcaagcgccgt

SEQ ID NO: 171545 - DNA, 25 bp, Saccharomyces pastorianus
ttctaatccccgacgacaatatcgt

SEQ ID NO: 171546 - DNA, 25 bp, Saccharomyces pastorianus
gcgcatatatttcctattatcatca

SEQ ID NO: 171547 - DNA, 25 bp, Saccharomyces pastorianus
gagcatactgcgcatatatttccta

SEQ ID NO: 171548 - DNA, 25 bp, Saccharomyces pastorianus
tgcctcaaaaaaccccgtgtgcggg

SEQ ID NO: 171549 - DNA, 25 bp, Saccharomyces pastorianus
taagtgcctcaaaaaaccccgtgtg

SEQ ID NO: 171550 - DNA, 25 bp, Saccharomyces pastorianus
aatctccggtcaattaagtgcctca

SEQ ID NO: 171551 - DNA, 25 bp, Saccharomyces pastorianus
aatatcgtttaaatctccggtcaat

SEQ ID NO: 171552 - DNA, 25 bp, Saccharomyces pastorianus
taaagttcacggttccctagctcgt

SEQ ID NO: 171553 - DNA, 25 bp, Saccharomyces pastorianus
cggttccctagctcgtgctggtaag

SEQ ID NO: 171554 - DNA, 25 bp, Saccharomyces pastorianus
ctaaagttcacggttccctagctcg

SEQ ID NO: 171555 - DNA, 25 bp, Saccharomyces pastorianus
ttcacggttccctagctcgtgctgg

SEQ ID NO: 171556 - DNA, 25 bp, Saccharomyces pastorianus
gttcacggttccctagctcgtgctg

SEQ ID NO: 171557 - DNA, 25 bp, Saccharomyces pastorianus
aaagttcacggttccctagctcgtg

SEQ ID NO: 171558 - DNA, 25 bp, Saccharomyces pastorianus
gctggtaaggttaagtctcaaactc

SEQ ID NO: 171559 - DNA, 25 bp, Saccharomyces pastorianus
acggttccctagctcgtgctggtaa

SEQ ID NO: 171560 - DNA, 25 bp, Saccharomyces pastorianus
tgctggtaaggttaagtctcaaact

SEQ ID NO: 171561 - DNA, 25 bp, Saccharomyces pastorianus
aagttcacggttccctagctcgtgc

SEQ ID NO: 171562 - DNA, 25 bp, Saccharomyces pastorianus
tggtaaggttaagtctcaaactcca

SEQ ID NO: 171563 - DNA, 25 bp, Saccharomyces pastorianus
attttcaacgcccgcggtcgatcta

SEQ ID NO: 171564 - DNA, 25 bp, Saccharomyces pastorianus
tttggtcacgagctttctaacccaa

SEQ ID NO: 171565 - DNA, 25 bp, Saccharomyces pastorianus
cgatctaaccgcagccacaatttgg

SEQ ID NO: 171566 - DNA, 25 bp, Saccharomyces pastorianus
gtcacgagctttctaacccaactat

SEQ ID NO: 171567 - DNA, 25 bp, Saccharomyces pastorianus
aaacgaaaattcatgactctttcca

SEQ ID NO: 171568 - DNA, 25 bp, Saccharomyces pastorianus
tattctcaccgtgcgaaacgaaaat

SEQ ID NO: 171569 - DNA, 25 bp, Saccharomyces pastorianus
caactattctcaccgtgcgaaacga

SEQ ID NO: 171570 - DNA, 25 bp, Saccharomyces pastorianus
tttctaacccaactattctcaccgt

SEQ ID NO: 171571 - DNA, 25 bp, Saccharomyces pastorianus
acgagctttctaacccaactattct

SEQ ID NO: 171572 - DNA, 25 bp, Saccharomyces pastorianus
cactaatttattttcaacgcccgcg

SEQ ID NO: 171573 - DNA, 25 bp, Saccharomyces pastorianus
aagaccttaatgatgaaaagcacaa

SEQ ID NO: 171574 - DNA, 25 bp, Saccharomyces pastorianus
gtaacaaaaggcatcaccctgcaca

SEQ ID NO: 171575 - DNA, 25 bp, Saccharomyces pastorianus
atgtatgtatatatccagtacagta

SEQ ID NO: 171576 - DNA, 25 bp, Saccharomyces pastorianus
aagggtgttctcatgtagcaccact

SEQ ID NO: 171577 - DNA, 25 bp, Saccharomyces pastorianus
tgcacatatcaccatgcacgaggcg

SEQ ID NO: 171578 - DNA, 25 bp, Saccharomyces pastorianus
gtagcaccacttcacaagagtattt

SEQ ID NO: 171579 - DNA, 25 bp, Saccharomyces pastorianus
gagagttgcataggaacgtgtctaa

SEQ ID NO: 171580 - DNA, 25 bp, Saccharomyces pastorianus
aaaggcatcaccctgcacatatcac

SEQ ID NO: 171581 - DNA, 25 bp, Saccharomyces pastorianus
atgcacgaggcgcaccttccttttt

SEQ ID NO: 171582 - DNA, 25 bp, Saccharomyces pastorianus
tatccagtacagtaaataacggtaa

SEQ ID NO: 171583 - DNA, 25 bp, Saccharomyces pastorianus
ttctcatgtagcaccacttcacaag

SEQ ID NO: 171584 - DNA, 25 bp, Saccharomyces pastorianus
gaacgtgtctaaggacatatagcaa

SEQ ID NO: 171585 - DNA, 25 bp, Saccharomyces pastorianus
gggttcctcttcgtcttgtaatcct

SEQ ID NO: 171586 - DNA, 25 bp, Saccharomyces pastorianus
cgtcttgtaatccttgattgccgcc

SEQ ID NO: 171587 - DNA, 25 bp, Saccharomyces pastorianus
gtattccatttagtttctccttcaa

SEQ ID NO: 171588 - DNA, 25 bp, Saccharomyces pastorianus
aagcgccccttgtattccatttagt

SEQ ID NO: 171589 - DNA, 25 bp, Saccharomyces pastorianus
gaaaaagcgccccttgtattccatt

SEQ ID NO: 171590 - DNA, 25 bp, Saccharomyces pastorianus
agtgtaacccttctataagaccaga

SEQ ID NO: 171591 - DNA, 25 bp, Saccharomyces pastorianus
tcttcgtcttgtaatccttgattgc

SEQ ID NO: 171592 - DNA, 25 bp, Saccharomyces pastorianus
gccccttgtattccatttagtttct

SEQ ID NO: 171593 - DNA, 25 bp, Saccharomyces pastorianus
taactagttagtgtaacccttctat

SEQ ID NO: 171594 - DNA, 25 bp, Saccharomyces pastorianus
tcctcttcgtcttgtaatccttgat

SEQ ID NO: 171595 - DNA, 25 bp, Saccharomyces pastorianus
tttagtttctccttcaatgcaagac

SEQ ID NO: 171596 - DNA, 25 bp, Saccharomyces pastorianus
gtgcttctttattatcatcatctca

SEQ ID NO: 171597 - DNA, 25 bp, Saccharomyces pastorianus
ctagaagccggaacaaaagacacag

SEQ ID NO: 171598 - DNA, 25 bp, Saccharomyces pastorianus
tgttttccaagtttcctagaagccg

SEQ ID NO: 171599 - DNA, 25 bp, Saccharomyces pastorianus
tactacttcgcctgtgcttctttat

SEQ ID NO: 171600 - DNA, 25 bp, Saccharomyces pastorianus
taaaacggcgtagagccagaattta

SEQ ID NO: 171601 - DNA, 25 bp, Saccharomyces pastorianus
atccgtggcacgctaaagggtgaaa

SEQ ID NO: 171602 - DNA, 25 bp, Saccharomyces pastorianus
aagacacaggcttaaaacggcgtag

SEQ ID NO: 171603 - DNA, 25 bp, Saccharomyces pastorianus
atttcgcactcttgtgttcctggtt

SEQ ID NO: 171604 - DNA, 25 bp, Saccharomyces pastorianus
tcgcctgtgcttctttattatcatc

SEQ ID NO: 171605 - DNA, 25 bp, Saccharomyces pastorianus
agggtcttttgctatttcgcactct

SEQ ID NO: 171606 - DNA, 25 bp, Saccharomyces pastorianus
gtgccgtcggatccccgcgtgtaat

SEQ ID NO: 171607 - DNA, 25 bp, Saccharomyces pastorianus
ttcttcttccaattacgtcaagcag

SEQ ID NO: 171608 - DNA, 25 bp, Saccharomyces pastorianus
tatccgcccacatacacattctgta

SEQ ID NO: 171609 - DNA, 25 bp, Saccharomyces pastorianus
agttcaagccctacacccaaagagt

SEQ ID NO: 171610 - DNA, 25 bp, Saccharomyces pastorianus
caaagagtctctttttctctctatc

SEQ ID NO: 171611 - DNA, 25 bp, Saccharomyces pastorianus
aggtcctgcttttgattcaccggca

SEQ ID NO: 171612 - DNA, 25 bp, Saccharomyces pastorianus
gtgctctagctcctttttacataac

SEQ ID NO: 171613 - DNA, 25 bp, Saccharomyces pastorianus
atatgcataccagttcaagccctac

SEQ ID NO: 171614 - DNA, 25 bp, Saccharomyces pastorianus
gcagtgtttgactcattttctttga

SEQ ID NO: 171615 - DNA, 25 bp, Saccharomyces pastorianus
atctctctccactgtatttactgtt

SEQ ID NO: 171616 - DNA, 25 bp, Saccharomyces pastorianus
ttttttgattttctgcaggtcctgc

SEQ ID NO: 171617 - DNA, 25 bp, Saccharomyces pastorianus
ttacataacatcctacgtatccgcc

SEQ ID NO: 171618 - DNA, 25 bp, Saccharomyces pastorianus
gcgtcgtcaggagaggaacagattc

SEQ ID NO: 171619 - DNA, 25 bp, Saccharomyces pastorianus
gattacatagacaactggaccaaga

SEQ ID NO: 171620 - DNA, 25 bp, Saccharomyces pastorianus
tgaagccccaactaaaaggcgtcgt

SEQ ID NO: 171621 - DNA, 25 bp, Saccharomyces pastorianus
gaaggtttcattacccatggtgatg

SEQ ID NO: 171622 - DNA, 25 bp, Saccharomyces pastorianus
gaagcaagtgctccaggcgcaagaa

SEQ ID NO: 171623 - DNA, 25 bp, Saccharomyces pastorianus
cagagttggttcgtgaaggtttcat

SEQ ID NO: 171624 - DNA, 25 bp, Saccharomyces pastorianus
tgcccaagcaactttgaatacggat

SEQ ID NO: 171625 - DNA, 25 bp, Saccharomyces pastorianus
caggcgcaagaagagacgatagatt

SEQ ID NO: 171626 - DNA, 25 bp, Saccharomyces pastorianus
gctacagatgatgcccaagcaactt

SEQ ID NO: 171627 - DNA, 25 bp, Saccharomyces pastorianus
agagacctcgcgaagaggacaccaa

SEQ ID NO: 171628 - DNA, 25 bp, Saccharomyces pastorianus
gaatacggattcatccgaagcaaat

SEQ ID NO: 171629 - DNA, 25 bp, Saccharomyces pastorianus
atcgtttctcttggtttcatctttc

SEQ ID NO: 171630 - DNA, 25 bp, Saccharomyces pastorianus
ttccactatccaagttaccctgact

SEQ ID NO: 171631 - DNA, 25 bp, Saccharomyces pastorianus
cttggtttcatctttccactatcca

SEQ ID NO: 171632 - DNA, 25 bp, Saccharomyces pastorianus
ttgcatcgtttctcttggtttcatc

SEQ ID NO: 171633 - DNA, 25 bp, Saccharomyces pastorianus
ctttccactatccaagttaccctga

SEQ ID NO: 171634 - DNA, 25 bp, Saccharomyces pastorianus
tctcttggtttcatctttccactat

SEQ ID NO: 171635 - DNA, 25 bp, Saccharomyces pastorianus
gcatcgtttctcttggtttcatctt

SEQ ID NO: 171636 - DNA, 25 bp, Saccharomyces pastorianus
actatccaagttaccctgactctcg

SEQ ID NO: 171637 - DNA, 25 bp, Saccharomyces pastorianus
ttctcttggtttcatctttccacta

SEQ ID NO: 171638 - DNA, 25 bp, Saccharomyces pastorianus
ctttgcatcgtttctcttggtttca

SEQ ID NO: 171639 - DNA, 25 bp, Saccharomyces pastorianus
gtttctcttggtttcatctttccac

SEQ ID NO: 171640 - DNA, 25 bp, Saccharomyces pastorianus
tcgagtccatcttcttccctaataa

SEQ ID NO: 171641 - DNA, 25 bp, Saccharomyces pastorianus
taataaaacatttaactacatccgg

SEQ ID NO: 171642 - DNA, 25 bp, Saccharomyces pastorianus
tctcggctctgtccttcgagtccat

SEQ ID NO: 171643 - DNA, 25 bp, Saccharomyces pastorianus
ctctgtccttcgagtccatcttctt

SEQ ID NO: 171644 - DNA, 25 bp, Saccharomyces pastorianus
aattctcggctctgtccttcgagtc

SEQ ID NO: 171645 - DNA, 25 bp, Saccharomyces pastorianus
gagtccatcttcttccctaataaaa

SEQ ID NO: 171646 - DNA, 25 bp, Saccharomyces pastorianus
ggctctgtccttcgagtccatcttc

SEQ ID NO: 171647 - DNA, 25 bp, Saccharomyces pastorianus
ttcgagtccatcttcttccctaata

SEQ ID NO: 171648 - DNA, 25 bp, Saccharomyces pastorianus
gtccatcttcttccctaataaaaca

SEQ ID NO: 171649 - DNA, 25 bp, Saccharomyces pastorianus
accaattctcggctctgtccttcga

SEQ ID NO: 171650 - DNA, 25 bp, Saccharomyces pastorianus
atgaccaccaattctcggctctgtc

SEQ ID NO: 171651 - DNA, 25 bp, Saccharomyces pastorianus
agtgctggctattctggtcaaatta

SEQ ID NO: 171652 - DNA, 25 bp, Saccharomyces pastorianus
aaacggtggcaatatcccatctacc

SEQ ID NO: 171653 - DNA, 25 bp, Saccharomyces pastorianus
gatgattctctatccactttgattg

SEQ ID NO: 171654 - DNA, 25 bp, Saccharomyces pastorianus
caacgggtggtgttccgtttctgat

SEQ ID NO: 171655 - DNA, 25 bp, Saccharomyces pastorianus
ggctacccttcagctggtattcaaa

SEQ ID NO: 171656 - DNA, 25 bp, Saccharomyces pastorianus
acgcctattttgatgctagctccag

SEQ ID NO: 171657 - DNA, 25 bp, Saccharomyces pastorianus
gaaccaccagtctcctttgaaaata

SEQ ID NO: 171658 - DNA, 25 bp, Saccharomyces pastorianus
tagcggtgttgactccatcgatgat

SEQ ID NO: 171659 - DNA, 25 bp, Saccharomyces pastorianus
tgctgaaagcgctggcacatttgtt

SEQ ID NO: 171660 - DNA, 25 bp, Saccharomyces pastorianus
ggtattaatccacacgcctattttg

SEQ ID NO: 171661 - DNA, 25 bp, Saccharomyces pastorianus
ttcatcactgaaactggctaccctt

SEQ ID NO: 171662 - DNA, 25 bp, Saccharomyces pastorianus
gacaaccgccgccaaagcattagaa

SEQ ID NO: 171663 - DNA, 25 bp, Saccharomyces pastorianus
gaacgattggaatccggctaacgat

SEQ ID NO: 171664 - DNA, 25 bp, Saccharomyces pastorianus
agaagactatctggtgtcacagtat

SEQ ID NO: 171665 - DNA, 25 bp, Saccharomyces pastorianus
aatttctagagacacacttttgcag

SEQ ID NO: 171666 - DNA, 25 bp, Saccharomyces pastorianus
aagcgcatagtatccaaggcatttg

SEQ ID NO: 171667 - DNA, 25 bp, Saccharomyces pastorianus
gtcacagtataagccgtacgccgtt

SEQ ID NO: 171668 - DNA, 25 bp, Saccharomyces pastorianus
taaagtaagcaggacaaccgccgcc

SEQ ID NO: 171669 - DNA, 25 bp, Saccharomyces pastorianus
tgatctactcttgcaacgaacagga

SEQ ID NO: 171670 - DNA, 25 bp, Saccharomyces pastorianus
tagaaagagacaaagcgaccgccag

SEQ ID NO: 171671 - DNA, 25 bp, Saccharomyces pastorianus
gaaaacctggtcaacgaaaagcgca

SEQ ID NO: 171672 - DNA, 25 bp, Saccharomyces pastorianus
gccgtacgccgttaatgatataatc

SEQ ID NO: 171673 - DNA, 25 bp, Saccharomyces pastorianus
tcccatcacaggtatcatcgtccaa

SEQ ID NO: 171674 - DNA, 25 bp, Saccharomyces pastorianus
ctaagcatcccatcacaggtatcat

SEQ ID NO: 171675 - DNA, 25 bp, Saccharomyces pastorianus
actggtttgagaaccaattctttga

SEQ ID NO: 171676 - DNA, 25 bp, Saccharomyces pastorianus
ttctcacacactgttgcttctaagc

SEQ ID NO: 171677 - DNA, 25 bp, Saccharomyces pastorianus
atcacaggtatcatcgtccaatttg

SEQ ID NO: 171678 - DNA, 25 bp, Saccharomyces pastorianus
gtattgctactggtttgagaaccaa

SEQ ID NO: 171679 - DNA, 25 bp, Saccharomyces pastorianus
aggtatcatcgtccaatttgaaggt

SEQ ID NO: 171680 - DNA, 25 bp, Saccharomyces pastorianus
agcatcccatcacaggtatcatcgt

SEQ ID NO: 171681 - DNA, 25 bp, Saccharomyces pastorianus
gcttctaagcatcccatcacaggta

SEQ ID NO: 171682 - DNA, 25 bp, Saccharomyces pastorianus
aaggtattgctactggtttgagaac

SEQ ID NO: 171683 - DNA, 25 bp, Saccharomyces pastorianus
tgttgcttctaagcatcccatcaca

SEQ ID NO: 171684 - DNA, 25 bp, Saccharomyces pastorianus
tacgcttattgcctaggctacgacg

SEQ ID NO: 171685 - DNA, 25 bp, Saccharomyces pastorianus
ataaaaaccaccagcgcagtcgtat

SEQ ID NO: 171686 - DNA, 25 bp, Saccharomyces pastorianus
tttcgctatcagtaccagattctct

SEQ ID NO: 171687 - DNA, 25 bp, Saccharomyces pastorianus
ggttccacctctgcttatactacaa

SEQ ID NO: 171688 - DNA, 25 bp, Saccharomyces pastorianus
gtcttgactgcaacccagggcaaca

SEQ ID NO: 171689 - DNA, 25 bp, Saccharomyces pastorianus
agcgcagtcgtatttacatttcaga

SEQ ID NO: 171690 - DNA, 25 bp, Saccharomyces pastorianus
gaactttcgcagaagcctacgctta

SEQ ID NO: 171691 - DNA, 25 bp, Saccharomyces pastorianus
ggcaacagacagtatattttcgcta

SEQ ID NO: 171692 - DNA, 25 bp, Saccharomyces pastorianus
cagattctctagttttgccttcagt

SEQ ID NO: 171693 - DNA, 25 bp, Saccharomyces pastorianus
tcgctactagtgacatgagcatcca

SEQ ID NO: 171694 - DNA, 25 bp, Saccharomyces pastorianus
ggctacgacggtgttatcgctacta

SEQ ID NO: 171695 - DNA, 25 bp, Saccharomyces pastorianus
gttccaagtctcatccatttggtca

SEQ ID NO: 171696 - DNA, 25 bp, Saccharomyces pastorianus
gaagctttcaaatccgttgtttcca

SEQ ID NO: 171697 - DNA, 25 bp, Saccharomyces pastorianus
tcaaggccgttaactacaaccattt

SEQ ID NO: 171698 - DNA, 25 bp, Saccharomyces pastorianus
gaaggttgttatcgtcaagccacat

SEQ ID NO: 171699 - DNA, 25 bp, Saccharomyces pastorianus
caagtctcatccatttggtcacgct

SEQ ID NO: 171700 - DNA, 25 bp, Saccharomyces pastorianus
tgatgaaggttccaagtctcatcca

SEQ ID NO: 171701 - DNA, 25 bp, Saccharomyces pastorianus
gatcaagcctttcatcaaggccgtt

SEQ ID NO: 171702 - DNA, 25 bp, Saccharomyces pastorianus
aggttccaagtctcatccatttggt

SEQ ID NO: 171703 - DNA, 25 bp, Saccharomyces pastorianus
tgaaacatttgaacaaccttcccaa

SEQ ID NO: 171704 - DNA, 25 bp, Saccharomyces pastorianus
tccgttgtttccactgaaacatttg

SEQ ID NO: 171705 - DNA, 25 bp, Saccharomyces pastorianus
acatgatgaaggttccaagtctcat

SEQ ID NO: 171706 - DNA, 25 bp, Saccharomyces pastorianus
gagtttgataatgggcatttgccaa

SEQ ID NO: 171707 - DNA, 25 bp, Saccharomyces pastorianus
gttggtcatagatgtttcctgtttg

SEQ ID NO: 171708 - DNA, 25 bp, Saccharomyces pastorianus
aagctgtaacttcagaggtcgagaa

SEQ ID NO: 171709 - DNA, 25 bp, Saccharomyces pastorianus
ggtacccaagaatgaccccttgtct

SEQ ID NO: 171710 - DNA, 25 bp, Saccharomyces pastorianus
ctaattcgccaagtttttgtctctt

SEQ ID NO: 171711 - DNA, 25 bp, Saccharomyces pastorianus
gaccccttgtctttgtatagcatag

SEQ ID NO: 171712 - DNA, 25 bp, Saccharomyces pastorianus
tatagcatagtcacgccagttggtc

SEQ ID NO: 171713 - DNA, 25 bp, Saccharomyces pastorianus
actacctgtacgttatacatttatc

SEQ ID NO: 171714 - DNA, 25 bp, Saccharomyces pastorianus
cgccaagtttttgtctcttggatat

SEQ ID NO: 171715 - DNA, 25 bp, Saccharomyces pastorianus
gatgtaaacgggtctaattcgccaa

SEQ ID NO: 171716 - DNA, 25 bp, Saccharomyces pastorianus
cacgccagttggtcatagatgtttc

SEQ ID NO: 171717 - DNA, 25 bp, Saccharomyces pastorianus
ggttttcttacggaatggaatcatc

SEQ ID NO: 171718 - DNA, 25 bp, Saccharomyces pastorianus
tttggtattcgctggcaccttacta

SEQ ID NO: 171719 - DNA, 25 bp, Saccharomyces pastorianus
tatgtgaccctttggtattcgctgg

SEQ ID NO: 171720 - DNA, 25 bp, Saccharomyces pastorianus
ttatcaagatcattcctgatggctg

SEQ ID NO: 171721 - DNA, 25 bp, Saccharomyces pastorianus
cattcctgatggctgatctttgtta

SEQ ID NO: 171722 - DNA, 25 bp, Saccharomyces pastorianus
gccgctacttctgctattatcaaga

SEQ ID NO: 171723 - DNA, 25 bp, Saccharomyces pastorianus
gcgtgcgcctggtaacctcagaagg

SEQ ID NO: 171724 - DNA, 25 bp, Saccharomyces pastorianus
tggcaccttactattttcctttgtc

SEQ ID NO: 171725 - DNA, 25 bp, Saccharomyces pastorianus
ggctgatctttgttatgtgaccctt

SEQ ID NO: 171726 - DNA, 25 bp, Saccharomyces pastorianus
tcagaaggccccattgtccggtttt

SEQ ID NO: 171727 - DNA, 25 bp, Saccharomyces pastorianus
tgtatacacgtaacccgcgtgcgcc

SEQ ID NO: 171728 - DNA, 25 bp, Saccharomyces pastorianus
gcagtccacttactttgtcgagtta

SEQ ID NO: 171729 - DNA, 25 bp, Saccharomyces pastorianus
gaaaatactatccattctccaaaaa

SEQ ID NO: 171730 - DNA, 25 bp, Saccharomyces pastorianus
acaaattatggtacagcttcaactt

SEQ ID NO: 171731 - DNA, 25 bp, Saccharomyces pastorianus
actttcaggctctaacatacacgtg

SEQ ID NO: 171732 - DNA, 25 bp, Saccharomyces pastorianus
aacctcaaagctccctgtcgagcag

SEQ ID NO: 171733 - DNA, 25 bp, Saccharomyces pastorianus
aggaatagagaaccggtctccgcaa

SEQ ID NO: 171734 - DNA, 25 bp, Saccharomyces pastorianus
taataatgcccatcgcagacgtggt

SEQ ID NO: 171735 - DNA, 25 bp, Saccharomyces pastorianus
tttttgttccgcaagctctctttca

SEQ ID NO: 171736 - DNA, 25 bp, Saccharomyces pastorianus
ctctctttcatcctgaggagcacta

SEQ ID NO: 171737 - DNA, 25 bp, Saccharomyces pastorianus
gcccatcgcagacgtggtctaggaa

SEQ ID NO: 171738 - DNA, 25 bp, Saccharomyces pastorianus
ggagcactaactacaatcgcaacta

SEQ ID NO: 171739 - DNA, 25 bp, Saccharomyces pastorianus
ctaggctatcgtttgcaagaaggaa

SEQ ID NO: 171740 - DNA, 25 bp, Saccharomyces pastorianus
ggtatcgtgcggaggcaatcgaaat

SEQ ID NO: 171741 - DNA, 25 bp, Saccharomyces pastorianus
gtcattctagaagccacccttggtg

SEQ ID NO: 171742 - DNA, 25 bp, Saccharomyces pastorianus
gtggttatcccaaaggatcaagttt

SEQ ID NO: 171743 - DNA, 25 bp, Saccharomyces pastorianus
gccaagctggtcgtcattctagaag

SEQ ID NO: 171744 - DNA, 25 bp, Saccharomyces pastorianus
gccacccttggtggttatcccaaag

SEQ ID NO: 171745 - DNA, 25 bp, Saccharomyces pastorianus
aagagaagggtttgctaggtatcgt

SEQ ID NO: 171746 - DNA, 25 bp, Saccharomyces pastorianus
agaatctggtgccaagctggtcgtc

SEQ ID NO: 171747 - DNA, 25 bp, Saccharomyces pastorianus
aaatagggtctggtgattaatatcc

SEQ ID NO: 171748 - DNA, 25 bp, Saccharomyces pastorianus
atccaggaataagccaattatgtgc

SEQ ID NO: 171749 - DNA, 25 bp, Saccharomyces pastorianus
ggtttatctaggctatcgtttgcaa

SEQ ID NO: 171750 - DNA, 25 bp, Saccharomyces pastorianus
gacgcgtgaactattttgatgtcaa

SEQ ID NO: 171751 - DNA, 25 bp, Saccharomyces pastorianus
gacactctttctggatctcaaactt

SEQ ID NO: 171752 - DNA, 25 bp, Saccharomyces pastorianus
gccataataagtgtagaagctcctg

SEQ ID NO: 171753 - DNA, 25 bp, Saccharomyces pastorianus
ctgacccagggcatatagagaatta

SEQ ID NO: 171754 - DNA, 25 bp, Saccharomyces pastorianus
aacattgccggacactctttctgga

SEQ ID NO: 171755 - DNA, 25 bp, Saccharomyces pastorianus
ggcagaaacaagtaggcctctcctt

SEQ ID NO: 171756 - DNA, 25 bp, Saccharomyces pastorianus
gaagctcctggaacattgccggaca

SEQ ID NO: 171757 - DNA, 25 bp, Saccharomyces pastorianus
gtaggcctctccttgaagaggaata

SEQ ID NO: 171758 - DNA, 25 bp, Saccharomyces pastorianus
aactgataatcctgacccagggcat

SEQ ID NO: 171759 - DNA, 25 bp, Saccharomyces pastorianus
aacgcaaacgttgatcttactgaac

SEQ ID NO: 171760 - DNA, 25 bp, Saccharomyces pastorianus
caaactttacagagacgcgtgaact

SEQ ID NO: 171761 - DNA, 25 bp, Saccharomyces pastorianus
aaaattggtctctagcgggatcgaa

SEQ ID NO: 171762 - DNA, 25 bp, Saccharomyces pastorianus
attggtctctagcgggatcgaaccg

SEQ ID NO: 171763 - DNA, 25 bp, Saccharomyces pastorianus
aaaaaattggtctctagcgggatcg

SEQ ID NO: 171764 - DNA, 25 bp, Saccharomyces pastorianus
aaattggtctctagcgggatcgaac

SEQ ID NO: 171765 - DNA, 25 bp, Saccharomyces pastorianus
cgaaccgctgatccccgcgttatta

SEQ ID NO: 171766 - DNA, 25 bp, Saccharomyces pastorianus
gtctctagcgggatcgaaccgctga

SEQ ID NO: 171767 - DNA, 25 bp, Saccharomyces pastorianus
ctctagcgggatcgaaccgctgatc

SEQ ID NO: 171768 - DNA, 25 bp, Saccharomyces pastorianus
tagcgggatcgaaccgctgatcccc

SEQ ID NO: 171769 - DNA, 25 bp, Saccharomyces pastorianus
aaaaattggtctctagcgggatcga

SEQ ID NO: 171770 - DNA, 25 bp, Saccharomyces pastorianus
ttggtctctagcgggatcgaaccgc

SEQ ID NO: 171771 - DNA, 25 bp, Saccharomyces pastorianus
aattggtctctagcgggatcgaacc

SEQ ID NO: 171772 - DNA, 25 bp, Saccharomyces pastorianus
gaaatgggttttcacctcagagagt

SEQ ID NO: 171773 - DNA, 25 bp, Saccharomyces pastorianus
tgcgacggtttcactctgtttaaag

SEQ ID NO: 171774 - DNA, 25 bp, Saccharomyces pastorianus
accgccacattatgatgagatttca

SEQ ID NO: 171775 - DNA, 25 bp, Saccharomyces pastorianus
gcaaaaggagagtgcgacggtttca

SEQ ID NO: 171776 - DNA, 25 bp, Saccharomyces pastorianus
attgacacttgttagatgctctgaa

SEQ ID NO: 171777 - DNA, 25 bp, Saccharomyces pastorianus
gggacttccctgaagagtcggatta

SEQ ID NO: 171778 - DNA, 25 bp, Saccharomyces pastorianus
ggcgagattatgtgggttttctttt

SEQ ID NO: 171779 - DNA, 25 bp, Saccharomyces pastorianus
acatactagaactcaacttcggaaa

SEQ ID NO: 171780 - DNA, 25 bp, Saccharomyces pastorianus
taaagttcttttttgcactgttaag

SEQ ID NO: 171781 - DNA, 25 bp, Saccharomyces pastorianus
gttatttgccttccgcactaagaaa

SEQ ID NO: 171782 - DNA, 25 bp, Saccharomyces pastorianus
gagagcatatcccacatactagaac

SEQ ID NO: 171783 - DNA, 25 bp, Saccharomyces pastorianus
gagtggtgagccaattgattacgat

SEQ ID NO: 171784 - DNA, 25 bp, Saccharomyces pastorianus
aacgtggcaaaatgacgaaggcgga

SEQ ID NO: 171785 - DNA, 25 bp, Saccharomyces pastorianus
ggacacgaagagtggtgagccaatt

SEQ ID NO: 171786 - DNA, 25 bp, Saccharomyces pastorianus
aggtggtaatgcttctgctctatcg

SEQ ID NO: 171787 - DNA, 25 bp, Saccharomyces pastorianus
gttatggtgaccttgcgcaaacgtg

SEQ ID NO: 171788 - DNA, 25 bp, Saccharomyces pastorianus
gtttcagaaacgcagtcaggagttc

SEQ ID NO: 171789 - DNA, 25 bp, Saccharomyces pastorianus
atcggagatatatttcaacacttac

SEQ ID NO: 171790 - DNA, 25 bp, Saccharomyces pastorianus
aatgcttctgctctatcgtttcaga

SEQ ID NO: 171791 - DNA, 25 bp, Saccharomyces pastorianus
gtgaccttgcgcaaacgtggcaaaa

SEQ ID NO: 171792 - DNA, 25 bp, Saccharomyces pastorianus
ccctgatacaggtggtaatgcttct

SEQ ID NO: 171793 - DNA, 25 bp, Saccharomyces pastorianus
agactggaagtactgctttgctgct

SEQ ID NO: 171794 - DNA, 25 bp, Saccharomyces pastorianus
ccattgcaactagttaaaggtgata

SEQ ID NO: 171795 - DNA, 25 bp, Saccharomyces pastorianus
gttctctctgacgtatgtgataaga

SEQ ID NO: 171796 - DNA, 25 bp, Saccharomyces pastorianus
gggaaatgcataccagactacaacc

SEQ ID NO: 171797 - DNA, 25 bp, Saccharomyces pastorianus
aatcgttctctctgacgtatgtgat

SEQ ID NO: 171798 - DNA, 25 bp, Saccharomyces pastorianus
aaaaactgtgcctgtaaaaccattg

SEQ ID NO: 171799 - DNA, 25 bp, Saccharomyces pastorianus
gtaaaaaaccaatgacagtcaaatc

SEQ ID NO: 171800 - DNA, 25 bp, Saccharomyces pastorianus
gcctgtaaaaccattgcaactagtt

SEQ ID NO: 171801 - DNA, 25 bp, Saccharomyces pastorianus
ctctctgacgtatgtgataagacaa

SEQ ID NO: 171802 - DNA, 25 bp, Saccharomyces pastorianus
agactacaacctaatcgttctctct

SEQ ID NO: 171803 - DNA, 25 bp, Saccharomyces pastorianus
aacctaatcgttctctctgacgtat

SEQ ID NO: 171804 - DNA, 25 bp, Saccharomyces pastorianus
gcataccagactacaacctaatcgt

SEQ ID NO: 171805 - DNA, 25 bp, Saccharomyces pastorianus
gaagaatatggcgaggacgctatat

SEQ ID NO: 171806 - DNA, 25 bp, Saccharomyces pastorianus
gcctgtttggacttcatcaatgcac

SEQ ID NO: 171807 - DNA, 25 bp, Saccharomyces pastorianus
aagtgtctcaaggaggcaagtttga

SEQ ID NO: 171808 - DNA, 25 bp, Saccharomyces pastorianus
tggcgaggacgctatattaaagact

SEQ ID NO: 171809 - DNA, 25 bp, Saccharomyces pastorianus
aagagaatatttggcctttgtaaca

SEQ ID NO: 171810 - DNA, 25 bp, Saccharomyces pastorianus
tgccatcaaaaggaatattacaaga

SEQ ID NO: 171811 - DNA, 25 bp, Saccharomyces pastorianus
ggacttcatcaatgcactcgataaa

SEQ ID NO: 171812 - DNA, 25 bp, Saccharomyces pastorianus
aaggatgctttgaacaagtgtctca

SEQ ID NO: 171813 - DNA, 25 bp, Saccharomyces pastorianus
gaaacgtgctgtcattgaaagtaga

SEQ ID NO: 171814 - DNA, 25 bp, Saccharomyces pastorianus
gaataacaagaaacgtgctgtcatt

SEQ ID NO: 171815 - DNA, 25 bp, Saccharomyces pastorianus
ggacgctatattaaagactatctta

SEQ ID NO: 171816 - DNA, 25 bp, Saccharomyces pastorianus
atcgcgaactcgtaagtagaaaact

SEQ ID NO: 171817 - DNA, 25 bp, Saccharomyces pastorianus
gaacgagtggttcagcttctgtttg

SEQ ID NO: 171818 - DNA, 25 bp, Saccharomyces pastorianus
gagtggttcagcttctgtttgagtt

SEQ ID NO: 171819 - DNA, 25 bp, Saccharomyces pastorianus
atgcagacagaagactctcaagatg

SEQ ID NO: 171820 - DNA, 25 bp, Saccharomyces pastorianus
ctgtttgagttgcaaccatggtatg

SEQ ID NO: 171821 - DNA, 25 bp, Saccharomyces pastorianus
gatggtgcaaatcgcgaactcgtaa

SEQ ID NO: 171822 - DNA, 25 bp, Saccharomyces pastorianus
gactctcaagatggtgcaaatcgcg

SEQ ID NO: 171823 - DNA, 25 bp, Saccharomyces pastorianus
agcttctgtttgagttgcaaccatg

SEQ ID NO: 171824 - DNA, 25 bp, Saccharomyces pastorianus
acagaagactctcaagatggtgcaa

SEQ ID NO: 171825 - DNA, 25 bp, Saccharomyces pastorianus
ggtgcaaatcgcgaactcgtaagta

SEQ ID NO: 171826 - DNA, 25 bp, Saccharomyces pastorianus
gttcagcttctgtttgagttgcaac

SEQ ID NO: 171827 - DNA, 25 bp, Saccharomyces pastorianus
gaagctctcgtcgatggtattggaa

SEQ ID NO: 171828 - DNA, 25 bp, Saccharomyces pastorianus
tttactagaagctctcgtcgatggt

SEQ ID NO: 171829 - DNA, 25 bp, Saccharomyces pastorianus
aatttactagaagctctcgtcgatg

SEQ ID NO: 171830 - DNA, 25 bp, Saccharomyces pastorianus
tactagaagctctcgtcgatggtat

SEQ ID NO: 171831 - DNA, 25 bp, Saccharomyces pastorianus
agctctcgtcgatggtattggaatc

SEQ ID NO: 171832 - DNA, 25 bp, Saccharomyces pastorianus
tagaagctctcgtcgatggtattgg

SEQ ID NO: 171833 - DNA, 25 bp, Saccharomyces pastorianus
gctctcgtcgatggtattggaatcc

SEQ ID NO: 171834 - DNA, 25 bp, Saccharomyces pastorianus
acaatttactagaagctctcgtcga

SEQ ID NO: 171835 - DNA, 25 bp, Saccharomyces pastorianus
tatacaatttactagaagctctcgt

SEQ ID NO: 171836 - DNA, 25 bp, Saccharomyces pastorianus
ttactagaagctctcgtcgatggta

SEQ ID NO: 171837 - DNA, 25 bp, Saccharomyces pastorianus
actagaagctctcgtcgatggtatt

SEQ ID NO: 171838 - DNA, 25 bp, Saccharomyces pastorianus
atgggctcttactggtcgcccatct

SEQ ID NO: 171839 - DNA, 25 bp, Saccharomyces pastorianus
tatacttcgtataggaagccgttct

SEQ ID NO: 171840 - DNA, 25 bp, Saccharomyces pastorianus
aacaaagctgatcaagccgctgtat

SEQ ID NO: 171841 - DNA, 25 bp, Saccharomyces pastorianus
aattggaacaactacatctgcacac

SEQ ID NO: 171842 - DNA, 25 bp, Saccharomyces pastorianus
atctcacactcatgtcttccacatt

SEQ ID NO: 171843 - DNA, 25 bp, Saccharomyces pastorianus
taggaagccgttcttttatgcccca

SEQ ID NO: 171844 - DNA, 25 bp, Saccharomyces pastorianus
gatcaagccgctgtatttatatgaa

SEQ ID NO: 171845 - DNA, 25 bp, Saccharomyces pastorianus
gttcttgaacgatgctatacttcgt

SEQ ID NO: 171846 - DNA, 25 bp, Saccharomyces pastorianus
atctgcacacatgggctcttactgg

SEQ ID NO: 171847 - DNA, 25 bp, Saccharomyces pastorianus
ttccacattccacttagcgactaag

SEQ ID NO: 171848 - DNA, 25 bp, Saccharomyces pastorianus
gcgactaagtcattattactatggg

SEQ ID NO: 171849 - DNA, 25 bp, Saccharomyces pastorianus
aaatggtctctagcgggatcgaacc

SEQ ID NO: 171850 - DNA, 25 bp, Saccharomyces pastorianus
aaaagtaaatggtctctagcgggat

SEQ ID NO: 171851 - DNA, 25 bp, Saccharomyces pastorianus
aagtaaatggtctctagcgggatcg

SEQ ID NO: 171852 - DNA, 25 bp, Saccharomyces pastorianus
gtaaatggtctctagcgggatcgaa

SEQ ID NO: 171853 - DNA, 25 bp, Saccharomyces pastorianus
cgaaccgctgatccccgcgttatta

SEQ ID NO: 171854 - DNA, 25 bp, Saccharomyces pastorianus
gtctctagcgggatcgaaccgctga

SEQ ID NO: 171855 - DNA, 25 bp, Saccharomyces pastorianus
ctctagcgggatcgaaccgctgatc

SEQ ID NO: 171856 - DNA, 25 bp, Saccharomyces pastorianus
aaagtaaatggtctctagcgggatc

SEQ ID NO: 171857 - DNA, 25 bp, Saccharomyces pastorianus
agtaaatggtctctagcgggatcga

SEQ ID NO: 171858 - DNA, 25 bp, Saccharomyces pastorianus
taaatggtctctagcgggatcgaac

SEQ ID NO: 171859 - DNA, 25 bp, Saccharomyces pastorianus
aatggtctctagcgggatcgaaccg

SEQ ID NO: 171860 - DNA, 25 bp, Saccharomyces pastorianus
aaggcgttagatggtgacataaggt

SEQ ID NO: 171861 - DNA, 25 bp, Saccharomyces pastorianus
tcctaatgtcagtatattgtcatat

SEQ ID NO: 171862 - DNA, 25 bp, Saccharomyces pastorianus
tatattgtcatataaggcgttagat

SEQ ID NO: 171863 - DNA, 25 bp, Saccharomyces pastorianus
aaaggagctgaaaatttgttggaat

SEQ ID NO: 171864 - DNA, 25 bp, Saccharomyces pastorianus
atataaggcgttagatggtgacata

SEQ ID NO: 171865 - DNA, 25 bp, Saccharomyces pastorianus
gtattcctaatgtcagtatattgtc

SEQ ID NO: 171866 - DNA, 25 bp, Saccharomyces pastorianus
aactagtattcctaatgtcagtata

SEQ ID NO: 171867 - DNA, 25 bp, Saccharomyces pastorianus
atcttatatcaactagtattcctaa

SEQ ID NO: 171868 - DNA, 25 bp, Saccharomyces pastorianus
gtgacataaggtatgaaaagttgcc

SEQ ID NO: 171869 - DNA, 25 bp, Saccharomyces pastorianus
ctagtattcctaatgtcagtatatt

SEQ ID NO: 171870 - DNA, 25 bp, Saccharomyces pastorianus
atcaactagtattcctaatgtcagt

SEQ ID NO: 171871 - DNA, 25 bp, Saccharomyces pastorianus
tgcatactatttgccttagaagccc

SEQ ID NO: 171872 - DNA, 25 bp, Saccharomyces pastorianus
ctatttgccttagaagcccgatcga

SEQ ID NO: 171873 - DNA, 25 bp, Saccharomyces pastorianus
atactatttgccttagaagcccgat

SEQ ID NO: 171874 - DNA, 25 bp, Saccharomyces pastorianus
gaatcctctcctcttccatataaat

SEQ ID NO: 171875 - DNA, 25 bp, Saccharomyces pastorianus
cctctcctcttccatataaatcaat

SEQ ID NO: 171876 - DNA, 25 bp, Saccharomyces pastorianus
aagcccgatcgatgaatcctctcct

SEQ ID NO: 171877 - DNA, 25 bp, Saccharomyces pastorianus
tttgccttagaagcccgatcgatga

SEQ ID NO: 171878 - DNA, 25 bp, Saccharomyces pastorianus
agaagcccgatcgatgaatcctctc

SEQ ID NO: 171879 - DNA, 25 bp, Saccharomyces pastorianus
ttagaagcccgatcgatgaatcctc

SEQ ID NO: 171880 - DNA, 25 bp, Saccharomyces pastorianus
caataaggcaacctctagaaaacgc

SEQ ID NO: 171881 - DNA, 25 bp, Saccharomyces pastorianus
tataaatcaataaggcaacctctag

SEQ ID NO: 171882 - DNA, 25 bp, Saccharomyces pastorianus
gcttctatgaagattgcgacgtctc

SEQ ID NO: 171883 - DNA, 25 bp, Saccharomyces pastorianus
gcgacgtctccaaagttagcaaaga

SEQ ID NO: 171884 - DNA, 25 bp, Saccharomyces pastorianus
gagagttgctccagtggtccaggtt

SEQ ID NO: 171885 - DNA, 25 bp, Saccharomyces pastorianus
gtggtccaggtttttcatgtgaaga

SEQ ID NO: 171886 - DNA, 25 bp, Saccharomyces pastorianus
ctgtggttcctatagagagttgctc

SEQ ID NO: 171887 - DNA, 25 bp, Saccharomyces pastorianus
tgagctttacgcacgatactgatat

SEQ ID NO: 171888 - DNA, 25 bp, Saccharomyces pastorianus
tgacgttttactgggattggaacac

SEQ ID NO: 171889 - DNA, 25 bp, Saccharomyces pastorianus
tgaagagggcacattttacgagtat

SEQ ID NO: 171890 - DNA, 25 bp, Saccharomyces pastorianus
taacaaccaatcatgttccctttcg

SEQ ID NO: 171891 - DNA, 25 bp, Saccharomyces pastorianus
gattacgaggtgtgagcttctatga

SEQ ID NO: 171892 - DNA, 25 bp, Saccharomyces pastorianus
ttttacgagtatgccaaagacagat

SEQ ID NO: 171893 - DNA, 25 bp, Saccharomyces pastorianus
actacgaattaggtcagctgatgag

SEQ ID NO: 171894 - DNA, 25 bp, Saccharomyces pastorianus
gaattaggtcagctgatgagccgat

SEQ ID NO: 171895 - DNA, 25 bp, Saccharomyces pastorianus
gatgagccgatgactaccttttata

SEQ ID NO: 171896 - DNA, 25 bp, Saccharomyces pastorianus
gactacgaattaggtcagctgatga

SEQ ID NO: 171897 - DNA, 25 bp, Saccharomyces pastorianus
tacgaattaggtcagctgatgagcc

SEQ ID NO: 171898 - DNA, 25 bp, Saccharomyces pastorianus
gccgatgactaccttttataagtgt

SEQ ID NO: 171899 - DNA, 25 bp, Saccharomyces pastorianus
ccgactacgaattaggtcagctgat

SEQ ID NO: 171900 - DNA, 25 bp, Saccharomyces pastorianus
agctgatgagccgatgactaccttt

SEQ ID NO: 171901 - DNA, 25 bp, Saccharomyces pastorianus
acgaattaggtcagctgatgagccg

SEQ ID NO: 171902 - DNA, 25 bp, Saccharomyces pastorianus
ttccgactacgaattaggtcagctg

SEQ ID NO: 171903 - DNA, 25 bp, Saccharomyces pastorianus
tccgactacgaattaggtcagctga

SEQ ID NO: 171904 - DNA, 25 bp, Saccharomyces pastorianus
ccgttacatcactacttgggaaaat

SEQ ID NO: 171905 - DNA, 25 bp, Saccharomyces pastorianus
aaatgcctatagaactgatgtgatt

SEQ ID NO: 171906 - DNA, 25 bp, Saccharomyces pastorianus
tctagagagaaacagccccttttgg

SEQ ID NO: 171907 - DNA, 25 bp, Saccharomyces pastorianus
gtatgacagaggtcacagaatccgt

SEQ ID NO: 171908 - DNA, 25 bp, Saccharomyces pastorianus
acctcgtattagcactttatttcaa

SEQ ID NO: 171909 - DNA, 25 bp, Saccharomyces pastorianus
aggcaggaagctattcagcagaata

SEQ ID NO: 171910 - DNA, 25 bp, Saccharomyces pastorianus
ggatcgtggtatacctcgtattagc

SEQ ID NO: 171911 - DNA, 25 bp, Saccharomyces pastorianus
aactatcttccgttacatcactact

SEQ ID NO: 171912 - DNA, 25 bp, Saccharomyces pastorianus
gggaatttaaacagtactctctaga

SEQ ID NO: 171913 - DNA, 25 bp, Saccharomyces pastorianus
acaaactcccaccatgacggtaaat

SEQ ID NO: 171914 - DNA, 25 bp, Saccharomyces pastorianus
aagagatcgacatactctagcgtat

SEQ ID NO: 171915 - DNA, 25 bp, Saccharomyces pastorianus
gtcgctagagtccttcatcacaaga

SEQ ID NO: 171916 - DNA, 25 bp, Saccharomyces pastorianus
gaagtgtcaccattaattattgcat

SEQ ID NO: 171917 - DNA, 25 bp, Saccharomyces pastorianus
tattgcatcatcaaaaactaaggga

SEQ ID NO: 171918 - DNA, 25 bp, Saccharomyces pastorianus
tcattcttgagagccgcgatcggat

SEQ ID NO: 171919 - DNA, 25 bp, Saccharomyces pastorianus
acaatgcgtcgctagagtccttcat

SEQ ID NO: 171920 - DNA, 25 bp, Saccharomyces pastorianus
ggagagttggcgttgcctgcaaaca

SEQ ID NO: 171921 - DNA, 25 bp, Saccharomyces pastorianus
aaactgtgtagcgtcattcttgaga

SEQ ID NO: 171922 - DNA, 25 bp, Saccharomyces pastorianus
gttgcctgcaaacaatgcgtcgcta

SEQ ID NO: 171923 - DNA, 25 bp, Saccharomyces pastorianus
agagtccttcatcacaagaaactgt

SEQ ID NO: 171924 - DNA, 25 bp, Saccharomyces pastorianus
atccttttctggagccaaagagtca

SEQ ID NO: 171925 - DNA, 25 bp, Saccharomyces pastorianus
gatcggatccttttctggagccaaa

SEQ ID NO: 171926 - DNA, 25 bp, Saccharomyces pastorianus
tgcgcagtaaattgatcctgatggt

SEQ ID NO: 171927 - DNA, 25 bp, Saccharomyces pastorianus
tactgttcttcgacgttattaaacg

SEQ ID NO: 171928 - DNA, 25 bp, Saccharomyces pastorianus
gaatcttatatacaagtacgagtac

SEQ ID NO: 171929 - DNA, 25 bp, Saccharomyces pastorianus
aagtacgagtacatactgcgcagta

SEQ ID NO: 171930 - DNA, 25 bp, Saccharomyces pastorianus
tagtgcaatactgttcttcgacgtt

SEQ ID NO: 171931 - DNA, 25 bp, Saccharomyces pastorianus
tcctgatggtgtgtttagatttcgc

SEQ ID NO: 171932 - DNA, 25 bp, Saccharomyces pastorianus
catactgcgcagtaaattgatcctg

SEQ ID NO: 171933 - DNA, 25 bp, Saccharomyces pastorianus
gtgcaatactgttcttcgacgttat

SEQ ID NO: 171934 - DNA, 25 bp, Saccharomyces pastorianus
gcaatactgttcttcgacgttatta

SEQ ID NO: 171935 - DNA, 25 bp, Saccharomyces pastorianus
ataccaagcaagtatagtgcaatac

SEQ ID NO: 171936 - DNA, 25 bp, Saccharomyces pastorianus
tgatggtgtgtttagatttcgccag

SEQ ID NO: 171937 - DNA, 25 bp, Saccharomyces pastorianus
aaaatatgtcgatgaacaatccaag

SEQ ID NO: 171938 - DNA, 25 bp, Saccharomyces pastorianus
gtttagttgcttaccatcaaaaata

SEQ ID NO: 171939 - DNA, 25 bp, Saccharomyces pastorianus
agttgcttaccatcaaaaatatgtc

SEQ ID NO: 171940 - DNA, 25 bp, Saccharomyces pastorianus
ttagttgcttaccatcaaaaatatg

SEQ ID NO: 171941 - DNA, 25 bp, Saccharomyces pastorianus
caaggttaatggttctccaatcact

SEQ ID NO: 171942 - DNA, 25 bp, Saccharomyces pastorianus
ggtttagttgcttaccatcaaaaat

SEQ ID NO: 171943 - DNA, 25 bp, Saccharomyces pastorianus
tttagttgcttaccatcaaaaatat

SEQ ID NO: 171944 - DNA, 25 bp, Saccharomyces pastorianus
tgttgcccatgtcaaggccggtaag

SEQ ID NO: 171945 - DNA, 25 bp, Saccharomyces pastorianus
ggctttcacttcttacgacagaacc

SEQ ID NO: 171946 - DNA, 25 bp, Saccharomyces pastorianus
gatcaaggttaatggttctccaatc

SEQ ID NO: 171947 - DNA, 25 bp, Saccharomyces pastorianus
aaggtctacgaaccattattgttag

SEQ ID NO: 171948 - DNA, 25 bp, Saccharomyces pastorianus
agacaacactctattggtcactggt

SEQ ID NO: 171949 - DNA, 25 bp, Saccharomyces pastorianus
tacctctaccaaagtctccgtggaa

SEQ ID NO: 171950 - DNA, 25 bp, Saccharomyces pastorianus
agaagacaacactctattggtcact

SEQ ID NO: 171951 - DNA, 25 bp, Saccharomyces pastorianus
ctctaccaaagtctccgtggaaggt

SEQ ID NO: 171952 - DNA, 25 bp, Saccharomyces pastorianus
ctaccaaagtctccgtggaaggtgt

SEQ ID NO: 171953 - DNA, 25 bp, Saccharomyces pastorianus
aacactctattggtcactggtccat

SEQ ID NO: 171954 - DNA, 25 bp, Saccharomyces pastorianus
actctattggtcactggtccattca

SEQ ID NO: 171955 - DNA, 25 bp, Saccharomyces pastorianus
acaacactctattggtcactggtcc

SEQ ID NO: 171956 - DNA, 25 bp, Saccharomyces pastorianus
ccaaagtctccgtggaaggtgtcaa

SEQ ID NO: 171957 - DNA, 25 bp, Saccharomyces pastorianus
acactctattggtcactggtccatt

SEQ ID NO: 171958 - DNA, 25 bp, Saccharomyces pastorianus
attgctacctctaccaaagtctccg

SEQ ID NO: 171959 - DNA, 25 bp, Saccharomyces pastorianus
cacctgttaccagtgtaacaacaag

SEQ ID NO: 171960 - DNA, 25 bp, Saccharomyces pastorianus
gttaccagtgtaacaacaagtcagg

SEQ ID NO: 171961 - DNA, 25 bp, Saccharomyces pastorianus
actgcttcatcattaccgcctgtta

SEQ ID NO: 171962 - DNA, 25 bp, Saccharomyces pastorianus
ttaccagtgtaacaacaagtcagga

SEQ ID NO: 171963 - DNA, 25 bp, Saccharomyces pastorianus
caggaaataacttcatcattaccac

SEQ ID NO: 171964 - DNA, 25 bp, Saccharomyces pastorianus
cgcctgttaccagtgcggcaacaag

SEQ ID NO: 171965 - DNA, 25 bp, Saccharomyces pastorianus
ccgcctgttaccagtgcggcaacaa

SEQ ID NO: 171966 - DNA, 25 bp, Saccharomyces pastorianus
cagtgtaacaacaagtcaggaaata

SEQ ID NO: 171967 - DNA, 25 bp, Saccharomyces pastorianus
accagtgtaacaacaagtcaggaaa

SEQ ID NO: 171968 - DNA, 25 bp, Saccharomyces pastorianus
aactgcttcatcattaccgcctgtt

SEQ ID NO: 171969 - DNA, 25 bp, Saccharomyces pastorianus
aaactgcttcatcattaccgcctgt

SEQ ID NO: 171970 - DNA, 25 bp, Saccharomyces pastorianus
aactgctagcaccatcataactaca

SEQ ID NO: 171971 - DNA, 25 bp, Saccharomyces pastorianus
tactgtcactggtaccaacggtcaa

SEQ ID NO: 171972 - DNA, 25 bp, Saccharomyces pastorianus
tagcaccatcataactacaactgag

SEQ ID NO: 171973 - DNA, 25 bp, Saccharomyces pastorianus
tctacttctaccgaattgaccacag

SEQ ID NO: 171974 - DNA, 25 bp, Saccharomyces pastorianus
taacaccatcgtaactacgaccaaa

SEQ ID NO: 171975 - DNA, 25 bp, Saccharomyces pastorianus
tctaccgaattgaccacagtcaccg

SEQ ID NO: 171976 - DNA, 25 bp, Saccharomyces pastorianus
aatgactactgtcactggtaccaac

SEQ ID NO: 171977 - DNA, 25 bp, Saccharomyces pastorianus
agaaatgactactgtcactggtacc

SEQ ID NO: 171978 - DNA, 25 bp, Saccharomyces pastorianus
atccacagaaatgactactgtcact

SEQ ID NO: 171979 - DNA, 25 bp, Saccharomyces pastorianus
aactacgaccaaaccatggactggt

SEQ ID NO: 171980 - DNA, 25 bp, Saccharomyces pastorianus
cacagtcaccggtaccaatggttta

SEQ ID NO: 171981 - DNA, 25 bp, Saccharomyces pastorianus
atcggcagcaagaattcgtttgaaa

SEQ ID NO: 171982 - DNA, 25 bp, Saccharomyces pastorianus
agcctaatttatcggcagcaagaat

SEQ ID NO: 171983 - DNA, 25 bp, Saccharomyces pastorianus
aattggaggtaattgttaggcctga

SEQ ID NO: 171984 - DNA, 25 bp, Saccharomyces pastorianus
aaagggaccttgattcgctggacct

SEQ ID NO: 171985 - DNA, 25 bp, Saccharomyces pastorianus
acctcccaccaacagtgactttgaa

SEQ ID NO: 171986 - DNA, 25 bp, Saccharomyces pastorianus
taacatcaccagatagtgcggatag

SEQ ID NO: 171987 - DNA, 25 bp, Saccharomyces pastorianus
gaagatctttcatccaaatatcgat

SEQ ID NO: 171988 - DNA, 25 bp, Saccharomyces pastorianus
gtgcggatagatcacaatcgccgaa

SEQ ID NO: 171989 - DNA, 25 bp, Saccharomyces pastorianus
aaacagcagttctattcagcctaat

SEQ ID NO: 171990 - DNA, 25 bp, Saccharomyces pastorianus
tattcttcgagaagactggtcgcca

SEQ ID NO: 171991 - DNA, 25 bp, Saccharomyces pastorianus
gaagtttatccgattgaaccaccaa

SEQ ID NO: 171992 - DNA, 25 bp, Saccharomyces pastorianus
atcgatgacagcaccattgactcca

SEQ ID NO: 171993 - DNA, 25 bp, Saccharomyces pastorianus
attgactccacagcaacagctactt

SEQ ID NO: 171994 - DNA, 25 bp, Saccharomyces pastorianus
ggagcaacaacagaatggtggagcc

SEQ ID NO: 171995 - DNA, 25 bp, Saccharomyces pastorianus
taagtgcaaacatcaatccaacccc

SEQ ID NO: 171996 - DNA, 25 bp, Saccharomyces pastorianus
tacttcaaagacaacagcaggcctt

SEQ ID NO: 171997 - DNA, 25 bp, Saccharomyces pastorianus
aacggagtggtaacaatgccaccag

SEQ ID NO: 171998 - DNA, 25 bp, Saccharomyces pastorianus
ctccacagcaacagctacttcaaag

SEQ ID NO: 171999 - DNA, 25 bp, Saccharomyces pastorianus
aaaacagcaggctttaagtgcaaac

SEQ ID NO: 172000 - DNA, 25 bp, Saccharomyces pastorianus
aacagcaggccttggagcaacaaca

SEQ ID NO: 172001 - DNA, 25 bp, Saccharomyces pastorianus
tcaacgctagaatatcgatgacagc

SEQ ID NO: 172002 - DNA, 25 bp, Saccharomyces pastorianus
tggtggagccatgaaaaacgcaaat

SEQ ID NO: 172003 - DNA, 25 bp, Saccharomyces pastorianus
ctttcgccgatttaaacattgaatt

SEQ ID NO: 172004 - DNA, 25 bp, Saccharomyces pastorianus
gtactccattaattctaagactttc

SEQ ID NO: 172005 - DNA, 25 bp, Saccharomyces pastorianus
attaattctaagactttcgccgatt

SEQ ID NO: 172006 - DNA, 25 bp, Saccharomyces pastorianus
ttaattctaagactttcgccgattt

SEQ ID NO: 172007 - DNA, 25 bp, Saccharomyces pastorianus
cattaattctaagactttcgccgat

SEQ ID NO: 172008 - DNA, 25 bp, Saccharomyces pastorianus
aagactttcgccgatttaaacattg

SEQ ID NO: 172009 - DNA, 25 bp, Saccharomyces pastorianus
taattctaagactttcgccgattta

SEQ ID NO: 172010 - DNA, 25 bp, Saccharomyces pastorianus
gactttcgccgatttaaacattgaa

SEQ ID NO: 172011 - DNA, 25 bp, Saccharomyces pastorianus
tcgccgatttaaacattgaattatt

SEQ ID NO: 172012 - DNA, 25 bp, Saccharomyces pastorianus
aacattgaattatttcgaaaccaca

SEQ ID NO: 172013 - DNA, 25 bp, Saccharomyces pastorianus
ttcgaaaccacaagttcaaaactgt

SEQ ID NO: 172014 - DNA, 25 bp, Saccharomyces pastorianus
gataaatttcgtggcccttcttaat

SEQ ID NO: 172015 - DNA, 25 bp, Saccharomyces pastorianus
gcccttcttaatttctcctatatct

SEQ ID NO: 172016 - DNA, 25 bp, Saccharomyces pastorianus
gcagcactggagtttgttttttgtt

SEQ ID NO: 172017 - DNA, 25 bp, Saccharomyces pastorianus
gttctaattagcagcactggagttt

SEQ ID NO: 172018 - DNA, 25 bp, Saccharomyces pastorianus
taatttctcctatatctaactccag

SEQ ID NO: 172019 - DNA, 25 bp, Saccharomyces pastorianus
ataggataaatttcgtggcccttct

SEQ ID NO: 172020 - DNA, 25 bp, Saccharomyces pastorianus
ttttgtttcccataccataggataa

SEQ ID NO: 172021 - DNA, 25 bp, Saccharomyces pastorianus
tctcctatatctaactccagacaag

SEQ ID NO: 172022 - DNA, 25 bp, Saccharomyces pastorianus
tggcccttcttaatttctcctatat

SEQ ID NO: 172023 - DNA, 25 bp, Saccharomyces pastorianus
tctaactccagacaaggataatcat

SEQ ID NO: 172024 - DNA, 25 bp, Saccharomyces pastorianus
ttttagttctaattagcagcactgg

SEQ ID NO: 172025 - DNA, 25 bp, Saccharomyces pastorianus
agatttattacatccaactcctgcc

SEQ ID NO: 172026 - DNA, 25 bp, Saccharomyces pastorianus
gcccaaaccgcggtcacttgtgaat

SEQ ID NO: 172027 - DNA, 25 bp, Saccharomyces pastorianus
tcttgtgcacaccaaccggtggtaa

SEQ ID NO: 172028 - DNA, 25 bp, Saccharomyces pastorianus
aaaccgcggtcacttgtgaatcctg

SEQ ID NO: 172029 - DNA, 25 bp, Saccharomyces pastorianus
gcacaaattaaagactctggtccaa

SEQ ID NO: 172030 - DNA, 25 bp, Saccharomyces pastorianus
tggacgttaaatgtccaggttgttt

SEQ ID NO: 172031 - DNA, 25 bp, Saccharomyces pastorianus
caactcctgcctctgaagcaagaaa

SEQ ID NO: 172032 - DNA, 25 bp, Saccharomyces pastorianus
tgaatcctgctcaacagtcttgtgc

SEQ ID NO: 172033 - DNA, 25 bp, Saccharomyces pastorianus
aagactctggtccaaagcccaagat

SEQ ID NO: 172034 - DNA, 25 bp, Saccharomyces pastorianus
tgctcaacagtcttgtgcacaccaa

SEQ ID NO: 172035 - DNA, 25 bp, Saccharomyces pastorianus
gtcacttgtgaatcctgctcaacag

SEQ ID NO: 172036 - DNA, 25 bp, Saccharomyces pastorianus
aagtcctctaacttgacgtctgcgg

SEQ ID NO: 172037 - DNA, 25 bp, Saccharomyces pastorianus
tgcttggacacgttgtctctcacct

SEQ ID NO: 172038 - DNA, 25 bp, Saccharomyces pastorianus
tccatcctggtcgtgctggtggtgt

SEQ ID NO: 172039 - DNA, 25 bp, Saccharomyces pastorianus
gggaatgatcgcctccatcctggtc

SEQ ID NO: 172040 - DNA, 25 bp, Saccharomyces pastorianus
tggtggtgtgcttgctgctctcctt

SEQ ID NO: 172041 - DNA, 25 bp, Saccharomyces pastorianus
tgacgtctgcgggaatgatcgcctc

SEQ ID NO: 172042 - DNA, 25 bp, Saccharomyces pastorianus
tcacctcgttctcgttgttggccag

SEQ ID NO: 172043 - DNA, 25 bp, Saccharomyces pastorianus
gtcacttccaagtcctctaacttga

SEQ ID NO: 172044 - DNA, 25 bp, Saccharomyces pastorianus
ttgttggccagcgtcacttccaagt

SEQ ID NO: 172045 - DNA, 25 bp, Saccharomyces pastorianus
tccttggccggctaatcgaagttga

SEQ ID NO: 172046 - DNA, 25 bp, Saccharomyces pastorianus
tgttctttttcaaaatttcgctcgg

SEQ ID NO: 172047 - DNA, 25 bp, Saccharomyces pastorianus
aggtattgcacactcctaacatagc

SEQ ID NO: 172048 - DNA, 25 bp, Saccharomyces pastorianus
gtagatatcacagcatgctttacca

SEQ ID NO: 172049 - DNA, 25 bp, Saccharomyces pastorianus
gcatgctttaccaaaaacgtcttag

SEQ ID NO: 172050 - DNA, 25 bp, Saccharomyces pastorianus
gcctatgacttactcagtttgaatg

SEQ ID NO: 172051 - DNA, 25 bp, Saccharomyces pastorianus
aattaacgctattggtgacctacaa

SEQ ID NO: 172052 - DNA, 25 bp, Saccharomyces pastorianus
atttcacttccaggacaacaccaaa

SEQ ID NO: 172053 - DNA, 25 bp, Saccharomyces pastorianus
ggtgacctacaatttcacttccagg

SEQ ID NO: 172054 - DNA, 25 bp, Saccharomyces pastorianus
atgaattggctgcagtagatatcac

SEQ ID NO: 172055 - DNA, 25 bp, Saccharomyces pastorianus
acatacactcagcatcatctaatcc

SEQ ID NO: 172056 - DNA, 25 bp, Saccharomyces pastorianus
cacgaacccttataagatctgctca

SEQ ID NO: 172057 - DNA, 25 bp, Saccharomyces pastorianus
gattcaggagcatcacgaaccctta

SEQ ID NO: 172058 - DNA, 25 bp, Saccharomyces pastorianus
ccctgatgaacctgctccaaactta

SEQ ID NO: 172059 - DNA, 25 bp, Saccharomyces pastorianus
gatgaacctgctccaaacttaccct

SEQ ID NO: 172060 - DNA, 25 bp, Saccharomyces pastorianus
gttaccctgacccatttcattatac

SEQ ID NO: 172061 - DNA, 25 bp, Saccharomyces pastorianus
aaccctgatgaacctgctccaaact

SEQ ID NO: 172062 - DNA, 25 bp, Saccharomyces pastorianus
acccatttcattataccactcccaa

SEQ ID NO: 172063 - DNA, 25 bp, Saccharomyces pastorianus
taccctgacccatttcattatacca

SEQ ID NO: 172064 - DNA, 25 bp, Saccharomyces pastorianus
tcgttaccctgacccatttcattat

SEQ ID NO: 172065 - DNA, 25 bp, Saccharomyces pastorianus
tgatgaacctgctccaaacttaccc

SEQ ID NO: 172066 - DNA, 25 bp, Saccharomyces pastorianus
tgctccaaacttaccctccattacc

SEQ ID NO: 172067 - DNA, 25 bp, Saccharomyces pastorianus
ctaatccaaccctgatgaacctgct

SEQ ID NO: 172068 - DNA, 25 bp, Saccharomyces pastorianus
ctgatgaacctgctccaaacttacc

SEQ ID NO: 172069 - DNA, 25 bp, Saccharomyces pastorianus
aaaagcgtgcagttaaagaaagtag

SEQ ID NO: 172070 - DNA, 25 bp, Saccharomyces pastorianus
aaggatgccttaaacaaatgtctca

SEQ ID NO: 172071 - DNA, 25 bp, Saccharomyces pastorianus
gacgccatactgaagactatcttag

SEQ ID NO: 172072 - DNA, 25 bp, Saccharomyces pastorianus
gagtactataaaagactatttggtc

SEQ ID NO: 172073 - DNA, 25 bp, Saccharomyces pastorianus
gataaatgccaccaaaaggagtact

SEQ ID NO: 172074 - DNA, 25 bp, Saccharomyces pastorianus
tggattttattaatgcactcgataa

SEQ ID NO: 172075 - DNA, 25 bp, Saccharomyces pastorianus
aaatgtctcaaagaggcaagcttga

SEQ ID NO: 172076 - DNA, 25 bp, Saccharomyces pastorianus
aggtaaaagagctgatctagagaaa

SEQ ID NO: 172077 - DNA, 25 bp, Saccharomyces pastorianus
aatgccaccaaaaggagtactataa

SEQ ID NO: 172078 - DNA, 25 bp, Saccharomyces pastorianus
caaagaggcaagcttgaacaataaa

SEQ ID NO: 172079 - DNA, 25 bp, Saccharomyces pastorianus
ggtgaagacgccatactgaagacta

SEQ ID NO: 172080 - DNA, 25 bp, Saccharomyces pastorianus
gaagattgaagaacagagctgctcg

SEQ ID NO: 172081 - DNA, 25 bp, Saccharomyces pastorianus
tgacagaagagctcaaagagttgct

SEQ ID NO: 172082 - DNA, 25 bp, Saccharomyces pastorianus
gattgaagaacagagctgctcgtga

SEQ ID NO: 172083 - DNA, 25 bp, Saccharomyces pastorianus
aaaaggctttgaacgaagaagctga

SEQ ID NO: 172084 - DNA, 25 bp, Saccharomyces pastorianus
cagaagagctcaaagagttgctgaa

SEQ ID NO: 172085 - DNA, 25 bp, Saccharomyces pastorianus
agaacagagctgctcgtgacagaag

SEQ ID NO: 172086 - DNA, 25 bp, Saccharomyces pastorianus
gaagctgaagctagaagattgaaga

SEQ ID NO: 172087 - DNA, 25 bp, Saccharomyces pastorianus
cagagctgctcgtgacagaagagct

SEQ ID NO: 172088 - DNA, 25 bp, Saccharomyces pastorianus
gctttgaacgaagaagctgaagcta

SEQ ID NO: 172089 - DNA, 25 bp, Saccharomyces pastorianus
gaagaacagagctgctcgtgacaga

SEQ ID NO: 172090 - DNA, 25 bp, Saccharomyces pastorianus
aacagagctgctcgtgacagaagag

SEQ ID NO: 172091 - DNA, 25 bp, Saccharomyces pastorianus
tagatatgtctacctcaataagaac

SEQ ID NO: 172092 - DNA, 25 bp, Saccharomyces pastorianus
ggttccgtaagaaatatcttcataa

SEQ ID NO: 172093 - DNA, 25 bp, Saccharomyces pastorianus
gaggttccacagttagatatgtcta

SEQ ID NO: 172094 - DNA, 25 bp, Saccharomyces pastorianus
gataatatatcatgcacggatgaga

SEQ ID NO: 172095 - DNA, 25 bp, Saccharomyces pastorianus
ggatacgaatttactgcaagacgcc

SEQ ID NO: 172096 - DNA, 25 bp, Saccharomyces pastorianus
aacatggtggatacgaatttactgc

SEQ ID NO: 172097 - DNA, 25 bp, Saccharomyces pastorianus
aatatccgcatttaggttccgtaag

SEQ ID NO: 172098 - DNA, 25 bp, Saccharomyces pastorianus
gaccagttcttaaacctgaaactag

SEQ ID NO: 172099 - DNA, 25 bp, Saccharomyces pastorianus
atcttcataagaggttccacagtta

SEQ ID NO: 172100 - DNA, 25 bp, Saccharomyces pastorianus
aaggtacactgcaatctgtagacca

SEQ ID NO: 172101 - DNA, 25 bp, Saccharomyces pastorianus
ctgcaatctgtagaccagttcttaa

SEQ ID NO: 172102 - DNA, 25 bp, Saccharomyces pastorianus
ataaatggtctctagcgggatcgaa

SEQ ID NO: 172103 - DNA, 25 bp, Saccharomyces pastorianus
aaatggtctctagcgggatcgaacc

SEQ ID NO: 172104 - DNA, 25 bp, Saccharomyces pastorianus
aaaataaatggtctctagcgggatc

SEQ ID NO: 172105 - DNA, 25 bp, Saccharomyces pastorianus
aataaatggtctctagcgggatcga

SEQ ID NO: 172106 - DNA, 25 bp, Saccharomyces pastorianus
aaaaataaatggtctctagcgggat

SEQ ID NO: 172107 - DNA, 25 bp, Saccharomyces pastorianus
cgaaccgctgatccccgcgttatta

SEQ ID NO: 172108 - DNA, 25 bp, Saccharomyces pastorianus
gtctctagcgggatcgaaccgctga

SEQ ID NO: 172109 - DNA, 25 bp, Saccharomyces pastorianus
ctctagcgggatcgaaccgctgatc

SEQ ID NO: 172110 - DNA, 25 bp, Saccharomyces pastorianus
aaataaatggtctctagcgggatcg

SEQ ID NO: 172111 - DNA, 25 bp, Saccharomyces pastorianus
taaatggtctctagcgggatcgaac

SEQ ID NO: 172112 - DNA, 25 bp, Saccharomyces pastorianus
aatggtctctagcgggatcgaaccg

SEQ ID NO: 172113 - DNA, 25 bp, Saccharomyces pastorianus
tacaatcagcaagggcaccagcagc

SEQ ID NO: 172114 - DNA, 25 bp, Saccharomyces pastorianus
actacaatcaacaagggtacaacca

SEQ ID NO: 172115 - DNA, 25 bp, Saccharomyces pastorianus
aagggcaccagcagcctgtctacgt

SEQ ID NO: 172116 - DNA, 25 bp, Saccharomyces pastorianus
acagcagcccggatactacaatcaa

SEQ ID NO: 172117 - DNA, 25 bp, Saccharomyces pastorianus
ggcaatgaaggttgcatgactgcat

SEQ ID NO: 172118 - DNA, 25 bp, Saccharomyces pastorianus
aggttgcatgactgcatgcctggct

SEQ ID NO: 172119 - DNA, 25 bp, Saccharomyces pastorianus
agagcgtgggtacccaccgcagcaa

SEQ ID NO: 172120 - DNA, 25 bp, Saccharomyces pastorianus
agcagcctgtctacgtccagcaaca

SEQ ID NO: 172121 - DNA, 25 bp, Saccharomyces pastorianus
gcatgactgcatgcctggctgcatt

SEQ ID NO: 172122 - DNA, 25 bp, Saccharomyces pastorianus
tacgtccagcaacagcctcctaaaa

SEQ ID NO: 172123 - DNA, 25 bp, Saccharomyces pastorianus
gcaacagcctcctaaaaagggcaat

SEQ ID NO: 172124 - DNA, 25 bp, Saccharomyces pastorianus
ttcctttatgtggtcattacctccc

SEQ ID NO: 172125 - DNA, 25 bp, Saccharomyces pastorianus
tggcccaatcgatgtgtgtttttaa

SEQ ID NO: 172126 - DNA, 25 bp, Saccharomyces pastorianus
ccctggcccaatcgatgtgtgtttt

SEQ ID NO: 172127 - DNA, 25 bp, Saccharomyces pastorianus
cctggcccaatcgatgtgtgttttt

SEQ ID NO: 172128 - DNA, 25 bp, Saccharomyces pastorianus
ctggcccaatcgatgtgtgttttta

SEQ ID NO: 172129 - DNA, 25 bp, Saccharomyces pastorianus
tccctggcccaatcgatgtgtgttt

SEQ ID NO: 172130 - DNA, 25 bp, Saccharomyces pastorianus
ttatgtggtcattacctccctggcc

SEQ ID NO: 172131 - DNA, 25 bp, Saccharomyces pastorianus
tttatgtggtcattacctccctggc

SEQ ID NO: 172132 - DNA, 25 bp, Saccharomyces pastorianus
tcctttatgtggtcattacctccct

SEQ ID NO: 172133 - DNA, 25 bp, Saccharomyces pastorianus
tgtggtcattacctccctggcccaa

SEQ ID NO: 172134 - DNA, 25 bp, Saccharomyces pastorianus
ctttatgtggtcattacctccctgg

SEQ ID NO: 172135 - DNA, 25 bp, Saccharomyces pastorianus
accaagcctgatcaccgtttatcaa

SEQ ID NO: 172136 - DNA, 25 bp, Saccharomyces pastorianus
caccgtttatcaatatttgggtcat

SEQ ID NO: 172137 - DNA, 25 bp, Saccharomyces pastorianus
agcctgatcaccgtttatcaatatt

SEQ ID NO: 172138 - DNA, 25 bp, Saccharomyces pastorianus
tgtccttcacattcatattacgctg

SEQ ID NO: 172139 - DNA, 25 bp, Saccharomyces pastorianus
ttcacattcatattacgctgacaat

SEQ ID NO: 172140 - DNA, 25 bp, Saccharomyces pastorianus
atttgtccttcacattcatattacg

SEQ ID NO: 172141 - DNA, 25 bp, Saccharomyces pastorianus
ttccaccaagcctgatcaccgttta

SEQ ID NO: 172142 - DNA, 25 bp, Saccharomyces pastorianus
atcaatatttgggtcattttcttat

SEQ ID NO: 172143 - DNA, 25 bp, Saccharomyces pastorianus
caagcctgatcaccgtttatcaata

SEQ ID NO: 172144 - DNA, 25 bp, Saccharomyces pastorianus
gtccttcacattcatattacgctga

SEQ ID NO: 172145 - DNA, 25 bp, Saccharomyces pastorianus
gatcaccgtttatcaatatttgggt

SEQ ID NO: 172146 - DNA, 25 bp, Saccharomyces pastorianus
cgtgccacctggaataatttctaat

SEQ ID NO: 172147 - DNA, 25 bp, Saccharomyces pastorianus
tagtaaaacactcgtgccacctgga

SEQ ID NO: 172148 - DNA, 25 bp, Saccharomyces pastorianus
tcgtcttctgatgaggaaacttcaa

SEQ ID NO: 172149 - DNA, 25 bp, Saccharomyces pastorianus
aagacgagtctagttcatcttcctc

SEQ ID NO: 172150 - DNA, 25 bp, Saccharomyces pastorianus
cgatgatgattctagctcctcaggt

SEQ ID NO: 172151 - DNA, 25 bp, Saccharomyces pastorianus
agagaaccagttagatcttcatcta

SEQ ID NO: 172152 - DNA, 25 bp, Saccharomyces pastorianus
agctcctcaggttcttccacagaag

SEQ ID NO: 172153 - DNA, 25 bp, Saccharomyces pastorianus
atgccacccctgataaaattccagt

SEQ ID NO: 172154 - DNA, 25 bp, Saccharomyces pastorianus
tagttcatcttcctcgtcttctgat

SEQ ID NO: 172155 - DNA, 25 bp, Saccharomyces pastorianus
aaacttcaacatccaggaaggctag

SEQ ID NO: 172156 - DNA, 25 bp, Saccharomyces pastorianus
ttaaacagctaatggacatgtcgtc

SEQ ID NO: 172157 - DNA, 25 bp, Saccharomyces pastorianus
ttgaagccagtttctctcgacaata

SEQ ID NO: 172158 - DNA, 25 bp, Saccharomyces pastorianus
ctcgacaataaaacactggacgatt

SEQ ID NO: 172159 - DNA, 25 bp, Saccharomyces pastorianus
ctaaaccagtagaattgaagccagt

SEQ ID NO: 172160 - DNA, 25 bp, Saccharomyces pastorianus
caactaacagaatcggcctctcatt

SEQ ID NO: 172161 - DNA, 25 bp, Saccharomyces pastorianus
ttatactcagatgctgtgatggcgg

SEQ ID NO: 172162 - DNA, 25 bp, Saccharomyces pastorianus
atggactaaccaactaacagaatcg

SEQ ID NO: 172163 - DNA, 25 bp, Saccharomyces pastorianus
actagtgaaaggaggtgaacaaatt

SEQ ID NO: 172164 - DNA, 25 bp, Saccharomyces pastorianus
gaattgaagccagtttctctcgaca

SEQ ID NO: 172165 - DNA, 25 bp, Saccharomyces pastorianus
gaacaaattagtcagttatactcag

SEQ ID NO: 172166 - DNA, 25 bp, Saccharomyces pastorianus
atagttgggatcaggtactagtgaa

SEQ ID NO: 172167 - DNA, 25 bp, Saccharomyces pastorianus
aacagaatcggcctctcattttgaa

SEQ ID NO: 172168 - DNA, 25 bp, Saccharomyces pastorianus
cagcacctgagtttcgcgtatggtc

SEQ ID NO: 172169 - DNA, 25 bp, Saccharomyces pastorianus
cggtcaggctcttaccagctgaact

SEQ ID NO: 172170 - DNA, 25 bp, Saccharomyces pastorianus
gtcaggctcttaccagctgaactac

SEQ ID NO: 172171 - DNA, 25 bp, Saccharomyces pastorianus
ctcggtcaggctcttaccagctgaa

SEQ ID NO: 172172 - DNA, 25 bp, Saccharomyces pastorianus
gcagcacctgagtttcgcgtatggt

SEQ ID NO: 172173 - DNA, 25 bp, Saccharomyces pastorianus
tcggtcaggctcttaccagctgaac

SEQ ID NO: 172174 - DNA, 25 bp, Saccharomyces pastorianus
agcacctgagtttcgcgtatggtca

SEQ ID NO: 172175 - DNA, 25 bp, Saccharomyces pastorianus
tcaggctcttaccagctgaactaca

SEQ ID NO: 172176 - DNA, 25 bp, Saccharomyces pastorianus
tactcggtcaggctcttaccagctg

SEQ ID NO: 172177 - DNA, 25 bp, Saccharomyces pastorianus
ggtcaggctcttaccagctgaacta

SEQ ID NO: 172178 - DNA, 25 bp, Saccharomyces pastorianus
actcggtcaggctcttaccagctga

SEQ ID NO: 172179 - DNA, 25 bp, Saccharomyces pastorianus
catacctcaaggcatacagttgaag

SEQ ID NO: 172180 - DNA, 25 bp, Saccharomyces pastorianus
actatggagatgaccttgtttctga

SEQ ID NO: 172181 - DNA, 25 bp, Saccharomyces pastorianus
catcttttgcacaatctcattatca

SEQ ID NO: 172182 - DNA, 25 bp, Saccharomyces pastorianus
tacctcaaggcatacagttgaagca

SEQ ID NO: 172183 - DNA, 25 bp, Saccharomyces pastorianus
tatcactatggagatgaccttgttt

SEQ ID NO: 172184 - DNA, 25 bp, Saccharomyces pastorianus
acctcaaggcatacagttgaagcag

SEQ ID NO: 172185 - DNA, 25 bp, Saccharomyces pastorianus
tcattatcactatggagatgacctt

SEQ ID NO: 172186 - DNA, 25 bp, Saccharomyces pastorianus
atacctcaaggcatacagttgaagc

SEQ ID NO: 172187 - DNA, 25 bp, Saccharomyces pastorianus
cattatcactatggagatgaccttg

SEQ ID NO: 172188 - DNA, 25 bp, Saccharomyces pastorianus
ctcattatcactatggagatgacct

SEQ ID NO: 172189 - DNA, 25 bp, Saccharomyces pastorianus
tcactatggagatgaccttgtttct

SEQ ID NO: 172190 - DNA, 25 bp, Saccharomyces pastorianus
gcaactgttatattcttcgtcatga

SEQ ID NO: 172191 - DNA, 25 bp, Saccharomyces pastorianus
catcctgacctaccaattgctgaat

SEQ ID NO: 172192 - DNA, 25 bp, Saccharomyces pastorianus
ctcccaggaatggttctcctttgaa

SEQ ID NO: 172193 - DNA, 25 bp, Saccharomyces pastorianus
actcttgccctttttgtcgtacttg

SEQ ID NO: 172194 - DNA, 25 bp, Saccharomyces pastorianus
aattgctgaattgttgccgtatatc

SEQ ID NO: 172195 - DNA, 25 bp, Saccharomyces pastorianus
gattgtgagcgctttttcgaacgta

SEQ ID NO: 172196 - DNA, 25 bp, Saccharomyces pastorianus
tcgtcatgagtatccgttctccaag

SEQ ID NO: 172197 - DNA, 25 bp, Saccharomyces pastorianus
ctccgttatctaccctcaagaaagt

SEQ ID NO: 172198 - DNA, 25 bp, Saccharomyces pastorianus
tcgtacttgtttgctcccaggaatg

SEQ ID NO: 172199 - DNA, 25 bp, Saccharomyces pastorianus
aaacagcgtttttctcaagtagcaa

SEQ ID NO: 172200 - DNA, 25 bp, Saccharomyces pastorianus
gaaagtttccggctcagacgtgttt

SEQ ID NO: 172201 - DNA, 25 bp, Saccharomyces pastorianus
tccttcgattttttgcaactcttcc

SEQ ID NO: 172202 - DNA, 25 bp, Saccharomyces pastorianus
acttataacagaatgccctctgtaa

SEQ ID NO: 172203 - DNA, 25 bp, Saccharomyces pastorianus
atgccctctgtaagtataaggacta

SEQ ID NO: 172204 - DNA, 25 bp, Saccharomyces pastorianus
tgagtatccttcgattttttgcaac

SEQ ID NO: 172205 - DNA, 25 bp, Saccharomyces pastorianus
agtataaggactattatcgttaggt

SEQ ID NO: 172206 - DNA, 25 bp, Saccharomyces pastorianus
aatggaactgagtatccttcgattt

SEQ ID NO: 172207 - DNA, 25 bp, Saccharomyces pastorianus
ggaactgagtatccttcgatttttt

SEQ ID NO: 172208 - DNA, 25 bp, Saccharomyces pastorianus
gccctctgtaagtataaggactatt

SEQ ID NO: 172209 - DNA, 25 bp, Saccharomyces pastorianus
gtatccttcgattttttgcaactct

SEQ ID NO: 172210 - DNA, 25 bp, Saccharomyces pastorianus
actgagtatccttcgattttttgca

SEQ ID NO: 172211 - DNA, 25 bp, Saccharomyces pastorianus
tcgattttttgcaactcttccccca

SEQ ID NO: 172212 - DNA, 25 bp, Saccharomyces pastorianus
ggttcccaaacctatataaatatat

SEQ ID NO: 172213 - DNA, 25 bp, Saccharomyces pastorianus
gttgtgcacttttttttcgaagatt

SEQ ID NO: 172214 - DNA, 25 bp, Saccharomyces pastorianus
tttacacagattttcccgcttgttg

SEQ ID NO: 172215 - DNA, 25 bp, Saccharomyces pastorianus
tcttttcttcgtagtttttgtacag

SEQ ID NO: 172216 - DNA, 25 bp, Saccharomyces pastorianus
gatcacttatacagctttacacaga

SEQ ID NO: 172217 - DNA, 25 bp, Saccharomyces pastorianus
aagagggatgcgtttggtacaataa

SEQ ID NO: 172218 - DNA, 25 bp, Saccharomyces pastorianus
acagctttacacagattttcccgct

SEQ ID NO: 172219 - DNA, 25 bp, Saccharomyces pastorianus
tattgaagagggatgcgtttggtac

SEQ ID NO: 172220 - DNA, 25 bp, Saccharomyces pastorianus
cgtagtttttgtacagatcacttat

SEQ ID NO: 172221 - DNA, 25 bp, Saccharomyces pastorianus
agattttcccgcttgttgtgcactt

SEQ ID NO: 172222 - DNA, 25 bp, Saccharomyces pastorianus
tttcccgcttgttgtgcactttttt

SEQ ID NO: 172223 - DNA, 25 bp, Saccharomyces pastorianus
gaaactactaaacgaactgatgaaa

SEQ ID NO: 172224 - DNA, 25 bp, Saccharomyces pastorianus
cggcaacggaaatcgaagtgatatt

SEQ ID NO: 172225 - DNA, 25 bp, Saccharomyces pastorianus
gtaaacagtctgctgagccacaaaa

SEQ ID NO: 172226 - DNA, 25 bp, Saccharomyces pastorianus
cagtaacggcaacggaaatcgaagt

SEQ ID NO: 172227 - DNA, 25 bp, Saccharomyces pastorianus
aaacagtctgctgagccacaaaaaa

SEQ ID NO: 172228 - DNA, 25 bp, Saccharomyces pastorianus
caagtactccagtaacggcaacgga

SEQ ID NO: 172229 - DNA, 25 bp, Saccharomyces pastorianus
gaagtaaacagtctgctgagccaca

SEQ ID NO: 172230 - DNA, 25 bp, Saccharomyces pastorianus
gataattctttgaccaatgctggca

SEQ ID NO: 172231 - DNA, 25 bp, Saccharomyces pastorianus
ggaaataccaagtactccagtaacg

SEQ ID NO: 172232 - DNA, 25 bp, Saccharomyces pastorianus
acaaaaaaattcaagcgccaacgct

SEQ ID NO: 172233 - DNA, 25 bp, Saccharomyces pastorianus
gtactccagtaacggcaacggaaat

SEQ ID NO: 172234 - DNA, 25 bp, Saccharomyces pastorianus
tacaacagttggtccacatgcctca

SEQ ID NO: 172235 - DNA, 25 bp, Saccharomyces pastorianus
tcatcaagtgttgctggtatgtatc

SEQ ID NO: 172236 - DNA, 25 bp, Saccharomyces pastorianus
cagttcaagttcagctgatctaagt

SEQ ID NO: 172237 - DNA, 25 bp, Saccharomyces pastorianus
ttgagtctactacaacagttggtcc

SEQ ID NO: 172238 - DNA, 25 bp, Saccharomyces pastorianus
gtgactacttcaattaacccaacta

SEQ ID NO: 172239 - DNA, 25 bp, Saccharomyces pastorianus
cggccgttcaaactagcccagctga

SEQ ID NO: 172240 - DNA, 25 bp, Saccharomyces pastorianus
attaacccaactactccagctgatt

SEQ ID NO: 172241 - DNA, 25 bp, Saccharomyces pastorianus
agttctatagtcagttctacttcag

SEQ ID NO: 172242 - DNA, 25 bp, Saccharomyces pastorianus
acatgcctcatcaagtgttgctggt

SEQ ID NO: 172243 - DNA, 25 bp, Saccharomyces pastorianus
gttcaagtgctgtgactacttcaat

SEQ ID NO: 172244 - DNA, 25 bp, Saccharomyces pastorianus
tgattcaactacttcggccgttcaa

SEQ ID NO: 172245 - DNA, 25 bp, Saccharomyces pastorianus
attgtgtgaggctcttcctctgctc

SEQ ID NO: 172246 - DNA, 25 bp, Saccharomyces pastorianus
gaacgcagcattgtgtgaggctctt

SEQ ID NO: 172247 - DNA, 25 bp, Saccharomyces pastorianus
cgcattattactatccccgagcaaa

SEQ ID NO: 172248 - DNA, 25 bp, Saccharomyces pastorianus
acgcagcattgtgtgaggctcttcc

SEQ ID NO: 172249 - DNA, 25 bp, Saccharomyces pastorianus
acaccacacacggtctgtttcgcct

SEQ ID NO: 172250 - DNA, 25 bp, Saccharomyces pastorianus
agcattgtgtgaggctcttcctctg

SEQ ID NO: 172251 - DNA, 25 bp, Saccharomyces pastorianus
cattattactatccccgagcaaact

SEQ ID NO: 172252 - DNA, 25 bp, Saccharomyces pastorianus
tgctcgccacgtgctcccacgaaat

SEQ ID NO: 172253 - DNA, 25 bp, Saccharomyces pastorianus
gcagcattgtgtgaggctcttcctc

SEQ ID NO: 172254 - DNA, 25 bp, Saccharomyces pastorianus
aagaacgcagcattgtgtgaggctc

SEQ ID NO: 172255 - DNA, 25 bp, Saccharomyces pastorianus
tgtgaggctcttcctctgctcgcca

SEQ ID NO: 172256 - DNA, 25 bp, Saccharomyces pastorianus
ttgcggctcctaaataaccagtgcg

SEQ ID NO: 172257 - DNA, 25 bp, Saccharomyces pastorianus
aagacaaacaacaccgaaagtgaat

SEQ ID NO: 172258 - DNA, 25 bp, Saccharomyces pastorianus
gttttcaaagagagcgattccatcg

SEQ ID NO: 172259 - DNA, 25 bp, Saccharomyces pastorianus
cctaaataaccagtgcgacaagcat

SEQ ID NO: 172260 - DNA, 25 bp, Saccharomyces pastorianus
ccagtgcgacaagcatgcattaaat

SEQ ID NO: 172261 - DNA, 25 bp, Saccharomyces pastorianus
gattccatcgattccgctttggaag

SEQ ID NO: 172262 - DNA, 25 bp, Saccharomyces pastorianus
aatgagctagaattgcggctcctaa

SEQ ID NO: 172263 - DNA, 25 bp, Saccharomyces pastorianus
gaattgcggctcctaaataaccagt

SEQ ID NO: 172264 - DNA, 25 bp, Saccharomyces pastorianus
ggctcctaaataaccagtgcgacaa

SEQ ID NO: 172265 - DNA, 25 bp, Saccharomyces pastorianus
atgcattaaatattcaactgaccca

SEQ ID NO: 172266 - DNA, 25 bp, Saccharomyces pastorianus
atcgattccgctttggaagaactaa

SEQ ID NO: 172267 - DNA, 25 bp, Saccharomyces pastorianus
gtatccatccgaagacgtcgctgct

SEQ ID NO: 172268 - DNA, 25 bp, Saccharomyces pastorianus
cgctgctctaaagaagaccagaaag

SEQ ID NO: 172269 - DNA, 25 bp, Saccharomyces pastorianus
atccgaagacgtcgctgctctaaag

SEQ ID NO: 172270 - DNA, 25 bp, Saccharomyces pastorianus
gacgtcgctgctctaaagaagacca

SEQ ID NO: 172271 - DNA, 25 bp, Saccharomyces pastorianus
gaagacgtcgctgctctaaagaaga

SEQ ID NO: 172272 - DNA, 25 bp, Saccharomyces pastorianus
acgtcgctgctctaaagaagaccag

SEQ ID NO: 172273 - DNA, 25 bp, Saccharomyces pastorianus
atccatccgaagacgtcgctgctct

SEQ ID NO: 172274 - DNA, 25 bp, Saccharomyces pastorianus
gtcgctgctctaaagaagaccagaa

SEQ ID NO: 172275 - DNA, 25 bp, Saccharomyces pastorianus
cgaagacgtcgctgctctaaagaag

SEQ ID NO: 172276 - DNA, 25 bp, Saccharomyces pastorianus
ccgaagacgtcgctgctctaaagaa

SEQ ID NO: 172277 - DNA, 25 bp, Saccharomyces pastorianus
aagacgtcgctgctctaaagaagac

SEQ ID NO: 172278 - DNA, 25 bp, Saccharomyces pastorianus
aactcaaacatgtagggtgccaaat

SEQ ID NO: 172279 - DNA, 25 bp, Saccharomyces pastorianus
ccttacatatggtgcgccagaaacc

SEQ ID NO: 172280 - DNA, 25 bp, Saccharomyces pastorianus
tgaagactccttacatatggtgcgc

SEQ ID NO: 172281 - DNA, 25 bp, Saccharomyces pastorianus
gactccttacatatggtgcgccaga

SEQ ID NO: 172282 - DNA, 25 bp, Saccharomyces pastorianus
gcttcaagccgctctgtgtcggcct

SEQ ID NO: 172283 - DNA, 25 bp, Saccharomyces pastorianus
gagaagtacgcatcgtacgagctgt

SEQ ID NO: 172284 - DNA, 25 bp, Saccharomyces pastorianus
gtatgcacattgagaacaacgtgta

SEQ ID NO: 172285 - DNA, 25 bp, Saccharomyces pastorianus
gggtgatcgtaatcctttgctattg

SEQ ID NO: 172286 - DNA, 25 bp, Saccharomyces pastorianus
tgtgtcggcctcttttcgccaggta

SEQ ID NO: 172287 - DNA, 25 bp, Saccharomyces pastorianus
agctcatatacgtgtagtaactcaa

SEQ ID NO: 172288 - DNA, 25 bp, Saccharomyces pastorianus
agtaactcaaacatgtagggtgcca

SEQ ID NO: 172289 - DNA, 25 bp, Saccharomyces pastorianus
gaaagggagttgatagttctaacaa

SEQ ID NO: 172290 - DNA, 25 bp, Saccharomyces pastorianus
gggatttcgttgttgatattaggta

SEQ ID NO: 172291 - DNA, 25 bp, Saccharomyces pastorianus
tcactttgtcttcctttcttttata

SEQ ID NO: 172292 - DNA, 25 bp, Saccharomyces pastorianus
tcagaaaatgggtgaacttcgtatt

SEQ ID NO: 172293 - DNA, 25 bp, Saccharomyces pastorianus
gaacttcgtattaattgttgggatt

SEQ ID NO: 172294 - DNA, 25 bp, Saccharomyces pastorianus
gttctcctcaacagtcttggaattc

SEQ ID NO: 172295 - DNA, 25 bp, Saccharomyces pastorianus
agaagttctcctcaacagtcttgga

SEQ ID NO: 172296 - DNA, 25 bp, Saccharomyces pastorianus
ctcaacagtcttggaattcacgaaa

SEQ ID NO: 172297 - DNA, 25 bp, Saccharomyces pastorianus
gtcttggaattcacgaaagggagtt

SEQ ID NO: 172298 - DNA, 25 bp, Saccharomyces pastorianus
attatttgcacgtaacaattatcag

SEQ ID NO: 172299 - DNA, 25 bp, Saccharomyces pastorianus
taaaatcactttgtcttcctttctt

SEQ ID NO: 172300 - DNA, 25 bp, Saccharomyces pastorianus
gaatgtccgagaaaacctgactagt

SEQ ID NO: 172301 - DNA, 25 bp, Saccharomyces pastorianus
agccctttagagattagtacgtgtg

SEQ ID NO: 172302 - DNA, 25 bp, Saccharomyces pastorianus
caattctgagctttcttcatttaaa

SEQ ID NO: 172303 - DNA, 25 bp, Saccharomyces pastorianus
tatggcctgttctcctttgaagaga

SEQ ID NO: 172304 - DNA, 25 bp, Saccharomyces pastorianus
ggcggaaaacaaacgctcttctgac

SEQ ID NO: 172305 - DNA, 25 bp, Saccharomyces pastorianus
gaggccattgtctcgaaagaatagc

SEQ ID NO: 172306 - DNA, 25 bp, Saccharomyces pastorianus
aggcctcctgggtgaagttgataat

SEQ ID NO: 172307 - DNA, 25 bp, Saccharomyces pastorianus
aagaacggtttgactcagcagccca

SEQ ID NO: 172308 - DNA, 25 bp, Saccharomyces pastorianus
tcttctgacagcttcgtttcgttaa

SEQ ID NO: 172309 - DNA, 25 bp, Saccharomyces pastorianus
gattccaaaaggtatggcctgttct

SEQ ID NO: 172310 - DNA, 25 bp, Saccharomyces pastorianus
gggtgaagatgaacatagcccttta

SEQ ID NO: 172311 - DNA, 25 bp, Saccharomyces pastorianus
aaatcgcgaaggagacgcaagcatt

SEQ ID NO: 172312 - DNA, 25 bp, Saccharomyces pastorianus
ctttgaggtcatgctctagctcagt

SEQ ID NO: 172313 - DNA, 25 bp, Saccharomyces pastorianus
tttgatgaagtgatgctatgatagc

SEQ ID NO: 172314 - DNA, 25 bp, Saccharomyces pastorianus
aactttgaggtcatgctctagctca

SEQ ID NO: 172315 - DNA, 25 bp, Saccharomyces pastorianus
gaaactttgaggtcatgctctagct

SEQ ID NO: 172316 - DNA, 25 bp, Saccharomyces pastorianus
gagacgcaagcatttgatgaagtga

SEQ ID NO: 172317 - DNA, 25 bp, Saccharomyces pastorianus
gaaggagacgcaagcatttgatgaa

SEQ ID NO: 172318 - DNA, 25 bp, Saccharomyces pastorianus
gacgcaagcatttgatgaagtgatg

SEQ ID NO: 172319 - DNA, 25 bp, Saccharomyces pastorianus
gttcacgggaaaatcgcgaaggaga

SEQ ID NO: 172320 - DNA, 25 bp, Saccharomyces pastorianus
atcgcgaaggagacgcaagcatttg

SEQ ID NO: 172321 - DNA, 25 bp, Saccharomyces pastorianus
aaactttgaggtcatgctctagctc

SEQ ID NO: 172322 - DNA, 25 bp, Saccharomyces pastorianus
aacccgcgcgggttcaacatcgctg

SEQ ID NO: 172323 - DNA, 25 bp, Saccharomyces pastorianus
actggcgcgctcgaacagcagcgga

SEQ ID NO: 172324 - DNA, 25 bp, Saccharomyces pastorianus
cctgttcgaggacccgtggttccag

SEQ ID NO: 172325 - DNA, 25 bp, Saccharomyces pastorianus
aggcacagaataccacctggcccgg

SEQ ID NO: 172326 - DNA, 25 bp, Saccharomyces pastorianus
gaagcctattatcaagactacaacg

SEQ ID NO: 172327 - DNA, 25 bp, Saccharomyces pastorianus
acaccattcccgacctgttcgagga

SEQ ID NO: 172328 - DNA, 25 bp, Saccharomyces pastorianus
tgatatagcagtcagcagtcccgca

SEQ ID NO: 172329 - DNA, 25 bp, Saccharomyces pastorianus
agactacaacgtacgacaacccgcg

SEQ ID NO: 172330 - DNA, 25 bp, Saccharomyces pastorianus
agaagcgctgttcacgctgtgcgaa

SEQ ID NO: 172331 - DNA, 25 bp, Saccharomyces pastorianus
cggaacttccagagcggcacgcggc

SEQ ID NO: 172332 - DNA, 25 bp, Saccharomyces pastorianus
gccgtcacgtgcaagaagcctatta

SEQ ID NO: 172333 - DNA, 25 bp, Saccharomyces pastorianus
taatgctctctactcactttattga

SEQ ID NO: 172334 - DNA, 25 bp, Saccharomyces pastorianus
attgagtggcgatttgctatttttt

SEQ ID NO: 172335 - DNA, 25 bp, Saccharomyces pastorianus
ttttttgatataatgctctctactc

SEQ ID NO: 172336 - DNA, 25 bp, Saccharomyces pastorianus
ttttttcttcgcaccatgcgtcacg

SEQ ID NO: 172337 - DNA, 25 bp, Saccharomyces pastorianus
aatgctctctactcactttattgag

SEQ ID NO: 172338 - DNA, 25 bp, Saccharomyces pastorianus
gatataatgctctctactcacttta

SEQ ID NO: 172339 - DNA, 25 bp, Saccharomyces pastorianus
ctactcactttattgagtggcgatt

SEQ ID NO: 172340 - DNA, 25 bp, Saccharomyces pastorianus
actttattgagtggcgatttgctat

SEQ ID NO: 172341 - DNA, 25 bp, Saccharomyces pastorianus
tgctctctactcactttattgagtg

SEQ ID NO: 172342 - DNA, 25 bp, Saccharomyces pastorianus
ttcttcgcaccatgcgtcacgttaa

SEQ ID NO: 172343 - DNA, 25 bp, Saccharomyces pastorianus
tctctactcactttattgagtggcg

SEQ ID NO: 172344 - DNA, 25 bp, Saccharomyces pastorianus
ctgatgcactagaagttatcaaaca

SEQ ID NO: 172345 - DNA, 25 bp, Saccharomyces pastorianus
aagaaagcactgactgatgcactag

SEQ ID NO: 172346 - DNA, 25 bp, Saccharomyces pastorianus
tgaagaaagcactgactgatgcact

SEQ ID NO: 172347 - DNA, 25 bp, Saccharomyces pastorianus
cctgttattattatccaagccttga

SEQ ID NO: 172348 - DNA, 25 bp, Saccharomyces pastorianus
gccttgaagaaagcactgactgatg

SEQ ID NO: 172349 - DNA, 25 bp, Saccharomyces pastorianus
tatcaaacaagtaagtaaacctgtc

SEQ ID NO: 172350 - DNA, 25 bp, Saccharomyces pastorianus
gactgatgcactagaagttatcaaa

SEQ ID NO: 172351 - DNA, 25 bp, Saccharomyces pastorianus
ctgttattattatccaagccttgaa

SEQ ID NO: 172352 - DNA, 25 bp, Saccharomyces pastorianus
agccttgaagaaagcactgactgat

SEQ ID NO: 172353 - DNA, 25 bp, Saccharomyces pastorianus
gttattattatccaagccttgaaga

SEQ ID NO: 172354 - DNA, 25 bp, Saccharomyces pastorianus
caagccttgaagaaagcactgactg

SEQ ID NO: 172355 - DNA, 25 bp, Saccharomyces pastorianus
aacttgcattttgcggacggaacaa

SEQ ID NO: 172356 - DNA, 25 bp, Saccharomyces pastorianus
ttttgcggacggaacaactttcgat

SEQ ID NO: 172357 - DNA, 25 bp, Saccharomyces pastorianus
aaacttgcattttgcggacggaaca

SEQ ID NO: 172358 - DNA, 25 bp, Saccharomyces pastorianus
gcattttgcggacggaacaactttc

SEQ ID NO: 172359 - DNA, 25 bp, Saccharomyces pastorianus
ttgcattttgcggacggaacaactt

SEQ ID NO: 172360 - DNA, 25 bp, Saccharomyces pastorianus
ttgcggacggaacaactttcgatgg

SEQ ID NO: 172361 - DNA, 25 bp, Saccharomyces pastorianus
acaactttcgatggaggcttggtgg

SEQ ID NO: 172362 - DNA, 25 bp, Saccharomyces pastorianus
gcggacggaacaactttcgatggag

SEQ ID NO: 172363 - DNA, 25 bp, Saccharomyces pastorianus
tcctactccccggaaaaacttgcat

SEQ ID NO: 172364 - DNA, 25 bp, Saccharomyces pastorianus
acggaacaactttcgatggaggctt

SEQ ID NO: 172365 - DNA, 25 bp, Saccharomyces pastorianus
gaacaactttcgatggaggcttggt

SEQ ID NO: 172366 - DNA, 25 bp, Saccharomyces pastorianus
ttaaagcccatactcagtctgttct

SEQ ID NO: 172367 - DNA, 25 bp, Saccharomyces pastorianus
gttaaagcccatactcagtctgttc

SEQ ID NO: 172368 - DNA, 25 bp, Saccharomyces pastorianus
aagcttattgttaaagcccatactc

SEQ ID NO: 172369 - DNA, 25 bp, Saccharomyces pastorianus
ttgttaaagcccatactcagtctgt

SEQ ID NO: 172370 - DNA, 25 bp, Saccharomyces pastorianus
tataaaacccttttacgcgcgcctg

SEQ ID NO: 172371 - DNA, 25 bp, Saccharomyces pastorianus
attgttaaagcccatactcagtctg

SEQ ID NO: 172372 - DNA, 25 bp, Saccharomyces pastorianus
taaagcccatactcagtctgttcta

SEQ ID NO: 172373 - DNA, 25 bp, Saccharomyces pastorianus
cttattgttaaagcccatactcagt

SEQ ID NO: 172374 - DNA, 25 bp, Saccharomyces pastorianus
agcttattgttaaagcccatactca

SEQ ID NO: 172375 - DNA, 25 bp, Saccharomyces pastorianus
aaagcccatactcagtctgttctaa

SEQ ID NO: 172376 - DNA, 25 bp, Saccharomyces pastorianus
tgttaaagcccatactcagtctgtt

SEQ ID NO: 172377 - DNA, 25 bp, Saccharomyces pastorianus
aatgcaacagcgccccagcgtgaag

SEQ ID NO: 172378 - DNA, 25 bp, Saccharomyces pastorianus
taagagaatgcaacagcgccccagc

SEQ ID NO: 172379 - DNA, 25 bp, Saccharomyces pastorianus
aagagaatgcaacagcgccccagcg

SEQ ID NO: 172380 - DNA, 25 bp, Saccharomyces pastorianus
cgcttcgagcttggtataagagaat

SEQ ID NO: 172381 - DNA, 25 bp, Saccharomyces pastorianus
gtataagagaatgcaacagcgcccc

SEQ ID NO: 172382 - DNA, 25 bp, Saccharomyces pastorianus
agagaatgcaacagcgccccagcgt

SEQ ID NO: 172383 - DNA, 25 bp, Saccharomyces pastorianus
gagaatgcaacagcgccccagcgtg

SEQ ID NO: 172384 - DNA, 25 bp, Saccharomyces pastorianus
ggcgcttcgagcttggtataagaga

SEQ ID NO: 172385 - DNA, 25 bp, Saccharomyces pastorianus
gcgaggcgcttcgagcttggtataa

SEQ ID NO: 172386 - DNA, 25 bp, Saccharomyces pastorianus
gaggcgcttcgagcttggtataaga

SEQ ID NO: 172387 - DNA, 25 bp, Saccharomyces pastorianus
ataagagaatgcaacagcgccccag

SEQ ID NO: 172388 - DNA, 25 bp, Saccharomyces pastorianus
gatcatgaggatttcgggccgaacc

SEQ ID NO: 172389 - DNA, 25 bp, Saccharomyces pastorianus
cacaatgggttgcagaatttctcga

SEQ ID NO: 172390 - DNA, 25 bp, Saccharomyces pastorianus
atcctggtgttttacttcttggcat

SEQ ID NO: 172391 - DNA, 25 bp, Saccharomyces pastorianus
gatatcatatcttcagacagctaga

SEQ ID NO: 172392 - DNA, 25 bp, Saccharomyces pastorianus
acattttcacgtgagcttgcaacag

SEQ ID NO: 172393 - DNA, 25 bp, Saccharomyces pastorianus
ggccgaacctgctccgaagaaatct

SEQ ID NO: 172394 - DNA, 25 bp, Saccharomyces pastorianus
gaagaaatctttcggccaggcatca

SEQ ID NO: 172395 - DNA, 25 bp, Saccharomyces pastorianus
aattactggttagtcatcctggtgt

SEQ ID NO: 172396 - DNA, 25 bp, Saccharomyces pastorianus
tggcattcggctcgatcatgaggat

SEQ ID NO: 172397 - DNA, 25 bp, Saccharomyces pastorianus
gccaggcatcatatcacaatgggtt

SEQ ID NO: 172398 - DNA, 25 bp, Saccharomyces pastorianus
ggtaccaaagtactgtatacacatg

SEQ ID NO: 172399 - DNA, 25 bp, Saccharomyces pastorianus
ggtcaagctgttgggttacactcta

SEQ ID NO: 172400 - DNA, 25 bp, Saccharomyces pastorianus
gaattcttcagtaccgttaccttca

SEQ ID NO: 172401 - DNA, 25 bp, Saccharomyces pastorianus
taatggctatatgagtactccccaa

SEQ ID NO: 172402 - DNA, 25 bp, Saccharomyces pastorianus
ttcagtaccgttaccttcacaaggt

SEQ ID NO: 172403 - DNA, 25 bp, Saccharomyces pastorianus
gttacactctaatcaatcgcaccaa

SEQ ID NO: 172404 - DNA, 25 bp, Saccharomyces pastorianus
accttcacaaggtcaagctgttggg

SEQ ID NO: 172405 - DNA, 25 bp, Saccharomyces pastorianus
tggccaatctttcctcttgagggat

SEQ ID NO: 172406 - DNA, 25 bp, Saccharomyces pastorianus
agatttgtccgttgaaccatctgac

SEQ ID NO: 172407 - DNA, 25 bp, Saccharomyces pastorianus
gaaccatctgacattggccaatctt

SEQ ID NO: 172408 - DNA, 25 bp, Saccharomyces pastorianus
tataccttccagcattaatggctat

SEQ ID NO: 172409 - DNA, 25 bp, Saccharomyces pastorianus
atcgcaccaagatttgtccgttgaa

SEQ ID NO: 172410 - DNA, 25 bp, Saccharomyces pastorianus
aacgcatctacgaaggtgctcacat

SEQ ID NO: 172411 - DNA, 25 bp, Saccharomyces pastorianus
tttattcaacttcccaacattctca

SEQ ID NO: 172412 - DNA, 25 bp, Saccharomyces pastorianus
attttcacgacatttcttctccaaa

SEQ ID NO: 172413 - DNA, 25 bp, Saccharomyces pastorianus
accgcgattactggagaggttgtcc

SEQ ID NO: 172414 - DNA, 25 bp, Saccharomyces pastorianus
atttcttctccaaataccgcgatta

SEQ ID NO: 172415 - DNA, 25 bp, Saccharomyces pastorianus
aaggtgctcacattttttattcaac

SEQ ID NO: 172416 - DNA, 25 bp, Saccharomyces pastorianus
acaacaatcattaacgcatctacga

SEQ ID NO: 172417 - DNA, 25 bp, Saccharomyces pastorianus
tattttctttcgtcaatttgtccaa

SEQ ID NO: 172418 - DNA, 25 bp, Saccharomyces pastorianus
ttcacgacatttcttctccaaatac

SEQ ID NO: 172419 - DNA, 25 bp, Saccharomyces pastorianus
ggagaggttgtccattaaacacaac

SEQ ID NO: 172420 - DNA, 25 bp, Saccharomyces pastorianus
tcttctccaaataccgcgattactg

SEQ ID NO: 172421 - DNA, 25 bp, Saccharomyces pastorianus
agctctgtccgatataccgcctatt

SEQ ID NO: 172422 - DNA, 25 bp, Saccharomyces pastorianus
aactacgagcgtattgtgttatatc

SEQ ID NO: 172423 - DNA, 25 bp, Saccharomyces pastorianus
tgcatcaactacgagcgtattgtgt

SEQ ID NO: 172424 - DNA, 25 bp, Saccharomyces pastorianus
tcaactacgagcgtattgtgttata

SEQ ID NO: 172425 - DNA, 25 bp, Saccharomyces pastorianus
cgtattgtgttatatcagctctgtc

SEQ ID NO: 172426 - DNA, 25 bp, Saccharomyces pastorianus
catcaactacgagcgtattgtgtta

SEQ ID NO: 172427 - DNA, 25 bp, Saccharomyces pastorianus
tacgagcgtattgtgttatatcagc

SEQ ID NO: 172428 - DNA, 25 bp, Saccharomyces pastorianus
atgcatcaactacgagcgtattgtg

SEQ ID NO: 172429 - DNA, 25 bp, Saccharomyces pastorianus
actacgagcgtattgtgttatatca

SEQ ID NO: 172430 - DNA, 25 bp, Saccharomyces pastorianus
cagctctgtccgatataccgcctat

SEQ ID NO: 172431 - DNA, 25 bp, Saccharomyces pastorianus
gcatcaactacgagcgtattgtgtt

SEQ ID NO: 172432 - DNA, 25 bp, Saccharomyces pastorianus
caaacaagaacagcaaggtcgtgta

SEQ ID NO: 172433 - DNA, 25 bp, Saccharomyces pastorianus
atcacagttcaaattcaccaacgca

SEQ ID NO: 172434 - DNA, 25 bp, Saccharomyces pastorianus
aaggtcgtgtatggtgaacttctac

SEQ ID NO: 172435 - DNA, 25 bp, Saccharomyces pastorianus
taccgttatggtagtggaaatagag

SEQ ID NO: 172436 - DNA, 25 bp, Saccharomyces pastorianus
tatggtgaacttctacaaggtgaga

SEQ ID NO: 172437 - DNA, 25 bp, Saccharomyces pastorianus
gaacttctacaaggtgagaaatcac

SEQ ID NO: 172438 - DNA, 25 bp, Saccharomyces pastorianus
gagacaacaagaaagacaggagaat

SEQ ID NO: 172439 - DNA, 25 bp, Saccharomyces pastorianus
gttcaaattcaccaacgcaaaggtt

SEQ ID NO: 172440 - DNA, 25 bp, Saccharomyces pastorianus
aacagcaaggtcgtgtatggtgaac

SEQ ID NO: 172441 - DNA, 25 bp, Saccharomyces pastorianus
gagaaatcacagttcaaattcacca

SEQ ID NO: 172442 - DNA, 25 bp, Saccharomyces pastorianus
tgggaaagttggataccgttatggt

SEQ ID NO: 172443 - DNA, 25 bp, Saccharomyces pastorianus
tgttgagctcctgggtgttcattca

SEQ ID NO: 172444 - DNA, 25 bp, Saccharomyces pastorianus
gaagcggttaaaaatctgttgtggg

SEQ ID NO: 172445 - DNA, 25 bp, Saccharomyces pastorianus
tcatcctgtctctaaccctgaatag

SEQ ID NO: 172446 - DNA, 25 bp, Saccharomyces pastorianus
tctgacccaatctttgaagcggtta

SEQ ID NO: 172447 - DNA, 25 bp, Saccharomyces pastorianus
ttcattcacccacagggcaattctg

SEQ ID NO: 172448 - DNA, 25 bp, Saccharomyces pastorianus
ggtgttcattcacccacagggcaat

SEQ ID NO: 172449 - DNA, 25 bp, Saccharomyces pastorianus
gggcaattctgacccaatctttgaa

SEQ ID NO: 172450 - DNA, 25 bp, Saccharomyces pastorianus
taaagatcatcctgtctctaaccct

SEQ ID NO: 172451 - DNA, 25 bp, Saccharomyces pastorianus
ggttcctaaagatcatcctgtctct

SEQ ID NO: 172452 - DNA, 25 bp, Saccharomyces pastorianus
aaaaatactatgtttgttgagctcc

SEQ ID NO: 172453 - DNA, 25 bp, Saccharomyces pastorianus
ctgtctctaaccctgaataggaaaa

SEQ ID NO: 172454 - DNA, 25 bp, Saccharomyces pastorianus
ctccacttgtgcgttactaatttat

SEQ ID NO: 172455 - DNA, 25 bp, Saccharomyces pastorianus
gtatctccacttgtgcgttactaat

SEQ ID NO: 172456 - DNA, 25 bp, Saccharomyces pastorianus
tgtgcgttactaatttattctaaaa

SEQ ID NO: 172457 - DNA, 25 bp, Saccharomyces pastorianus
atgggtccctgtatctccacttgtg

SEQ ID NO: 172458 - DNA, 25 bp, Saccharomyces pastorianus
tccctgtatctccacttgtgcgtta

SEQ ID NO: 172459 - DNA, 25 bp, Saccharomyces pastorianus
gttaaggatgggtccctgtatctcc

SEQ ID NO: 172460 - DNA, 25 bp, Saccharomyces pastorianus
ctgtatctccacttgtgcgttacta

SEQ ID NO: 172461 - DNA, 25 bp, Saccharomyces pastorianus
cacttgtgcgttactaatttattct

SEQ ID NO: 172462 - DNA, 25 bp, Saccharomyces pastorianus
aaggatgggtccctgtatctccact

SEQ ID NO: 172463 - DNA, 25 bp, Saccharomyces pastorianus
tattctaaaattccagagtgtgtag

SEQ ID NO: 172464 - DNA, 25 bp, Saccharomyces pastorianus
acgcaattggaaacggttaaggatg

SEQ ID NO: 172465 - DNA, 25 bp, Saccharomyces pastorianus
atacagaaccactacaaaaactgga

SEQ ID NO: 172466 - DNA, 25 bp, Saccharomyces pastorianus
gggaggtgttgttgtatattgttct

SEQ ID NO: 172467 - DNA, 25 bp, Saccharomyces pastorianus
cacaaacaatagaacggtattactt

SEQ ID NO: 172468 - DNA, 25 bp, Saccharomyces pastorianus
gtgataagcgagtaacaaaacatac

SEQ ID NO: 172469 - DNA, 25 bp, Saccharomyces pastorianus
ttctttggtgtgataagcgagtaac

SEQ ID NO: 172470 - DNA, 25 bp, Saccharomyces pastorianus
caaaaactggaaaagggcgtatgca

SEQ ID NO: 172471 - DNA, 25 bp, Saccharomyces pastorianus
acttttctttggtgtgataagcgag

SEQ ID NO: 172472 - DNA, 25 bp, Saccharomyces pastorianus
aaaactggaaaagggcgtatgcatg

SEQ ID NO: 172473 - DNA, 25 bp, Saccharomyces pastorianus
gtaatacagaaccactacaaaaact

SEQ ID NO: 172474 - DNA, 25 bp, Saccharomyces pastorianus
ctttggtgtgataagcgagtaacaa

SEQ ID NO: 172475 - DNA, 25 bp, Saccharomyces pastorianus
gcgagtaacaaaacatacaaatagt

SEQ ID NO: 172476 - DNA, 25 bp, Saccharomyces pastorianus
gtcgagactattctctttcgaagaa

SEQ ID NO: 172477 - DNA, 25 bp, Saccharomyces pastorianus
cggcaacaagaaggcggccccttgg

SEQ ID NO: 172478 - DNA, 25 bp, Saccharomyces pastorianus
ttctaaaacacacttcggcaggccg

SEQ ID NO: 172479 - DNA, 25 bp, Saccharomyces pastorianus
aaaaaccatattaacatctgtacat

SEQ ID NO: 172480 - DNA, 25 bp, Saccharomyces pastorianus
aaattctaaaacacacttcggcagg

SEQ ID NO: 172481 - DNA, 25 bp, Saccharomyces pastorianus
acgttgtcgagactattctctttcg

SEQ ID NO: 172482 - DNA, 25 bp, Saccharomyces pastorianus
taaaacacacttcggcaggccggca

SEQ ID NO: 172483 - DNA, 25 bp, Saccharomyces pastorianus
acacacttcggcaggccggcaacaa

SEQ ID NO: 172484 - DNA, 25 bp, Saccharomyces pastorianus
tttccaagacaaaacgttgtcgaga

SEQ ID NO: 172485 - DNA, 25 bp, Saccharomyces pastorianus
ttaactaaacatccgtacacaaaag

SEQ ID NO: 172486 - DNA, 25 bp, Saccharomyces pastorianus
gactattctctttcgaagaaattct

SEQ ID NO: 172487 - DNA, 25 bp, Saccharomyces pastorianus
ggtaaacgtcacaacaagtcccaca

SEQ ID NO: 172488 - DNA, 25 bp, Saccharomyces pastorianus
taaacgtcacaacaagtcccacact

SEQ ID NO: 172489 - DNA, 25 bp, Saccharomyces pastorianus
acaacaagtcccacactttgtgtaa

SEQ ID NO: 172490 - DNA, 25 bp, Saccharomyces pastorianus
acaagtcccacactttgtgtaacag

SEQ ID NO: 172491 - DNA, 25 bp, Saccharomyces pastorianus
gtcacaacaagtcccacactttgtg

SEQ ID NO: 172492 - DNA, 25 bp, Saccharomyces pastorianus
gctaagaccagatcttacaactggg

SEQ ID NO: 172493 - DNA, 25 bp, Saccharomyces pastorianus
gtgctaaggctaagagaagacacac

SEQ ID NO: 172494 - DNA, 25 bp, Saccharomyces pastorianus
aagtcccacactttgtgtaacagat

SEQ ID NO: 172495 - DNA, 25 bp, Saccharomyces pastorianus
ttacaactggggtgctaaggctaag

SEQ ID NO: 172496 - DNA, 25 bp, Saccharomyces pastorianus
gtcccacactttgtgtaacagatgt

SEQ ID NO: 172497 - DNA, 25 bp, Saccharomyces pastorianus
tccagctgctaagaccagatcttac

SEQ ID NO: 172498 - DNA, 25 bp, Saccharomyces pastorianus
taatacggctattgtttggagatac

SEQ ID NO: 172499 - DNA, 25 bp, Saccharomyces pastorianus
atattggtcattcagctgccgtaac

SEQ ID NO: 172500 - DNA, 25 bp, Saccharomyces pastorianus
gacagcatcgaatgatttaacaatc

SEQ ID NO: 172501 - DNA, 25 bp, Saccharomyces pastorianus
tgtggatcgcaaccgcctctaaaga

SEQ ID NO: 172502 - DNA, 25 bp, Saccharomyces pastorianus
caatgagaacagctgcaagtttgat

SEQ ID NO: 172503 - DNA, 25 bp, Saccharomyces pastorianus
ggataattccaaagccaactgctag

SEQ ID NO: 172504 - DNA, 25 bp, Saccharomyces pastorianus
gccgtaactgctgttggattgccaa

SEQ ID NO: 172505 - DNA, 25 bp, Saccharomyces pastorianus
ttggatgctactgaggatggcctgt

SEQ ID NO: 172506 - DNA, 25 bp, Saccharomyces pastorianus
gcaagtttgatatttatgccaagta

SEQ ID NO: 172507 - DNA, 25 bp, Saccharomyces pastorianus
gccaactgctagtatggatgttcaa

SEQ ID NO: 172508 - DNA, 25 bp, Saccharomyces pastorianus
tgaggatggcctgtggatcgcaacc

SEQ ID NO: 172509 - DNA, 25 bp, Saccharomyces pastorianus
atgatttctgtttgcccacaaaatg

SEQ ID NO: 172510 - DNA, 25 bp, Saccharomyces pastorianus
aagcctcacattcgatgttccagga

SEQ ID NO: 172511 - DNA, 25 bp, Saccharomyces pastorianus
gcctcacattcgatgttccaggaca

SEQ ID NO: 172512 - DNA, 25 bp, Saccharomyces pastorianus
aaatgacttgcaaaaatgctacaga

SEQ ID NO: 172513 - DNA, 25 bp, Saccharomyces pastorianus
aatgctacagaagcctcacattcga

SEQ ID NO: 172514 - DNA, 25 bp, Saccharomyces pastorianus
agaagcctcacattcgatgttccag

SEQ ID NO: 172515 - DNA, 25 bp, Saccharomyces pastorianus
tacagaagcctcacattcgatgttc

SEQ ID NO: 172516 - DNA, 25 bp, Saccharomyces pastorianus
ctgtttgcccacaaaatgacttgca

SEQ ID NO: 172517 - DNA, 25 bp, Saccharomyces pastorianus
gctacagaagcctcacattcgatgt

SEQ ID NO: 172518 - DNA, 25 bp, Saccharomyces pastorianus
tcacattcgatgttccaggacaaca

SEQ ID NO: 172519 - DNA, 25 bp, Saccharomyces pastorianus
acattcgatgttccaggacaacaat

SEQ ID NO: 172520 - DNA, 25 bp, Saccharomyces pastorianus
ggatagcaggtctgcaataacagat

SEQ ID NO: 172521 - DNA, 25 bp, Saccharomyces pastorianus
gatgctgaccactcggtaaaggata

SEQ ID NO: 172522 - DNA, 25 bp, Saccharomyces pastorianus
ccactcggtaaaggatagcaggtct

SEQ ID NO: 172523 - DNA, 25 bp, Saccharomyces pastorianus
gaatttaccaactactcacagagta

SEQ ID NO: 172524 - DNA, 25 bp, Saccharomyces pastorianus
gcaggtctgcaataacagataaaga

SEQ ID NO: 172525 - DNA, 25 bp, Saccharomyces pastorianus
cagaataactatgatgtgggcaata

SEQ ID NO: 172526 - DNA, 25 bp, Saccharomyces pastorianus
ctcggtaaaggatagcaggtctgca

SEQ ID NO: 172527 - DNA, 25 bp, Saccharomyces pastorianus
aaacgaatttaccaactactcacag

SEQ ID NO: 172528 - DNA, 25 bp, Saccharomyces pastorianus
tgaccactcggtaaaggatagcagg

SEQ ID NO: 172529 - DNA, 25 bp, Saccharomyces pastorianus
gatcaatacgaaaacgaatttacca

SEQ ID NO: 172530 - DNA, 25 bp, Saccharomyces pastorianus
taactatgatgtgggcaatatcggg

SEQ ID NO: 172531 - DNA, 25 bp, Saccharomyces pastorianus
atgttgctgtacctacaccaaacac

SEQ ID NO: 172532 - DNA, 25 bp, Saccharomyces pastorianus
gtacctacaccaaacacgagtggta

SEQ ID NO: 172533 - DNA, 25 bp, Saccharomyces pastorianus
ggtattgccatgttgataaacacca

SEQ ID NO: 172534 - DNA, 25 bp, Saccharomyces pastorianus
gtggtaacgggtattgccatgttga

SEQ ID NO: 172535 - DNA, 25 bp, Saccharomyces pastorianus
acacgagtggtaacgggtattgcca

SEQ ID NO: 172536 - DNA, 25 bp, Saccharomyces pastorianus
ttgccatgttgataaacaccataaa

SEQ ID NO: 172537 - DNA, 25 bp, Saccharomyces pastorianus
tgctgtacctacaccaaacacgagt

SEQ ID NO: 172538 - DNA, 25 bp, Saccharomyces pastorianus
aacgggtattgccatgttgataaac

SEQ ID NO: 172539 - DNA, 25 bp, Saccharomyces pastorianus
atgattcggaatctaatgttgctgt

SEQ ID NO: 172540 - DNA, 25 bp, Saccharomyces pastorianus
cggaatctaatgttgctgtacctac

SEQ ID NO: 172541 - DNA, 25 bp, Saccharomyces pastorianus
atctaatgttgctgtacctacacca

SEQ ID NO: 172542 - DNA, 25 bp, Saccharomyces pastorianus
atgaagagttcgtcaacaccgaccg

SEQ ID NO: 172543 - DNA, 25 bp, Saccharomyces pastorianus
accgaccgcgagactatcttttcaa

SEQ ID NO: 172544 - DNA, 25 bp, Saccharomyces pastorianus
accgcgagactatcttttcaaagtg

SEQ ID NO: 172545 - DNA, 25 bp, Saccharomyces pastorianus
ttcaaagtgcattattggttttcat

SEQ ID NO: 172546 - DNA, 25 bp, Saccharomyces pastorianus
gagttcgtcaacaccgaccgcgaga

SEQ ID NO: 172547 - DNA, 25 bp, Saccharomyces pastorianus
gcgagactatcttttcaaagtgcat

SEQ ID NO: 172548 - DNA, 25 bp, Saccharomyces pastorianus
aacaccgaccgcgagactatctttt

SEQ ID NO: 172549 - DNA, 25 bp, Saccharomyces pastorianus
gaagagttcgtcaacaccgaccgcg

SEQ ID NO: 172550 - DNA, 25 bp, Saccharomyces pastorianus
cgaccgcgagactatcttttcaaag

SEQ ID NO: 172551 - DNA, 25 bp, Saccharomyces pastorianus
gagactatcttttcaaagtgcatta

SEQ ID NO: 172552 - DNA, 25 bp, Saccharomyces pastorianus
tcgtcaacaccgaccgcgagactat

SEQ ID NO: 172553 - DNA, 25 bp, Saccharomyces pastorianus
cgaagacgaaaagtctggcctaatc

SEQ ID NO: 172554 - DNA, 25 bp, Saccharomyces pastorianus
ggcctaatcaaagtggtaaaattca

SEQ ID NO: 172555 - DNA, 25 bp, Saccharomyces pastorianus
ctggcctaatcaaagtggtaaaatt

SEQ ID NO: 172556 - DNA, 25 bp, Saccharomyces pastorianus
gaaaagtctggcctaatcaaagtgg

SEQ ID NO: 172557 - DNA, 25 bp, Saccharomyces pastorianus
aagtctggcctaatcaaagtggtaa

SEQ ID NO: 172558 - DNA, 25 bp, Saccharomyces pastorianus
aaagtctggcctaatcaaagtggta

SEQ ID NO: 172559 - DNA, 25 bp, Saccharomyces pastorianus
gacgaaaagtctggcctaatcaaag

SEQ ID NO: 172560 - DNA, 25 bp, Saccharomyces pastorianus
gtctggcctaatcaaagtggtaaaa

SEQ ID NO: 172561 - DNA, 25 bp, Saccharomyces pastorianus
gttgtcatttccgtcatggtcggga

SEQ ID NO: 172562 - DNA, 25 bp, Saccharomyces pastorianus
agacgaaaagtctggcctaatcaaa

SEQ ID NO: 172563 - DNA, 25 bp, Saccharomyces pastorianus
aaagttgtcatttccgtcatggtcg

SEQ ID NO: 172564 - DNA, 25 bp, Saccharomyces pastorianus
atatcaccaccgaaacacagcgatt

SEQ ID NO: 172565 - DNA, 25 bp, Saccharomyces pastorianus
cgaggtaataagtgatggcgactat

SEQ ID NO: 172566 - DNA, 25 bp, Saccharomyces pastorianus
gtgtaactgtaatgacgaggtaata

SEQ ID NO: 172567 - DNA, 25 bp, Saccharomyces pastorianus
tcaaaaaatttgagcggtacgagaa

SEQ ID NO: 172568 - DNA, 25 bp, Saccharomyces pastorianus
aacctcttccgataatgttggaacg

SEQ ID NO: 172569 - DNA, 25 bp, Saccharomyces pastorianus
gggtaatcactactgcgattctaat

SEQ ID NO: 172570 - DNA, 25 bp, Saccharomyces pastorianus
ttaaaagggtaatcactactgcgat

SEQ ID NO: 172571 - DNA, 25 bp, Saccharomyces pastorianus
gaaacacagcgattacttaaaaggg

SEQ ID NO: 172572 - DNA, 25 bp, Saccharomyces pastorianus
gatggcgactatatcaccaccgaaa

SEQ ID NO: 172573 - DNA, 25 bp, Saccharomyces pastorianus
tacactaaccgcccatgtgttggat

SEQ ID NO: 172574 - DNA, 25 bp, Saccharomyces pastorianus
cactactgcgattctaattgttgga

SEQ ID NO: 172575 - DNA, 25 bp, Saccharomyces pastorianus
gaagccgcattgaatatctatttgg

SEQ ID NO: 172576 - DNA, 25 bp, Saccharomyces pastorianus
agttgcaaaattaaggtcctaccat

SEQ ID NO: 172577 - DNA, 25 bp, Saccharomyces pastorianus
tagctgttaacgctgccaaggattc

SEQ ID NO: 172578 - DNA, 25 bp, Saccharomyces pastorianus
ggacaattttgccaccacagttggt

SEQ ID NO: 172579 - DNA, 25 bp, Saccharomyces pastorianus
atctatttggacaattttgccacca

SEQ ID NO: 172580 - DNA, 25 bp, Saccharomyces pastorianus
ttgcagctgcattattaatcattcc

SEQ ID NO: 172581 - DNA, 25 bp, Saccharomyces pastorianus
taatcattccaaaaactttagctgt

SEQ ID NO: 172582 - DNA, 25 bp, Saccharomyces pastorianus
attaaggtcctaccatgccgctagt

SEQ ID NO: 172583 - DNA, 25 bp, Saccharomyces pastorianus
acagttagctattgctgagtttgca

SEQ ID NO: 172584 - DNA, 25 bp, Saccharomyces pastorianus
atgccgctagtcaaatggccaagcc

SEQ ID NO: 172585 - DNA, 25 bp, Saccharomyces pastorianus
acgctgccaaggattctagtgaatt

SEQ ID NO: 172586 - DNA, 25 bp, Saccharomyces pastorianus
ggtaacgcaacctcttttggatttg

SEQ ID NO: 172587 - DNA, 25 bp, Saccharomyces pastorianus
cgaataatcgatctccttttagcgg

SEQ ID NO: 172588 - DNA, 25 bp, Saccharomyces pastorianus
ttcggttctgcttctaacctcaata

SEQ ID NO: 172589 - DNA, 25 bp, Saccharomyces pastorianus
aaagtctcgcaatctaacccttcat

SEQ ID NO: 172590 - DNA, 25 bp, Saccharomyces pastorianus
tacatcgtcagcgtttggcaaaccg

SEQ ID NO: 172591 - DNA, 25 bp, Saccharomyces pastorianus
ggcaactttcaatcttcttttggta

SEQ ID NO: 172592 - DNA, 25 bp, Saccharomyces pastorianus
aggagtatccccatttggcacattt

SEQ ID NO: 172593 - DNA, 25 bp, Saccharomyces pastorianus
taggcagtagcgcattcggaacgac

SEQ ID NO: 172594 - DNA, 25 bp, Saccharomyces pastorianus
aacttctccttttggttcactgcaa

SEQ ID NO: 172595 - DNA, 25 bp, Saccharomyces pastorianus
atacccagtcgccatttggtactat

SEQ ID NO: 172596 - DNA, 25 bp, Saccharomyces pastorianus
tggttcttcgccgtttggtactaca

SEQ ID NO: 172597 - DNA, 25 bp, Saccharomyces pastorianus
cttaggtgaactagaaagaagagct

SEQ ID NO: 172598 - DNA, 25 bp, Saccharomyces pastorianus
gaagagctaaagctggcaagcgttt

SEQ ID NO: 172599 - DNA, 25 bp, Saccharomyces pastorianus
ttggctttcgtccatctagttgaac

SEQ ID NO: 172600 - DNA, 25 bp, Saccharomyces pastorianus
gctaaagctggcaagcgtttggctt

SEQ ID NO: 172601 - DNA, 25 bp, Saccharomyces pastorianus
agctggcaagcgtttggctttcgtc

SEQ ID NO: 172602 - DNA, 25 bp, Saccharomyces pastorianus
ggctttcgtccatctagttgaacct

SEQ ID NO: 172603 - DNA, 25 bp, Saccharomyces pastorianus
aagctggcaagcgtttggctttcgt

SEQ ID NO: 172604 - DNA, 25 bp, Saccharomyces pastorianus
aagcgtttggctttcgtccatctag

SEQ ID NO: 172605 - DNA, 25 bp, Saccharomyces pastorianus
gcgtttggctttcgtccatctagtt

SEQ ID NO: 172606 - DNA, 25 bp, Saccharomyces pastorianus
tggcaagcgtttggctttcgtccat

SEQ ID NO: 172607 - DNA, 25 bp, Saccharomyces pastorianus
tttggctttcgtccatctagttgaa

SEQ ID NO: 172608 - DNA, 25 bp, Saccharomyces pastorianus
gaatacactagaagtgctcctcggg

SEQ ID NO: 172609 - DNA, 25 bp, Saccharomyces pastorianus
attattgggaattcattattgcttg

SEQ ID NO: 172610 - DNA, 25 bp, Saccharomyces pastorianus
atctgttttacacgttttcattcat

SEQ ID NO: 172611 - DNA, 25 bp, Saccharomyces pastorianus
gggacatagagatccataaaaggaa

SEQ ID NO: 172612 - DNA, 25 bp, Saccharomyces pastorianus
tgttttacacgttttcattcattat

SEQ ID NO: 172613 - DNA, 25 bp, Saccharomyces pastorianus
gggaattcattattgcttgagataa

SEQ ID NO: 172614 - DNA, 25 bp, Saccharomyces pastorianus
aaggaaatcgataattctacacatt

SEQ ID NO: 172615 - DNA, 25 bp, Saccharomyces pastorianus
atctgttttatttctttatctgttt

SEQ ID NO: 172616 - DNA, 25 bp, Saccharomyces pastorianus
ttattacaaaatcagcccttgcgct

SEQ ID NO: 172617 - DNA, 25 bp, Saccharomyces pastorianus
gataattctacacattaatctgttt

SEQ ID NO: 172618 - DNA, 25 bp, Saccharomyces pastorianus
attatgagtgagtggattttgagat

SEQ ID NO: 172619 - DNA, 25 bp, Saccharomyces pastorianus
attgtagtcgcctgctccttcagtt

SEQ ID NO: 172620 - DNA, 25 bp, Saccharomyces pastorianus
tgcggtatcatattgtttttcttct

SEQ ID NO: 172621 - DNA, 25 bp, Saccharomyces pastorianus
gggctgaattcctcggcgaagcttt

SEQ ID NO: 172622 - DNA, 25 bp, Saccharomyces pastorianus
cagttcgtccgctggttgcggaata

SEQ ID NO: 172623 - DNA, 25 bp, Saccharomyces pastorianus
gatcatggcaaagttaccgcgccaa

SEQ ID NO: 172624 - DNA, 25 bp, Saccharomyces pastorianus
aatcgccctgcgcattgtagtcgcc

SEQ ID NO: 172625 - DNA, 25 bp, Saccharomyces pastorianus
taaattttttactctcgggctgaat

SEQ ID NO: 172626 - DNA, 25 bp, Saccharomyces pastorianus
tttcttctcttccttaactcattta

SEQ ID NO: 172627 - DNA, 25 bp, Saccharomyces pastorianus
gcggaatatttgaacgtcagttttc

SEQ ID NO: 172628 - DNA, 25 bp, Saccharomyces pastorianus
attgctgattcacacgggagaccac

SEQ ID NO: 172629 - DNA, 25 bp, Saccharomyces pastorianus
aagctttgccttgccattttaggtg

SEQ ID NO: 172630 - DNA, 25 bp, Saccharomyces pastorianus
ggcatttgagtttatatccattttt

SEQ ID NO: 172631 - DNA, 25 bp, Saccharomyces pastorianus
cctgatgttcagcaaaccgaaagaa

SEQ ID NO: 172632 - DNA, 25 bp, Saccharomyces pastorianus
gaggcatttgagtttatatccattt

SEQ ID NO: 172633 - DNA, 25 bp, Saccharomyces pastorianus
ctgaggcatttgagtttatatccat

SEQ ID NO: 172634 - DNA, 25 bp, Saccharomyces pastorianus
tactgaggcatttgagtttatatcc

SEQ ID NO: 172635 - DNA, 25 bp, Saccharomyces pastorianus
ttttttccctgatgttcagcaaacc

SEQ ID NO: 172636 - DNA, 25 bp, Saccharomyces pastorianus
gagtttatatccatttttttccctg

SEQ ID NO: 172637 - DNA, 25 bp, Saccharomyces pastorianus
ttccctgatgttcagcaaaccgaaa

SEQ ID NO: 172638 - DNA, 25 bp, Saccharomyces pastorianus
ttttccctgatgttcagcaaaccga

SEQ ID NO: 172639 - DNA, 25 bp, Saccharomyces pastorianus
ggcttactgaggcatttgagtttat

SEQ ID NO: 172640 - DNA, 25 bp, Saccharomyces pastorianus
gatgttcagcaaaccgaaagaaata

SEQ ID NO: 172641 - DNA, 25 bp, Saccharomyces pastorianus
gtgaggcttaggtgatttttgagat

SEQ ID NO: 172642 - DNA, 25 bp, Saccharomyces pastorianus
acgtaaaacatgcatgtgaggctta

SEQ ID NO: 172643 - DNA, 25 bp, Saccharomyces pastorianus
ggcttaggtgatttttgagataatt

SEQ ID NO: 172644 - DNA, 25 bp, Saccharomyces pastorianus
tgcatgtgaggcttaggtgattttt

SEQ ID NO: 172645 - DNA, 25 bp, Saccharomyces pastorianus
catgtgaggcttaggtgatttttga

SEQ ID NO: 172646 - DNA, 25 bp, Saccharomyces pastorianus
gaggcttaggtgatttttgagataa

SEQ ID NO: 172647 - DNA, 25 bp, Saccharomyces pastorianus
aaacatgcatgtgaggcttaggtga

SEQ ID NO: 172648 - DNA, 25 bp, Saccharomyces pastorianus
acatgcatgtgaggcttaggtgatt

SEQ ID NO: 172649 - DNA, 25 bp, Saccharomyces pastorianus
aacgtaaaacatgcatgtgaggctt

SEQ ID NO: 172650 - DNA, 25 bp, Saccharomyces pastorianus
atgcatgtgaggcttaggtgatttt

SEQ ID NO: 172651 - DNA, 25 bp, Saccharomyces pastorianus
aacatgcatgtgaggcttaggtgat

SEQ ID NO: 172652 - DNA, 25 bp, Saccharomyces pastorianus
agaagttcccagaccgtcattttat

SEQ ID NO: 172653 - DNA, 25 bp, Saccharomyces pastorianus
tttgtctgcataccacaaggtccaa

SEQ ID NO: 172654 - DNA, 25 bp, Saccharomyces pastorianus
ttccagtcccagctttgtctgcata

SEQ ID NO: 172655 - DNA, 25 bp, Saccharomyces pastorianus
gatgttactagtggtaagaaagctt

SEQ ID NO: 172656 - DNA, 25 bp, Saccharomyces pastorianus
cttgactgctgtccacgacaaggtc

SEQ ID NO: 172657 - DNA, 25 bp, Saccharomyces pastorianus
aaagctttagtcattttcgttccag

SEQ ID NO: 172658 - DNA, 25 bp, Saccharomyces pastorianus
caaaaggtcttattggactccaagg

SEQ ID NO: 172659 - DNA, 25 bp, Saccharomyces pastorianus
ggactccaaggacgttcaacaaatt

SEQ ID NO: 172660 - DNA, 25 bp, Saccharomyces pastorianus
ataccacaaggtccaaacaaagttg

SEQ ID NO: 172661 - DNA, 25 bp, Saccharomyces pastorianus
aagctttagtcattttcgttccagt

SEQ ID NO: 172662 - DNA, 25 bp, Saccharomyces pastorianus
gtcttggaagacatggttttcccaa

SEQ ID NO: 172663 - DNA, 25 bp, Saccharomyces pastorianus
cgtccctttatgctaaattagaaca

SEQ ID NO: 172664 - DNA, 25 bp, Saccharomyces pastorianus
tattaactatccgtccctttatgct

SEQ ID NO: 172665 - DNA, 25 bp, Saccharomyces pastorianus
actatccgtccctttatgctaaatt

SEQ ID NO: 172666 - DNA, 25 bp, Saccharomyces pastorianus
gaacatgttcatgaaaacaccggat

SEQ ID NO: 172667 - DNA, 25 bp, Saccharomyces pastorianus
aactatccgtccctttatgctaaat

SEQ ID NO: 172668 - DNA, 25 bp, Saccharomyces pastorianus
tccgtccctttatgctaaattagaa

SEQ ID NO: 172669 - DNA, 25 bp, Saccharomyces pastorianus
ttaactatccgtccctttatgctaa

SEQ ID NO: 172670 - DNA, 25 bp, Saccharomyces pastorianus
ttcatgaaaacaccggatattaact

SEQ ID NO: 172671 - DNA, 25 bp, Saccharomyces pastorianus
gatattaactatccgtccctttatg

SEQ ID NO: 172672 - DNA, 25 bp, Saccharomyces pastorianus
gattgcaaacaacaggaacatgttc

SEQ ID NO: 172673 - DNA, 25 bp, Saccharomyces pastorianus
tatccgtccctttatgctaaattag

SEQ ID NO: 172674 - DNA, 25 bp, Saccharomyces pastorianus
aggtgctactggtactgctgtttct

SEQ ID NO: 172675 - DNA, 25 bp, Saccharomyces pastorianus
tgctactggtactgctgtttctttc

SEQ ID NO: 172676 - DNA, 25 bp, Saccharomyces pastorianus
tgttatcaactatgacatgccaggt

SEQ ID NO: 172677 - DNA, 25 bp, Saccharomyces pastorianus
actggtactgctgtttctttcttca

SEQ ID NO: 172678 - DNA, 25 bp, Saccharomyces pastorianus
caaaggtttaggtagcaagttgatt

SEQ ID NO: 172679 - DNA, 25 bp, Saccharomyces pastorianus
tggtactgctgtttctttcttcaca

SEQ ID NO: 172680 - DNA, 25 bp, Saccharomyces pastorianus
gcaggtgctactggtactgctgttt

SEQ ID NO: 172681 - DNA, 25 bp, Saccharomyces pastorianus
ctactggtactgctgtttctttctt

SEQ ID NO: 172682 - DNA, 25 bp, Saccharomyces pastorianus
caactatgacatgccaggtaacatt

SEQ ID NO: 172683 - DNA, 25 bp, Saccharomyces pastorianus
gatgtcaaaggtattaactatgtta

SEQ ID NO: 172684 - DNA, 25 bp, Saccharomyces pastorianus
tatcaactatgacatgccaggtaac

SEQ ID NO: 172685 - DNA, 25 bp, Saccharomyces pastorianus
ttccagttttgctatttaaagtaag

SEQ ID NO: 172686 - DNA, 25 bp, Saccharomyces pastorianus
cggccgatccaccaaagaacaacaa

SEQ ID NO: 172687 - DNA, 25 bp, Saccharomyces pastorianus
atccttgacgagttgctgttttttc

SEQ ID NO: 172688 - DNA, 25 bp, Saccharomyces pastorianus
tggtaccctcactaaaactcgtacg

SEQ ID NO: 172689 - DNA, 25 bp, Saccharomyces pastorianus
tccagtttgtggtaattttccagtt

SEQ ID NO: 172690 - DNA, 25 bp, Saccharomyces pastorianus
gagttgctgttttttcgaacggttg

SEQ ID NO: 172691 - DNA, 25 bp, Saccharomyces pastorianus
gttattttcggccaattgcacaagg

SEQ ID NO: 172692 - DNA, 25 bp, Saccharomyces pastorianus
gtggtaattttccagttttgctatt

SEQ ID NO: 172693 - DNA, 25 bp, Saccharomyces pastorianus
cactaaaactcgtacggccgatcca

SEQ ID NO: 172694 - DNA, 25 bp, Saccharomyces pastorianus
gaacaacaacacaatccttgacgag

SEQ ID NO: 172695 - DNA, 25 bp, Saccharomyces pastorianus
gcacaaggcaacattcaggatatat

SEQ ID NO: 172696 - DNA, 25 bp, Saccharomyces pastorianus
ttcgactgtcgtaccttgcacagaa

SEQ ID NO: 172697 - DNA, 25 bp, Saccharomyces pastorianus
cgattggatatccataatgtcacag

SEQ ID NO: 172698 - DNA, 25 bp, Saccharomyces pastorianus
catttttgtatttcgactgtcgtac

SEQ ID NO: 172699 - DNA, 25 bp, Saccharomyces pastorianus
gtatttcgactgtcgtaccttgcac

SEQ ID NO: 172700 - DNA, 25 bp, Saccharomyces pastorianus
aaagcttttcaaatttattctcatt

SEQ ID NO: 172701 - DNA, 25 bp, Saccharomyces pastorianus
gactgtcgtaccttgcacagaacga

SEQ ID NO: 172702 - DNA, 25 bp, Saccharomyces pastorianus
gtaccttgcacagaacgattggata

SEQ ID NO: 172703 - DNA, 25 bp, Saccharomyces pastorianus
tgcacagaacgattggatatccata

SEQ ID NO: 172704 - DNA, 25 bp, Saccharomyces pastorianus
ggatcgatatcaaagcttttcaaat

SEQ ID NO: 172705 - DNA, 25 bp, Saccharomyces pastorianus
ttctcatttttgtatttcgactgtc

SEQ ID NO: 172706 - DNA, 25 bp, Saccharomyces pastorianus
tagtttagctttttggatcgatatc

SEQ ID NO: 172707 - DNA, 25 bp, Saccharomyces pastorianus
aagccaatatacttcagcaaatttt

SEQ ID NO: 172708 - DNA, 25 bp, Saccharomyces pastorianus
tacttcagcaaatttttggtcactg

SEQ ID NO: 172709 - DNA, 25 bp, Saccharomyces pastorianus
aaagcagaaagatgagtaagccaat

SEQ ID NO: 172710 - DNA, 25 bp, Saccharomyces pastorianus
tatacttcagcaaatttttggtcac

SEQ ID NO: 172711 - DNA, 25 bp, Saccharomyces pastorianus
gccaatatacttcagcaaatttttg

SEQ ID NO: 172712 - DNA, 25 bp, Saccharomyces pastorianus
caatatacttcagcaaatttttggt

SEQ ID NO: 172713 - DNA, 25 bp, Saccharomyces pastorianus
gatgagtaagccaatatacttcagc

SEQ ID NO: 172714 - DNA, 25 bp, Saccharomyces pastorianus
atacttcagcaaatttttggtcact

SEQ ID NO: 172715 - DNA, 25 bp, Saccharomyces pastorianus
aatatacttcagcaaatttttggtc

SEQ ID NO: 172716 - DNA, 25 bp, Saccharomyces pastorianus
acttcagcaaatttttggtcactga

SEQ ID NO: 172717 - DNA, 25 bp, Saccharomyces pastorianus
cttcagcaaatttttggtcactgaa

SEQ ID NO: 172718 - DNA, 25 bp, Saccharomyces pastorianus
atgtagtccttccacgtttctgcta

SEQ ID NO: 172719 - DNA, 25 bp, Saccharomyces pastorianus
atatcggctttcttcagatttcctc

SEQ ID NO: 172720 - DNA, 25 bp, Saccharomyces pastorianus
gaagcacttgcaatagactcttgag

SEQ ID NO: 172721 - DNA, 25 bp, Saccharomyces pastorianus
atttggttcttgatatcggctttct

SEQ ID NO: 172722 - DNA, 25 bp, Saccharomyces pastorianus
aaaagcaaccatttcgaagcacttg

SEQ ID NO: 172723 - DNA, 25 bp, Saccharomyces pastorianus
ttgttaaaaaccttctgcgctcttg

SEQ ID NO: 172724 - DNA, 25 bp, Saccharomyces pastorianus
ttctgcgctcttgcttgggctatta

SEQ ID NO: 172725 - DNA, 25 bp, Saccharomyces pastorianus
gggcatctctgtactgcaaaagcaa

SEQ ID NO: 172726 - DNA, 25 bp, Saccharomyces pastorianus
gggctattattctggcctttcaagt

SEQ ID NO: 172727 - DNA, 25 bp, Saccharomyces pastorianus
actcttgagagtcttccaacgtatt

SEQ ID NO: 172728 - DNA, 25 bp, Saccharomyces pastorianus
tcagatttcctcacccttttgttaa

SEQ ID NO: 172729 - DNA, 25 bp, Saccharomyces pastorianus
aacgagatatctgcgagacaacatg

SEQ ID NO: 172730 - DNA, 25 bp, Saccharomyces pastorianus
tcagagagtcattagtctcgccggg

SEQ ID NO: 172731 - DNA, 25 bp, Saccharomyces pastorianus
atcagagagtcattagtctcgccgg

SEQ ID NO: 172732 - DNA, 25 bp, Saccharomyces pastorianus
gatatctgcgagacaacatgcaggt

SEQ ID NO: 172733 - DNA, 25 bp, Saccharomyces pastorianus
taatcagagagtcattagtctcgcc

SEQ ID NO: 172734 - DNA, 25 bp, Saccharomyces pastorianus
gggaacgagatatctgcgagacaac

SEQ ID NO: 172735 - DNA, 25 bp, Saccharomyces pastorianus
gaacgagatatctgcgagacaacat

SEQ ID NO: 172736 - DNA, 25 bp, Saccharomyces pastorianus
cgagatatctgcgagacaacatgca

SEQ ID NO: 172737 - DNA, 25 bp, Saccharomyces pastorianus
ggaacgagatatctgcgagacaaca

SEQ ID NO: 172738 - DNA, 25 bp, Saccharomyces pastorianus
agtcattagtctcgccggggaacga

SEQ ID NO: 172739 - DNA, 25 bp, Saccharomyces pastorianus
aatcagagagtcattagtctcgccg

SEQ ID NO: 172740 - DNA, 25 bp, Saccharomyces pastorianus
caagtgatgtatactggtcaatcca

SEQ ID NO: 172741 - DNA, 25 bp, Saccharomyces pastorianus
gttgtcagcacgaatgttctcagtt

SEQ ID NO: 172742 - DNA, 25 bp, Saccharomyces pastorianus
gtagcagctccagttgtatttcaca

SEQ ID NO: 172743 - DNA, 25 bp, Saccharomyces pastorianus
gaggtgcagaatctaggtctaagac

SEQ ID NO: 172744 - DNA, 25 bp, Saccharomyces pastorianus
tcggtgcaacatgtgattgtgactt

SEQ ID NO: 172745 - DNA, 25 bp, Saccharomyces pastorianus
tcctatttgggacgtatgcattgtt

SEQ ID NO: 172746 - DNA, 25 bp, Saccharomyces pastorianus
acttagttggtaatgttgtcagcac

SEQ ID NO: 172747 - DNA, 25 bp, Saccharomyces pastorianus
gttggacaacgtacgccattgatta

SEQ ID NO: 172748 - DNA, 25 bp, Saccharomyces pastorianus
tttactcagtagcaggtgtagcagc

SEQ ID NO: 172749 - DNA, 25 bp, Saccharomyces pastorianus
cgttcttttctgtttagaggtgcag

SEQ ID NO: 172750 - DNA, 25 bp, Saccharomyces pastorianus
gaacatagggcaatactactgcaag

SEQ ID NO: 172751 - DNA, 25 bp, Saccharomyces pastorianus
caggttcaccaagaaccatatgttt

SEQ ID NO: 172752 - DNA, 25 bp, Saccharomyces pastorianus
tgttttcaacgctagaccagatggt

SEQ ID NO: 172753 - DNA, 25 bp, Saccharomyces pastorianus
cgctagaccagatggtgtccacgtt

SEQ ID NO: 172754 - DNA, 25 bp, Saccharomyces pastorianus
ttacaggttcaccaagaaccatatg

SEQ ID NO: 172755 - DNA, 25 bp, Saccharomyces pastorianus
tttcaacgctagaccagatggtgtc

SEQ ID NO: 172756 - DNA, 25 bp, Saccharomyces pastorianus
caacgctagaccagatggtgtccac

SEQ ID NO: 172757 - DNA, 25 bp, Saccharomyces pastorianus
tacaggttcaccaagaaccatatgt

SEQ ID NO: 172758 - DNA, 25 bp, Saccharomyces pastorianus
atatgttttcaacgctagaccagat

SEQ ID NO: 172759 - DNA, 25 bp, Saccharomyces pastorianus
ggttcaccaagaaccatatgttttc

SEQ ID NO: 172760 - DNA, 25 bp, Saccharomyces pastorianus
acaggttcaccaagaaccatatgtt

SEQ ID NO: 172761 - DNA, 25 bp, Saccharomyces pastorianus
gaaaacttggtcttagccgctaaat

SEQ ID NO: 172762 - DNA, 25 bp, Saccharomyces pastorianus
agtcttgagactaagaggcgctcta

SEQ ID NO: 172763 - DNA, 25 bp, Saccharomyces pastorianus
gtcattgccctaactgacttggact

SEQ ID NO: 172764 - DNA, 25 bp, Saccharomyces pastorianus
ggttttagccgctagaatcatcgct

SEQ ID NO: 172765 - DNA, 25 bp, Saccharomyces pastorianus
ctagtcgacagaacccaaccatggt

SEQ ID NO: 172766 - DNA, 25 bp, Saccharomyces pastorianus
taagaggcgctctagtcgacagaac

SEQ ID NO: 172767 - DNA, 25 bp, Saccharomyces pastorianus
acttggactccccatcagaatacgt

SEQ ID NO: 172768 - DNA, 25 bp, Saccharomyces pastorianus
agaatacgtcgatgtcgctatccca

SEQ ID NO: 172769 - DNA, 25 bp, Saccharomyces pastorianus
tagttatcgtcaccgacccaagatc

SEQ ID NO: 172770 - DNA, 25 bp, Saccharomyces pastorianus
gtttaatttggtacttattggccag

SEQ ID NO: 172771 - DNA, 25 bp, Saccharomyces pastorianus
tattggccagagaagtcttgagact

SEQ ID NO: 172772 - DNA, 25 bp, Saccharomyces pastorianus
acgtcgatgtcgctatcccatgtaa

SEQ ID NO: 172773 - DNA, 25 bp, Saccharomyces pastorianus
actaccgggaattacagcacataca

SEQ ID NO: 172774 - DNA, 25 bp, Saccharomyces pastorianus
cccgctgaagtatcggcgcagcatg

SEQ ID NO: 172775 - DNA, 25 bp, Saccharomyces pastorianus
ttggcccgctgaagtatcggcgcag

SEQ ID NO: 172776 - DNA, 25 bp, Saccharomyces pastorianus
gcagcatgcgcttggaactaccggg

SEQ ID NO: 172777 - DNA, 25 bp, Saccharomyces pastorianus
agtatcggcgcagcatgcgcttgga

SEQ ID NO: 172778 - DNA, 25 bp, Saccharomyces pastorianus
tcattggcccgctgaagtatcggcg

SEQ ID NO: 172779 - DNA, 25 bp, Saccharomyces pastorianus
gaaagggcctattgttgttgcctct

SEQ ID NO: 172780 - DNA, 25 bp, Saccharomyces pastorianus
taccgggaattacagcacatacaat

SEQ ID NO: 172781 - DNA, 25 bp, Saccharomyces pastorianus
gcacatacaattgggaaatctggca

SEQ ID NO: 172782 - DNA, 25 bp, Saccharomyces pastorianus
agcatgcgcttggaactaccgggaa

SEQ ID NO: 172783 - DNA, 25 bp, Saccharomyces pastorianus
ggaattacagcacatacaattggga

SEQ ID NO: 172784 - DNA, 25 bp, Saccharomyces pastorianus
ttgctggtgaccactgttaaggaag

SEQ ID NO: 172785 - DNA, 25 bp, Saccharomyces pastorianus
acacacattaccacacacatacaat

SEQ ID NO: 172786 - DNA, 25 bp, Saccharomyces pastorianus
acacacatacaatggctgccccaag

SEQ ID NO: 172787 - DNA, 25 bp, Saccharomyces pastorianus
attgactagcacacacacattacca

SEQ ID NO: 172788 - DNA, 25 bp, Saccharomyces pastorianus
ttagtggcgccgtgtcctacccgca

SEQ ID NO: 172789 - DNA, 25 bp, Saccharomyces pastorianus
tgttttgggtcgtgttttgtacttg

SEQ ID NO: 172790 - DNA, 25 bp, Saccharomyces pastorianus
tcgtcgcacgcgatacactgttaat

SEQ ID NO: 172791 - DNA, 25 bp, Saccharomyces pastorianus
acacagtgtttattgctggtgacca

SEQ ID NO: 172792 - DNA, 25 bp, Saccharomyces pastorianus
gtttctgctcaattgactagcacac

SEQ ID NO: 172793 - DNA, 25 bp, Saccharomyces pastorianus
cgtgttttgtacttgtttctgctca

SEQ ID NO: 172794 - DNA, 25 bp, Saccharomyces pastorianus
atacactgttaatcacccgcctttt

SEQ ID NO: 172795 - DNA, 25 bp, Saccharomyces pastorianus
ttaccccaaactggcggtgctagaa

SEQ ID NO: 172796 - DNA, 25 bp, Saccharomyces pastorianus
atacctatccttggttgccttgaag

SEQ ID NO: 172797 - DNA, 25 bp, Saccharomyces pastorianus
tgccggtttaggttttgcttatctt

SEQ ID NO: 172798 - DNA, 25 bp, Saccharomyces pastorianus
gattgtcttctcgtttttgagcgtc

SEQ ID NO: 172799 - DNA, 25 bp, Saccharomyces pastorianus
gactcgggaaacgtgattatcgcaa

SEQ ID NO: 172800 - DNA, 25 bp, Saccharomyces pastorianus
aaccttgctgggttcgtattgccaa

SEQ ID NO: 172801 - DNA, 25 bp, Saccharomyces pastorianus
taacatcatggccacttttctctca

SEQ ID NO: 172802 - DNA, 25 bp, Saccharomyces pastorianus
tgccttgaagaccacaactgccaat

SEQ ID NO: 172803 - DNA, 25 bp, Saccharomyces pastorianus
acacacgttttttatgcgttcctcg

SEQ ID NO: 172804 - DNA, 25 bp, Saccharomyces pastorianus
atgcgttcctcggtagtacagatac

SEQ ID NO: 172805 - DNA, 25 bp, Saccharomyces pastorianus
aggtatcggtgaaatcctctccaac

SEQ ID NO: 172806 - DNA, 25 bp, Saccharomyces pastorianus
aggaataagcaacaccttctggtta

SEQ ID NO: 172807 - DNA, 25 bp, Saccharomyces pastorianus
tggagtcgcgccttccgtatcttgt

SEQ ID NO: 172808 - DNA, 25 bp, Saccharomyces pastorianus
tctggttagaagacaaatttctttt

SEQ ID NO: 172809 - DNA, 25 bp, Saccharomyces pastorianus
agctgcgtggagtcgcgccttccgt

SEQ ID NO: 172810 - DNA, 25 bp, Saccharomyces pastorianus
aataagcaacaccttctggttagaa

SEQ ID NO: 172811 - DNA, 25 bp, Saccharomyces pastorianus
gcaacaccttctggttagaagacaa

SEQ ID NO: 172812 - DNA, 25 bp, Saccharomyces pastorianus
ctgtgcatacgtaaggaataagcaa

SEQ ID NO: 172813 - DNA, 25 bp, Saccharomyces pastorianus
ttccgtatcttgtgctttgcattct

SEQ ID NO: 172814 - DNA, 25 bp, Saccharomyces pastorianus
tcatcaaatgaaaatcctccctacg

SEQ ID NO: 172815 - DNA, 25 bp, Saccharomyces pastorianus
gtatcttgtgctttgcattctgtgc

SEQ ID NO: 172816 - DNA, 25 bp, Saccharomyces pastorianus
gccttccgtatcttgtgctttgcat

SEQ ID NO: 172817 - DNA, 25 bp, Saccharomyces pastorianus
ctttgcttgcaaattctagcgccaa

SEQ ID NO: 172818 - DNA, 25 bp, Saccharomyces pastorianus
gcgtgatgcaattccatagatgtgt

SEQ ID NO: 172819 - DNA, 25 bp, Saccharomyces pastorianus
ctagcgccaaggcaaccttcaaatt

SEQ ID NO: 172820 - DNA, 25 bp, Saccharomyces pastorianus
cttttgctctcgataaactggatat

SEQ ID NO: 172821 - DNA, 25 bp, Saccharomyces pastorianus
ttttttgttgtatctctccactaag

SEQ ID NO: 172822 - DNA, 25 bp, Saccharomyces pastorianus
tctccactaagctacgtatttccaa

SEQ ID NO: 172823 - DNA, 25 bp, Saccharomyces pastorianus
gtaaattgttcctttgcgtgatgca

SEQ ID NO: 172824 - DNA, 25 bp, Saccharomyces pastorianus
attattggccaactgcaaatgagca

SEQ ID NO: 172825 - DNA, 25 bp, Saccharomyces pastorianus
ttttttcttcttttgctctcgataa

SEQ ID NO: 172826 - DNA, 25 bp, Saccharomyces pastorianus
gagcaggatgactctttgatttatc

SEQ ID NO: 172827 - DNA, 25 bp, Saccharomyces pastorianus
gtgttctcatcatcgatttcaagct

SEQ ID NO: 172828 - DNA, 25 bp, Saccharomyces pastorianus
agactctgtcggattaactttgtcc

SEQ ID NO: 172829 - DNA, 25 bp, Saccharomyces pastorianus
agacattttaatgggtaagaaactg

SEQ ID NO: 172830 - DNA, 25 bp, Saccharomyces pastorianus
aacgcgcttgatgtatcatttaaag

SEQ ID NO: 172831 - DNA, 25 bp, Saccharomyces pastorianus
gagtgaatcccatacatcttctaca

SEQ ID NO: 172832 - DNA, 25 bp, Saccharomyces pastorianus
gtcagacaataagagtgaatcccat

SEQ ID NO: 172833 - DNA, 25 bp, Saccharomyces pastorianus
gatgcaaacgcgcttgatgtatcat

SEQ ID NO: 172834 - DNA, 25 bp, Saccharomyces pastorianus
aagaaactggatgaagactctgtcg

SEQ ID NO: 172835 - DNA, 25 bp, Saccharomyces pastorianus
aactttgtccgacaagtcagacaat

SEQ ID NO: 172836 - DNA, 25 bp, Saccharomyces pastorianus
gaatcccatacatcttctacaaatg

SEQ ID NO: 172837 - DNA, 25 bp, Saccharomyces pastorianus
tgacaaaaatgaatcagcagtcgaa

SEQ ID NO: 172838 - DNA, 25 bp, Saccharomyces pastorianus
ggattaactttgtccgacaagtcag

SEQ ID NO: 172839 - DNA, 25 bp, Saccharomyces pastorianus
gagtacgataccacagttattgatg

SEQ ID NO: 172840 - DNA, 25 bp, Saccharomyces pastorianus
agatgcccctgtcgtaatagagtac

SEQ ID NO: 172841 - DNA, 25 bp, Saccharomyces pastorianus
gctgcactaagagagctaagcatag

SEQ ID NO: 172842 - DNA, 25 bp, Saccharomyces pastorianus
agagtcttcactcgcagacaaaaca

SEQ ID NO: 172843 - DNA, 25 bp, Saccharomyces pastorianus
acggtacaaggatgaaggcgatctt

SEQ ID NO: 172844 - DNA, 25 bp, Saccharomyces pastorianus
gagttagagtcttcactcgcagaca

SEQ ID NO: 172845 - DNA, 25 bp, Saccharomyces pastorianus
cagtgatagtacaaaggcgaaggac

SEQ ID NO: 172846 - DNA, 25 bp, Saccharomyces pastorianus
aaatgttcttctgcgatctgaaaaa

SEQ ID NO: 172847 - DNA, 25 bp, Saccharomyces pastorianus
aagccattaaagatgcccctgtcgt

SEQ ID NO: 172848 - DNA, 25 bp, Saccharomyces pastorianus
accaaattaaatgttcttctgcgat

SEQ ID NO: 172849 - DNA, 25 bp, Saccharomyces pastorianus
gaagatggcgaattggctgcactaa

SEQ ID NO: 172850 - DNA, 25 bp, Saccharomyces pastorianus
gtgcaacagagttcgtttttaattt

SEQ ID NO: 172851 - DNA, 25 bp, Saccharomyces pastorianus
gaagtcacatattccgacaaattca

SEQ ID NO: 172852 - DNA, 25 bp, Saccharomyces pastorianus
gtagtgtccatttaaattgtacaat

SEQ ID NO: 172853 - DNA, 25 bp, Saccharomyces pastorianus
attccgacaaattcaatcgcacgtt

SEQ ID NO: 172854 - DNA, 25 bp, Saccharomyces pastorianus
attagtgcaacagagttcgttttta

SEQ ID NO: 172855 - DNA, 25 bp, Saccharomyces pastorianus
atattgctagtagtgtccatttaaa

SEQ ID NO: 172856 - DNA, 25 bp, Saccharomyces pastorianus
cacgttctattattagtgcaacaga

SEQ ID NO: 172857 - DNA, 25 bp, Saccharomyces pastorianus
gacaaattcaatcgcacgttctatt

SEQ ID NO: 172858 - DNA, 25 bp, Saccharomyces pastorianus
ttcaatcgcacgttctattattagt

SEQ ID NO: 172859 - DNA, 25 bp, Saccharomyces pastorianus
gttcgtttttaatttatattgctag

SEQ ID NO: 172860 - DNA, 25 bp, Saccharomyces pastorianus
gctagtagtgtccatttaaattgta

SEQ ID NO: 172861 - DNA, 25 bp, Saccharomyces pastorianus
aaattagcgggtatcctgttcgatg

SEQ ID NO: 172862 - DNA, 25 bp, Saccharomyces pastorianus
cggactgctcgaaaaggctaacaag

SEQ ID NO: 172863 - DNA, 25 bp, Saccharomyces pastorianus
agttcagcgataaacatttctatca

SEQ ID NO: 172864 - DNA, 25 bp, Saccharomyces pastorianus
gtgtacacaccctcttaaagttcag

SEQ ID NO: 172865 - DNA, 25 bp, Saccharomyces pastorianus
agtttatgcagtggtgtacacaccc

SEQ ID NO: 172866 - DNA, 25 bp, Saccharomyces pastorianus
gaacaagcacgctaactggatagtt

SEQ ID NO: 172867 - DNA, 25 bp, Saccharomyces pastorianus
atgtggtcaaatgcgctaaggaatt

SEQ ID NO: 172868 - DNA, 25 bp, Saccharomyces pastorianus
gaggtaatgacccaacagaattcta

SEQ ID NO: 172869 - DNA, 25 bp, Saccharomyces pastorianus
ttaaagggctaacggactgctcgaa

SEQ ID NO: 172870 - DNA, 25 bp, Saccharomyces pastorianus
agtggccgcgtagcgctgtagaact

SEQ ID NO: 172871 - DNA, 25 bp, Saccharomyces pastorianus
gggtatcctgttcgatgtggtcaaa

SEQ ID NO: 172872 - DNA, 25 bp, Saccharomyces pastorianus
taggcgcaaactctggtacttcgat

SEQ ID NO: 172873 - DNA, 25 bp, Saccharomyces pastorianus
gtactctttggaacacaacactact

SEQ ID NO: 172874 - DNA, 25 bp, Saccharomyces pastorianus
tgcggatccttttcagatgcttcag

SEQ ID NO: 172875 - DNA, 25 bp, Saccharomyces pastorianus
tttacctcgtacttttctgctgtgg

SEQ ID NO: 172876 - DNA, 25 bp, Saccharomyces pastorianus
tctggtacttcgatcacgtccttta

SEQ ID NO: 172877 - DNA, 25 bp, Saccharomyces pastorianus
tggagctctccacattcttgcggat

SEQ ID NO: 172878 - DNA, 25 bp, Saccharomyces pastorianus
ctcctttgtgctaggcgcaaactct

SEQ ID NO: 172879 - DNA, 25 bp, Saccharomyces pastorianus
gtacttttctgctgtgggccaagca

SEQ ID NO: 172880 - DNA, 25 bp, Saccharomyces pastorianus
gatgcttcagtgaaacagggtcatt

SEQ ID NO: 172881 - DNA, 25 bp, Saccharomyces pastorianus
actacttccaatgtggagctctcca

SEQ ID NO: 172882 - DNA, 25 bp, Saccharomyces pastorianus
gggccaagcactcttcagcttaaga

SEQ ID NO: 172883 - DNA, 25 bp, Saccharomyces pastorianus
gaaggccttgccatggctaagaaaa

SEQ ID NO: 172884 - DNA, 25 bp, Saccharomyces pastorianus
taagctatgaagaaggccttgccat

SEQ ID NO: 172885 - DNA, 25 bp, Saccharomyces pastorianus
tcaacgtttccagtggcaacaacaa

SEQ ID NO: 172886 - DNA, 25 bp, Saccharomyces pastorianus
gacatcaacgtttccagtggcaaca

SEQ ID NO: 172887 - DNA, 25 bp, Saccharomyces pastorianus
acagtaactctaatgctaagaatct

SEQ ID NO: 172888 - DNA, 25 bp, Saccharomyces pastorianus
tatccaacaacaggacatcaacgtt

SEQ ID NO: 172889 - DNA, 25 bp, Saccharomyces pastorianus
cgaatcgaacgctatcacaccgaac

SEQ ID NO: 172890 - DNA, 25 bp, Saccharomyces pastorianus
gaagaaggccttgccatggctaaga

SEQ ID NO: 172891 - DNA, 25 bp, Saccharomyces pastorianus
gaaaacgaatcgaacgctatcacac

SEQ ID NO: 172892 - DNA, 25 bp, Saccharomyces pastorianus
gccttgccatggctaagaaaattgg

SEQ ID NO: 172893 - DNA, 25 bp, Saccharomyces pastorianus
gcgctgaaatgcgatttgagaaaca

SEQ ID NO: 172894 - DNA, 25 bp, Saccharomyces pastorianus
agctgctaaattcgaaacctactta

SEQ ID NO: 172895 - DNA, 25 bp, Saccharomyces pastorianus
tcctcgttggaggtttttacgcttg

SEQ ID NO: 172896 - DNA, 25 bp, Saccharomyces pastorianus
gtgatatttcattgtactgggtcca

SEQ ID NO: 172897 - DNA, 25 bp, Saccharomyces pastorianus
tcattgtactgggtccaagaatagg

SEQ ID NO: 172898 - DNA, 25 bp, Saccharomyces pastorianus
gggaccaaaagtagctgctaaattc

SEQ ID NO: 172899 - DNA, 25 bp, Saccharomyces pastorianus
ttgagagttgcatcctcgttggagg

SEQ ID NO: 172900 - DNA, 25 bp, Saccharomyces pastorianus
gtaagtttgagagttgcatcctcgt

SEQ ID NO: 172901 - DNA, 25 bp, Saccharomyces pastorianus
gctaaattcgaaacctacttacaag

SEQ ID NO: 172902 - DNA, 25 bp, Saccharomyces pastorianus
gtttttacgcttgggagacccattg

SEQ ID NO: 172903 - DNA, 25 bp, Saccharomyces pastorianus
ttacgcttgggagacccattgtaga

SEQ ID NO: 172904 - DNA, 25 bp, Saccharomyces pastorianus
tctcaattcgtcaaagtgatatttc

SEQ ID NO: 172905 - DNA, 25 bp, Saccharomyces pastorianus
gctaacggttaccaatgatccaatt

SEQ ID NO: 172906 - DNA, 25 bp, Saccharomyces pastorianus
gttaccaatgatccaattcccatat

SEQ ID NO: 172907 - DNA, 25 bp, Saccharomyces pastorianus
acggttaccaatgatccaattccca

SEQ ID NO: 172908 - DNA, 25 bp, Saccharomyces pastorianus
taacggttaccaatgatccaattcc

SEQ ID NO: 172909 - DNA, 25 bp, Saccharomyces pastorianus
cagctaacggttaccaatgatccaa

SEQ ID NO: 172910 - DNA, 25 bp, Saccharomyces pastorianus
ggttaccaatgatccaattcccata

SEQ ID NO: 172911 - DNA, 25 bp, Saccharomyces pastorianus
aatgatccaattcccatatttaaga

SEQ ID NO: 172912 - DNA, 25 bp, Saccharomyces pastorianus
gatccaattcccatatttaagaagg

SEQ ID NO: 172913 - DNA, 25 bp, Saccharomyces pastorianus
ctcagctaacggttaccaatgatcc

SEQ ID NO: 172914 - DNA, 25 bp, Saccharomyces pastorianus
accaatgatccaattcccatattta

SEQ ID NO: 172915 - DNA, 25 bp, Saccharomyces pastorianus
cggttaccaatgatccaattcccat

SEQ ID NO: 172916 - DNA, 25 bp, Saccharomyces pastorianus
atattcgtgccaattcctcacaata

SEQ ID NO: 172917 - DNA, 25 bp, Saccharomyces pastorianus
acttccacgaccttcgacagagatc

SEQ ID NO: 172918 - DNA, 25 bp, Saccharomyces pastorianus
gtaggaccacgttgaaccaaatgat

SEQ ID NO: 172919 - DNA, 25 bp, Saccharomyces pastorianus
gaccttcgacagagatccaaatgac

SEQ ID NO: 172920 - DNA, 25 bp, Saccharomyces pastorianus
cctagtagtgtgtatgctgacctgg

SEQ ID NO: 172921 - DNA, 25 bp, Saccharomyces pastorianus
aattcctcacaatacacttccacga

SEQ ID NO: 172922 - DNA, 25 bp, Saccharomyces pastorianus
acagccaaagaaactaccctagtag

SEQ ID NO: 172923 - DNA, 25 bp, Saccharomyces pastorianus
tcgaaatttcgtgagctttgcgctt

SEQ ID NO: 172924 - DNA, 25 bp, Saccharomyces pastorianus
gacaataagttgaaagccagaatgc

SEQ ID NO: 172925 - DNA, 25 bp, Saccharomyces pastorianus
gacctggtaccaactcgaaatttcg

SEQ ID NO: 172926 - DNA, 25 bp, Saccharomyces pastorianus
agtgtgtatgctgacctggtaccaa

SEQ ID NO: 172927 - DNA, 25 bp, Saccharomyces pastorianus
gttccaggaattcacactcaataaa

SEQ ID NO: 172928 - DNA, 25 bp, Saccharomyces pastorianus
gataaaccgctatatcgcaagggta

SEQ ID NO: 172929 - DNA, 25 bp, Saccharomyces pastorianus
gaacagtctctgcttcattatacaa

SEQ ID NO: 172930 - DNA, 25 bp, Saccharomyces pastorianus
gctatacctcaatatgcactccata

SEQ ID NO: 172931 - DNA, 25 bp, Saccharomyces pastorianus
tctcgccatgtttcctttattgatt

SEQ ID NO: 172932 - DNA, 25 bp, Saccharomyces pastorianus
gactatgtcttttgcagcctttgta

SEQ ID NO: 172933 - DNA, 25 bp, Saccharomyces pastorianus
gctatttgtgtttcgatgtgttcca

SEQ ID NO: 172934 - DNA, 25 bp, Saccharomyces pastorianus
acatgtttgttcaagccggtctgat

SEQ ID NO: 172935 - DNA, 25 bp, Saccharomyces pastorianus
atactgtaccgttactagccatctt

SEQ ID NO: 172936 - DNA, 25 bp, Saccharomyces pastorianus
attacattgctcttgggaaatccat

SEQ ID NO: 172937 - DNA, 25 bp, Saccharomyces pastorianus
actagccatcttgcgtttttggaaa

SEQ ID NO: 172938 - DNA, 25 bp, Saccharomyces pastorianus
acatctttaccctgatctactatca

SEQ ID NO: 172939 - DNA, 25 bp, Saccharomyces pastorianus
tctttaccctgatctactatcaata

SEQ ID NO: 172940 - DNA, 25 bp, Saccharomyces pastorianus
caccatacatctttaccctgatcta

SEQ ID NO: 172941 - DNA, 25 bp, Saccharomyces pastorianus
accatacatctttaccctgatctac

SEQ ID NO: 172942 - DNA, 25 bp, Saccharomyces pastorianus
tacatctttaccctgatctactatc

SEQ ID NO: 172943 - DNA, 25 bp, Saccharomyces pastorianus
catctttaccctgatctactatcaa

SEQ ID NO: 172944 - DNA, 25 bp, Saccharomyces pastorianus
tcaataccacaccatacatctttac

SEQ ID NO: 172945 - DNA, 25 bp, Saccharomyces pastorianus
acaccatacatctttaccctgatct

SEQ ID NO: 172946 - DNA, 25 bp, Saccharomyces pastorianus
catacatctttaccctgatctacta

SEQ ID NO: 172947 - DNA, 25 bp, Saccharomyces pastorianus
ctcaataccacaccatacatcttta

SEQ ID NO: 172948 - DNA, 25 bp, Saccharomyces pastorianus
atctttaccctgatctactatcaat

SEQ ID NO: 172949 - DNA, 25 bp, Saccharomyces pastorianus
aaaccagcggtagattctcagccaa

SEQ ID NO: 172950 - DNA, 25 bp, Saccharomyces pastorianus
ggaagcttctaaacctgcgttctca

SEQ ID NO: 172951 - DNA, 25 bp, Saccharomyces pastorianus
atgcaaacaaacctgccttttcttt

SEQ ID NO: 172952 - DNA, 25 bp, Saccharomyces pastorianus
aatagtaacacaactcctgcttcca

SEQ ID NO: 172953 - DNA, 25 bp, Saccharomyces pastorianus
caagtctttcatttggcaccaagcc

SEQ ID NO: 172954 - DNA, 25 bp, Saccharomyces pastorianus
tcctttggtgctacaacggcggaaa

SEQ ID NO: 172955 - DNA, 25 bp, Saccharomyces pastorianus
tctcattcggcgctaagcttggtga

SEQ ID NO: 172956 - DNA, 25 bp, Saccharomyces pastorianus
cctgccttttcttttggtgcaaact

SEQ ID NO: 172957 - DNA, 25 bp, Saccharomyces pastorianus
aaccatctaaaactgctttctcctt

SEQ ID NO: 172958 - DNA, 25 bp, Saccharomyces pastorianus
tgacacagcaaagccggcattttcc

SEQ ID NO: 172959 - DNA, 25 bp, Saccharomyces pastorianus
ggagtttcccaaggtacacagttag

SEQ ID NO: 172960 - DNA, 25 bp, Saccharomyces pastorianus
aggatcttatttccggccgtgtccg

SEQ ID NO: 172961 - DNA, 25 bp, Saccharomyces pastorianus
gaaccaccggaccaatgaaacgcga

SEQ ID NO: 172962 - DNA, 25 bp, Saccharomyces pastorianus
ggcgaaccaccggaccaatgaaacg

SEQ ID NO: 172963 - DNA, 25 bp, Saccharomyces pastorianus
atgcaaggatcttatttccggccgt

SEQ ID NO: 172964 - DNA, 25 bp, Saccharomyces pastorianus
gccgaggctcggtgtgccttttagc

SEQ ID NO: 172965 - DNA, 25 bp, Saccharomyces pastorianus
cggtgtgccttttagctgcatttag

SEQ ID NO: 172966 - DNA, 25 bp, Saccharomyces pastorianus
gaaggcgaaccaccggaccaatgaa

SEQ ID NO: 172967 - DNA, 25 bp, Saccharomyces pastorianus
ggctcggtgtgccttttagctgcat

SEQ ID NO: 172968 - DNA, 25 bp, Saccharomyces pastorianus
gcaaggatcttatttccggccgtgt

SEQ ID NO: 172969 - DNA, 25 bp, Saccharomyces pastorianus
cgcgttctcattggctgggcgctcg

SEQ ID NO: 172970 - DNA, 25 bp, Saccharomyces pastorianus
cggaccaatgaaacgcgagagcgca

SEQ ID NO: 172971 - DNA, 25 bp, Saccharomyces pastorianus
taaagcctttattatgtgtggtttc

SEQ ID NO: 172972 - DNA, 25 bp, Saccharomyces pastorianus
gcctttattatgtgtggtttcaaat

SEQ ID NO: 172973 - DNA, 25 bp, Saccharomyces pastorianus
attatgtgtggtttcaaattctatt

SEQ ID NO: 172974 - DNA, 25 bp, Saccharomyces pastorianus
aaagcctttattatgtgtggtttca

SEQ ID NO: 172975 - DNA, 25 bp, Saccharomyces pastorianus
ttatgtgtggtttcaaattctattt

SEQ ID NO: 172976 - DNA, 25 bp, Saccharomyces pastorianus
tattatgtgtggtttcaaattctat

SEQ ID NO: 172977 - DNA, 25 bp, Saccharomyces pastorianus
atgtgtggtttcaaattctatttta

SEQ ID NO: 172978 - DNA, 25 bp, Saccharomyces pastorianus
tgtgtggtttcaaattctattttac

SEQ ID NO: 172979 - DNA, 25 bp, Saccharomyces pastorianus
ctttattatgtgtggtttcaaattc

SEQ ID NO: 172980 - DNA, 25 bp, Saccharomyces pastorianus
agcctttattatgtgtggtttcaaa

SEQ ID NO: 172981 - DNA, 25 bp, Saccharomyces pastorianus
aagcctttattatgtgtggtttcaa

SEQ ID NO: 172982 - DNA, 25 bp, Saccharomyces pastorianus
agttttaccaggtgcttcaactgct

SEQ ID NO: 172983 - DNA, 25 bp, Saccharomyces pastorianus
taccaggtgcttcaactgctttaac

SEQ ID NO: 172984 - DNA, 25 bp, Saccharomyces pastorianus
catatctagttttaccaggtgcttc

SEQ ID NO: 172985 - DNA, 25 bp, Saccharomyces pastorianus
aactggtaccctatatatttactgg

SEQ ID NO: 172986 - DNA, 25 bp, Saccharomyces pastorianus
gtgcttcaactgctttaactggtac

SEQ ID NO: 172987 - DNA, 25 bp, Saccharomyces pastorianus
tttaccaggtgcttcaactgcttta

SEQ ID NO: 172988 - DNA, 25 bp, Saccharomyces pastorianus
gcttcaactgctttaactggtaccc

SEQ ID NO: 172989 - DNA, 25 bp, Saccharomyces pastorianus
ctgctttaactggtaccctatatat

SEQ ID NO: 172990 - DNA, 25 bp, Saccharomyces pastorianus
gtcatatctagttttaccaggtgct

SEQ ID NO: 172991 - DNA, 25 bp, Saccharomyces pastorianus
aggtgcttcaactgctttaactggt

SEQ ID NO: 172992 - DNA, 25 bp, Saccharomyces pastorianus
caactgctttaactggtaccctata

SEQ ID NO: 172993 - DNA, 25 bp, Saccharomyces pastorianus
tgttgagataagaagccactatgct

SEQ ID NO: 172994 - DNA, 25 bp, Saccharomyces pastorianus
gaaggcctacgatgagatgaagaaa

SEQ ID NO: 172995 - DNA, 25 bp, Saccharomyces pastorianus
aagaagccactatgctataagtaag

SEQ ID NO: 172996 - DNA, 25 bp, Saccharomyces pastorianus
aagaaggcctacgatgagatgaaga

SEQ ID NO: 172997 - DNA, 25 bp, Saccharomyces pastorianus
gaagccactatgctataagtaagaa

SEQ ID NO: 172998 - DNA, 25 bp, Saccharomyces pastorianus
tgctataagtaagaaggcctacgat

SEQ ID NO: 172999 - DNA, 25 bp, Saccharomyces pastorianus
gagataagaagccactatgctataa

SEQ ID NO: 173000 - DNA, 25 bp, Saccharomyces pastorianus
ctatgctataagtaagaaggcctac

SEQ ID NO: 173001 - DNA, 25 bp, Saccharomyces pastorianus
gtaagaaggcctacgatgagatgaa

SEQ ID NO: 173002 - DNA, 25 bp, Saccharomyces pastorianus
ggatgttgagataagaagccactat

SEQ ID NO: 173003 - DNA, 25 bp, Saccharomyces pastorianus
gataagaagccactatgctataagt

SEQ ID NO: 173004 - DNA, 25 bp, Saccharomyces pastorianus
gatgagaatggtaagccccttcctc

SEQ ID NO: 173005 - DNA, 25 bp, Saccharomyces pastorianus
gagtacgttttctaagaccaatcca

SEQ ID NO: 173006 - DNA, 25 bp, Saccharomyces pastorianus
gtagcatcctaattgagagtctcat

SEQ ID NO: 173007 - DNA, 25 bp, Saccharomyces pastorianus
ggcttaccagactcaccaatttttg

SEQ ID NO: 173008 - DNA, 25 bp, Saccharomyces pastorianus
tcctcctttagtggtccagcttgga

SEQ ID NO: 173009 - DNA, 25 bp, Saccharomyces pastorianus
tggcaaaacctcaaacttgtagcat

SEQ ID NO: 173010 - DNA, 25 bp, Saccharomyces pastorianus
agcgtgattggttcttttacaagcc

SEQ ID NO: 173011 - DNA, 25 bp, Saccharomyces pastorianus
ttgaaacttcctggcttaccagact

SEQ ID NO: 173012 - DNA, 25 bp, Saccharomyces pastorianus
tattaccgatttgctcatcaaccac

SEQ ID NO: 173013 - DNA, 25 bp, Saccharomyces pastorianus
ttgagagtctcataatggccctaga

SEQ ID NO: 173014 - DNA, 25 bp, Saccharomyces pastorianus
actgctctacagaacacaagtgatt

SEQ ID NO: 173015 - DNA, 25 bp, Saccharomyces pastorianus
tactggatttagctgaatagagacg

SEQ ID NO: 173016 - DNA, 25 bp, Saccharomyces pastorianus
agggcttgtccttattaataaacag

SEQ ID NO: 173017 - DNA, 25 bp, Saccharomyces pastorianus
taagtgctactggatttagctgaat

SEQ ID NO: 173018 - DNA, 25 bp, Saccharomyces pastorianus
ggagcaagataagaaagccgatttt

SEQ ID NO: 173019 - DNA, 25 bp, Saccharomyces pastorianus
atgaagggcttgtccttattaataa

SEQ ID NO: 173020 - DNA, 25 bp, Saccharomyces pastorianus
atgacttgaatttagatgagatcga

SEQ ID NO: 173021 - DNA, 25 bp, Saccharomyces pastorianus
gaatgttataagtgctactggattt

SEQ ID NO: 173022 - DNA, 25 bp, Saccharomyces pastorianus
gatttagctgaatagagacggagga

SEQ ID NO: 173023 - DNA, 25 bp, Saccharomyces pastorianus
gatcgagaatgttataagtgctact

SEQ ID NO: 173024 - DNA, 25 bp, Saccharomyces pastorianus
ggcttgtccttattaataaacagaa

SEQ ID NO: 173025 - DNA, 25 bp, Saccharomyces pastorianus
tgaatagagacggaggagcaagata

SEQ ID NO: 173026 - DNA, 25 bp, Saccharomyces pastorianus
gtgtaagtaaggaagctcaagtcaa

SEQ ID NO: 173027 - DNA, 25 bp, Saccharomyces pastorianus
agcaaatactggaaatgtcacccat

SEQ ID NO: 173028 - DNA, 25 bp, Saccharomyces pastorianus
atactggaaatgtcacccataagga

SEQ ID NO: 173029 - DNA, 25 bp, Saccharomyces pastorianus
gtaaggaagctcaagtcaacaaaag

SEQ ID NO: 173030 - DNA, 25 bp, Saccharomyces pastorianus
ttgcccgaaagtgccgatagaactt

SEQ ID NO: 173031 - DNA, 25 bp, Saccharomyces pastorianus
actatttagacttggtgtgtaagta

SEQ ID NO: 173032 - DNA, 25 bp, Saccharomyces pastorianus
agtgccgatagaactttcattgaag

SEQ ID NO: 173033 - DNA, 25 bp, Saccharomyces pastorianus
acccatttgccatcaaagcaaatac

SEQ ID NO: 173034 - DNA, 25 bp, Saccharomyces pastorianus
gaactttcattgaagtagataaact

SEQ ID NO: 173035 - DNA, 25 bp, Saccharomyces pastorianus
gccgatagaactttcattgaagtag

SEQ ID NO: 173036 - DNA, 25 bp, Saccharomyces pastorianus
ctggaaatgtcacccataaggatcc

SEQ ID NO: 173037 - DNA, 25 bp, Saccharomyces pastorianus
tttccattgtggtacctgacgtttg

SEQ ID NO: 173038 - DNA, 25 bp, Saccharomyces pastorianus
gaaaagagtgctcgcgctttcttct

SEQ ID NO: 173039 - DNA, 25 bp, Saccharomyces pastorianus
tctccgttgattggccgcgggaccg

SEQ ID NO: 173040 - DNA, 25 bp, Saccharomyces pastorianus
gcgccctagcttcacgataagcaga

SEQ ID NO: 173041 - DNA, 25 bp, Saccharomyces pastorianus
tgtggtacctgacgtttggagaaaa

SEQ ID NO: 173042 - DNA, 25 bp, Saccharomyces pastorianus
gcctgaagccggttctaccagaaaa

SEQ ID NO: 173043 - DNA, 25 bp, Saccharomyces pastorianus
tgataacagcccctctccgttgatt

SEQ ID NO: 173044 - DNA, 25 bp, Saccharomyces pastorianus
ttttttcagcctgaagccggttcta

SEQ ID NO: 173045 - DNA, 25 bp, Saccharomyces pastorianus
tcttccgctcatttccattgtggta

SEQ ID NO: 173046 - DNA, 25 bp, Saccharomyces pastorianus
gcactcaaaatacgtgggccggttc

SEQ ID NO: 173047 - DNA, 25 bp, Saccharomyces pastorianus
gttctaccagaaaagagtgctcgcg

SEQ ID NO: 173048 - DNA, 25 bp, Saccharomyces pastorianus
atattcacaatcagacaccacggct

SEQ ID NO: 173049 - DNA, 25 bp, Saccharomyces pastorianus
tttacttgaaagacaggcgcaacgt

SEQ ID NO: 173050 - DNA, 25 bp, Saccharomyces pastorianus
agatgtcgtttccaagcagctttac

SEQ ID NO: 173051 - DNA, 25 bp, Saccharomyces pastorianus
gatgcacctaaatcgtatgtctcta

SEQ ID NO: 173052 - DNA, 25 bp, Saccharomyces pastorianus
gtcggatctggaaagatgtcgtttc

SEQ ID NO: 173053 - DNA, 25 bp, Saccharomyces pastorianus
gatgtgctagaaagtgaaacctcgg

SEQ ID NO: 173054 - DNA, 25 bp, Saccharomyces pastorianus
gtatgtctctagttccaagtcggat

SEQ ID NO: 173055 - DNA, 25 bp, Saccharomyces pastorianus
gaaacctcggaagatgcacctaaat

SEQ ID NO: 173056 - DNA, 25 bp, Saccharomyces pastorianus
cacggctatcggtgcacagtgggat

SEQ ID NO: 173057 - DNA, 25 bp, Saccharomyces pastorianus
taccgctattttataaaccttattg

SEQ ID NO: 173058 - DNA, 25 bp, Saccharomyces pastorianus
gtgaaaacaattgttaccgctattt

SEQ ID NO: 173059 - DNA, 25 bp, Saccharomyces pastorianus
aacggctggtcgctgaaatcatttc

SEQ ID NO: 173060 - DNA, 25 bp, Saccharomyces pastorianus
tctaggcgactatatcatctccggg

SEQ ID NO: 173061 - DNA, 25 bp, Saccharomyces pastorianus
gtaagattcagaaccccatcaacaa

SEQ ID NO: 173062 - DNA, 25 bp, Saccharomyces pastorianus
gttcaatattgcgtttctgcgtcaa

SEQ ID NO: 173063 - DNA, 25 bp, Saccharomyces pastorianus
gcacagggcacgagtttcccataga

SEQ ID NO: 173064 - DNA, 25 bp, Saccharomyces pastorianus
agattgacacactggccgtcaggta

SEQ ID NO: 173065 - DNA, 25 bp, Saccharomyces pastorianus
gggaaatacctctgcccagattaat

SEQ ID NO: 173066 - DNA, 25 bp, Saccharomyces pastorianus
tattcatttcattgaggacccggca

SEQ ID NO: 173067 - DNA, 25 bp, Saccharomyces pastorianus
caggtaatggtctcagcgtgggcac

SEQ ID NO: 173068 - DNA, 25 bp, Saccharomyces pastorianus
gaggacccggcaaacgtaagattca

SEQ ID NO: 173069 - DNA, 25 bp, Saccharomyces pastorianus
gggtctcacgacactacattaagat

SEQ ID NO: 173070 - DNA, 25 bp, Saccharomyces pastorianus
cttgtgcttgtaccgcaagggattt

SEQ ID NO: 173071 - DNA, 25 bp, Saccharomyces pastorianus
gtcttgtgcttgtaccgcaagggat

SEQ ID NO: 173072 - DNA, 25 bp, Saccharomyces pastorianus
gtgtcgtcttgtgcttgtaccgcaa

SEQ ID NO: 173073 - DNA, 25 bp, Saccharomyces pastorianus
ctgaaagtatgtaagttgcgcagtc

SEQ ID NO: 173074 - DNA, 25 bp, Saccharomyces pastorianus
attccctctgtggacgagcatggcc

SEQ ID NO: 173075 - DNA, 25 bp, Saccharomyces pastorianus
gtaccgcaagggatttagatatatt

SEQ ID NO: 173076 - DNA, 25 bp, Saccharomyces pastorianus
gtggacgagcatggcctgaaagtat

SEQ ID NO: 173077 - DNA, 25 bp, Saccharomyces pastorianus
aacaacggcgttgcaatgtggaaat

SEQ ID NO: 173078 - DNA, 25 bp, Saccharomyces pastorianus
tggcctgaaagtatgtaagttgcgc

SEQ ID NO: 173079 - DNA, 25 bp, Saccharomyces pastorianus
gacgagcatggcctgaaagtatgta

SEQ ID NO: 173080 - DNA, 25 bp, Saccharomyces pastorianus
attggtgtcgtcttgtgcttgtacc

SEQ ID NO: 173081 - DNA, 25 bp, Saccharomyces pastorianus
ttttaatcgcgagtatgtccgcggc

SEQ ID NO: 173082 - DNA, 25 bp, Saccharomyces pastorianus
gaaaactttttaatcgcgagtatgt

SEQ ID NO: 173083 - DNA, 25 bp, Saccharomyces pastorianus
ggaaaactttttaatcgcgagtatg

SEQ ID NO: 173084 - DNA, 25 bp, Saccharomyces pastorianus
gcttttactttgcatgcaaggctca

SEQ ID NO: 173085 - DNA, 25 bp, Saccharomyces pastorianus
tgcaaggctcagtttgataaccttt

SEQ ID NO: 173086 - DNA, 25 bp, Saccharomyces pastorianus
gcggcttttactttgcatgcaaggc

SEQ ID NO: 173087 - DNA, 25 bp, Saccharomyces pastorianus
ctttgcatgcaaggctcagtttgat

SEQ ID NO: 173088 - DNA, 25 bp, Saccharomyces pastorianus
cgcggcttttactttgcatgcaagg

SEQ ID NO: 173089 - DNA, 25 bp, Saccharomyces pastorianus
ctttttaatcgcgagtatgtccgcg

SEQ ID NO: 173090 - DNA, 25 bp, Saccharomyces pastorianus
gcatgcaaggctcagtttgataacc

SEQ ID NO: 173091 - DNA, 25 bp, Saccharomyces pastorianus
caaggctcagtttgataacctttgg

SEQ ID NO: 173092 - DNA, 25 bp, Saccharomyces pastorianus
cgactaccattgttcattctctagt

SEQ ID NO: 173093 - DNA, 25 bp, Saccharomyces pastorianus
ttctctagtactcggaatgcggaag

SEQ ID NO: 173094 - DNA, 25 bp, Saccharomyces pastorianus
gcgctggattcaatggttaggcctt

SEQ ID NO: 173095 - DNA, 25 bp, Saccharomyces pastorianus
tagtactcggaatgcggaagacgta

SEQ ID NO: 173096 - DNA, 25 bp, Saccharomyces pastorianus
ctaccattgttcattctctagtact

SEQ ID NO: 173097 - DNA, 25 bp, Saccharomyces pastorianus
attgttcattctctagtactcggaa

SEQ ID NO: 173098 - DNA, 25 bp, Saccharomyces pastorianus
gactaccattgttcattctctagta

SEQ ID NO: 173099 - DNA, 25 bp, Saccharomyces pastorianus
accattgttcattctctagtactcg

SEQ ID NO: 173100 - DNA, 25 bp, Saccharomyces pastorianus
taccattgttcattctctagtactc

SEQ ID NO: 173101 - DNA, 25 bp, Saccharomyces pastorianus
actaccattgttcattctctagtac

SEQ ID NO: 173102 - DNA, 25 bp, Saccharomyces pastorianus
ccattgttcattctctagtactcgg

SEQ ID NO: 173103 - DNA, 25 bp, Saccharomyces pastorianus
gcaacgtatacggtgacgattcaac

SEQ ID NO: 173104 - DNA, 25 bp, Saccharomyces pastorianus
tcaaacagggcgcaacgtatacggt

SEQ ID NO: 173105 - DNA, 25 bp, Saccharomyces pastorianus
acgacgccagacgattgcaggaacg

SEQ ID NO: 173106 - DNA, 25 bp, Saccharomyces pastorianus
gggcgcaacgtatacggtgacgatt

SEQ ID NO: 173107 - DNA, 25 bp, Saccharomyces pastorianus
acgccagacgattgcaggaacgagc

SEQ ID NO: 173108 - DNA, 25 bp, Saccharomyces pastorianus
gtgacgattcaacgataactagtgt

SEQ ID NO: 173109 - DNA, 25 bp, Saccharomyces pastorianus
aacagggcgcaacgtatacggtgac

SEQ ID NO: 173110 - DNA, 25 bp, Saccharomyces pastorianus
gtcagtgggacgacgccagacgatt

SEQ ID NO: 173111 - DNA, 25 bp, Saccharomyces pastorianus
ggacgacgccagacgattgcaggaa

SEQ ID NO: 173112 - DNA, 25 bp, Saccharomyces pastorianus
atacggtgacgattcaacgataact

SEQ ID NO: 173113 - DNA, 25 bp, Saccharomyces pastorianus
gattcaacgataactagtgtcagtg

SEQ ID NO: 173114 - DNA, 25 bp, Saccharomyces pastorianus
cgtcccaggacacggaaaactcact

SEQ ID NO: 173115 - DNA, 25 bp, Saccharomyces pastorianus
ggacacggaaaactcactcattata

SEQ ID NO: 173116 - DNA, 25 bp, Saccharomyces pastorianus
cacgtcccaggacacggaaaactca

SEQ ID NO: 173117 - DNA, 25 bp, Saccharomyces pastorianus
cggaaaactcactcattatagtatc

SEQ ID NO: 173118 - DNA, 25 bp, Saccharomyces pastorianus
cccaggacacggaaaactcactcat

SEQ ID NO: 173119 - DNA, 25 bp, Saccharomyces pastorianus
tgccactcgctatttcgtgaccacg

SEQ ID NO: 173120 - DNA, 25 bp, Saccharomyces pastorianus
ccaggacacggaaaactcactcatt

SEQ ID NO: 173121 - DNA, 25 bp, Saccharomyces pastorianus
gacacggaaaactcactcattatag

SEQ ID NO: 173122 - DNA, 25 bp, Saccharomyces pastorianus
acggaaaactcactcattatagtat

SEQ ID NO: 173123 - DNA, 25 bp, Saccharomyces pastorianus
tgaccacgtcccaggacacggaaaa

SEQ ID NO: 173124 - DNA, 25 bp, Saccharomyces pastorianus
tatccccttatggtgcttttctgaa

SEQ ID NO: 173125 - DNA, 885 bp, Saccharomyces pastorianus
acgtactactgtttgcatcgtagctttgcacaaatatcgaacgcaagaacttcttacagactctgttgtgaagcggtcggtctgattacggtagcagggttacatcgggaagaaacttacggatcccttacatttgaagaacagcaacttagacggaaactttattacttgcttctcatgacggagagatactatgccatatatcttcattgtgcgacgagcctggatgccacaatagcaccaccgcaacttgaacttgtaactgatcctcagctttctatggacagtttccttgaaatgattaggatatttaccgtgccgggaaaatgtttcttcgatgctttagccgctgactctacagatgcttcttgcactgaagagtcattgaaaaagatatggaacgaactccacacaacttcctcggaaatagagccatggtctaacggttacatagacatctcattttcccggcgttggattaggatactagcatggaagctagcttatcaaatgaggggtagcaacttttcattgaacgctaacaatgggcaaataccaatagaaattgcgagagatatgttaatagatacttacttaaccccagagaatctttacgatgtccatggtcccggggtaccagtgaaaacattagaaatagctactgctttggtggacattgtaggccagtatgatcataacatgaaattagaagcatggaatgttttgcatgatgtatgcaaatttgctttttctttaaaccactataacaatgatatgctgaagagattttccaccaaatgccagaatgccctaattactctgcccatttctaaacctttacaattggatggttatcccaaggataatgaagacatagacccttga

SEQ ID NO: 173126 - DNA, 360 bp, Saccharomyces pastorianus
atgacggccgagcctgctactaagaagatcaagctagaattaagcgatcctagtgaaccgcttactcaatctgatgtgatagcgtttcaaaaagaagctttgtttagatgtataaatcgtcgaagagtcgactttgaagccttgcgaaagcaatatgaactttcaagaagggagtgcatagatgtttcccgcaagttggcaaatattatggcgctgatagtaactttagctaggtttatcgaaacattctgcacagacgccaacgagaagcaactatgtagggaaatagcccaaggcgatgagacgttgatagttcagcgcagtgattctttcatgaagctactgactaaatatgggaag

SEQ ID NO: 173127 - DNA, 177 bp, Saccharomyces pastorianus
gagaagaaacatacaggcagcgttcatggcgtaaccaaaggctcaatgagcggcggtttaactcatgcaagcgatgatgatgatacagatgggaccattcctgacctgggtcgtgctgacgctgacgcgtcttatccatcaattgaagaactcacagatacccttaattccaccata

SEQ ID NO: 173128 - DNA, 213 bp, Saccharomyces pastorianus
atggaatcccaacaattatctcaaaattcacccaatcttcatggtagcgcctatgcttcggttacttctaaggaagtcccatcaaatcaagatccgttagccgtttcagcttccaatttaccggaatctgatagagattccactaaggttaattctcaacaagagacaacacctgggacatcagctgttccagagaaccatcatcatgtctct

SEQ ID NO: 173129 - DNA, 180 bp, Saccharomyces pastorianus
aatctgcaaagcaccatagaaaatactgaggatattacagtgaataaaattactagagaagatgccattagtttgtaccacttataccttcattatctaaaagacgtatttaaagtttttgagcaaagtttgccgaacttagaatatctaaccatcaactggtatacctacataaaataa

SEQ ID NO: 173130 - DNA, 111 bp, Saccharomyces pastorianus
gttgaatcagatactacttcacctagacactcgtctaccttcactgcacgaaaccaaaaccgacctggggatcctctagagtcgacctgcagcacaagcgtgcactgccgt

SEQ ID NO: 173131 - DNA, 1626 bp, Saccharomyces pastorianus
actttgtcgttccagaagtattttcattacccacttacttctccgctgggcaatatagtgagcattgttaatctgggtgcgttcatggcgtcgttatttgtctattctggcatcctggagccttgtagcaggaaaaaaatgctccaaataagcacaatgatatactctttgggtgcaattgttcaggtcttggctctaaaccaatggtgtctactactgggtagattcttactcggagtaggtatgggctttgccttttctatggtaataatttatcaattcgagtttccccttccctatataagaaaacggacattaatttccattcaatgcatctctagtgtcattgcgtattcattcggaatatggattaattgtgctttcagatatttgggctttgcatggaaataccctttgtcaacacatgtggcacttggaataatactaaacctaatgtcgttctatcttattttagagtccccttcgtggctgttgaagcaaaaaaacgacgtagaggcattggttttaatatcgaatgttttcgatgatggaaatttcgaagaaaaccaaactcagttgaaatttagggtcctgaaacgagacatattattaaagtcacaccttcaaaaaaactcctatccatatgcgtatatcttaaaggatttttcttcaataataaaattgttgataggtttccaacttctcacacgaacaaatggagtggatgctttcttgtattactcaccgttaatattacaacaaatggggagaggagaaagaaaatctatctatttaacgggacttaatgctttaatttacagcatcgtaatattagcatatgttcccttggtgttacggaaacgtaaagagaaaacgaatgtactcttaggttcgattgtgatgtgtgtattgctatttaccatatcttttacagactggtttcccaagagcacaacgaggtatatatcaatactatttgctgtttttctttttacgcacttcatcagttgggattctatagggtgggttatgaccattgagcttttacctcacttgtcacaggccccagtgatactactagtctcaaacttttattggatttttaagtggttcgtcagcttaataacccctatacttattgaccgtctgtcttggaagttttatcttattccatctttatcttcctttatttccattatatttgtgctaaagatttttcctatagaaacccgtgacgaaggattagattctgatgatgattctaccggaaatggtagcggtaaccatgatgatgtttttgacgatactggttctgaattctcctcctcaccatctttttccgcgtatcagataaacactctaggaagtagtatcaaacaaaataatcaagcctattcatctattcaaaatgagcaaattctacccaaaaacggaaacttatcgaaccagacacacggttctgcacaaaatgtttatttcattacatctgattcaggaccatcaaggactggagaatttttcagttttcataacagaaccgatccaaatatcagcgacaacattgctgcgaataaacccagttcaggtgggggccagaattcgcctggagacatggcagttgcctag

SEQ ID NO: 173132 - DNA, 645 bp, Saccharomyces pastorianus
ttctttacgaacagaggtattactgcatgctatacaaccacggcagattctagagcacacggtgtcgctgaacgattaaatcgtactttattaaacgattgtcgcacactgcttcattgcagtggtctaccaaatcatctatggttctcagcagtcgaattttctactataatcagaaattcattagtctcaccaaaaaacgataaatctgcaagacaacatgcaggtttagctggactggacattactactatactacctttcggtcaaccggttatagttaacaaccataatcccgactcgaaaatacatcctcgtggcattccaggttacgccttacatccgtcacgaaactcttatggctatattatctatcttccatcattaaaaaagacagtagatactgccaattacgttatattacaagacaaccaatccaaattggaccaattcaattatgatacactcacctttgatgatgatctcaatcgtttaacagcccataaccaatctttcattgaacaaaatgaaacagagcagtcatatgatcagaatacagaatctgatcatgactatcaatcggagattgaaataaactctgatcgacaagcttggatccggccagtaaggccaattcactgcacg

SEQ ID NO: 173133 - DNA, 666 bp, Saccharomyces pastorianus
atgtcgttttcattagggtctctaggatttttaacaaattttaagtttgaacatttcagggaggatttacctcggattatgaatcataaaatcaagacaaatttacggttgaggttggagtgcacaatttatcgtagacaccgccctgaagtagacccaaacacggggaagaaaatatgtgtggtggaaaaactaagcacacaccacattttgaacgaagtgaccatcgatcgtggtccaagtcctttcctatccatgttagaattgtatggtgacggctcattaatgaccgttgcgcaggcggacggactgattgctgctactccgactgggtccacggcctattctttgagtgcaggtgggtcattggtatgcccaaccgtcaatgcaatcgctttaacacccatttgtccacatgcattgagtttcagacccatcatcttaccagaaagtataaatttaaaagtgaaagtctcgatgaagtcaagggctccagcatgggcggcttttgatgggaaagatagaattgaattgcaaaaaggtgattttataaccatatgcgccagcccatatgcttttccaaccgtggaagcctcgcccgatgagtctattaacagtatcagtcgaaaactaaactggaatgtgagggaacaacaaaagtctttt

SEQ ID NO: 173134 - DNA, 501 bp, Saccharomyces pastorianus
atgcttggacatgctaacttccgaagtattcagaagtctcttaagaagaatgcagttacatatttgaaggaatcggatattgaatggtctaacgctagcacatatcaatgtcctgactgtctaatcggcaaaagcacgaaacatagacatgtcaaaggatcacgactaaagtaccaagaatcatatgagccttttcagtacttgcataccgatatatttggtcctgtacatcacttaccgaaaagtgcaccttcttactttatatcgtttacagatgagaaaaccagattccaatgggtgtacccattacacgaccgtcgtgaagaatctatcctcaatgtttttacatcgatattagcatttattaagaaccaattcaatgctcgcgttctagttatccagatggatcgtggctccgagtacactaacaaaactcttcataagttctttacgaacagaggtattactgcatgctatacaaccacggcagattctagagca

SEQ ID NO: 173135 - DNA, 207 bp, Saccharomyces pastorianus
aaccaagctgctcaatgtgcgggcgactttatcttacaacatgatgtacttgatgtaacatttgacaccttcatacaaggtctgtataattatttttacgagccacctggcgtcaaaaaattcttcaacgctatcatcgcagcgccaactcgtgcccacgaagatcgctactctgacaacgagccagaagataatacattacactag

SEQ ID NO: 173136 - DNA, 78 bp, Saccharomyces pastorianus
atggaatctatatttctatataccaatattacgattattcctcattccgttttatatgtttcattatcctattacatt

SEQ ID NO: 173137 - DNA, 120 bp, Saccharomyces pastorianus
atgaaccctttacaattagaccacgaaccagtccaaaaagtacgtgcaccaaaagaagttgatgccgacatatctgaatacaatattcttccatctcctgtacgatctcgtacgacccat

SEQ ID NO: 173138 - DNA, 114 bp, Saccharomyces pastorianus
ccagcagcgattgaagttaatttgaccattgtatttgttttgtttgttagtgctgatgtaatcttaacaagaaatagtgaaatgaaagcgcatacctcaaaggcatatagttga

SEQ ID NO: 173139 - DNA, 318 bp, Saccharomyces pastorianus
agagcgataacctatctgttgcactaccaattgaacgacacgctctacacaaaggctcaggttgatataccggaagatcgggcggatttgaaagttgggttgtggcttggcgcagacgtgatgctggaatatcccatcgacgaggccatagagttgttaaagaagaaactcgcggactccgaacagtctttaacggtgtccaccgaggacgtagagtttttgagggaaaatatcacgacaatggaggtcaattgcgcgcgattgtataactgggacgttcagagaaggcaagacttgaagcaggctcaagaagggact

SEQ ID NO: 173140 - DNA, 84 bp, Saccharomyces pastorianus
gggaatatagaagacgaatggactttaccctcaacaaagactatgctgtcattctccatgtcaaaactgggcgaattgggagcg

SEQ ID NO: 173141 - DNA, 5712 bp, Saccharomyces pastorianus
atgtcccaggatagaattttgttagatttagacgcagttaaccaaaggttaattctcttcaattctgcctttccctctgatgctattgaagcgcccttccactttagcaacaaggaatcaacttctgagaatttagacaatttagcaggaactatactacatagccgttccatcacaggtcatgttttcctttacaaacatatttttttagagatagtggcacgttggataaaggactccaaaaaaaaagattacgttcttgtaattgaaaagttggcaagtataattacaatatttcccgttgcaatgccattaattgaagactatttagataaagagaatgatcatttcatcactattcttcaaaatccatccacacaaaaggattccgacatgtttaaaatactattagcatactataggttactatatcacaataaagaagtatttgcacgcttcattcaacccgacattttataccaacttgtggatttactcaccaaagaacaagaaaatcaggttgttatatttttagcattaaaggttttatctttatacttagacatgggagaaaaaacattaaacgatatgctcgacacttatataaaatcacgcgattcattgttgggccattttgagggcgattctggaattgattacagcttcctcgaactgaacgaagctaagagatgtgcaaatttctctaaactacccagtgttccagaatgcttcactatagaaaaaaaatctagctacttcattattgagcctcaggatttgagtactaaggtcgcgtcaatctgtggcgttatcgtccctaaggtccacactatccacgacaaagtattctacccattaacctttgtccctactcataaaacggtttcctctcttcgtcaactcgggagaaagattcaaaattcaactccaataatgctcattggaaaagcgggatctggtaaaacctttttaatcaatgagctaagtaaatatatgggttgccatgactccattgtgaaaattcatttaggtgaacaaactgatgccaagttactgattggtacttatacctctggtgacaagccaggcacgtttgaatggagagctggtgttctcgctaccgcggtcaaagaagggagatgggtacttatagaagacatagataaagctcctacagatgttttatcaatacttttatcgcttttagaaaagcgcgaactaaccattccatccagaggagagactgtaaaggctgcaaatggtttccagttaatatcaactgttagaataaacgaagatcatcagaaggatagttccaataagatctataacttgaatatgattggtatgagaatctggaatgttattgaattagaggaacctagcgaagaggatttgacacacattttagcccaaaagtttcccattttgaccaaccttatccccaaactaatcgatacatacaaaaacgtcaaaagtatttatatgaacaccaagttcatttcattgaacaagggggcacacacaagagttgtatctgtaagagatttaattaagctgtgcgaaaggttagacatcctattcaaaaacaatggcatcaacaaacctgaccaactaatccagtcttctgtctacgacagtattttctccgaagccgccgactgtttcgctggcgctattggagaattcaaagctttggaacctattatacaagcaatcggcgagtcattagacattgcttcctcaaggatttcgttatttttgacccaacatgtgcccactttggaaaaccttgatgatagcattaaaattggaagagccgtattacttaaggaaaagctaaatatacaaaaaaaatcaatgaacagcacatcgttcgcatttacgaatcattctttaagactaatggaacagatttctgtttgtatacagatgactgaacctgttttactagtcggggaaacgggtaccgggaaaactacagtcgttcaacaacttgctaagatgttagcaaaaaaattaacggtaatcaatgtttcacaacaaacagaaactggtgatcttcttggtgggtacaaacccgtaaattctaaaacagttgcagttcctatacaagaaaattttgaaactctttttaatgctacattttccttaaagaagaacgagaagtttcacaagatgctacataggtgcttcaacaagaatcaatggaagaacgttgttaaactttggaacgaagcgtacaaaatggctcaaagcatattaaaaattacaaacactgaaaatgaaaacgaaaatgcaaagaagaagaaaagaagactcaatactcatgaaaaaaaattgttacttgacaaatgggctgacttcaatgactcagtgaagaagtttgaggcccagtctagctctattgaaaactcgtttgtcttcaattttgtcgagggttccttggtaaaggctatcagggctggggagtggctattgctcgatgaagtgaatttagcaaccgcagataccttagaaagtatttctgaccttctcaccgagcctgattctcgtagtattcttctttcagaaaagggtgacgctgagcctataaaagctcaccccgattttagaatatttgcttgtatgaaccccgctactgatgttggtaaaagagacttacctatgggtatcagatcaagatttaccgaaatatatgtacattctccggaacgtgatattactgatttgctttccataattgataaatatattggaaagtacagtgtcagcgatgaatgggtaggaaatgacatcgctgaactttaccttgaagccaaaaaactgtccgataacaatactatagttgatggctcaaaccaaaaaccacactttagtatccgtaccctgacgcgtacattgctttatgttactgatattattcatatctacggtctacgccgttccctgtatgatggattctgcatgagttttttgactttactggaccaaaaatctgaggccattctgaagccagtaatagaaaaattcacattggggaggctaaaaaatgtcaagtcaatcatgtcacagacacctccctctccaggaccagattatgttcagtttaagcattattggatgaaaaagggccctaatacaattcaagaacaagctcactatatcattacgccttttgttgaaaagaatatgatgaatttggtaagagctacatcaggcaaaagatttcctgtgcttattcaaggtccaacttcatcgggaaaaaccagtatgatcaaatatcttgcggatataacgggccataagtttgtccgtataaataaccatgagcatacagatttacaggaatatttaggtacatatgttaccgatgataccggaaagctgtcgtttaaggaaggtgttttagtcgaggcactacgaaaaggatattggattgttttggatgaattaaatcttgccccaaccgatgttttagaagccttaaataggttacttgacgataacagagaactttttattccagaaacacaagaagttgtacatcctcatcctgatttccttctttttgctacccagaatccacctgggatatacggtggccgtaaaattctttcaagagcttttaggaatcgttttctggagttgcacttcgacgatattccgcaagatgaattagaaattatcctacgtgagcgctgccaaattgccccatcatatgcaaagaaaatcgttgaagtataccgccaattatccatcgaacgttccgcttcaaggttgttcgaacagaaaaatagttttgcaactctacgtgatcttttccgctgggctttaagggacgcagtgggctatgagcagcttgctgccagtggctatatgcttcttgcagaaaggtgcagaactccacaagaaaaagttacagtcaaaaagactttagaaaaagtaatgaaagttaaattagatatggaccaatattatgcaagtctggaagataaatccttagaagccattggctctgttacttggacaaaaggaatgcgccgactatccgtcttagtttctagttgtttaaagaataaggagccagtactactggtaggtgaaactgggtgcggcaaaacaacaatttgccaattattggcgcaattcatgggtcgagaactgatcacactaaatgcccatcaaaacacagaaactggagacatattaggtgctcaaagacctgttcgtaacaggtctgaaattcaatataagctaataaaatccctaaaaacagcattgaatattgctaatgaccaagatgtagacttgaaagagttattacagctatattctaagtcagataataaaaatatagccgaagatgttcaactggaaatacaaaagctgagggatagtttgaatgttttatttgaatggagtgacgggcctctgattcaggctatgaggacgggaaatttttttctacttgatgaaatatcgctagcagatgattccgttcttgaaagactaaatagtgttttggagccagaaaggagtttgttgttagcagaacagggttcatccgatagccttgtaacggcttcagaaaactttcaattcttcgcaaccatgaaccctggtggagattacggtaaaaaagaattatctccagcgttaagaaatagatttactgaaatatgggtaccatccatggaagatttcaacgatgtaaacatgatcgtatcctcaaggcttttagaggacttgaaagatcttgctaatccaattgtgaaattctctgaatggtttggcaagaagctgggaggcggaaatgcaacaagtggtgtcatttctttacgtgacatacttgcatgggttgaatttattaataaagtgtttccgaaaatacagaacaagtcaactgccttaattcaaggtgcctcaatggtttttattgacgcccttggtacaaataacactgcttacttagctgaaaacgaaaatgatttaaagtcacttagaacagaatgtattatacaactattgaaactatgtggtgacaatttggaactacaacaaattgaaacgaacgaaattattgtgactcaggatgaattacaagtcggaatgttcaaaataccaagatttccagatgctcagtcttcatcctttaacttaaccgcccccactactgcctcaaacttagtaagggttgtacgggctatgcaagtacacaagccaattttacttgaaggtagtccaggtgttggtaaaacaagtttaatcaccgctcttgccaatattacaggaaataagcttacaagaatcaatttgtctgaacaaacggatctagtagatcttttcggtgcagacgctcctggtgagcgaagtggtgaatttttatggcacgatgctccgtttttaagagcaatgaagaaaggtgagtgggttctattagatgaaatgaatttagcctcccaatccgtcctagaagggttgaatgcctgtttagatcatcgaggcgaagcgtatatccccgagttggacatatcgttttcctgccaccccaattttctagtctttgctgctcaaaatcctcagtatcaaggtggtggtaggaaaggtcttcctaaatctttcgttaatcgatttagcgtggtatttattgacatgcttacatctgatgatctccttttgattgcaaaacacttatatccaagtattgaa

SEQ ID NO: 173142 - DNA, 192 bp, Saccharomyces pastorianus
atggaatcccaacaattatctcaaaattcacccactcttcatggtagcgcctatgcttcggttacttctaaggaagtcccatcaaatcaagatccgttagccgtttcagcttccaatttaccggaatttgatagagattccactaaggtaatctcaacaaggcaacaccctgggacatcagctgttccagag

SEQ ID NO: 173143 - DNA, 252 bp, Saccharomyces pastorianus
cacggcacttgcctcagcggtctataccctgtgccatttacgcataacgcccatcattatccacattttaatatctatatctcattcggcgaccccaaatattgtataactgcccttaatacatacgttataccacttttgcaccatatactaaccactcaatttatacacacttatgtcaatattacagaaaaattaccactaaaatcacctaaacataaaaatattctatccttcaacaataatacataa

SEQ ID NO: 173144 - DNA, 672 bp, Saccharomyces pastorianus
ttattagctcattatgttcctgaggaagaaactaccattatcagtggctacgagttagctaaagaaaccgacctggtactaagcaaaaaatattccaccttggaaaacaaggacatgaacattaaaactcatgtaaaagatggaatcattcacgtaaaaaaggatgacttaattgatcatcctacatatgatttcaaagtaaatgcaatacaaccaacttcttctaaaaaggttagactgaagaccaaagttgtaagcttgaaagatgctcataaacgaatgggacatacaggagttcaacaaattgaaaactccatcaaacataatcactacgaagaaagtattgatttaattaaagaaccaaatgaattttggtgtgaaacttgtaaagtttcaaaagccacgagaaggaaccattatacgggatccatgaacgaatacagtatcgataatgaacctggttcatcgtggtgcatggatatctttggtccagtatcaaactcgaactcggatacgaaaagatacatgtttattatggttgataacaatacaagatattgtatgacctccacacattttaataaaaatgctgaaactatcttggcacagatcagaagaacattcaatatgtggaaactcattgacagaaaagtcagaaatcattcagtcgac

SEQ ID NO: 173145 - DNA, 141 bp, Saccharomyces pastorianus
tctgggctggcatttaggattgcccacgaaatcggcctacatttgaatccagaagcatggagtaatgtttatgaagacgagctgtcaataatggattttgaagtgagaagtagaatcttattggggctgctacattgctga

SEQ ID NO: 173146 - DNA, 651 bp, Saccharomyces pastorianus
cctttcggccggaccaagctggtcgatcctaaaaaagtcataaactcaatgtttatatttaacagaaaacgtgatggtacacacaaagctagatttgttgcaagaggcgacattcaacaccccgatacatatgattctgatatgcaatccaataccgtacatcactatgcactgatgacgtcactgtcaatcgcattagacaacgactattatatcacacagctggacatatcctctgcttacttatatgctgatatcaaagaagaattatacataagacctccaccacatttaggtttgaatgataaattactacgtttgagaaaatcactctatggtttgaaacaaagtggtgcaaactggtatgaaaccattaaatcatatttaataaattggtgcgacatgcaagaagttcgcggatggtcatgcgtatttaagaatagtcaagtaacaatttgcttattcgttgatgatatgatattattcagcaaagacttaaatgcaaataagaaaatcataacaacactcaagaaacaatacgatacaaagataataaatctgggtgaaagtgataacgaaattcagtacgacatacttggattagagatcagatatcaaagaagcaagtacatgaaattaggtatggaaaaa

SEQ ID NO: 173147 - DNA, 576 bp, Saccharomyces pastorianus
atctataaaatcatacaatatttagtacaacatacgaatatcggaatacactatgacagagacctcaacaaagataagaaaatcactactataaccgatgcatcagttggaacagaatacgatgcacaatcaagaattggagttataatttggtatggaaagaatattttcaatgtatactcaaataaaagcaccaacaagtgcgtatcctcaaccgaagcggaacttcatgctatctatgaaggttatgcagactcagaaaccctgaaagcaaccttaacagaacttggagaaggtaaagataaagaaattacaatgattacggattctaaaccagctattgaaggcttaaaccggagctatctgcaacccaaacagaagttcacatggataaaaaccgaaataattaaagagaaactaaaagagaagactataaaactaataaaaatcaatggtaaagacaatatagcagatttactcacaaaaccagtatcaatttctgattttgatagatttattaaagtattaaataaccagataacaccacaggatattttggcctcaacggactattga

SEQ ID NO: 173148 - DNA, 204 bp, Saccharomyces pastorianus
atgttcgctggaacagtgattgatgaccaagtcagtgataaatttcataccgagcttatgtgtcttttcgatcaaggcaaagcagtcctcgttcgtaccgtaggttggccagaccttttcgtagttggcaatatcgtaacccatatcatcttgtggcgagtcgtaaaatggcgagatccaaatggcatcggcgccaagctcctt

SEQ ID NO: 173149 - DNA, 87 bp, Saccharomyces pastorianus
aatgatcacattaatgaatcaaccgtttcatcacaatacttaagcgatgacaacgaacttagtcttaggccagcaacagaaagaatc

SEQ ID NO: 173150 - DNA, 216 bp, Saccharomyces pastorianus
gatgtaagggcagagaaactagccatatcactattgattttatcattgtttctgatattccaattagtggctgagatttatctcaataatggtgatcagtaccatacagagactagcccctttacaagaagaagatcacatgtaacgcgtgtgcccaaccatgatgctagtttatctataccgtttttgacaagatcaaccagttttggcatgtag

SEQ ID NO: 173151 - DNA, 135 bp, Saccharomyces pastorianus
atgagacttagagatgaagtatcaggtaataatttatacgtatactacatcgagaccaagaagaacattgctgatgtgatgacaaaacctcttccgataaaaacatttaaactattaactaacaaatggattcat

SEQ ID NO: 173152 - DNA, 441 bp, Saccharomyces pastorianus
cttccaaacaatatgacaaacaatcaaatatgctggttagttcaggcgtcatattttgacatagcttctaacaatactggtaagacactgagatccggaagatttgaacctagtgatgaaatttctatgattttcagagacatcctggtcgaattaccaaatattgcggattcttatgaatacagtgacttggatctatcaacttacagcggacctgagccctatgatccagagtctgattactgtacagatatcatggatttgatgatgggcgtatatgatgaagaaggaaattatgttaagccaagatctgaagttgattctgctgctacaaactcaacagttcaacgtagatcttccgattctgacattgacgaatgcgttgacgagccaatgacgtcaaagcatgccggtataacaaaaatcagggaacttttgtaa

SEQ ID NO: 173153 - DNA, 123 bp, Saccharomyces pastorianus
aacaagtcagagcttttgacaaagagaaagaaggcttcaaacaaaaacctggtcataattgatacaggttcaggcgtcaatattacaaacaataggagattattacacgattatgaagacaac

SEQ ID NO: 173154 - DNA, 186 bp, Saccharomyces pastorianus
ataatattatgtatacagaatatactgaaagttctcctcgaggacataggaatcctcaaaatggaatttatatttttacatactaatattacgattgttcctcattccgttttatatgtttcgttatcctattacattatcaatttttgtatttcagcttcctctaacctcgatgacagcttctca

SEQ ID NO: 173155 - DNA, 270 bp, Saccharomyces pastorianus
atgaatctaaataaaccgtcccaatacaaacaacacagcgaatacaaaaatgtttctcgcacatctccaaacacgactaacacaaaggttacaactcgtaattatcatagaacaaatagttcaaaaccaagagcagcaaaagctcacaatattgctacatctagtaaattctcaagggtgaacaatgatcacattaatgaatcaaccgtttcatcacaatacttaagcgatgacaacgaacttagtcttaggccagcaacagaaagaatc

SEQ ID NO: 173156 - DNA, 312 bp, Saccharomyces pastorianus
acaagtttaaattcaactacaacgccaaggaccgctcgcaacaaaacagcactggcaacaacagcaacgagaacaataacgttatcaatctcaacagcaacaacaacaacaacaacaacaacaacaacaacaacaacaacaacaacaacaacaacaacagcaacagcaacggcaacagcaacggcaacagcaatagcaacaacatcatcatcagtagcagcagtggtggcggtgatggtattgatgacagcagtaataccacctcaaacaacaacagtaccactttcgcacttaacagaaagaaaaaaaatc

SEQ ID NO: 173157 - DNA, 90 bp, Saccharomyces pastorianus
atggaatcccaacaattacatcaaaattcaccaaatcttcatggtagcgcctatgcttcggttacttctaaggaagtcccatcaaatcag

SEQ ID NO: 173158 - DNA, 195 bp, Saccharomyces pastorianus
atggcaaatgctggaccaaacactaacggttctcaattcttcattaccactgtgccttgtccatggttggatggaaaacacgttgtctttggtgaggtaaccaaaggtatggacattgtcaaagcaatcgaatcatacggtactgcttctggtaaaccaagagctgaaatcgttatcgaagaagctggtgagtta

SEQ ID NO: 173159 - DNA, 141 bp, Saccharomyces pastorianus
attcagaagtctcttaagaagaatgcagttacatatttgaaggaatcggatattgaatggtctaacgctagcacatatcaatgtcctgactgtctaatcggcaaaagcacgaaacgggatcctctagagtcgaccgcagca

SEQ ID NO: 173160 - DNA, 612 bp, Saccharomyces pastorianus
atggattccgatgccacgtcacataatcaagatcattggcattcagacataaacagggcaggaacatcaatgtcaacgagtgatatcccaacagatttacatttagaacatatcggctctgtttcatcaactaataataatagtaacaatgccctaatcaaccacaaccctctgtcatctcatctttccaatccgtcatcttcattacgaaacaagaagagctctttgttggtagcttctaaccctgcgtttgcttcagatgttgaactctcgaagaagaaacctgccgtcatctccaataatatgcctacaagtaacattgccctttatcaaacagcgagatcggcgaatattcatggtccatcatcaacttccgcatctaaagcgttcagaaaggcttcggccttctccaataacacggcacccagcactagtaataacatcggctcgaatacacctccagctcctcttttacctctaccttcactatcacaacaaaataagccaaaaataatagagaggcccacaatgcacgtcactaattcaagagaaatacttttaggtgaaaacctgttagatgatacaaaggcgaagaatgctcccgcgaattca

SEQ ID NO: 173161 - DNA, 624 bp, Saccharomyces pastorianus
tttgatagagattccactaaggttaattctcaacaagagacaacacctgggacatcagctgttccagagaaccatcatcatgtctctcctcaacctgcttcagtaccacctccacagaatggacagtaccaacagcacggcatgatgaccccaaacaaagctatggcctctaactgggcacattaccaacaaccatctatgatgacgtgttcacattatcaaacgtcacctgcgtattatcaaccggacccacactatccgttgccacagtatatcccaccactgagtacttcctcacctgatccaatcgattcacagaatcaacactctgaagtacctcaagctaagacaaaggtgagaaataacgtcttaccaccacacactttaacatcagaagaaaacttttctacatgggttaaattttacatcagatttttgaagaactctaatctcggtgacataattccaaatgaccagggtgaaatcaaaagacaaatgacttatgaagaacatgcttatatatacaataccttccaagcatttgccccatttcatttattgccaacatgggtaaaacaaattttagaaattaattattctgacatccttacagtcctttgtaaa

SEQ ID NO: 173162 - DNA, 81 bp, Saccharomyces pastorianus
actttcttttcgccaggtaaacttgcttggtatgcagaaaaaatcgatagctcatctacgtgtagtaacaaaaacatgtag

SEQ ID NO: 173163 - DNA, 129 bp, Saccharomyces pastorianus
atggagatgctcttgtatctgaacgaatcatacatctttcataggtttcgtatgtggagtactgttttatggcactcatgtgtattcgtatgcgcagaatgtgggaatgcctattataggggtgccggg

SEQ ID NO: 173164 - DNA, 153 bp, Saccharomyces pastorianus
agatattgtatgacctccacacattttaacaaaagtgctgaaactatcttagcacaaatcaagaagaacattcagtatgtggaaactcaatttgacagaaaagtcagggaaatcaattcagatcgacggccgatttggccagcttgcgtatca

SEQ ID NO: 173165 - DNA, 441 bp, Saccharomyces pastorianus
atgtgggggttatgcaagaatcattttccgagcaataaaattcaagtgcaggagagaaacaaagcattaaaaccaaagaagagtggcagcgaacataagacaaagcaactgtttcctgtattcaattgcaagaagaaggaaaaaggggtaatgatacggtttgcgattctacgtaatgctaacacatctctactgtctgcgagaagtatatgcttatttacccaggcgcctacctattgtcatgtaaggttgaataccttgaataaaagcattacaactaaaagaaattcattggcagagtcgaaaaggcatgtccatgatggcaagcatttttttacgacgccacatcaacagcaacagacgaagttgggggaaattgaagagggacacagtcctaacataaaagaagaggacttgagaagcattggtcaagcaataaca

SEQ ID NO: 173166 - DNA, 237 bp, Saccharomyces pastorianus
cttcatggtagcgcctatgcttcggttacttctaaggaagtcccatcaaatcaagatccgttagccgtttcagcttccaatttaccggaatttgatagagattccactaaggttaattctcaacaagagacaacacctgggacatcagctgttccagagaaccatcatcatgtctctcctcaacctgctgcagtaccacctgacctgcaggcatgcaagctggcactgccgtcgttt

SEQ ID NO: 173167 - DNA, 219 bp, Saccharomyces pastorianus
gcaaactatgccttatacagagacacaaagagcatggaggtcttttacaaccatttagacccggctgagtttagagaaaccatgctgagaagctttgttttcatcgacaccagtaactgtggtttaatgaagcgaactcatttttcgtctgtcctttcgacctacccaaaatctgtcagtaagacctgcaggcatgcaagcttgcactgccgtcgttta

SEQ ID NO: 173168 - DNA, 312 bp, Saccharomyces pastorianus
atggaatcccaacaattatctcaaaattcacccaatcttcatggtagcgcctatgcttcggttacttctaaggaagtcccatcaaatcaagatccgttagccgtttctgcttccaatttaccggaatttgatagagattccactaaggttaattctcaacaagagacaacacctgggacatcagctgttccagagaaccatcatcatgtctctcctcaacctgcttcagtaccacctccacagaatggacagtaccaacagaacggcatgatgaccccaaacaaagctatggcctctaactgggcacattac

SEQ ID NO: 173169 - DNA, 111 bp, Saccharomyces pastorianus
acgattgttcctcattccgttttatacgtttcattatcctattacattatcaatccttgcatttcagcttccactttttttcccgttaaaataggaagcggcggaagctga

SEQ ID NO: 173170 - DNA, 381 bp, Saccharomyces pastorianus
aacatcaaaactcaggtaaaaaatggaattatttacgtaaaaataaatgacctaattgatcatcctgcgtatgatttcaaaaggaatacaatacaaccaaaatcttccccaaaaactagattgatgcccaaaattataagcttagaagatgctcataaacgaatgggacatacaggagtgcaacagattgaaaactccattaaacacagtcaatacgaagaaagtattgatttgattaaagaaccaaatgaattttggtgtgaaacttgtaaagtttcaaaaatcacgagaagaaaccattatgctggatctatgaacgaacacggtatcgatcatgaacctggttcatcgtggtgcatggatatacttggtccagtataa

SEQ ID NO: 173171 - DNA, 141 bp, Saccharomyces pastorianus
ctcattccgttttatatgtttcattatcctattacattatcaatccttgcacttcagcttcctctaacttcgatgacagcttctcataacttatgtcatcatcttaacaccgtatatgataatatattgatagtacaacta

SEQ ID NO: 173172 - DNA, 396 bp, Saccharomyces pastorianus
  modified_base (353)..(353): a, c, g, t, unknown, or other
tatgaagaacatgcgtatatatacaataccttccaagcatttgccccatttcatttattgccaacatgggtaaaacaaattttagaaattaattattctgacatccttacagtcctttgtaaaagtgtgtccaaaatgcaaactaacaatcaagaattaaaagattggatagctcttgccaaccttgagtacaacggaagtacatctgctgatacatttgaaattacagtcagcacgatcattcaaaggctaaaagaaaacaatatcaatgttagcgacagattggcctgtcaactaatacttaaaggtctatccggtgacttcaaatacctacgtaatcaatatcgtaccanaacgaacatgaaactttcccaattattcgctgaaattcattaa

SEQ ID NO: 173173 - DNA, 138 bp, Saccharomyces pastorianus
atgatgtctgttttcagggacatcggtcttgtgacaccgtgcagcttgaggaacaggccacaggcgttgcagaggggcaggcccttggggtcctttctccacaacggggtggtggaggtggtgcagttggagcacttg

SEQ ID NO: 173174 - DNA, 717 bp, Saccharomyces pastorianus
gacaatactgaccaaacatatgataaaccgagcaaggcagaaagcaaaaacaactctgatacaagtatctcaccgaaaggtaataatgaagagttagtacaattggtaggaagtagcgaagcggaaaaaccgaatgctacaccagaatcatcaattataacagatgaaccaattgagccaggaaactcagcagtaaacaaagctggattcctaaacaaaacgtttaattctctcaataagaaaaggaagagacctgttgaaaacaagactccctttaatgacacagttgaaagagattataaacgtcgaagaaaaaaaataatcaaactacttccggataacacagaaacaagttctgcaccgagaattaaaaccatctactacaatgaagctatttcaagaaatgttgattacaaagaaaaacatgcttataaagaagcatacaggaaggaattacaaaatctcaaggatatgaaggtattcgacgttgatgtcaaatacaacagatctgatgttcccagtaatctaataatcccgacgaatacaatattctcaaagaagagaaatggtatttataaagcaagaattgtttgtagaggtgatatccagacaccagacacatataatgttattggaacagagtccctgaaccataaccacattaaaatatttctgatgattgcaaacaataggaatatgtttatgaaaacattagac

SEQ ID NO: 173175 - DNA, 1782 bp, Saccharomyces pastorianus
atgcatagattagatgttcctttacttgctcccatgtcccaatctaacacacatgaatcgtcgcacaccagtaaatctaaagatttcagacactcagactcgtacagtgacaatgagactaatcatacaaacgtaccaatatccagtacgggtggtaccaataataaaactgttccgcagacaagcgaacaggagactgagaaaaggattatacaccgttcaccttcgatcgatacttcctcatcagaaagtaattcactacaccacgtcgttcctatcaaaacgtcagatacctgtcctaaggagaatacagaggaatctataattgctgatcttccacttcccgatctgcctccagaacctcctaccaaattatcagactcctttaaagaacttccaccgatcaattctcgtcaaactaattccagtttgggtggtattggtgactctaatgcctatactactatcaacagtaagaaaagatcattagaagataatgaaactgaaattaaggtatcacgagacacatggaatactaagaatatgcgtagtttagaacctccgagatcgaagaaacgaattcacctgattgcagctgtaaaagcagtaaaatcaatcaaaccaatacgaacaaccttacgatacgatgaggcaatcacctataataaagatattaaagaaaaagaaaaatatatccaggcataccacaaagaagtcaatcaactgttgaagatgaaaacttgggacactgacagatattatgacagaaaagaaatagaccccaaaagagtaataaattcaatgtttatctttaacaggaaacgtgacggtactcataaagctagatttgttgcaagaggtgatattcagcatcctgacacttacgactcaggcatgcaatccaataccgtacatcactatgcattaatgacatccctgtcacttgcattagacaataactactatattacacaattagacatatcttcggcatatttgtatgcagacatcaaagaagaattatacataagacctccaccacatttaggaatgaatgataagttgatacgtttgaagaaatcactttatggattgaaacaaagtggagcgaactggtacgaaactatcaaatcatacctgataaaacagtgtggtatggaagaagttcgtggatggtcatgcgtatttaaaaacagtcaagtgacaatttgtttattcgtagatgatatggtattgtttagcaaaaatctaaattcaaacaaaagaattatagagaagcttaagatgcaatacgacaccaagattataaatctaggcgaaagtgatgaggaaattcaatatgacattcttggcttggaaatcaaataccaaagaggtaaatacatgaaattgggtatggaaaattcattaactgaaaaaatacccaaactaaacgtacctttaaacccaaaaggaaggaagcttagcgcaccaggtcaaccaggtctatatatagaccagcaagaactagagctagaagaagatgattacaaaatgaaggtacatgaaatgcaaaagctgataggtctagcatcatatgttggatataaatttagatttgacctattatactacatcaacacacttgcacaacatatactatttccgtccaagcaagtgttagatatgacatatgaattgatacagttcatatggaatacgagagataagcaattaatatggcacaaaagcaaacctgttaagccaacaaataaattagttgttataagcgatgcctcgtat

SEQ ID NO: 173176 - DNA, 129 bp, Saccharomyces pastorianus
ctcttgtttctgaacgaatcatacatctttcataggtttcgtatgtggagtattgttttatggcactcatgtgtattcgtatgcgcagaatgtgggaatgccaattataggggtgccggggtgccttga

SEQ ID NO: 173177 - DNA, 138 bp, Saccharomyces pastorianus
atgactctctcccatgatcacaccctatttggagaacatttttgtgttacagtaacattcgggaaaattgtcccaatatactattggccaaaattacaacactccataacccactacatccagacttgcttaaaatgc

SEQ ID NO: 173178 - DNA, 156 bp, Saccharomyces pastorianus
atcacctttaataaccatttaaattgtatgatgatctttgggattccattgtttcttaatgttataatattacgtatatatattatactagagattctcctcatggatttaggaatccacagaaaggaatcaataattctacataatattataaat

SEQ ID NO: 173179 - DNA, 486 bp, Saccharomyces pastorianus
gcaaaagtgctaagaccagccaacggtttaatttaccgtatcgctatgtcatggttcacctttttctttgcgtctttgttcttctgcacaacaaccgccatctttcaagtcgattttaccaagtcctttggtagaggtggcttcgtcgtatattggatgtctacgtggctcttcatgcttgctgcgggaggagctaacgaaaatgcggttatgcttgttattacgttaggaccccagtatctcgggttctggatcctatcatttgtcattctcaatattgcaccttctttcttcccattagcgctaaacaataatgtttatagatatgggtacatgatgcccgttcacaacgtcatcgatatctacagggttattttttttgacgtgacaagacgcaagatgggtcggaattatggtattttagtcgcactcattgccttgaatacggcactgttaccatttgttggcaagcatgctagtagataa

SEQ ID NO: 173180 - DNA, 561 bp, Saccharomyces pastorianus
atctataacaaaaaacttggtacggttgatttaacattaaaatcattcatagaaaaaatgggtgagaagtataaaaaggaattggataaggttagaaaaagttcaattccacatacatcaatatacagggttgatcccaaaaagggagaactaaaaatgaccgaaaaagaatataaagacggtgtgttgaaattacaacaactactaggagaacttaactatgttaggtacaagtgtagatacgatgttgaatttgcggttaagaaagtagctaggctagtaaactttcctcatgaacaggtattttacatgatctataaaatcatacaatatttagtacaagatacgaatatcggaatacactatgacagagacctcaacaaagataagaaaatcactactataaccgatgcatcagttggaacagaatacgatgcacaatcaagaattggagttataatttggtatggaaagaatattttcaatgtatactcaaataaaagcaccaacaagtgcgtatcctcaaccgaagcggaacttcatgctatctatggactctag

SEQ ID NO: 173181 - DNA, 498 bp, Saccharomyces pastorianus
tatgttacggctgattctattcttgacgacctcccacttcctgacttaacccatcaatctcctacggacacttctgatgtttcaaaagatattccacacatacactctcgtcagactaattccagtttgggtggtatggatgattctaatgttctgactactaccaaaagtaagaaaagatcattagaagataatgaaactgaaattgaggtatcccgagacacatggaataataagaatatgagaagtctggaaccaccaagatcgaagaaacgcataaatttaattgcagcaataaaaggagtgaaatcgatcaaaccagttcgaacgaccttaagatatgatgaagcaattacatataataaagacaacaaagaaaaagacagatatgttgaagcttatcataaagaaattagccaactattgaaaatgaacacttgggatacaaacaaatattatgatagaaatgacatagatcgacaagctgatccgccataa

SEQ ID NO: 173182 - DNA, 741 bp, Saccharomyces pastorianus
atgtcttcactagaagtggtagatgggtgcccctatggataccgaccatatccagatagtggcactaatgcattaaatccatgttttatatccgtaatatccgcctggcaagccgtctttttcctattgattggtagctatcaattgtggaaactttataagaacaataaagtaccacccagatttaagaactttcctacattaccaagtaaaatcaacagtcgacatctaacgcatttgaccaatgtctgcttccagtccacgcttataatttgtgaactggccttggtatcccaatctagcgatagggtttatccatttatactaaagaaggctctgtacttgaatctccttttcaatttgggtatttctctccctactcaatacttagcgtattttaaaagtacattttcaatgggcaaccagcttttctattacatgtttcaaattcttctacagctcttcttgatattgcagaggtactatcatggttctagtaacgaaaggcttactgttattagcggacaaactgctatgattttagaagtactccttcttttcaattctgtggcaatttttatttatgatctatgcatttttgagccaattaacgaattatctgaatactacaagaaaaatgggtggtatccccccgttcatgtactatcctatattacatttatctggatgaacaaactgattgtggaaacttaccgtaacaagaaaatccaagatcctaac

SEQ ID NO: 173183 - DNA, 153 bp, Saccharomyces pastorianus
atgaatggttctattgtcgttgtggctgctattcatggacaaacacttcaacccatagagcatctgctagtagctggacaagttagtaatcaacatgtagttattttcgttaacaaggtggatgctattgacaattcaaagttaatagagttg

SEQ ID NO: 173184 - DNA, 192 bp, Saccharomyces pastorianus
atgaaccctttacaattagaccacgaaccagtccaaaaagtacgtgcaccaaaagaagttgatgccgacatatctgaatacaatattcttccatctcctgtacgatctcgtacaccccatatcattaataaagagagtaccgaaatgggtggtaccattgaatcagatactacttcacctagacactcgtct

SEQ ID NO: 173185 - DNA, 129 bp, Saccharomyces pastorianus
catgataatattactctaacttcttttcttctatactttgccattcattaccctatcacgttatcaatccttgcatttcagcttccattaagaccgataactgtttcccaatctctatgtcatcatctt

SEQ ID NO: 173186 - DNA, 345 bp, Saccharomyces pastorianus
agcaagcctaagaagcgagaaaacaaattggtgacaataagcgatgcctcatacggcaatcaactatattatagaccccaaattggtaacataatattactcaataggaaagtaattggaggaaaatcaacaaaagcttccttaacatgtacctcaactacagaatctgaaatacatgcagttagtgaagctataccgctattaaacaacctaagttacctagttcaggaactcgataagaagccaattatcaaaggcttatttactgatagtagatctacatcagtattattatatctgaaaatgaagagaaatttagaaacagattcttcggtactaacctga

SEQ ID NO: 173187 - DNA, 225 bp, Saccharomyces pastorianus
gatgaaggatcctcgtcttcatcctcatcctcatcctcatcctcgtcttcagccccatcctcatctccggcctcttccgcatcagacgcatcttcaccgcctgacgattccgaatcagacgagtcggagaaactgccttccacagcctcatcgttcttaattccatccgcatcgtcacccaagagctccaaatcaacgtcatccttgggaagtccaactgcaggt

SEQ ID NO: 173188 - DNA, 255 bp, Saccharomyces pastorianus
atggaatcccaacaattacatcaaaatccacattctcttcatggtagcgcctatgcttcggttacttctaaggaagtcccatcaaatcaagatccgttagccgtttcagcttccaatttaccggaatttgatagagattccactaaggttaattctcaacaagagacaacacctgggacatcagctgttccagagaaccatcatcatgtctctcctcaacctgctgcagtacacactccacagaatggacagtac

SEQ ID NO: 173189 - DNA, 177 bp, Saccharomyces pastorianus
aaggtcaagctgcatgagaaaggggagatagataagccaacaatgctgaaatcaagtggcccgatttcaaaagacaaaaaaacaaaacctaccccaccacctaagccttcacatttaaagcctaaacctcctccaaaaccactgctcctcgcgggacgaaagttatccttggataag

SEQ ID NO: 173190 - DNA, 312 bp, Saccharomyces pastorianus
tcaagtaatactgatgaggattttttcgatgaaaatgtttatagaattccaacggcaatacaagaaaatcttgttggaagccagaagactataaacatcaataatgaggataatattgctagcagaatgcaaaggaagactagtggaaatgaaataaactacaatgagttgtcggatgacgagagcgattacagctctcatgaccccacaaatgacttacttacagttgtaagcaaaaaagataattccacagatgataacatctcgaatcccagcaagaaatattcaagaaactatcgattcagaagtact

SEQ ID NO: 173191 - DNA, 135 bp, Saccharomyces pastorianus
accattgtatttgttttgtttgttagtgctgatgtaatcttaacaagaaatagtgaaatgaaagcgcatacctcaaaggcatatagttgtagcagctctgacctgcaggcatgcaagctggcactgccgtcgttt

SEQ ID NO: 173192 - DNA, 909 bp, Saccharomyces pastorianus
ttcgagctctgtgtctgctgggctcgccagaaagtatcgtatcggaggatagcttgggaagcactagctgtggagagaatgctgcgaaatgacgaggaatacaaagaatacttggaagacatcgagccatatcatggggaccctgtaggatatttgaaatattttagcgtaaaaaggggagagatctactctcggatacaaagaaattatgcttggtacttggctattactagaagaagagaaacaattagtgtattggattcgacaagaggcaagcaagggagccgagttttccgcatgtctggaaggcaaatcaaagagttgtattttaaagtatggagcaacttgcgtgaatcgaagacggaggtgctgcagtactttttgaactgggacgaaaaaaagtgccaggaagaatgggaggcaaaagacgatacggtcgttgtagaggcgctcgagaaactggaagtttttcagcgtttgcgttccatgacaagcgctggactgcagggtccgcagtatgtcaagctgcagtttggcaggcatcatcaacagctgaggagcaggtatgaattgagtttaggaatgcacttgcgagatcagcttgcgctgggagttaccccatctaaactgccgcattggacgcctttcctctcgatgctgataggcctgttctacaataaaatatttcggcagaaactggagtatctcttggagcagatttcggaagtgtggttattaccacattggcttgatttggcgaatgttgaagttctcgctgcagataacacgagagtaccactgtacatgctgatggtggcggttcacaaagagctaggtagcgatgatgttccagacggcaaaattgatataatatcacgtagaggtcccagcagagaagttggagagtga

SEQ ID NO: 173193 - DNA, 585 bp, Saccharomyces pastorianus
atgggtggtaccattgaatcagatactacttcacctagacactcgtctaccttcactgcacgaaaccaaaaccgacctggtagtcccaatgagatgattgatttgacctcacaggatagagttaattatggacttgaaaaaatcaaaactacacgtttgggtggtacggaggaaccatatattcaacgaaatagtgatacaaatatcaaatacaggactacaaatagtacgccctcaatagatgaccgttcgtccaacagtgaatccactactcccatcatctccatagaaacaaaggctgtatgtgataatacaccctccattgatacggatccgccagaatatcgatcttctgaccatgcgactcctaatataatgcctgacaaatcctcaaaaaatgttacggctgattctattcttgacgacctcccacttcctgacttaacccatcaatctcctacggacacttctgatgtttcaaaagatattccacacatacactctcgtcagactaattccagtttgggtggtatggatgattctaatgttctgactactaggggatcctctagagtcgacctgcag

SEQ ID NO: 173194 - DNA, 477 bp, Saccharomyces pastorianus
atgtcttcacaagatgttctgatacattcagatgatccgtgccatccagcaaatctcatttgcacgctatgcaagcagttttttcataataattggtgcaccggaactggaggtgggatttcaataaaagatcctaacacgaattattattatctcgccccatctggggtgcagaaggagaagatgacacctgaggatttgtttgtcatggacgctcagacattagagtatttgcgctctcccaagctttacaagccaagcgcatgtactccattgttcttagcgtgctaccaaaagaaagatgcaggtgcgataatacatacacactccccaaatgctgtgatatgctccatggtatttggcgatgagttcaggattgcttacatcgaacaaatcaaagcaattccaagcggtaaggtggaccctgtgattaagaaacccatggcgctatcgttttatgatacgctgcagattccc

SEQ ID NO: 173195 - DNA, 315 bp, Saccharomyces pastorianus
atgaacattaaaactcatgtaaaagatggaatcattcacgtaaaaaaggatgacttaattgatcatcctacatatgatttcaaagtaaatgcaatacaaccaacttcttctaaaaaggttagactgaagaccaaagttgtaagcttgaaagatgctcataaacgaatgggacatacaggagttcaacaaattgaaaactccatcaaacataatcactacgaagaaagtattgatttaattaaagaaccaaatgaattttggtgtgaaacttgtaaagtttcaaaagccacgagaaggaaccattatacgggatcg

SEQ ID NO: 173196 - DNA, 144 bp, Saccharomyces pastorianus
catacaggagttcaacaaattgaaaactccatcaaacataatcactacgaagaaagtattgatttaattaaagaaccaaatgaattttggtgtgaaacttgtaaagtttcaaaagccacgagaaggaaccattatacggatgac

SEQ ID NO: 173197 - DNA, 444 bp, Saccharomyces pastorianus
aattataatttttttttagctgataacaatatgggtgtcgataaaagtctaaaactgcccacagttacacggttatttcttggtatagataacattcatattgtttccaacacagctgcatacatgacggaagttatctgccaagctggcgatttgaatttaccactggaacagaatttaattaggagtcaaaaattttccaattggttgaagttaaacactcttatattaaaatccgttgatatgcttttaaagtccatcattttcaatcattccaacgttttggttcattgttctgacggttgggacagaactagtcaagttgtatcactattagaaatttgtttggatcctttctatagaacttttgaaggttttatgatcctagtggaaaaagattggtgctcttttgtcaccggtttttggaaagaagtggtcatttaa

SEQ ID NO: 173198 - DNA, 183 bp, Saccharomyces pastorianus
cagaatcaacactctgaagtacctcaagctaagacaaaggtgggaaataacgtcttaccaccacacactttaacatcagaagaaaacttttctacatgggttaaattttacatcagatttttgaagaactctaatctcggtgacataattccaaatgaccaggtgaaatcaaaagacaaatga

SEQ ID NO: 173199 - DNA, 537 bp, Saccharomyces pastorianus
atgggcggcgatgttgggacaattcgtggcagaaagtatccatggggcatactggacgtggaagattcatcgatctctgattttgttatcttaaggaatgcgttattgatctctcatttacatgacttgaaaaactacacacatgagatattatatgaaagatatagaaccgaggcattatcaggtgaatctgtcgcggcagaatccatacgtccaaatctgacaaaattgaatggttcgtcgtcatcgtccaccacaacaaggagaaacacaaatcccttcaagcaaagtaataatattaataacgatgttctcaacccagcatccgatatgcacgggcaaagtactggcgaaaataacgaaacctacatgacacgtgaggagcaaatacggttagaagaagagcgactaaaggcatttgaggagagagttcagcaagaactgctgttgaaaagacaagaactgttgcaaagagaaaaggaattaagagaaattgaagccaggttggaaaaagaggcgaaaatcaaacaggaagaa

SEQ ID NO: 173200 - DNA, 165 bp, Saccharomyces pastorianus
atggaatcccaacaattatctcaaaattcacccaatcttcatggtagcgcctatgcttcggttacttctaaggaagtcccatcaaatcaagatccgttagccgtttcagcttccaatttaccggaatttgatagagattccactaaggttaattctcaacaagaa

SEQ ID NO: 173201 - DNA, 2154 bp, Saccharomyces pastorianus
aagagcattgatattttggaaaaattaaagctcagcgtcgttacttcgtctgaatacgcgactaatgcaatcgcagatatcaatagacagcttgaaactctgctctcatttcaacatgttaatataaattcagaatcagttcgtacatacaaggataacggcgcactcgaaaatcagctgctagacggtaattatgttgcgtttgatgcttttagtacttttgaaaatgttagcaaaggaaaggcagtggatgatatttttggcctctattcgcctatatcagtaatgtcaccaaaaggaatatgctggctaatacaacagcttatagtaaagtccagagagaaggatacggaagagactgtatatattcttctaaagtttttagatgcagggagctccagctacaaatgggaattgatagcgcctgtgtatcggttgcagtttattttgatagagttctttgggtgtaaggtacccttcactcgaaatgagactttgaaggaagcgattgatgctatcccaccatcattgagaagtgaactaaaagaggagggcggaaattctattcaggactccagaaaactatttatgtattgtgtgaaacttttaggcaaacacttcacgtcatctcgccacttgttaagaaatatcaatatctttgagcaattttttcaagttgaagaactgctgtctacgctctgttacacatttttggaaaattccctaaattttagattactcgacgctgaatttctacatgatttgttatgctttgttaagcagcggcactggaaagacaattcatttataataggtggggttatcgcaccattatgtagacaagtgcaagatctgggattgagccgatgggaatattatcttgggatgaatgaagagcatgcaaaccccctccgtgaaatatggtgggacacttactggtgggacaaatggtacgtggtagtgaccggaaagctaccgatgattgatagctcaaccgtgacatgtttactcccccaacaaataatgagacttggagtagatgatgcgatgtcaagttggcaaatgctagaacgtgttgattttacttatggatcgttgaaggaccacatcatgtttggatacattgttctctcgattagcatcaatgatgtgttttcaaatgtactttacaatcgcaagtttacggattatagagtgttttcggggatcactgcgttggatttcaaagttgtggaggaactactaacaagaataaatggaataaggaagggattcacggtgttgaaaacaacggttgtgcatgagcttgaaaaaagcttgctggacgatgatgttttcaggttttgcatacactttgcatacagtcgaatatcatgtcttagggctataggaaacctgttgatgcggtttaagagtatttttcatggtacaagtagcaatctaatcagtgatcagataggtgagtgtgataaagatatccttcaaactacagttgaaacttttactttcattctacgtgcgaacgataatataaaaatcaaggaacacgttcggcccataagcgagatggggttgaacattttactcgaagcagtgaaagcccccgccggaatcgatgtttaccatatttctctattttgtggagtagcgagtttgttcgaccgcattacgtgctcagaaaatggtgcagagaagcaatataatcatccgggaaggatagttttaatggagatcacatgtatcttcatttttgttcgcgtgtgctgtttagtttatcggcagtataaaaaagtttcaaaggaagaattaatggccattttgacggattttgatcacacaacagcgaggttctgcaatgaaacgttagatataaggtccgatttgtttcagcacataataagagacaaaaaaaagtcggactatcatagggatattatacacggcatcgagaaagttcttgggagagacataataactactatcgaaagctgtgagagggaggttataagttctgatgaatatcgacaggcgcaatatatgggaaatgttgccactaaagaccttgattatttgcgctactttctcaaccttgatattttcccagagttgaatacagacgacgagttatgggatgatttaaaagagatagataag

SEQ ID NO: 173202 - DNA, 126 bp, Saccharomyces pastorianus
gccattagttggcattttgtgcttattggtgggtgcctcatattggcaatattacagagcagcttctgtttaagtaaaatccagataattgtaaactttatttatactttttttttcaacaaataa

SEQ ID NO: 173203 - DNA, 162 bp, Saccharomyces pastorianus
ttagaagttctcctcgatgatataggaatcctcgaaatggaatctatatttctacatactaatattacgattattcctcattcccttttatatgtttcattatcctattgcattatcaatccttgcacttcagcttcctctaacttcgatgacagcttctca

SEQ ID NO: 173204 - DNA, 105 bp, Saccharomyces pastorianus
ggaattgttattttagctatgatagctcctgcattaagcaactatatcctgaacgtgtcagcaatcaatggcatcatggagaccttggttgaaactaagctgata

SEQ ID NO: 173205 - DNA, 93 bp, Saccharomyces pastorianus
atggaatcccaacaattatctaattacccacctttatctcatggtagcgcctgtgcttgtacttctaaggaagtccacacaaatcaagatccg

SEQ ID NO: 173206 - DNA, 528 bp, Saccharomyces pastorianus
atgtatcgcagtagaaaccgaccaaaaagaggtggagaaaatgaagttaagggaccaaattctgccttgactcaatttttaagagaagaagggatcagtgctgaaaatatcaaacaaaaatggtaccagcgacagtcgaagaagcaagaagatgcaacagacgaaaaaaaaggtaaagcggaggatgatagctttactgccgagatatctcgagtagttgaagatgaagaaattgatgaaattggaacaggtagtggtaccgagacagaaagagctcaggtttcctacgatgccaggatgaaattagtccctgctgatagtgatgaagaagaatatgaaactagccacatttctgacacgccagtcagtttaagttcggctaatgaccgggaatcattcactaaaaaaaggcaaaatactgcaaaaattatccaaaatcgtcgcagaaagcgtaaaagagcagctgacctattggatagacgcgtcaacaaagtatccagcttacaaagtctttgtattacgaaaata

SEQ ID NO: 173207 - DNA, 468 bp, Saccharomyces pastorianus
gtcaaatacaacagatctgatgttcccagtaatctaataatcccgacgaatacaatattctcaaagaagagaaatggtatttataaagcaagaattgtttgtagaggtgatatccagacaccagacacatataatgttattggaacagagtccctgaaccataaccacattaaaatatttctgatgattgcaaacaataggaatatgtttatgaaaacattagacattaaccatgcattcctatatgctaaattagaagaagacatatacattccacatccacatgacaggagatgcgttgttaaactagataaagcgttatatggtctcaagcagagtcctaaggaatggaacgaccatcttagacgatatttaaacagtattggactaaaagataacacttatactccaggactataccaatccaaggataaaatactcatgatcgacaagcttgatccgccataa

SEQ ID NO: 173208 - DNA, 300 bp, Saccharomyces pastorianus
atgaatgtctacgaggacggttgttctaataagaccatagcaaacgccacccaattcttcaccaaactatcgagaaatatgacaaataactacattttgcaacaaagcggtggtagtactgagtcctcgtcatcatctgggcgcatccccgtagcacaaacaagctatgtgcagccacctaatgctccttcataccaatccgtacaaggtggtagctctatttcggccactacaaatacagcaacttatgtgccagtacggttggccaagtatcccactggtccttcgcttactgaacat

SEQ ID NO: 173209 - DNA, 117 bp, Saccharomyces pastorianus
gaatcccaacaattatctcaaaattcaccaaattttcatggtagcgcctatgcttcggttacttctaaggaagtcccatcaaatcaagatccgttagccgtttcagcttccaattga

SEQ ID NO: 173210 - DNA, 564 bp, Saccharomyces pastorianus
tcaaacttcccaatcaccaaaagaaaagtttattcaaacacaggaggaaaccacttcaactttgatttcttaagattgaaattatcagtcaatcctgctgaatgtgaaaaactggtcaccaagggtcctgctcattccccaacgatgtctactgaagctgctgtctttaaaaacttttggggaataaaatcatctttgagaagattcaaagatggctctattacacattgttgtgtttggtctacatcctcatcagaacctattatctcctctattgttgactttgtattgcaaaaacatatctcgaaaaaggtgcaagtgtcaaacgatattactaagcaatttcaaaattttctaccattaccaaacttaccatcaagtgctagtacatctgttttgaacttgagtagttttttcaatgtaaagaaatcctttgatgatatttacaaaatagttttccaaatgaaactaccactttctgtaatatgcatcttaccagtcggctccggattaagatggacttccttatgccgcccagtaccaatcgcagtactcagcatcctg

SEQ ID NO: 173211 - DNA, 732 bp, Saccharomyces pastorianus
gtatacgtcgatgatacaacaagacgcatccaactgtacactgattacaacaagaacggttcatcggagcctcgactaaagacgcttgacggactcacctcagattacgtgttttattttgtcactgtgctaaggcaaatgcaaatatgtgcgcttggtaacagttatgacgcttttaatcatgatccttggatggatgtggtgggatttgaggatccaaatcaagtaacaaatcgaggcatttcgaggatagttttgtattcctacatgtttctgaataccgcgaagggctgtctggttgaatacgcaacttttcggcagtacatgagggaacttccgaagaatgcacctcagaagctgaattttcgggagatgcgtcaggggttgattgccctaggacggcactgcgtaggtagcagatttgaaacagatttgtacgagtcggcgacgagtgaactcatggccaatcattccgttcaaacagggcgaaatatttacggtgtggattccttttcgttaactagtgtcagtgggacaaccgccactttattgcaggaacgagcttccgagcgctggattcagtggttaggccttgaaagcgaactacattgttcattctccagtactccgaatgcggaaaacgtagtggaggtgaagcggcgagtccaattctcctcaaaaattccagataacgcaaaaagcccgaaaccagattcaacgaatcccgtgagc

SEQ ID NO: 173212 - DNA, 1161 bp, Saccharomyces pastorianus
ggatttggttttccaaaatcattaagaaataaatcgttcgtctttgagggtctcccatttgaacacattacgtctatgcatgacaggcttctacgaagctatcatgggtcaaatattgtacactcacaagaagaagtggatatgttattgatgaatctcccaatgggaaaatacattcatgtagcttccgtcgaaccgtgcttaagtatatccgataattacaacagtagtgacaagaaaagctcaattaacaacaaagtgcggatgtacattgagaatagagatttgaggactttcagtaattctcgacgtttgccaggcgcaaaaggagtcactgacctgtgggtggaggaatatacgtatcatactatgaatacttttccaacacttatgaatagatcagaaattgtaaaggttacgaagagcaaactttctccacttgaaaatgcaattcgttccttacaagttaaaatacaggagttatatgggcttgaaaacatgtgcaataaaactctgaaggaccacggtgatgtgaacgatttatttaccgagttttctacaaatattacgggaacaatatcagctccagttaatggaggcatatcacagtacaaggcctttttagaaccctccacatccaagcagttcagtactgatgatttaggaagattgacgctagcttttgatgagcttgttgcagtattaggtcgctgtctaacgttgcatgcagaactactaccatcaaaggatctaaaaccatcacatgatcttctagtgcgtctttttgaggaaaatttcgctgaggagatagaaagatatagtcgtactctcagtgaggccaatcgtagcaggaataacatgattactgctcgaataatttcgcacaagaaccccaataaaaaggcaagcttttctggaagggatcatcacacctcagggtccaatcatagccaatttgtattagaacatagcgactcatttggcccaaacagtttactttttggaaaatatttaacaagaacgttatcacactcgtccactacgagtagtttggataaaagtggaattgtttccggcacttcaagcacctttttggcagggtcacagccaaacaccaacacagattcacagcacaagcatgattactcacattcgggataa

SEQ ID NO: 173213 - DNA, 1968 bp, Saccharomyces pastorianus
aagctaaagttaatgattgtttactataaagatgccattagtttcattaaagagatacacaagagtattgaattgatatctaatttgctgttttctaagaacagaaacgaagttttagaatcaatggacttcctagttttagcagacgcttttgacattgagttaagcgaatttggtataaaaaaaatgctgcatttggtttggatgaagggcacaaacgatgaaggaacgagtatatcagtacatttgatagaatgttataagcagctatttttaaccgcgccagatagttgcaatatgcaggagaaggcggcacatattgccaaaaatttaattaatctaagcatcggcgcatctattgcagacttggcctctttggaacagctattaggaatgatgtatgaacaaaaaatgattgatcaacatgtcattaatatcctttgggctatttacaattctgcatcgaaggccagtatgcagaaagaacaaaatgtgaacaaccgtgactccgaaaaagggttttctaaggaacaaattcatggttctattattattttaggaatgttatcgttagccgataacgaaatagcattaaaaggactggagtcacttttaaacattggacttggtgccgttggtttaaaagatctgaccctttgtcggtattcttgtttagcgttagagagaatggttcccaagagaagcactattattaccaaggcaataaatcaagagcttgaagatgttgcagtgaaaaagttgtatgccataattatcaactataccaaggataatgaatattatcctatgtgcgaacaagcgcttagtgcactgtttacaatctcttctaagcctgatatactagctacagatctgattagagaaaagacaatgatgacatttggtaaacctgaagaggaagactctattttgtcgttagaacaatcatctagagttgtttctctcagtcaattattattcattgtgggtcaagtggcgattaaaacacttgtctatctagagaaatgtgaggcagaattcaagaaaagaaagatcgaggcagaaactcggaacggtaaagtaaaaaaccaaggtgcagatgtaactaacaccacacaagataacggtggtgataaagagctagaaatgataggaggtactaatgaggacgatttcacggatgctattcaatttgtaaaagagaatgaattactatttggagaaaaatctatattagggaagttttgcccaattgtagaagagattgtttctaattcaagcaggtttagcgatccaatgcttcaaagaacggcaaccttatgtctagaaaaactaatgtgtttatcatcaaaatattgtgaaaagagcctgccgctattaatcacagtaatggaaaaatctcctgatcctactattcgctcaaatgctgtcttaggactaggtgacatggcagtatgcttcaacaacttagtggacgaaaacacagattatttgtatcgccgtttgcatgatgaaaacttaatggtacaaagaacatgtttaatgacagttaccttcttgattttagctggccaggttaaggttaaaggacaattaggagaaatggccaaatgcctagacaatccagaccagggaataagtgatatgtgcagattatttttcaccgagttagcatccaaggacaacgccatttataatggattcatcgatatctttagtaatttatcgtcagatgatttattgggtaaggagagtttcaagaaaatcatcaaatttctgttgacttttatcgataaggaacggcaccaaaagcaattaaacgagaaattagttggaagactaagaaagtgcgagacccaaaagcaatgggatgatattgcattcgtactaaacaatctaccatacaaaaatgaagacgtcactgcattattggagcaaggtttcaaggttgtatccgcaaaagaataa

SEQ ID NO: 173214 - DNA, 414 bp, Saccharomyces pastorianus
  modified_base (9)..(9): a, c, g, t, unknown, or other
atgaggttnttcaacacatgttatgctgcacgaaagaagggagggaaatttgtggcccagttctacccgaaaaacgacgaccaggtggacgacatactgcagtctgccaaggtggcagggttcagtggcgggcttgtggtggacgacccagagtctaaaaagaataagaagtactaccttgtgttgagcagtggggccccaccgcagggggaggagcaggtgaatttggacggtgtgaccatggacgaggagaacgtcaacttgaagaaacaactgcgccagcgcttgaagggaggcaaagacaaggagtctgccaagagtttcattctaagaaagaaggagctcatgaaaagacgtgggaggaaagttgcgaaggactccaagttcaccgggaggaaaagaagacacaggttc

SEQ ID NO: 173215 - DNA, 90 bp, Saccharomyces pastorianus
agcgcctgtgcttcggttacttctaaggaagtccacacaaatcagatcgttagacgtttcagcttccaaaattcaagatatgataagctc

SEQ ID NO: 173216 - DNA, 588 bp, Saccharomyces pastorianus
  modified_base (180)..(224): a, c, g, t, unknown, or other
atggacatattcagacagacttttggaaacaatgacgaatcatttattcgaatcccaggagctttcaatgaggaaccgcccgcaaatgtgaatggagagggagataatgggaacaacagtgcggatgaaccaataagaagtcaaagtacgcgttcgaggtcagtccttcgttttctgttnnnnnnnnnnnnnnnnnnnnnnnnnnnnnnnnnnnnnnnnnnnnnccgaagttcacgtcttctgaaaccactgttaagatttcatgggttctatcaaagaaagcacaatcgtttgttggatcatggctctcaattgaaccgtctattggaaggcttgcagaatgagtctcaggttgtaatgccttctgaaggtaacggaaatgctgacggcggcagcaatagtgaaaatacgggcaacagtcaaagtagccaagttcagttcagtttcggttccttatacaatcctgaaaatggaatgttttccaaaggtatcatgcaaaatagttataccgaattgctggacaattgcagcgaacaagtaaaatttggagtgatttacctgcatgacccgcttttggatgatcatatg

SEQ ID NO: 173217 - DNA, 597 bp, Saccharomyces pastorianus
tcactttatggattgaaacaaagtggagcgaactggtacgaaactatcaaatcatacctgataaaacagtgtggtatggaagaagttcgtggatggtcatgcgtatttaaaaacagtcaagtgacaatttgtttattcgtagatgatatggtattgtttagcaaaaatctaaattcaaacaaaagaattatagagaagcttaagatgcaatacgacaccaagattataaatctaggcgaaagtgatgaggaaattcaatatgacattcttggcttggaaatcaaataccaaagaggtaaatacatgaaattgggtatggaaaactcattaactgaaaaaatacccaaactaaacgtacctttaaacccaaaaggaaggaagcttagcgcaccaggtcaaccaggtctatatatagaccagcaagaactagagctagaagaagatgattacaaaatgaaggtacatgaaatgcaaaagctgataggtctagcatcatatgttggatataaatttagatttgacctattatactacatcaacacacttgcacaaactctagaggatccccggtaccgagctcgaattgtatcatgtcat

SEQ ID NO: 173218 - DNA, 114 bp, Saccharomyces pastorianus
atgaaattttctaaagtctcactactggccgcatctgcatctgtcgctttatctgccccagttgctgtgactgtcacacaacatgtccaccaagctgccaatgtagtggtacag

SEQ ID NO: 173219 - DNA, 96 bp, Saccharomyces pastorianus
atcattatctatgaaggcgattcatatgtagtgccaggtaatgttcctcacagtcctggtcggtgtgctgatactgggggtattgttgtggtacaa

SEQ ID NO: 173220 - DNA, 1488 bp, Saccharomyces pastorianus
agtgaaaccgaagcaaattcacagtgcacgatgagtgatgaaggtgctgataaaagtctagatactaacacagaatttattatacaaacacgatctaggaggtctaatgccggtaataaattacaaaaactattggagcaggagctaagagatatagaatctaccaaaagacaaatttcttcctataagaatggtaatgatgatgaagaagatgaaatagggctgttgtttcaggaagatgaagatgatgaagatttcgaaatgatggcaaaagatgacgatgatgaaggggaagaaaaagaagatgagactcaaagtataaggaaagagccctctcaggcttcaagtgagcaagcagccgatgacttaatgttcagcagtagcgaatctgaggactccagcaacgagaatgatgaagatgcagaggaaaaggaaatacgaagacaagaactactttcaagaaagaaaagaaacaagagattacagaagggtcccgttgtaatcaaaaaacaaaaacctaagcctaagtcaggagaagctataccaagatcgcaccatacccatgaacaattaaacgcagagacgttactattaaatacaaggagaacttctaaaagatcatcggtaatggaaaacacgatgaaagtttatgagaaattgtctaaagctgaaaaaaagagaaaaattatacaagaaagaataaggaaacacaaggagcaggagtctcagcatatgctgacgcaagaagagaggctacggattgccaaggagactgagaagctgaatattttgtcactggataagttcaaggaacaagaagtttggaaaaaggagaatcgtctagctttgcagaaaagacaaaagcagaaattccagccaaatgagactatactgcaatttttatctactgcttggctaatgacgccagcgatggagttagaagatcgtaaatattggcaggaacaattgaataaacgtgataagaagaagaaaaaatatccgaggaagccaaagaagaatttaaatctcggaaaacaggacgcatcagatgataaaaagcgggagagtgaagaatcgataaagaacgatggcgacgtgaattctttgggtgagaattcttcatctgtacacaaccagaaaaggattgaggaaacttctactaacgatacagttgaaggagaatcgagtccagatgcagcggtgagtagagtaaattcagacgaattaaagccaacagcattatctgatgttacattggacgcaattgcaaacaagcagagtaccgttgatgaagctcccaacagccaaccacaaaagaatataataactaatgagcaaaaaattaccaatgtaggcgaaccgatacaaaatttacataatgaagaaattaaagatgaaatggtaagtgctctcgagagcagggaaaatacttttgaaaactcatcacctgctgcccaagtggtctcacaaaggactttagcagattaa

SEQ ID NO: 173221 - DNA, 135 bp, Saccharomyces pastorianus
atgagacttagagatgaagtatcaggtaataatttatacgtatactacatcgagaccaagatgaacattgctgatgtgatgacaaaacctcttccgataaaaacatttaaactattaactaacaaatggattcat

SEQ ID NO: 173222 - DNA, 222 bp, Saccharomyces pastorianus
ggacaagacgcgacggttcccatccaacccaacagcagcggaaacggaaaccgcctcaacgatatgaacaagccaaggcctctgtggggcccatatttcggcctttctcttcaactgatcatcgatgaccgtatattcagaaacgacttcaacggtgtgatatcggggtttaactacaacatggtttataaacccgatgactctctgctgagaattcaatga

SEQ ID NO: 173223 - DNA, 564 bp, Saccharomyces pastorianus
aagagttttattcaatcaccgacggaatcaaaggtgaaacaggctaccaacgaggacgaaacaagtggagcaacggggacgcttatgaacgaaatatcaatcttgacctacagccccaagacagtacgagaaatcatccaggtaatccggaagcgattgttacttgggcagaacagaagaaattctcatcgaaattgtatccaggtgatgaagacgctgactttggtctcatatctgatgaataacgggtccaatgaattcatcaagtggctgaaaggaaacatgatactaattgagatcctggaggattttcaggttcaggatcctcgggatgaacgtaaggcggaagatattcaaaagctaagcaggaacgttctggggctgctgcaagacgacgggttactagaaaaacaacgcaaggatgtaatacaattccgctcaagcatatcgactccgggcaggaagtccacggacaatagccatttgaagctggaggaaataagaaacgagctcacgcgacaaagccttagaacagaaagcaaagcctcccaccaccagcactag

SEQ ID NO: 173224 - DNA, 258 bp, Saccharomyces pastorianus
atgattactgattcaaaaccagctattgaaggcttaaaccggagctatctgcaacccaaacagaagttcacatggataaaaaccgaaataattaaagagaaactaaaagagaagactataaaactaataaaaatcaatggtaaagaaaatatagcagatttactcacaaaaccagtatcgatttctgactttgatagatttatcaaagtattgaaaaacaagataacaccacaggatattttggcctcaacggactat

SEQ ID NO: 173225 - DNA, 1881 bp, Saccharomyces pastorianus
atggattcggtgagatgttttatagtgttttctctactgtgcgtcgttgataatattcccgcagcggctaaggtcttgactgccgacgaacagtcacgagacatgttttttccctggtttaagagcatttacgccaaagcagttaacgaggagaatactgaggcgcacacttttatcaccgccaatttcgtgacgcagagcgtcgagatccatggcctatatctgtcgtttggttacatcaaggatctgcgcaaggacgttcaccgtgatatcgaactgtgcgttgatatgctctcggagtggttgagctttgggacaatcagtcaggtctattacaacggcatgggcaaccggtcggtccgcatcagagacgatctttatagggatagtgatattgtcaatgtttttcacgttatcgatcgcagtctcctatcttcttttttcatgggttggagaagcccagggtatatcaacgatgaaaatatcagggcaaccattctgaaaatcgttaaccgtatcacaaagatccttatggttgccgtttggatctgtcctggtttaccgctaaggtttcctgagttaagtattttgtgtttttctggttccaacagaaacttatattttgacgccgatgagcgtgtattccttatcaaatctaggtacaacaagtcacacaagttcgattcacgaatcttattcttggatgtaccggtttccgcagttttgttctggtacatatacatactgcgaccattcataatgtctttgtacccagtagaggccggtcgcttggaaaaagctctaattgtgtcctccattggcaaacttgtaggagacagcgtgtttgacgaggacgaggtggacggaatagttgcggaagaggaggaggaggaggaccgcgctgcaaactatgccttatacagagacacaaagagcatggaggtcttttacaaccatttagacccggctgagtttagagaaaccatgctgagaagctttgttttcatcgacaccagtaactgtggtttaatgaagcgaactcatttttcgtctgtcctttcgacctacccaaaatctgtcagtaaaagagaggcgcacaagatcagaacattcagacagggattggcggccttgtggagacacttcattgttccctcgaactatagctcgctggcggtaattgagtcgcacgttgccaagctgttcggccacagcgtacagacggacagatccggctatggggttaatagatcgagagctgtgcagcattcgacatcggaatctgagctggactattacagggcaaagattttatgtcagaagttccagcgtctcacttctcccgccacaacccccccgatagcggacctccgtagagacgacaagaaagagatcgagaagcctataggagatatttacgatctgatggaggcaggatcgtgtttgtttggtaattcccaattccccgcgttcaaatcaacagaccaatccaacttcactgccacggtcttgaatggtgacagaaaattgttggccttgcaagcccccacgtcgtttgggaaaaccgtaacttatcttcttcccatgatggttctagccaagacccggcctggtaaattcatccattttgtcagcgtcccttacgttgccttgaagactgcaacgatgaaaagagtgcaacaggcaggccttgtagctgctgatagctccgctcttggtgctattgacttctacacgcaggtggtcaccattgatgtcatagtgggcgtgtttgatggatttgctcaggacgaatgcgtttccaaatgggacgttatgtatggcggatgcaggaagttgggctactttgtcattgatgagttccacgtacttgaggtggag

SEQ ID NO: 173226 - DNA, 285 bp, Saccharomyces pastorianus
agttccgaaactggcattaagttggcattggacccgaacttaattacattggcactaagttctaatccaaactctagccttcattcaccaacgtctgatgaacccgtacctgaatctacaggaaaagcagatactagtattcgactagaaggtgatgagttagagaataaaactaagaaaggcaatgataagaacttaaaatttttgaagaataaagattctctagtcagtaatccacacgaaattaatggtcttgccgttggagcaatgatcccatcatctaag

SEQ ID NO: 173227 - DNA, 123 bp, Saccharomyces pastorianus
cgtgcccagtgctggctagaacacctagctacttacgactttaccctcaaatatctggctggacccaagaatgtcgcagatgcaatataccgtgccgtgcttaccataaccccccaaaacacc

SEQ ID NO: 173228 - DNA, 81 bp, Saccharomyces pastorianus
atggtctacacgttgtttcaagtgcatactttgaaattcaatagaaaggattacgataccctttctcttttttacctcaac

SEQ ID NO: 173229 - DNA, 621 bp, Saccharomyces pastorianus
atgaaattaggtatggaaaaatccttgacagaaaaattacccaaactaaacgtacctttgaacccaaaaggaaagaaacttagagctccaggtcaaccaggtcattatatagaccaggatgaactagaaatagatgaagatgaatacaaagagaaagtacatgaaatgcaaaagttgattggtctagcttcatatgttggatataaatttagatttgacttactatactacatcaacacacttgctcaacatatactattcccctctaggcaagttttagacatgacatatgagttaatacaattcatgtgggacactagagataaacaattaatatggcacaaaaacaaacctaccaagccagataataaactagtcgcaataagcgatgcttcatatggtaaccaaccatattacaagtcacaaattggtaacattttcctactcaacggaaaagtgattggaggaaagtcgacaaaggcttcgttaacatgcacttcaactacagaagcagaaatacacgcagtcagtgaagctataccgctattgaataacctcagtcaccttgtgcaagaacttaacaagaaaccaattattaaaggcttacttactgatagtaga

SEQ ID NO: 173230 - DNA, 885 bp, Saccharomyces pastorianus
atgtctactatcacaggtaccaatgggttaccaacggatgaaaccatcatcatagtcagaaccccagccagtgtcagctcgtcttctgctgcatcaggaatcatcactactacaacagaaccatggacgagtgcttccacaacaacgtctactgagatgtctactatcacaggtaccaatgggctaccaacggatgaaaccatcgtcatagtcagaaccccagccagtgccagctcatcttccgccggcattatcactaccacaacagaaccatggactggtgcttccacaacaacgtctactgagacatctactatcacaggtaccaatgggctaccaacggatgaaaccaccatcatagtcagaactccaaccagtgccagctcttcttccgccgcatcctctaacgtgactagctctgccgccacatcagacataattacaggctcgaaggatctaacatctatagtttcttctaccaccacttcaaccgactctggctcccctaagccttctggatccacagctacggtaacaaacgaacaaactactttaatcacagttacttcctgcgagtctggtgtgtgtaccgagtctgtatcatcggctatcgtttctacagccacaactacggttagtggcgtgactacagaatacactacatggtgtcctatgtctaccacagagccaacaaagccaactacgttgattacagttacttcttgcgaatctggtgtctgttctgagaccacctctcctgccatcgtttctactgctacgaccactgttagcggcgtcgctactgaatacactacatggtgtcctatgtctaccacagagccaacaaagcaaactactttagttacagttacttcctgtgaatct

SEQ ID NO: 173231 - DNA, 69 bp, Saccharomyces pastorianus
gaggtagaccaggatgatgagtttctaaatgactaccaggaattccaaaataaaaaggatgatttttga

SEQ ID NO: 173232 - DNA, 549 bp, Saccharomyces pastorianus
gtaagcaaaaaagataattccacagatgataacatctcgaaatcccagcaagaaatattcaagaaaactatcgattcagaagtactacctgaacagataaacatcgaaaaacatgttgcattacaagattcggataattgtaccccacaaagcgtagaggttcaatctgaatcaattgtcacatcatcgagtgaagatgatgttcaaaatgatgactattcttctgacaaagaaagtcatcacctgcccctggttgtaaaagttatggacaatactgaccaaacatatgataaaccgagcaaggcagaaagcaaaaacaactctgatacaagtatctcaccgaaaggtaataatgaagagttagtacaattggtaggaagtagcgaagcggaaaaaccgaatgctacaccagaatcatcaattataacagatgaaccaattgagccaggaaactcagcagtaaacaaagctggattcctaaacaaaacgtttaattctctcaataagaaaaggaagagacctgttgaaaacaagactcctttaatgaca

SEQ ID NO: 173233 - DNA, 177 bp, Saccharomyces pastorianus
atggatcatccacgtaagtggcaccgtaagctcgtcaattgcaacagccactttatttttaagagccgcggtcattttgttagcatctcttctcaactttggcagcacaatttcgcgatatttaacaggtatcatttgaagggaagaatcgttctccagatactcgtcaattcctcg

SEQ ID NO: 173234 - DNA, 585 bp, Saccharomyces pastorianus
ttacccaaactaaacgtacctttgaacccaaaaggaaagaaacttagagctccaggtcaaccaggtcattatatagaccaggatgaactagaaatagatgaagatgaatacaaagagaaagtacatgaaatgcaaaagttgattggtctagcttcatatgttggatataaatttagatttgacttactatactacatcaacacacttgctcaacatatactattcccctctaggcaagttttagacatgacatatgagttaatacaattcatgtgggacactagagataaacaattaatatggcacaaaaacaaacctaccaagccagataataaactagtcgcaataagcgatgcttcatatggtaaccaaccatattacaagtcacaaattggtaacattttcctactcaacggaaaagtgattggaggaaagtcgacaaaggcttcgttaacatgcacttcaactacagaagcagaaatacacgcagtcagtgaagctataccgctattgaataacctcagtcaccttttgcaagaacttaacagacctgcaggcaagcaagcgttgcgctgccgtcgttac

SEQ ID NO: 173235 - DNA, 306 bp, Saccharomyces pastorianus
gtttcaagggctattagagatggtgttattgaagccaagattaatcacgaggatggctttatcgaaaccacagaattactaaacatttatgatagtgaagatcctcagcaagtatttgatgaaagaatcaaatttgccaaccaattacatgatgaataccttgtttcaatgaggtaccctgaggataaaaagactcaacaaaatgagaaaagtgaaaatggtgaaaatgatgatgatacgctagatggtgatttgatggatgacatgtctgatatctcggatctcgacgatttgggattcttataa

SEQ ID NO: 173236 - DNA, 204 bp, Saccharomyces pastorianus
cccaaacagaagttcacatggataacaaacgaaataattaaagagaaactaaaagagaagactataaaactaataaaaatcaatggtaaagacaatatagcagatttactcacaaaaccagtatcaatttctgattttgatagatttattaaagtattaaataaccagataacaccacaggatattttggcctcaacggactat

SEQ ID NO: 173237 - DNA, 186 bp, Saccharomyces pastorianus
ttacagactttgttcaccacagaagaactagctcaaatcgaagctaatgctaaatatccatcacccagtgataatctagaaggtaatttagactacgtcttcgctaacacagaagaatctgaagaagaagaatctgaagaagatgaatctgatcatgtcaccaaccttgatatatattccgatcgt

SEQ ID NO: 173238 - DNA, 567 bp, Saccharomyces pastorianus
ctatacattaaatcgtccagttcttcatgtgaagaaaaagtgtcgagttcaacaacaaaaccgggagctgattcggaaaaagaccaactgctgggtagactgcttggagttctgaactgggacgttaacgtcagcaaccagggtttaccacgtgaacaactgagcaatcgcttacaaaatttattgagggaaaaaccatcatcttttcagcttgctaaagaaagagccaaatacacgaccgaggtcattgaatacatcccgatatgtagtgactattcgcatgcatctctattgtccacctcggtgtacattgtcaataacaaaatcgtttctttacaatggtccaaaatatccgcatgtcaggaaaaccacccaggattaattgaatgcattcaatcaaaaattcactttatccctaatatcaaaccacaaactgatatttcgttaggagattgttcttatttggatacctgtcataaattaaatacgtgtcgatacattcattatctgcaatatattccgtcatgcttgcaagagcgagctgatcgtgaaactgcgagtgaaaat

SEQ ID NO: 173239 - DNA, 78 bp, Saccharomyces pastorianus
gtcgaatttcttactataatcagaagttcattagtctcaccaaaaaacgataaatctgcaagacaacatgcaggttga

SEQ ID NO: 173240 - DNA, 261 bp, Saccharomyces pastorianus
aaatcgtcgaatcaggatactggatttagctctcaacaccaacatccaaatggacagaacaatggaaacaataatagcagcaccgctggcaacggcaacggatacccatgtaaactggtgtccagtgggccctgcgcttcatcaaataatggtgccttttttacgaattttactttacaaactgcaacgccgaccaccgctattagtcaggacttatatgcaatgggcacaacaggaatacatcagaaaatgcctttttca

SEQ ID NO: 173241 - DNA, 924 bp, Saccharomyces pastorianus
agaccggttgatctggtaaatcaaccgcttggattccaagaaagatataaaattttgcagaaattattcaagcagttacaaaaggcatatgcacacacaaaaggaactaatattgaccttgaaagacttgccactcgcttagaagtccatgttgctaaaaacagcttgtctggtcagagttacaagtttaacatgagcattttactgcgggatgtgcttaaatataaaggagatctctcgaagatcaaaattaatgggcgcccccttaaaggagccaagcctcatttatcctcaattggtaatgcaaactctatcactacaaaatcaaaagcgatggaagctttaaaggctctgattttggattcgaaggtcttggagaaaaatgggtatattgttaaggaaatgcgaaataaaactaatgatgacaatagtacgcaactgtatgcaccttgtttgcgttgcagcacacatttcaaaaaaacagacatcatggaaaagactctatgtaggtatcaccctttgaaaagaatatacaacagagataccaagaaccatcagtatccatgctgtggtgaaactactgattccgtttcttttctaaggctaggatgcaagacgttttttcaccatgtgtttagaggagaatcatatgacgagttatgcaaaatttcgaagttttctagtacagatgacattgatggtgttgagaatgttctttctcttgactgtgaaatggcttttacatcattgggctatgagatgatacgtttaacaattgtggattttttcaccggcaagacactatttgatcatgtaattcagccaataggggatattgtcgatctgaattcagacttcagtggtgtccatgagatgaccgaacctatgccgacgtacaaggaggcactgatgtgttgtatccga

SEQ ID NO: 173242 - DNA, 1053 bp, Saccharomyces pastorianus
atggcgaccccagtgagggatgagacaagatatgttactgacgacaacatttctaacctggttcaatcaaaagtcaaacttcaaaaatcaagtattgatacttctgttgaaatcgaccaaaaagatctaggaatacttaaaccattattacaaaaattaatcatcaagaaggatgagatagctaataatcatagacaggaaagtgaattatttattaccgataagttaatggaagtcattgaaagaatcgataaagtacaaaacaagattcataccttggaaaaaaggctggaaacaattgattccgtagaagatcaacatatcttacacgaaagaaatgattccactggaacatattacttattcgataatatttttgatcaacaaatacaaaacatcgatcctcgtgaaaacgaaatcttatgtaagattatcagagacggtttcgatgaaagtcctgatataatgaacattaacacagttgacatctttagaatcattcgtgatttaaagaaaaaatacacaagcttttttggcagagatgtgagattaaaggtatgggaaaaggtgttggtggacacaacttgtaagaatactgatctattaatgaaggaacttcaaaagttagtattaatggaaaaatggatcctttcaaaatgttgccaagattgtccaaatcttacacacatcttagaagaagcaattcttgggaccttacatgaatctttgagaaatccggttaaacaacgtttacacatctactctgttgatgaaaatgagagaattgaagaagttttaatcaatatcataattgaaacagtaatggacttgagttcgacagactcgcattattcagaaagaaattgcaagtactgtaaatcggaattacacagctcagtaaactgtagaaagaaattaaacagagaacttaggcctaccacgcctaactactcaaaaggtaattattcgcaaggttcaacccaaaaagaatacacaaaaactggcacacaacaagtcagagcttttgacaaagagaaagaaggcttcaaacaa

SEQ ID NO: 173243 - DNA, 162 bp, Saccharomyces pastorianus
atggcatatgcacacggatgctacagtatataccactctcaaacttaccctactctcacactccactccatggcccatctctcactaaatcagtaccaaatgcactcacatcattatgcacggcgcttgcctcagcggtctataccctgtgccatttaccca

SEQ ID NO: 173244 - DNA, 492 bp, Saccharomyces pastorianus
atgcaagaagttcgcggatggtcatgcgtatttaagaatagtcaagtaacaatttgcttactcgttgatgatatgatattattcagcaaagacttaaatgcaaataagaaaatcataacaacactcaagaaacaatacgatacaaagataataaatctgggtgaaagtgataacgaaattcagtacgacatacttggattagagatcaaatatcaaagaagcaagtacatgaaattaggtatggaaaaatccttgacagaaaaattacccaaactaaacgtacctttgaacccaaaaggaaagaaacttagagctccaggtcaaccaggtcattatatagaccaggatgaactagaaatagacgaagatgaatacaaagagaaagtgcatgaaatgcagaagttgattggtctagcttcatatgttggatataaatttagatttgacttactatactacatcaacacacttgctcaacatatactattccct

SEQ ID NO: 173245 - DNA, 69 bp, Saccharomyces pastorianus
atgatatggctcgatgtcttccaagtattctttgtattcctcgtcatttcgcagcattctctccacagc

SEQ ID NO: 173246 - DNA, 144 bp, Saccharomyces pastorianus
ggtggtaccattgaatcagatactacttcacctagacactcgtctaccttcactgcacgaaaccaaaagcgacctggtagtcccaatgatatgattgatttgacctcacaggatagagttaattatggacttgaaaacatctaa

SEQ ID NO: 173247 - DNA, 192 bp, Saccharomyces pastorianus
attgccatctttattggcgtcctccttggcactagcgttggtactttcagtggtagtggcattagtgctggagttggtgctagcagtggtagtggcattagtgctggagttggtgctagcagtggtagtggcattagtgctggagttggtgcttgcagtggtagtagcactatgtctgacgttgatgctggc

SEQ ID NO: 173248 - DNA, 255 bp, Saccharomyces pastorianus
agttctttaacggataagttacctaaagtgaatgtgcccttaaatccaaaaggtaagaaaattagtgcaccaggtcaaccaggactctatataaacaaagaagaactgaaactagacgaagatgactacaattcgaaggtacacaaaatgcaaatgttaataggactagcatcatatgtcgggtacaagtttagatttgatctactatactacattaacacacttgcacaacacatacatctaaacgagtattag

SEQ ID NO: 173249 - DNA, 87 bp, Saccharomyces pastorianus
cgcgtatggtcacccactacactactcggtcaggctcttaccagcttaactacagttgatcggacgggaaacggtgctttctggtag

SEQ ID NO: 173250 - DNA, 315 bp, Saccharomyces pastorianus
ttgatctataacaaaaaacttggtacggttgatttaacattaaaatcattcatagaaaaaatgggtgagaagtataaaaaggaattggataaggttagaaaaagttcaattccacatacatcaatatacagggttgatcccaaaaagggagaactaaaaatgaccgaaaaagaatataaagacggtgtgttgaaattacaacaactactaggagaacttaactatgttaggtacaagtgtagatacgatgttgaatttgcggttaagaaagtagctaggctagtaactttcctcatgaacaggtattttacatga

SEQ ID NO: 173251 - DNA, 924 bp, Saccharomyces pastorianus
atgactttggtcaagcaagcatgcgactgttgtcgcgttcgtcgagtaaaatgtgatggtaaaggaccgtgcggtcgttgtattcaacgcgatttgaattgtacttatctccaaacgttaagaaaacgaggtccaaagtctattaggtcaagaagcccaaaaaaagtagtctgtgtgcagagggttaatgaggacagcagtacaatgactgctccaagggtgctcacgaaggttccaaaggtgctgattgaccaatgtttaaagctgtaccatgacaatttatacgtgatctggcctttactctgctatgatgatcttcacaagcttttggaagaaaaattcgatgactgccacgtttactggtttttggtagctctttcagcagccactcttagcgatttgcataccgggatagaatctgaggaaggaatccattatactggaaggcagttatcagttctctgtatgtcatcgcgccaagacttcgacgatcttagtaccagcggcatattcaagattatgacatattactgcttgcttcgttgttttgctcagtttgctgatacaggaacttcatacagactttcttgtgaagccgttggccttataaaggtcggcgaattgcatcttgaagaaacgtatgaatctctttcatttggtgagcagcagcttagacggaaagtttactatttgcttcttttaacagagagatactattctgtgtatattcgttgtgcgacaagcctggatgtcacgatatcaccaccgcaacctgaagctgtaactgatcctcggctttccctggatagttttctcgagatgatcagggttttcactctaccaggaaaacatttctttgatgctttagctagtaactctgcgaatgtttcttgtacagaagactctttaaaaaaatatggaaag

SEQ ID NO: 173252 - DNA, 186 bp, Saccharomyces pastorianus
ttagtcttaggccagcaacagaaagaatctaagccaacacgcacaatagactcgaatgacgaactacctgatcaccttcttattgattcaggagcttcgcaaacgcttgtcagatcagcccattatttacaccatgcaacacccaattctgaaataaacatagtcgatgctcaaagggatcctcta

SEQ ID NO: 173253 - DNA, 186 bp, Saccharomyces pastorianus
caattcataactttttattatgttggtcttttcgagagcgcaggcgcaagagaatatgcatcaagaggaaaaggtttgttgaagacgaaccagatttccagggcggaccaatcccttcaaacaaaccacgtgatggtgtacacgttgtttcaagtgcatactttgaaattcaatagaaaggattac

SEQ ID NO: 173254 - DNA, 171 bp, Saccharomyces pastorianus
aagagaattagaaacagattttttggcacaaaggcaatgagacttagagatgaagtatcaggtaataatttatacgtatactacatcgagaccaagatgaacattgctgatgtgatgacaaaacctcttccgataaaaacatttaaactattaactaacaaatggattcat

SEQ ID NO: 173255 - DNA, 309 bp, Saccharomyces pastorianus
atgaatgaagaggattctacagaaacgaaaagcctagtcataactaatggcatgtttatcatagacgacatcgagcgtagtaaatataatattcactataagaatgtcccgggaggtggaggaacttttgccattttgggtgcatgcataatatcttccggcaatgtcacatccaaaggtttgaagtggatagtggacagaggctctgactttccaaaggaagttataagggaaatagactcatggggtactgatgtgaggtttcgagatgactttagcagattaactaccaaagggttgaattattag

SEQ ID NO: 173256 - DNA, 1044 bp, Saccharomyces pastorianus
aaggaaatcactgttttcgtttcgggcgctactggtttcattgccttacacgttgtgcatgatttgttgaaagctggatacaaagtaatcggttcaggtagatctcaagaaaaaaacgatggtatattgaagaagttcaataacaatcccaacctttcaatggaaattgtcaaagacatcgctgcaccaaacgcttttgatgatgttttccaaaagcgtggtagggaaatcaaagttgtcttgcacatagcctctccggtccatttcaaaaccaccgattttgaaaaagaccttttaattccagctgtgaatggtaccaagtccattttggaagcaattaaaaaatacgcagcagacaccgttgaaaaggtcgtcatcacctcttctgttgctgcacttgctaaccctatagatataagaaacaacagcttgattcttaccgaggagacttggaacaaggacacatgggaaagctgtcaagctgatgccgttgccgcatattgcggttccaaaaagtttgctgaacaagctgcttggaaattccttgaggaaaaccagtcgagcatcaagtttacgctctccactatcaacccagggttcgtttttggccctcaattgtttgctgattcacttaaagatggtataaatagctcttcaggtattattgctcgattagttcattccaagaccgatgaaaagttctacaattacagcggcccatttattgacgtccgtgacgtttcggaagctcacttggttgcatttgaaaattctgaatgtgctggtaaaagactagtcttgagcgaagatttattttgctcccaagaagcagttgatatcttgaacgaagaatttccccagctaaagggtaagattactactggtgaacctggcagcggtccaagctttctggaaaaatattcatgcaggttcgacaactcgaaaaccaaaaaactgctaggatttaagtttcacaatttcagagattgcattgtcgataccgcatctcaaatgttagaagttcaaggtggagcctcgatttag

SEQ ID NO: 173257 - DNA, 204 bp, Saccharomyces pastorianus
tcagcacccttgatggagtgtaaaagatcaggatcggccactagattatggggcaggtcaatattgggtagatatttaacgttctggtgtcttgtatttatgatatccgtcagattttcgtcgccgatcttttcatcaaaaacccacattctcacctctggctcgaagatatgggaatgcaattctgtgttttccgcaatgact

SEQ ID NO: 173258 - DNA, 408 bp, Saccharomyces pastorianus
atggcgaccctagcgagagatgagataaaatctgttactgacgacaacatttctgcgcaggttcgatcaaaagtcaaacttcaagctactaaggaatttcaagtatgtattgaaaatgatggaaatgatataaaattacttagacagatgttatcgaaattaatcactaaaaagaatgaaattgcacgcaaggctagacgggatgttgatatatcagaactcgaccagttatttgaagtcgatgaaagaattaataaagttaatattaaaattcttagtctagaaaaaaagttactttcaatagattccgatgaagaccaacattctttacacgaaagaaacgattctactggaacatactacttgttcaataccaaaagcgtaaaaaacaaaaaaatattatccaaa

SEQ ID NO: 173259 - DNA, 456 bp, Saccharomyces pastorianus
atgaaaagtataatattcaaattgaaggacttcaaaaacttcataacgataggtccatcctggaagactacccaggacggaaatgataatataagtttatggttttgccacccaggggaccctattcttatgcaaatgcaaaaaccgggcgtaaaattagaattggttgaagtcactgacagtaacattaacgatgatattttaggaggaaaattcataaaaacagcaatctctggctccaaagaagaggccggactgaaagacaacaaagaaagctgcgaaagtccattaaaaagcaaaactgctttaaagagagaaaacctgccacactctgtggctggaactcgaaacagtcctttgaaagtgtcgtatctgacccctgataatggaagcacagttgctaagacctatagaaataacacggcaagaaaattattcgtggaagaacaaagccaa

SEQ ID NO: 173260 - DNA, 105 bp, Saccharomyces pastorianus
tggtcatgtgtgttcaaaaatagtcaagtcacaatctgtttattcgtaaatgacatgatattgttcagcgaagacttaaacgacaatatgacaccaaaactataa

SEQ ID NO: 173261 - DNA, 417 bp, Saccharomyces pastorianus
atgtaccatgttcctgaaatgaggctacattaccccctggtgaacactcaatctaacgccgcaataacacccaccagaagttacgacaatacccttccttcgtttaacgagctatcacaccagagtacaatcaatcttccattcgtccaacgcgaaactccaaacgcatatgctaatgttgcccaattagctacgtcgccaactcaggctaaatcagggtattattgtcgctattatgctgtgccttttcccacatatccacaacaaccacaatctccatatcaacaagctgtacttccttatgccaccattcccaacagcaatttccaaccatcttctttccctgtgatggcagtgatgcctccagaggttcaatttgatggatcattcttgaacaccttacatcctcacacagag

SEQ ID NO: 173262 - DNA, 1545 bp, Saccharomyces pastorianus
ataattgttcagaacttggatctctcctttgataagaaaaccttgttcacggaccttgactttaaggtatcatatggagacaaggtgaccattgttggagagaatgggagcggaaagactacatttctcaagctcttatccggcgtagaggattatccatattctgggtcgattgtaatccaagggagaatcggatttctacctcaacatttcgaagaagttgacggcgagttactggcaattaaagtattactcagatcgttgtatgatgacgagatcaacgaatttctagaattgcatttggaatccttttcacacgagtggctccaggagctcaactctctagggggacacgagatattcaagcaattatcccacattggactgagagatgaaatattgaaacgtcctttcaagtcccttagtggcggtgagaagacaaaaatccttctctgtgcactgagcatcttggatcctgactttattttgctggacgaaccaacaaatcacctggacaacaaaggaattgaatggttagagtcttttttgaaaagatacatgggtgctgtcgtaatagttactcatgatcgtagtatagtcaatgcagtttcaaacagtatttcggaattgtcacctcacaccaaaaagtttacacattttagaggtggctacaagcactacttggaagaagaaaataagagacgacaaaaattaactgtagagagacgcttccaggacagggagctcaaaaaactaaagtctaaggctgcaaaagcacaatctaaagttaagacacgaatcgttaggtcggggtcagatagagataaactaagttacaacaataaagaacaaagggctcagaagggaattatgggtcttgtaaatcagctttctgataaagttgagaatcttaatgataatttagtggagattattcctgacagatcacagatatccttcgatttcgatgatctttctgcgtttagctctcttttggggatatctgtaaccggtgtatcaaaatcatacaaaaagcaaatattcaccaatatatcctttacgttgacaagaggtgaaaagctggttatccagggaccaaatggttctggcaaaactactttaaatcggatcctcatgggtctaactgaaccagaccacgggacagtttctatcagcgggaatgccgttgttgggtacttggaccaggagcaagagaaccttcccttggaaaagtctccgatagagctgctagaagaagatactaaaatcaatgtatcaagacagtccgcaattcgtaatttacgtgatttcgggatttataaatggcacgatttaaagagtcctttgaaaaatttgagtgtcggttgccgtcgtaaatcacagctctgtcagattattatgaggaaatgctctatacttgttttagatgagcctaccaaccacattgattttccaagtttagaaattattgaagacgctttattaacatttccgggtattattattgctaccacacatgacagatactttacagaaaaaattgcc

SEQ ID NO: 173263 - DNA, 225 bp, Saccharomyces pastorianus
caatcgatcagtaattgtcccatcgggttagtttcaaaaaacacaatcaactcagcttccactattgcagagtgggtagcatgtccatggaaatatatcaacgttgttggttcaggcagatatgtgagcaataaacctgataaaattaccagatatgatctactcaaggctgcccaggaagcggaaatgcaggagttgcttacaagaaatgatatgaaaggttga

SEQ ID NO: 173264 - DNA, 213 bp, Saccharomyces pastorianus
acatctccacacacgactaacacaaaggttacaactcgtaattatcatagaacaaatagttcaaaaccaagagcagcaaaagctcacaatattgctacatctagtaaattctcaagggtgaacaatgatcacattaatgaatcaaccgtttcatcacaatacttaagcgatgacgacgaacttagtcttaggccagcaacagaaagaatctaa

SEQ ID NO: 173265 - DNA, 138 bp, Saccharomyces pastorianus
aaccctggaaatcacataccagatataactttcgtaacagacaacgaaaggaagcgttacgaaagcatgtgggtaagcaacagacaccgtcatttgaacctgttgagctggtggccctctataacgggtgattccgga

SEQ ID NO: 173266 - DNA, 171 bp, Saccharomyces pastorianus
cattttcttcatggtagcgcctatgcttcggttacttctaaggaagtcccatcaaatcaagatccgttagccgtttcagcttccaatttaccggaatttgatagagattccactaaggttaattctcaacaagagacaacacgacctgcaggcatgaagcttgcactgccg

SEQ ID NO: 173267 - DNA, 480 bp, Saccharomyces pastorianus
accaaattacagctactatactacttatcactattactgggcgtatacgaaaatagacgcgtgaataacaagacgaagttgttagaaaggttgaacagtcctcctgaaatcttggtagatggtatcttaagcagatttaccgtgataaagcctggacagtttggaagatcaaaggatcgctcctatttcattgacccacaaaatgaagataaaatcttatgctacatcttggcaatcataatgcatttggataacttcattgttgaaatcacacccttagcacacgaattgaacttgaaaccttccaaagttgtcagtttgttcagggtacttggtgctattgtcaaaggtgccacagtggctcaagctgaggcttttggcattccaaaaagtactgcagcttcttataaaattgccactatgaaagttccatttaagctacctgaaatgacaagaagaggaagaggtccaagacgttag

SEQ ID NO: 173268 - DNA, 231 bp, Saccharomyces pastorianus
atgctatctaagggtgggaagactagaagtctaactgttcattatatttttgccatgggattatacagagcattgtatattcctaactggatttggaggtacagcacggaagataaaaaattggacaagattgcctttttcgcgggacttttgcaaactttgttatactctgatttcttttacatttactacactaaagtcatcagaggaaaaggtttcaaactgccaaaa

SEQ ID NO: 173269 - DNA, 87 bp, Saccharomyces pastorianus
agaggaccccaatttatacacacttatgttaatattacagaaaaattactactaaaatcacctaaacataaaaatattctactcttc

SEQ ID NO: 173270 - DNA, 996 bp, Saccharomyces pastorianus
attccgtatacaccttatcatatgtcgcctatgtactttccacctgggccacaatcacagtttccgcagtatccatcatcagttggaacgcctctgagcactccgtcacctgagtcaggtaatacatttactgattcatcctcagcaaagtctaatatgacatccactaatcaacatgtcagaccaccaccaatcttaacctcacctaatgactttccaaattgggttaaaatatacatcaaatttttacaaaattcgaatctcggtgatattattccgacagcaacaagaaaagccgtacgtcagatgactgatgacgaactcaccttcttatgtcacacctttcaactatttgctctatctcaattcttacccacctgggttaaagacatcttatctgttgattatacagatatcatgaaaattctttccaaaagcattaacaaaatgcagtctgatactcaagaggtaaatgacattacgaccctagcaactttgcattataatggaagtacacctgcagatgcatttgaagcagaagtcacaaacattcttgacagactaaacaacaatggcattcctatcaataacaaggtagcatgccaattcattatgagaggtctatctggcgagtacaaatttttacgctacgcacgtcatcgatgtatacatatgacagttgctgatctgttttcagacatacattctatgtatgaagaacaacaggaatcaaaacgtaataaatctacttataggagaagtccgagtgatgagaagaaagactctcacacctatacgaatacaaccaaacccaaatccataactcggaattcccaaaaaccaaataattcacaatcaagaacagccagggctcataacgtatccacatctaataactttcccggccctgataacgatctcataagaggatcaactactgaaccgattcaattgaagaataaacacgaccttcaccttaggccaggaacttactga

SEQ ID NO: 173271 - DNA, 546 bp, Saccharomyces pastorianus
ttcacgacttggaaacggagttctaccggcagtcgcaatttggggggcatgactaacctcgattttgacgctttcgagaaagcaatctctttgagcgacacagcacctgaggctgtagctgatgctgcgttgcagcgcattgggcttacgagactgaccaagaaatcgatggacatcaacgagctcaatcggtcggaagatctcagcagaggtttatccagctatccaacacagatgttcaatctgataaaggagaaatctgaggtgcctttggggcacgttcataaaatttggaggaaagtcgaatcacctcccgaagaagcactgaagcttcttctagccctgtttgaaattgaaccagagtcgaaggccattgtagttgcaagcacaaccaaccaagtggaagaattggcctgctcttggagggagtatttcagggtggtatggatacacgggaagctgggtgctgcagaaaaggtgtctcgcacaaaggagtttgtcactgacggtagcatgcgagttctcatcggaacgaaattagtgact

SEQ ID NO: 173272 - DNA, 141 bp, Saccharomyces pastorianus
gaacatgcgtatatatacaataccttccaagcatttgccccatttcatttattgccaacatgggtaaaacaaattttagaaattaattattctgacatccttacagtcctttgtaaaagtgtgtccaaaaatgcaaactaa

SEQ ID NO: 173273 - DNA, 96 bp, Saccharomyces pastorianus
gaaactgcatattatagaagcatcttagtgcctactggtttcccattgactactggactaggactctctgttaaagtactaaataagaaatggtaa

SEQ ID NO: 173274 - DNA, 78 bp, Saccharomyces pastorianus
atggaatcccaacaattatctaattacccacatatatctcatggtagcgcctgtgcttcggtaacttctaaggaagtc

SEQ ID NO: 173275 - DNA, 258 bp, Saccharomyces pastorianus; identical to SEQ ID NO: 173224

SEQ ID NO: 173276 - DNA, 267 bp, Saccharomyces pastorianus
  modified_base (220)..(220): a, c, g, t, unknown, or other
  modified_base (256)..(256): a, c, g, t, unknown, or other
aatgaactttacctattgttgaacgcatccaattacataatgcatgaccttcaaagagcatttaaaggctgcgtggacggggatgatataaaaggattgaaatttgacttggtacttagacaatggtgtgatatgaatccggcactcgaatttagggtcttcgttaagaatgcgcatatcgttggggccacccagcgtgatttaaattattatgactatntagatgagttgtcagataccttcaaggacccttatnggatgacatag

SEQ ID NO: 173277 - DNA, 84 bp, Saccharomyces pastorianus
gtgagtggtagtggagttggaaatgcaattcataaatttttattatgttggtcttttcgagagcggaggcgcaagagaatatgc

SEQ ID NO: 173278 - DNA, 297 bp, Saccharomyces pastorianus
atgaacattaaaactcatgtaaaagatggaatcattcacgtaaaaaaggatgacttaattgatcatcctacatatgatttcaaagtaaatgcaatacaaccaacttcttctaaaaaggttagactgaagaccaaagttgtaagcttgaaagatgctcataaacgaatgggacatacaggagttcaacaaattgaaaactccatcaaacataatcactacgaagaaagtattgatttaattaaagaaccaaatgaattttggtgtgaaacttgtaaagtttcaaaagccacgagaaga

SEQ ID NO: 173279 - DNA, 120 bp, Saccharomyces pastorianus
atgagggttgtaaggcaaagtggctcagcattaagtagggctaaaaagagtcgcaaatatacatcgtaccgagtgatgaacgtggttttgaacaccttgttctcttttgttctcgctccc

SEQ ID NO: 173280 - DNA, 135 bp, Saccharomyces pastorianus
tcatacatttttgatagacttcgtatgtggagtactgttttatggcgcttatgtgtattcgtatgcgcagaatgtgggaattcctattataggggtgccgaggtgccttatgaaacccttttccgtgcctgttaa

SEQ ID NO: 173281 - DNA, 369 bp, Saccharomyces pastorianus
attgcatttggcggcttcatctttggttgggataccggtaccatttctggttttgttaacctttctgactttatcagaaggttcggtcaaaaaaatgacaagggaacctactacttatcgaaagtaagaatgggtttgatcgtctcaatattcaacattggctgcgccataggcggaattgtcttgtcaaaagtcggtgatatatatggtcgtcgtattggattgattacagttactgccatttacgttgtaggcatcctaatccaaataacctccataaacaagtggtaccaatacttcattggaagaattatttctgggctaagagtgggaagaattgctgtcctttccccaatggtcatctcctga

SEQ ID NO: 173282 - DNA, 609 bp, Saccharomyces pastorianus
atgtctggaaggcagatcaaagagttgtattataaagtatggagcaacttgcgtgaatcgaagacagaggtgctgcagtactttttgaactgggacgagaaaaagtgccaggaagaatgggaggcaaaagacgatacggtctttgtggaagcgctcgagaaagttggagtttttcagcgtttgcgttccatgacgagcgctggactgcagggtccgcagtacgtcaagctgcagtttagcaggcatcatcgacagttgaggagcagatatgaattaagtctaggaatgcacttgcgagatcagattgcgctgggagttaccccatctaaagtgccggattggacggcattcctctcgatgctgatagggctgttctacaataaaacatttcggcagaaactggagtatcttttggagcagatttcggaggtgtggttgttaccacattggcttgatttggcaaacgttgaagttctcgctgcagataacacgagggtaccgctgtacatgctgatggtagcggttcacaaagagctggatagcgatgatgttccagacggtagatttgatataatattatgtagggattcgagcagagaagttggagag

SEQ ID NO: 173283 - DNA, 375 bp, Saccharomyces pastorianus
atggaatcccaacaattacatcaaaattcaccaaatcttcatggtagcgcctatgcttcggttacttctaaggaagtcccatcaaatcaagatccgttagccgtttcagcttccaatttaccggaatttgatagagattccactaaggttaattctcaacaagagacaacacctgggacatcagctgttccagagaaccatcatcatgtctctcctcaacctgctgcagtaccacctccacagaatggacagtaccaacagcacggcatgatgaccccaaacaaagctatggcctctaactgggcacattaccaacaaccgtctatgatgacgtgttcacattatcaaacgtcacctgcgtattatcaaccggac

SEQ ID NO: 173284 - DNA, 915 bp, Saccharomyces pastorianus
atgataaaaatgtggaggttacaaattgtactggtgccgccaagtgctcaagatattatcacatttctcgaagcacgcttgaatactccacaatcagtgtctcctatggtccagtataatgaagatataattacgcacaacaacagtatcaataactgtagcgacccctctcctacgagcccgtcttcgcaaaattctattcagtcgaatcgtagtagtgatttcattaactacctcccgaattgtaaaaagtttttacattttacggacggtgacaatacccttttacaactatctaatgaaattttaactaaatttgatagactttatccaaatttcaaagaatccattgaaatcgtatctctacaagataggcatggttgtgatttggactctgaatttataataaaagacgtatttgaaaatgatggtgtggttttggtaattttaaaagatgaattagactggagtagaaatcaacatatttcacttttacaattggcaagacagcggagacggcaggacaacaagccatccacaaaatccatcgttactgaaaagagaaaaaagatctctaaggaagacttatcttctatatcaagtaaagatacaatgcatctaatagctaaaagctcgctcaagaataacttcattaataaatcaagagtatcaacgccgctaatgaacgaaattctaccgcttgcaagcaagtatgatgcactgaataaagaaaagtgtcccatgccacttacttccacagtagtggcatcaaatgtacacaaagacgtaaaagatcacgctcgtgttaaagagggagttgtaacgcaagggagtgataacaataaagaaaatataccttcatccactcaacaacagaaaaatgatggcgctaaaagggccgaatcaaaggattta

SEQ ID NO: 173285 - DNA, 714 bp, Saccharomyces pastorianus
gaaatatatattagtggtactgaaggtaacgaacaggatattgagatcgattatattgattaccatgacccccatatagacgtcgcggatgaaggtactaacacaccttcgcgggtacagggttatgggctaagagacgattctatgttatcagacgggactgcgccgtatgctgaacccaacgagaattctgctctgttgagtaagaaatccactttgagaactcaccagtctaccaagacaaacgacatacctgacagtaatgcagacgatgaaatagactttacttatgcttttggtagatctaagtcaaagaaaaacatcacccgtgggaccttaaccacacatttctcgctcaatgggtcgaatgttttcagacaaccgaagactattgagccgcctgtacaagaacaacagggcgattcgccatcagcaacaccaccgaaaaaaatcagaataccagcaggggtcaaagtcttctttggtaggcctacactcggcgataaagactatgagtggtgcctgcaaacagaatgtgacgcggagacagattctattcaatgctgcaggtgggcaaaccaaggcagagatcacgccgaatacctatcgcaagtgtgggtgcttgctgccggcccaagaggtttaatagaaagcacaagaagatgggcagtagacggtggactgcacttccacggagaaagcttcgcattatga

SEQ ID NO: 173286 - DNA, 711 bp, Saccharomyces pastorianus
atgactactgtcactggtaccaacggtcaaccaactgacgaaactgtcattgttgtcaaaacaccaacaactgctaacaccatcgtaactacgaccaaaccatggactggtactttcacctctacatccacagaaatgaccacagtcaccggtactaatggtcaaccaactgatgaaaccgtgattgttatcagaactccaaccagtgaaggtctaatcagcaccaccactgaaccatggactggcactttcacctctacatccactgaggttaccaccatcaccggtactaatggtcaaccaactgacgaaaccgttattgttatcagaactccaactagtgagggtttggttacaaccaccactgaaccatggactggtactttcacttcgacttccactgggatgaccaccatcaccggtactaatggtttgccaactgatgaaactgttattgttgtcaaaactccaactactgccatctcatccagtttgtcattatcttcttcaggacaaatcaccagctctatcacgtcttcgcgtccaattattaccccattctatcctagcaatggaacttcagtaatttcttcctcagacacttcttcctcagacacttcttctctagtcacttcttctctagtcacttcttctctagtcacttcttcagtcatttcttcttcagtcacttcttctctagtcacttcctca

SEQ ID NO: 173287 - DNA, 117 bp, Saccharomyces pastorianus
caattatatcaaaattcaccaaatcatcatggtagcgcctatgcttcggttacttctaaggaagtcccatcaaatcaagatccgttagccgtttcagcttccaatttaccggaattg

SEQ ID NO: 173288 - DNA, 102 bp, Saccharomyces pastorianus
gatctcgtaggcaaaggactggttgccaatgatttttttgtcaacacaattagcgaactgagcagatgcttccaacaagccgtgcagctttctcggagctaa

SEQ ID NO: 173289 - DNA, 390 bp, Saccharomyces pastorianus
atgcttggacatgctaacttccgaagtattcagaagtctcttaagaagaatgcagttacatatttgaaggaatcggatattgaatggtctaacgctagcacatatcaatgtcctgactgtctaatcggcaaaagcacgaaacatagacatgtcaaaggatcacgactaaagtaccaagaatcatatgagccttttcagtacttgcacaccgatatatttggtcctgtacatcacttaccgaaaagtgcaccttcttactttatatcgtttacagatgagaaaaccagattccaatgggtgtacccattacacgaccgtcgtgaagaatctatcctcatgttttacatcgatattagcattattaagaacaattcatgctcgcgtctagta

SEQ ID NO: 173290 - DNA, 126 bp, Saccharomyces pastorianus
gaatctgtatttctacatactaatattacgattattcctcattccgttttatatgtttcattatcctattacattatcaatccttgcacttcagcttcctctaacttcgatgacagcttctcataa

SEQ ID NO: 173291 - DNA, 756 bp, Saccharomyces pastorianus
atggaatcccaacaattatctcaacattcacccatttctcatggtagcgcctgtgcttcggttacttctaaagaagtccaaacaactcaagatccgttagacatttcagcttccaaaacagaagaatgtgagaaggttttcactcaggctaattctcaacagccaacaacacctccctcagctgctgttccagagaaccatcatcatgcctctcctcaagctgctcaagtaccattgccacaaaatgggccgtacccacagcagcgaatgatgactccccaacaagccaatatttctggttggccagtatacgggcacccatctttgatgccgtatccaccttatcaaatgtcacctatgtacgctccacctggggcacaatcacagtttacacaatatccacaatatgttggaacacatttgaacaccccgtcacctgagtcaggtaattcatttcctgattcatcctcagcaaagtctaatatgacatccactaatcaacatgtcagaccaccgccaatcttaacctcacctaatgactttctaaattgggttaaaatatacatcaaatttttacaaaattcgaatctcggtgatattattccgacagcaaccagaaaagccgtacgtcagatgactgatgacgaactcaccttcttatgtcacacctttcaactatttgctctattctcaattcttaacccagctgggtttaaagacatcttatctgttgattatacggatctcatgaaaatt

SEQ ID NO: 173292 - DNA, 282 bp, Saccharomyces pastorianus
acagcaccactaactccccaacaacagcttttacaaagacaacagcaagctttggaacagcagcagaatggtggagccataaaaagctcgaataaaagaagcaacaccaatgcaagtagtaataatagtaataatgggaataattcagataaaccgaaggccaaacgacccagaaagaacgcaaaaaagagtgatagtggcacaccagctcctaaaaagaaacgggtgactaagaagaaacaaagcgcaagtagcacacccttctccaccacaatttcatag

SEQ ID NO: 173293 - DNA, 342 bp, Saccharomyces pastorianus
atgtccttcttaccattcggagaacaaggaataatttggaatcataatcacaacaaactaaaaccatcagggtttaatgctatagtattatgcaaagatgctaatagttacggatacaaattttttgtaccatccatcaaaaaaattgtcacttccgataattacacaattccagactacgcagtggatccaatattaaggaacacacagaacatatacctagatgatccaagtagatcagatacgctcaatgaagcagaaaactcagaagcagtttcaaggttacatgatgcattggaaaattacgaagatgatcataaacaagttacactacttacagac

SEQ ID NO: 173294 - DNA, 384 bp, Saccharomyces pastorianus
atggtatctagtgcagttaaatgtggcatatgtcgcggagttgatggtaaatataaatgtcctaaatgtggcgtacgatattgctccttgaaatgctataaagatgctgcaaagcatgttcataaggaaagcgaacaacccagggctggtacagaagctaatgtggaagttgctaataacgataagatcataaacagttcactcgcaatgaataaaacattaaagacgaaggcattcgatgatatatatcaaaatagcgcagaattgcaagagctgttgaagtacaacacggtgaagttccatttggcaaaggtttatagaattttgtccagtactgttaacgatggaagttctggaaaaatgaacagcgatctgcaaaaagaa

SEQ ID NO: 173295 - DNA, 447 bp, Saccharomyces pastorianus
ttagtattaatggaaaaatggatcctttcaaaatgttgccaagattgtccaaatcttacacacatcttagaagaagcaattcttgggaccttacatgaatctttgagaaatccggttaaacaacgtttacacatctactctgttgatgaaaatgagagaattgaagaagttttaatcaatatcataattgaaacagtaatggacttgagttcgacagactcgcattattcagaaagaaattgcaagtactgtaaatcggaattacacagctcagtaaactgtagaaagaaattaaacagagaacttaggcctaccacgcctaactactcaaaaggtaattattcgcaaggttcaacccaaaaagaatacacaaaaactggcacacaacaagtcagagcttttgacaaagagaaagaaggcttcaaacaaaaacctggtcataattga

SEQ ID NO: 173296 - DNA, 126 bp, Saccharomyces pastorianus
atggaatctatatttctatataccaatattacgattattcctcattccgttttatatgtttcattatcctattacattatcaatccttgcacttcagcttcctctaacttcgatgacagcttctca

SEQ ID NO: 173297 - DNA, 87 bp, Saccharomyces pastorianus
aaaatcaactatcatctactaactagtatttacgttactagtatattatcatatacggtgttagaagatgacgcaaatgatgagaaa

SEQ ID NO: 173298 - DNA, 162 bp, Saccharomyces pastorianus
agaaacagatttttaggcacaaaggcaatgagacttagagatgaagtatcaggtaataatttatacgtatactacatcgagaccaagatgaacattgctgatgtgatgacaaaacctcttccgataaaaacatttaaactattaactaacaaatggattcat

SEQ ID NO: 173299 - DNA, 1716 bp, Saccharomyces pastorianus
tcaagccttggtgatatacctgcgaataatttatctccggctagttcgaatccccattcaacggctagcgcatctcctattaggaccaaacaagaagattcaaaaaactcctctgctctggctttggctgaaccggctacggctgaaccggctatcgaaataccaaagaaacccctctctgcctataccactgtttcgattctgtgtttgatgattgcgtttggcgggtttatctttggttgggataccggtacaatctcgggttttgtcaacctctccgacttcgtcaaaagatttggccaaaaaaacgacaagggaatttactacctgtcaaaggtgagaatggggctgattgtttcgatattcaacgttggttgcgccgtgggcgggattcttttgtcaaaagtaggtgatatatatggccgccgtattggtttaattgcggtcacgtctatctatgtcgtcggcatcctagtccaaatcacctcgacacataaatggtatcaatacttcatcggcagaatcatttctggtttaggcgtgggaggcattgccgtcctctccccaatgctaatatccgaggtgtctccgaaacagatcagaggtaaccttgtccaactgtatcaactgatggggacaatgggtattttcctgggctactgcaccaactatggtacaaaaaactatgacgactcaacccagtggagggtcggtcttggtctttgctttgcttgggccacgttcatgatcagcgggatgatgttcgtgcccgagtccccacgtttcctggtcgaagttggtaggcatgaagaagccaaacgttccatatcgaaatctaacaaggtttcagtcgatgaccctgctctattagctgaatatgacgctataagggcgggtatcgagctcgaaaagctagcaggtaacgcatcatggggtgagcttctctccacaaaaacaaaggtgttccaacgtgtgatcatgggagtcatgatccaatctttgcagcaactaaccggtgacaactacttcttctattacggcacgacaatcttcaagtctattggtctaaaagactcctttcaaacatcgatcatcattggtgtagtcaattttttctcttcattcgtggcaatatacactattgagaggtttggacgccgtacgtgcctgttgtggggtgccgctgccatgctatgctgctttattgtgttcgcttccgtcggtgtaaccaagctttggcctcagggaagtggtcatcaggatatcacatctcaaggtgctggtaactgtatgattgttttcaccatgtttttcatttttgcgttcgctaccacctgggcaggcggctgctttgttatcgtgtcagaaacctttccgcttagagtcaaatcaagaggtatggcgatcgcaacggctgcgaactggatgtggggtttcataattagtttcttcactcctttcatcaccggtgccatcaacttttactatggctatgttttcattggctgtctatgtgttgccttcttttacgtctttttctttgtcccagaaacgaagggcctgacgctagaagaagtcgacactatgtggctagaaggcattccaccatggaagtcagcttcatgggtgccaccggacagaagaaccgcagattacgatgaggaggctgtggctcatgacgatagaccagcttacaaaaggtttttctccaactga

SEQ ID NO: 173300 - DNA, 255 bp, Saccharomyces pastorianus
aaaaaaagaatggtctctagcgggatcgaaccgctgatccccgcgttattagcacggtgccttaaccaactgggccaagagaccattgttatctgttttccaccctccctccacactaccaaaccaacgtcactactgtgtgccaacaccaccgctcattatctctgtgccacaaaaatcaacttacactgtcattcgaatttccggcaaactccgactgagaaatgttcgtactacttcctttctagggtacat

SEQ ID NO: 173301 - DNA, 363 bp, Saccharomyces pastorianus
atgacttatgaagaacatgcgtatatatacaataccttccaagcatttgccccatttcatttattgccaacatgggtaaaacaaattttagaaattaattattctgacatccttacagtcctttgtaaaagtgtgtccaaaatgcaaactaacaatcaagaattaaaagattggatagctcttgccaaccttgagtacaacggaagtacatctgctgatacatttgaaattacagtcagcacgatcattcaaaggctaaaagaaaacaatatcaatgttagcgacagattggcctgtcaactaatacttaaaggtctatccggtgacttcaaatacctacgtaatcaatatcgtaccaaaacg

SEQ ID NO: 173302 - DNA, 1059 bp, Saccharomyces pastorianus
ttgagagataattatgtcattacaggggcaaacgataatatgatcagagtctatgattcgataaataaaaaatttctattgcaactatcaggtcacgatggtggggtttgggctttgaaatatgtacatgatggtatcttggtcagcggctccgccgacagaacggtgcggatctgggatatcaaaaggggttgttgtacccatgtattcaagggccacagctcaacggtgggatgtcttgatctactagaatacaaaaatacgaaatatgttgtaactggttcgagagataatactttacatgtctggaaacttccggaggtgtcttctactactgatcatcaagctgaacacgattgtccattgatatttcataccccggaggaaaatccatattttgtaggtgtcttaagaggacacactgcatctataagaactgtctctggccatggtaatattgtcatcagtgcctcttatgatagcacactgattgtgtgggatattgccgaaatgaagtgtctttatattttaagtggacacactgatcgtgtatatcctgctatctatgactatgaaagaaaaaggtgtatctctgcaggtatggattctaccataagaatttgggacttagaaaatatttcgaataatggagagtgctccaatgcaacgaattgtgcatatccatgcaccaagattcttgagtcaatgtatgccttacagggtcatacggcattggtcggtttattaaaactgtctgataaatttttagtcagtgctgctgcggacggttcgataagagtttgggatgcaaacgattactctagaaaattttcttatgatcacaccgacttcagctcgatcacggcatgttacgtttctgatagtattttggcaagcgggtctgagggccaattagatatttacaatttaagaaatgggcaattagttcattcgaatattctgggaggcgctgatcatatttggtcaattgagtttaggggcaatacgcttgttacagcagcggagaaagacgggcagagtttcttggcatttttggac

SEQ ID NO: 173303 - DNA, 1278 bp, Saccharomyces pastorianus
atgcgtagtttagaacctccgagatcgaagaaacgaattcacctgattgcagctgtaaaagcagtaaaatcaatcaaaccaatacggacaaccttaagatacgatgaggcaatcacctataataaagatattaaagaaaaggaaaaatatatcgaagcataccacaaagaagtcaaccaactattgaaaatgaatacttgggacactgacaaatattatgacagaaaagaaatagaccctaaaagagtaataaattcaatgtttatcttcaacaggaaacgtgacggtactcataaagctagatttgttgcaagaggtgatattcagcatcctgacacttacgactcaggcatgcaatccaataccgtacatcactatgcattaatgacatccctgtcacttgcattagacaataactactatattacacaattagacatatcttcggcatatttgtatgcagacatcaaagaagaattatacataagacctccaccacatttaggaatgaatgataagttgatacgtttgaagaaatcactttatggattgaaacaaagtggagcgaactggtacgaaactatcaaatcatacctgataaaacagtgtggtatggaagaagttcgtggatggtcatgcgtatttaagaatagtcaagtaacaatttgcttattcgttgatgatatgatattgttcagcaaagacttaaatgcaaataagaaaatcataacaacactcaagaaacaatacgatacaaagataataaatctgggtgaaagtgataacgaaattcagtacgacatacttggcttagaaatcaaatatcaaagaggtaaatacatgaaattaggtatggaaaactcattaactgagaaaatacccaaattaaacgtacctttgaatccaaaaggaagaaaacttagcgctccaggtcaaccaggtctttatatagaccaggatgaactagaaatagatgaagatgaatacaaagagaaggtacatgaaatgcaaaagttgattggtctagcttcatatgttggatataaatttagatttgacttactatactacatcaacacacttgctcaacatatactattcccctctaggcaagttttaggcatgtcatatgagttaatacaattcatgtgggacactagagataaacaactgatatggcacaaaaacaaacctaccgagccagataataaactagtcgcaataagtgatgcttcatatggtaaccaaccatattacaagtcacaaattggcaacata

SEQ ID NO: 173304 - DNA, 234 bp, Saccharomyces pastorianus
aacattaaaactcatgtaaaagatggaatcattcacgtaaaaaaggatgacttaattgatcatcctacatatgatttcaaagtcaatgcaatacaaccaacttcttctaaaaaggttagattgaagaccaaagttgtaagtttgaaagatgctcataaacgaatgggacatacaggagttcaacaaattgaaaactccatcaaacataatcactacgaagaaagtattgattaa

SEQ ID NO: 173305 - DNA, 705 bp, Saccharomyces pastorianus
atggataccgataatttcgaagatgtgaaggcttatacgattggtgagaacttttgtcacgctgaaactaggaaatcacctgtggttgatggtatagttagaagaaatactcatggtaaagaagttagatatattactgagttatcagacgaagagaaaaccattgctgggaaagtttccaaagctttttcacaaatgatctgtggtttcgatttgcttcgcgtttctggtaaaagttacgtcattgatgttaacggattttcttttgttaaggataacaaagcttactatgattcatgcgccaatatattgagaagtaccttcattgaagccaaaaagaagatggatatggaaaagaagaatctgcccattattcgtgaagaaaaggaacaaaagtgggtattcaaaggactggctatcattatccgtcacgcggacagaacaccaaaacagaaattcaaacattcattcacttcgcctatttttatatcgttactaaaaggtcacaaagaagaagttgtcattcggaatgtaaatgatttaaagattgttcttcaggccttaagaattgcgttagatgaaaaagcaggaaatccagctaaaattaaagtgttagcaaacgctctagaaaagaaactgaattttcccggtacgaaaatacaattgaaaccggttttaaataaagagaacgaagtggaaaaagtg

SEQ ID NO: 173306 - DNA, 177 bp, Saccharomyces pastorianus
aaatcggaattacacagctcagtaaactgtagaaagaaattaaacagagaacttaggcctaccacgcctaactactcaaaaggtaattattcgcaaggttcaacccaaaaagaatacacaaaaactggcacacaacaagtcagagcttttgacaaagagaaagaaggcttcaaacaa

SEQ ID NO: 173307 - DNA, 651 bp, Saccharomyces pastorianus
tctcatttcgaaaatggcactgccaatttttttaggttgaacgacagtcaagacgatgtgcctataacatttaaagtctcagaaagtactgctctctttggaaacgtgatcaagtccgattttttctccttttcgtccaagattgacagctctaaacgaatattgattactttcgtcatatttctgataataataggattcatgatactcatggcttggttattgattcgagttctttccaagaaacctaatgcgtctccagtgccggggaatactgctcttcccaaagacacatttgagtcatatttttcttatttgttatacgaaatcactcaatttccaccattcgtgctttctttcgtggtactgataattttgattgtgtcagctgaaaactgcaatgttcactccttttacgtcctactttttgtgtggttgtttatagcagacttcttaggtttaggttattcggtgtttagatttaatgccgggagcttcgacgacaattgtgatacaaaacttttactggaggtaataacacgtaaaccagcagtaaaagggaaggaatggagaactatcacatacaacatgaatcaatatttgtttgacaatggattatgggataccccatactatttctacagtgaaaac

SEQ ID NO: 173308 - DNA, 168 bp, Saccharomyces pastorianus
atggagacttttactgggtatctaaaaagtacttgcttccatcaaatatctccgtaccaaccatcaataatgtccatacaagtgaaagtacacgcaaatatccttatcctttcattcatcgaatgcttgcgcatgccaatgcacagacaattcgatactcacttaaaa

SEQ ID NO: 173309 - DNA, 177 bp, Saccharomyces pastorianus
tggtacaacaacagcatcctgctcaacaaacgcctattaactcttctgcaacaatgtacagtaatggagcttcccctcaattacaagctcaagctcaagctcaagcacaagcacaagcacaagcacaagcacaagcacaagcacaagcacaagcacaagcacaagcgcaagcacaag

SEQ ID NO: 173310 - DNA, 294 bp, Saccharomyces pastorianus
atgtcccaatctaacacacatgaatcgtcgcacaccagtaaatctaaagatttcagacactcagactcgtacagtgacaatgagactaatcatacaaacgtaccaatatccagtacgggtggtaccaataataaaactgttccgcagacaagcgaacaggagactgagaaaaggattatacaccgttcaccttcgatcgatacttcctcatcagaaagtaattcactacaccacgtcgttcctatcaaaacgtcagatacctggggatcctctagagtcacctgcagcatgcaa

SEQ ID NO: 173311 - DNA, 135 bp, Saccharomyces pastorianus; identical to SEQ ID NO: 173151

SEQ ID NO: 173312 - DNA, 237 bp, Saccharomyces pastorianus
ggatcccgtggcggtggtaatgtgaagtcacaactttcttcagcgtttatttcgaagttgcttggaggaggtggtggaggcggaaggaatgtatcctcatttaccgatgatggcaccatcggattatccagttcttcgatttcgtatccaggcggtggtggtggtggtggtggaagtgctaagtcgctgtcctcttcaaaaccaggaggtgggggcggtagtccactcatctttctt

SEQ ID NO: 173313 - DNA, 249 bp, Saccharomyces pastorianus
atggaatcccaacaattatctcaaaattcaccaaattttcatggtagcgcctatgcttcggttacttctaaggaagtcccatcaaatcaagatccgttagccgtttcagcttccaatttaccggaatttgatagagattccactaaggttaattctcaacaagagacaacacctgggacatcagctgttccagagaaccatcatcatgtctctcctcaacctgcttcagtaccacctccacagaatgga

SEQ ID NO: 173314 - DNA, 93 bp, Saccharomyces pastorianus
attatccacagatccacgatcattaagcaaaccttagaagaagatggtgttgtcccctccacagcaagaattatttctaaagcagaaaaataa

SEQ ID NO: 173315 - DNA, 258 bp, Saccharomyces pastorianus; identical to SEQ ID NO: 173224

SEQ ID NO: 173316 - DNA, 750 bp, Saccharomyces pastorianus
atgtctccaaaacaggataaaagcggcacaaacggtattgagaacaaactgagagcggctaataaagatgatcttaacgcgaatgtattaccttctgatattgacgttcccgatgggggatacggatggtttgttcttctggcttttgttctctacaatttctgtacctggggagcaaattctggttatgctatctatttggcatattacttagataaaaatacatttgctgggggagataaattagattatgcagctattggtgggctagcattcagtggtggacttttattcgctccagttataacatggctttaccatgtatcttcggttcaagtcattattggcttgggaattttgcttcaaggagcagctcttctactagcagctttttctacaactctctgggagctttatctaacgcagggcgtcttgatttcatttggcttagcatctatcttaatacctagcattacattgatcccgctgtggttcagaaagaaaagatcgctggcctctgggataggaactgccgggagtggcttaggaggtatcgtatttagtttagggatgcaaagtattatagaaaggaaaagtgttaaatgggcacttatagctcaatgcgttatatgcacatcacttagtgtcattgcacttacgttaactaggacaagaacgcaaagcacaagccagcacaaaaagtacaagtttaaattgctagattgggatgtactctcaaacttcggggtt

SEQ ID NO: 173317 - DNA, 645 bp, Saccharomyces pastorianus
atgttcattatggttgataacaatacgagatattgtatgacctccacacattttaacaaaagtgctgaaactatcttagcacaaatcaagaagaacattcagtatgtggaaactcaatttgacagaaaagtcagggaaatcaattcagatcgaggaactgaatttacaaatgatcagatagcggaatattttgtctcaaagggaattcatcatatattctctggtacacaagatcatgctgcaaacgggagagcagaaagatacatcagaaccataatcaccgatgcgataactctgttaagacaaagcaacttatgcattaaattttgggaatacgcagtgaattctgctaccgatgtacgcaattgtttagaaaaccatagtacaggtcaattgccacttaaggcgatatctggtcaacctgttaaagttagattcatgtccttcttacctttcggagaacaaggaataattttgaatcataaatacagcaaactaaaacaaccaggacttagcgctataatcttatgcaaagatcctgatcgtcatggatataaactttttgtaccctctactaaaaaaattgtcacttcaagtaattacaggctttcaaactacgcaaaggatccaatattaaggaacaca

SEQ ID NO: 173318 - DNA, 273 bp, Saccharomyces pastorianus
aatttcgaacctgtttttgccatttataacgagataaatgaggactttcaaggcataatatctgacgaattggaggccgaaagcatggcattttatcacactgagggctgcagaagagaaataggagaaaataataaggttaataccgttgcttatcacaaatacattgaggatctagttgctacagttgatagtgacgggttgttaactgtatataagccgtttactggaaaagttttagatggcagtagagaggttggagctgccaaaagt

SEQ ID NO: 173319 - DNA, 165 bp, Saccharomyces pastorianus
atcacgtattttaacgaatcagatgtcgactggtctagtgctgttgactatcaatgtcctgattgtttaatcggcaaaagcaccaaacacagacatatcaaaggttcgcgacatcacatacctttattcatacgaaccctttcaatacgtagcataaggacatag

SEQ ID NO: 173320 - DNA, 210 bp, Saccharomyces pastorianus
acccgtgagcacaggtatagaaagaaactagaggatgaacgtattaaacttgttgagatagccctaaagaccatcccttacttcgttcctccggatgattacaagagacccaccaaatttcaggacaagtattatatcccggtggatcagtatcctgatgtcaattttgttggtttattattaggtcctcgtggacgtacgttaagaaaa

SEQ ID NO: 173321 - DNA, 258 bp, Saccharomyces pastorianus; identical to SEQ ID NO: 173224

SEQ ID NO: 173322 - DNA, 96 bp, Saccharomyces pastorianus
cacggcactgcctcagcggtttataccctgtgccatttacccataacgcccatgattatctacattttaatatctatatctcattcggtgccccca

SEQ ID NO: 173323 - DNA, 90 bp, Saccharomyces pastorianus
tcaggtaataatttatacgtatactacatcgagaccaagatgaacattgctgatgtgatgacaaaaccttcttccgataaaaacatttaa

SEQ ID NO: 173324 - DNA, 1233 bp, Saccharomyces pastorianus
atggctaacgtagaaaaaccaaacgattgttcaggctttcccgttgttgacttgaattcgtgcttttctaacggcttcaataatgggaaacaagaaatagaaatggaaacggatgattcaccgattttattaatgtcatcatcagcttccagagaaaactcaaacactttctctgtgatacagaggacgccagatggaaagatcattaccacaaataataatatgaactccaagattaacaagcaactggacaagttgcccgaaaatttaaggcttaatggtagaacccccagtgggaaactaaggtcatttgtttgcgaggtttgtacgagagcgttcgcaagacaagagcacttgaaaagacattacagatcgcatacaaatgaaaaaccttatccctgtggcctctgcaacagatgctttactaggagggacttactgatcaggcatgctcaaaaaatccatagtggtaatttaggggaaacgatttcccataccaagaaagtgtcgagaactataactaaagctcggaaaaattctgcatcctcagtcaagtttcaaactccaacctatggtactccagataatggtaattttttgaatcgcactactgccaatacaagaagaaaagcaagccctgaagctaatgttaaacgtaagtacttgaaaaaactgacgcgcagggcttcatttagcgcacaatcagcatccagctatgctttgcccgaccaatcttcgctagaacaacatccaaaggatcgtgttaaattttctacgcctgaattagttccacttgacttgaagaatcctgaacttgactcttcgtttgacctgaatatgaatctagatttaaacctaaatctagattccaatttcaatatagcattaaaccgttctgattcttctggatcaacaatgaatttggattataaattgcccgaatcagcaaataactacacatattcttccggctcaccaacccgcgcatatgtcggcgctaacacgaattctaagaacgcttcatttagtgacgcagacttattgtcgtcgtcgtactggataaaagcctataatgatcatttgttttcagtatctgaaagtgatgaaacttctccaatgaactctgaattaaatgacactaaattaatcgtcccagattttaaatcgactatacatcatttgaaggattcaaggtcctcctcttggactgttgctatagataataatagcaat

SEQ ID NO: 173325 - DNA, 75 bp, Saccharomyces pastorianus
atggaatcccaacaattatctcaacattcacccatttctcatggtagcgcctgtgcttcgggtacttctaaagaa

SEQ ID NO: 173326 - DNA, 423 bp, Saccharomyces pastorianus
tacactaacaaaactcttcataagttctttacgaacagaggtattactgcatgctatacaaccacggcagattctagagcacacggtgtcgctgaacgattaaatcgtactttattaaacgattgtcgcacactgcttcattgcagtggtctacccaatcatctatggttctcagcagtcgaattttctactataatcagaaattcattagtctcaccaaaaaacgataaatctgcaagacaacatgcaggtttagctggactggacattactactatactacctttcggtcaaccggttatagttaacaaccataatcccgactcgaaaatacatccttcgtggcattccaaggttacgcccttacatccatcacgcaaactcttattggctaatatttatctatctttcccatccatttaa

SEQ ID NO: 173327 - DNA, 225 bp, Saccharomyces pastorianus
agttgctatgagtcatttagaacattcattctagagccattttccctaacaaaagacaacggcgcaaagttcaagtcattcaaggagtcagttctttacattgaagaggccttgcaagtctactttgcaagagtagacgaacaatggaatcagttcagttctgaaaaactattgaatgtaattgacttgcaaggcgttccactcccaagaaactatactattttt

SEQ ID NO: 173328 - DNA, 132 bp, Saccharomyces pastorianus
tccgagtacactaacaaaactcttcataagttctttacgaacagaggtattactgcatgctatacaaccacggcagattctagagcacacggtgtcgctgaacgattaaatcgtactttatacacacgatag

SEQ ID NO: 173329 - DNA, 543 bp, Saccharomyces pastorianus
atgattgatgatgattccaagaattatcacgtttggtcgtacagaaagtggtgctgtttgttcttcagtgactttcaacatgagctcgcctacgccagcgacctcatcgagacagacatttataacaacagcgcatggactcataggatgttttactgggtgaacgctaaagatgtcatttcaaaagtggaattggccgacgagctccagttcattatggacaagattcaattggttccgcagaacatcagtccgtggacctacctccgtggtttccaagagctattccatgataggctacagtgggatagcaaagtagtcgacttcgccacaaccttcatcggtgacgtattgtcacttccaattggctcaccagaggatttgcccgagatcgagtcctcatatgccctggaattcctggcatatcactggggtgcagacccttgtacccgagacaacgctgttaaggcctatagcttgctagcaatcaaatacgatcctattagaaaaaacttgtggcaccacaaaataaataatctgaac

SEQ ID NO: 173330 - DNA, 150 bp, Saccharomyces pastorianus
ccggaatttgatagagattccactaaggttattctcaacaagagacaacacctgggacatcagctgttccagagaaccatcatcatgtctctcctcaacctgcttcagtaccacctccacagaatggacagtaccaacagcacggactga

SEQ ID NO: 173331 - DNA, 306 bp, Saccharomyces pastorianus
atggacaaatttccatcagaatataaagaatcattaaaagacccatatcattttcgattccctagggcggaatcttaccatgacttagccgttcgtatggaacctttactattagaaatggagcatacgagcaaggacattctcatcattgcacatgagtcaacattaagagtattatatggctatttaatggcttgcacctgcgtagagttaccaaatctaaatttcacaagagacaaattagttgaaatttcattcagccctttctgtaatactgtagagttactgaacattcctttaactagc

SEQ ID NO: 173332 - DNA, 1266 bp, Saccharomyces pastorianus
atgtttttgttactacacgtagatgagctatcgattttttctgcataccaagcaagtttacctggcgaaaagaaagtcgacacagagcggctgaagcgtgatctatgcccacgtaaacccattgagataaagtacttttcacagatatgtaacgatatgatgaacaaaaaggaccgattgggtgatattttgcatattatcttgcgagcatgtgcactcaatttcggggcaggtccccgtggtggcgctggtgacgaagaggatcgatctattgcgaatgaacaatccattattccctctgtggacgagcatggcttaaaagtatgtaagttgcgcagtcctaacactccacgaagactcagaaaaacactagatgccgtgaaagctttattggtgtcctcttgtgcttgcacagcaaaggatttagatatatttgatgacaacaacggcgttgcgatgtggaaatggatcaaaactctgtaccacgaagtagcacaggaaactgcgctgaaggactcttatagaataactttggtaccttcttctgatggtatatcagtatgtggaaaactgtttaatcgcgagtatgtccgcggctattactttgcatgcaaggctcagtttgataacctttgggaagaattgaacgactgcttttatatgcctacagtggttgatattgccagtctcattctgcgtaatcgagacgttttgttcagagagccaaagcgaggaattgacgagtatctggagaacgattctttccttcaaatgatacctgttaaatatcgtgaaattgtgctgccaaagttgagaagagatgctaacaaaatgaccgcggctcttaaaaataaagtggctgttgcaattgacgagcttacggtgccacttacgtggatgatccattttgccgtaggatacccttaccgttatccagaacttcagctactcgcttttgccggtcctcggcgcaacgtatacgtcgacgataaaacaagacgcatccaactgtacactgatcagaacaaaaacggttcatcggagcctcgactaaagacacttgacggactcacttcagattacttgttttattttgtcactgtgctaaggcaaatgcaaatatgtgcgcttggtaacagttatgacgcctttaaacatgagccttggatggatgtcgtgggatttgaggatccagatcaagcaacaaatcgagatatttcgaggatagttttgtattcccacttgtttctgaataccgcgaagggc

SEQ ID NO: 173333 - DNA, 249 bp, Saccharomyces pastorianus
ttatactcctgtggtgaagatggttgcgttaaaatttgggaaaacaaacaggggccgttagatattccagaaaatttttgggattactctaaaaaaatgaacgtcttaggagatgacgacagagaaggttccattaatttagacgaacctcttattattcaaaaagaatcggtttccacgaggccaaggaaggagaaacacaagaaagccaagaaacattccacgaaaagtcgtttcaaaccatactag

SEQ ID NO: 173334 - DNA, 150 bp, Saccharomyces pastorianus
aagagagactataaactaataaaaatcaatggtaaagacaatatagcagatttactcacaaaaccagtatcaatttctgattttgatagatttattaaagtattaaataaccagataacaccacaggatattttggcctcaacggactat

SEQ ID NO: 173335 - DNA, 87 bp, Saccharomyces pastorianus
atgcaattctctactgtcgcctctatcgccgctgtcgccgccgttgcctctgccgctgctaacgtcaccactgctactgtcagtgaa

SEQ ID NO: 173336 - DNA, 378 bp, Saccharomyces pastorianus
gtcgaagaagacgtaagaagtagagggaaaaattctaagatattttcccctttccggattattggtaatgttagcaatggtgttccttttgctactggtacattgggatctaccttttacattgtaacgtgtgttggtaaaacatttcagatatatgatgcgaataccttacatttactttttgtttccgagaaagaaacaccatcctcaattgtagcattatcagcacactttcactacgtctacgcagcatatgaaaacaaggttggtatttacaagaggggtattgaggaacatttgcttgagctagaaactgatgcaaatgtcgaacatttgtgcatattcggagatatctttgcgctacctgcaggcatgcag

SEQ ID NO: 173337 - DNA, 168 bp, Saccharomyces pastorianus
caaatgaaagtacacgcaagtatccttatcctttcattcatcgaatgcttgcgcatgccaatgcacagacaattcgatactcacttaaaaataacaccatcacgtattttaacgaatcagatgtcgactggtctagtgctgttgactatcaatgtcctgattgtttaa

SEQ ID NO: 173338 - DNA, 138 bp, Saccharomyces pastorianus
attatttctccctctgttttatgtgtttcattatcctattacgttatcaatccttgcatttcagcttcgtctaacttcgatgacagtttctcatatcttatgtcatcgtttaacaccgtgtatgataatatattggta

SEQ ID NO: 173339 - DNA, 1164 bp, Saccharomyces pastorianus
atggttgacagaaaatgtaaaaaactggaatcattaagaactgaactcaacaaattagttttaatatgtatcataccaaagtgttacgacaataatgaaacaagagattatattttgaaagaaaatctattggacgttttacatgaatccttgaaaatgccagtgtacctgcgattattcagcattcaaaatgaacaaaaattaagagttgaagaatatatgattaatatcattattcaaacaataaacgaattaggtgtaaatgttacagatcaatatgaaatgcattgtaagtactgtaaatcagaattccacagctcgataaactgcagaatgaaattagacaaaaaacacaggtctaacacgaatagctacttgaaaggtaatgtttcacaaggtacaaccaaaaaaaatacaccaaaactggtacaaaaccagccagaacctttgaaaagacaacaaaagaagaggaacaaaaagggttcagacaaaaatctggtcattattggcaccggttcaaacatcagtattacgaataataagaatttattacacaattatgaagacaaccaagaaaatacacaattatttggtattggtaaaactaacccagtttctgttaaaggttcaggatacatacaaataaaaagtaacacaaatgacaattacttattggctcattatgttcctgaagaagaaactaccattatcagtggttatgagttggctaaagaaaccgatctggttttaaccaaaaattatttgaccctgggaaacaaggacatgaacatcaaaactcaggtaaaaaatggaattatttacgtaaaaataaatgacctaattgatcatcctgcgtatgatttcaaaaggaatacaatacaaccaaaatcttccccaaaaactagattgatgcccaaaattataagcttagaagatgctcataaacgaatgggacatacaggagtgcaacagattgaaaactccattaaacacagtcaatacgaagaaagtattgatttgattaaagaaccaaatgaattttggtgtgaaacttgtaaagtttcaaaaatcacgagaagaaaccattatgctggatctatgaacgaacacggtatcgatcatgaacctggttcatcgtggtgcatggatatacttggtccagta

SEQ ID NO: 173340 - DNA, 360 bp, Saccharomyces pastorianus
gtcaaattaacttcaatcgctgctggtgttgccgccatcgctgctactgcttccgcaaccaccactctagctcaatctgacgaaagagtcaacttggtggaattgggtgtctacgtctctgatataagagctcacttggcccaatactacatgttccaagccgcccacccaacggaaacctacccagtcgaagttgctgaagccgttttcaactacggtgacttcaccaccatgttgactggtattgccccagaccaagtgaccagaatgatcaccggtgttccatggtactccagcagattaaagccagccatctctagtgctctatccaaggacggtatctacactatcgcaaattag

SEQ ID NO: 173341 - DNA, 753 bp, Saccharomyces pastorianus
tcatcgtggtgcatggatatctttggtccagtatcaaactcgaactcggatacgaaaagatacatgtttattatggttgataacaatacaagatattgtatgacctccacacatcttaataaaaatgctgaaactatcttggcacagatcaagaagaacattcaatatgtggaaactcaatttgacagaaaagtcagaaaaatcaattcagatcaaggaactgaattcacaaatgatcagatagcaaaatattttgtttcaaaaggaatccatcatattttttccactacacaagatcatgctgccaacggaagagcagaaagatacatcagaaccatcgttactgatgcaacaaccttgttaaaacatagtaacttgcgtatcaaattttgggaatatgcagtaacatctgccaccaatgtacgcaattgtttagaaaacaagaccacaggtcaactaccgctaaaggcgatatctagtcaacctgttaaagtgagattcatgtccttcttaccattcggagaacaaggaataatttggaatcataatcacaacaaactaaaaccatcagggtttaatgctatagtattatgcaaagatgctaatagttacggatacaaattttttgtaccatccatcaaaaaaattgtcacttccgataattacacaattccagactacgcagtggatccaatattaaggaacacacagaacatatacctagaagatccaagtagatcagatcgctcatga

SEQ ID NO: 173342 - DNA, 429 bp, Saccharomyces pastorianus
aggatactgatctataagaaggaacttcaaaagttagtattaatggaaaaatggatcctttcaaaatgttgccaagattgtccaaatcttacacacatcttagaagaagcaattcttgggaccttacatgaatctttgagaaatccggttaaacaacgtttacacatctactctgttgatgaaaatgagagaattgaagaagttttaatcaatatcataattgaaacagtaatggacttgagttcgacagactcgcattattcagaaagaaattgcaagtactgtaaatcggaattacacagctcagtaaactgtagaaagaaattaaacagagaacttaggcctaccacgcctaactactcaaaaggtaattattcgcaaggttcaacccaaaaagaatacacaaaaactggcacacaacaagtcaga

SEQ ID NO: 173343 - DNA, 84 bp, Saccharomyces pastorianus
atgtgcactataataatggaagttttgtctcagatgcctcacagccttgaaatggtagacgagcttgtgcgagtgaccatatcg

SEQ ID NO: 173344 - DNA, 951 bp, Saccharomyces pastorianus
atgccaaatgtgctttctgatgatgaagagctccttaatggactaggaagtgagattatgaaaccctctagacaaggtaaccatatggcaaggacggtcaaaaggtgggtaaataaagaacgtgctaccacagccgatctgaaaaatgttaatattgatggagttcatggaccggtaaataccgaaagttatatatcaccaggacagctttactccactgactcgggcaatttatttcatgctggaagaatccttgtcgttctagtcggtcttccagcaacatcaaagacactattgtcagtagcgattacaagatatacaagatggttaggagttaggacgaaatcgttccatttttcagaatataaagaatcagctaaaaatataccctcagactatttttgcgtagtgccaacgtcaaaagaaggtgtagcgtttgttgaaaagcttcgcatgcagatgttgaatgatatactggcatttttcaacgacttgtcaggtcagctggccatttatgatgccctaaacatccgtaaaattgacagaaagaatttggagacaacgttttctgaaattggagttaaagtactcttcatagaatcaatcgtgtctgatcaagaaatcatgaatagaaacatagctcttgcactggagtcgaacgattacaagggactttcaactgatgaagccattgacgaatatatgagacgtttatcagtgaacgaaccatactatgaaatgatgacacatgacgaagaattatcgtacattaaatatataaatttgggaaagcagataattgtgaaagataacatacatggttatttggtcaacaaaatagtatttttcttaatgaatttgaggcagaaaaagaggtgtgtatattttgctcgctgtggcaccagcgataaagacaactacatacatgatgaggaactaaacgaggaggga

SEQ ID NO: 173345 - DNA, 354 bp, Saccharomyces pastorianus
cttggacatgctaacttccgaagtattcagaagtctcttaagaagaatgcagttacatatttgaaggaatcggatattgaatggtctaacgctagcacatatcaatgtcctgactgtctaatcggcaaaagcacgaaacatagacatgtcaaaggatcacgactaaagtaccaagaatcatatgagccttttcagtacttgcacaccgatatatttggtcctgtacatcacttaccgaaaagtgcaccttcttactttatatcgtttacagatgagaaaaccagattccaatgggtgtacccattacacgaccgtcgtgaagaatctatcctcatgttttacctcgatttagca

SEQ ID NO: 173346 - DNA, 1653 bp, Saccharomyces pastorianus
atgaagggtatcgcctccaagttggagtacatcaaggagcttggcgccgatgccatttggatctcgccattttacgactcgccacaagatgatatgggttacgatattgccaactacgaaaaggtctggccaacctacggtacgaacgaggactgctttgccttgatcgaaaagacacataagctcggtatgaaatttatcactgacttggtcatcaatcactgttccagcgaacatgaatggttcaaagagagcagatcctcaaaaaccaatccaaaacgtgactggttcttctggagacctcctaagggttatgacgccgaaggcaagccaattcctccaaacaattggaggtcttacttcggtggttctgcatggacgttcgatgaaaagacacaagagttttacttgcgtttgttttgctccacccaacctgatttgaattgggagaatgaggactgtagaaaggcaatctacgaaagtgccgttggatactggttagaccatggtgtagacggctttagaattgatgtgggaagcttgtactccaaggttgctggtctaccggatgctcctgtgattgacgaaaactcaaagtggcaacccagtgattctttcacaatgaacggaccacgtatccatgagtttcatcaagaaatgaacaagttcatcagaaacagagtgaaggatggcagagaaattatgacagttggtgaaatgcaacatgctactgatgagaccaagaggttgtatacaagtgcatcaagacacgaacttagtgagttattcaacttttcccacactgatgtcgggacttcgcccaagttccgtcaaaatttgatcccatatgaactaaaggattggaaggttgcccttgctgaacttttcagatacgttaacggaactgattgttggtcaacaatttatctggaaaatcacgaccaacctcgttcaattaccagatttggtgacgattctcccaagaaccgtgttatttctggtaagttactctctgtgttgctaagtgccttgaccggtactctatatgtgtatcagggacaagagcttggccaaatcaatttcaagaactggcctgttgaaaagtacgaggatgtcgaaatcagaaacaactacaatgcaattaaagaagagcatggagaaaactcagaggagatgaaaaagtttcttgaaggaattgccttggtttctagagatcatgcgaggactcccatgccttggacacctaatgaaccgaatgccggcttttccggccctaataccaagccttggttttatttgaatgagtcctttagacagggtataaatgtagaggaggaacagaaaaattctgattctgttctagcattctggaaaaaggctttggaatttagaaaaaatcacaaagacatcgcagtttacggttttgatttcaagtttattgacttggataacaaaaagctattcagtttcacgaaaaggtataacaacaaaactttgtttgctgctttgaattttagctctgatgcgacggattttaagattccaaatgatggttcatcgttcaaattagagtttggaaactatccaaagaatgaagtagatgcctcttctagaacattgaagccatgggaaggaagaatttacattaatgaa

SEQ ID NO: 173347 - DNA, 204 bp, Saccharomyces pastorianus
atggaatcccaacaattatctcaaaattcacccaatcttcatggtagcgcctatgcttcggttacttctaaggaagtcccatcaaatcaagatccgttagccgtttcagcttccaatttaccggaatttgatagagattccactaaggttaattctcaacaagagacaacacctgggacatcagctgttccagagaaccatcat

SEQ ID NO: 173348 - DNA, 192 bp, Saccharomyces pastorianus
gaggacgaagaacgagaaagagaagatcaacgagagtttaattacaagattgataacgatacgcaggacacaattttggcgaaattcagttcagatgatgaaggtgactttctgacaggatttgaagaattagagggtgagcagttgatgaaacgatttcttcgaacgggggatcctctagagtcacctcag

SEQ ID NO: 173349 - DNA, 585 bp, Saccharomyces pastorianus
atgactaaaacaggagaaacaacagctaccagcttgaatgctaaaaccctcaagagtttccaatcgactctaccggtaccaacttaccccagagaaggtgtcaaacaaggtatcgtccatctaggtgttggtgcattccaccgttcccatttggctgtctttatgcagcgtctaatgcaggaacacaacgtcaaggactggtccatctgtggggttggtttaatgaaagcggacgctcttatgcgtgatgccatggacgcccaagactgcctttacacgcttgtggagcgcggtatcaaggacaccaacgcctacattgttggttccattacggcctacatgtacgcaccagatgaaccaaaggctgtcattgcaaaaatggcccatctggacacacacatcgtgtctcttaccgtcacagagaacggttactatcacaatgaggccacacactcgttgatggccgatgatgccgcaattgtcaacgatttgaatcacccagaaagaccggacactatttacggatatctgtatgaagctttgttgctacgttacaaggcaggtggtcatcctttcactatcatg

SEQ ID NO: 173350 - DNA, 774 bp, Saccharomyces pastorianus
ttgagtgatgagatcaagaaccacgtcgaaaaatcaattgaatccatatctggaaagatatccaacaaggagactcctcgactacaggaaaacgacagtaacagatctaaagtatataaaactttgaggatcgggctccaggatcattggaagctaggcttgggaatttctgccacctccctgtgcttataccttgggtataggaccttttttaaactgccacctaatttacctgaagcagaatctcaagtggtattaatactgggcgatatgaatgatcctatcataaggaatcaagtgatggatttatatcgcagacggtttacagtatatatttgtactgaaaatgcagacgtctataagaagcacgaagaagatcaggatttcatatattacattgatcccacctgcgaaaaagacttcgagggtttttttgttgatgtaccaaggctagcatccatattgtttatgccaaggttatcatatcatccatccggagtaatttcatgtgactcattggaatctgaaattcattcaagtatatttgtgtattatcaagcattattaagcattataccccatttgaagagaaaaacccaactaattatgttcaatccatctttgactgcggacctgaacttagtccatcatagtacagaaattataacgtctggaataatcgactcactatttaaattttcaaggatatcaaaggttaaatgtttccacaatcaagcgacctgcaggcatggcagcttggcactgccgtccgtt

SEQ ID NO: 173351 - DNA, 192 bp, Saccharomyces pastorianus
aggcctgggggagaaaacgataagataaggtggtactgttctcattgtcgccaagtggtccacgagagtgaactgcaaatgttagacttaggtacccaagtgaaagaagccattttagattttgaaaatgatgtcgagaagaggacatgtttccattgcaagacgttaaactacgcacgccctcaatctaat

SEQ ID NO: 173352 - DNA, 660 bp, Saccharomyces pastorianus
atgcaaaagttgattggtctagcttcatatgttggatataaatttagatttgacttactatactacatcaacacacttgctcaacatatactattcccctctaggcaagttttagacatgacatatgagttaatacaattcatgtgggacactagagataaacaactgatatggcacaaaaacaaacctaccgagccagataataaactagtcgcaataagtgatgcttcatatggtaaccaaccatattacaagtcacaaattggcaacatatatttacttaatggaaaggtaattggaggaaagtccaccaaggcttcattaacatgtacttcaactacggaagcagaaatacacgcgataagtgaatctgtcccattattaaataacctcagttaccttgtacaagaacttaacaagaaaccaattactaaaggattactaaccgacagtaaatctacaatcagtataattatatccaataatgaagagaaatttagaaacagattttttggtactaaagcaatgagattgagagatgaagtatcaggaaatcatctgcacgtatgctatatcgaaaccaaaaagaatattgcagacgtaatgaccaaacctcttccgataaaaacattcaaactattaacaaacaaatggattcat

SEQ ID NO: 173353 - DNA, 402 bp, Saccharomyces pastorianus
aacataaccaatgaacagagacttccgtctggacccaaagatgacgtagatacgttagcacttaccagtgctcaaaatcaagctaatagtttgaggaagctagatacagatgcgaacgctaaagctttgccatccatcacagacataccagtcagtgatgattctgatataaaacgacaagttggctctggttttggttcaaatccgcttcatataaaagattccgaggcctttccacattcatctattgaagccctaaaagagggtatggacaaagtcacaaaacaatgcaacgatttgaagacggctttgctttccaaagacacttccctcactgattctgtgcaggatttgtttaactcattaaaagtttatcacacaaccaatcagtttggaaaatag

SEQ ID NO: 173354 - DNA, 135 bp, Saccharomyces pastorianus; identical to SEQ ID NO: 173221

SEQ ID NO: 173355 - DNA, 84 bp, Saccharomyces pastorianus
aatgcacgtgtcgctttcctcatcactgctgcaatactttctgcacctgtcactgctattgctctcctggaagctagacggtaa

SEQ ID NO: 173356 - DNA, 159 bp, Saccharomyces pastorianus
gaatcccaacaattatctcaaaattcaccaaatcatcatggtagcgcctatgcttcggttacttctaaggaagtcccatcaaatcaagatccgttagccgtttcagcttccaatttaccggaatttgatagagattccactaaggttaattctcaataa

SEQ ID NO: 173357 - DNA, 1134 bp, Saccharomyces pastorianus
atgtgtggttcctttgcctacgcaggatctgtgtttacaagtgcttcaactacattgtctgttgcgacagaagttgttggtatgtacgcgttaatgaatcctaattttactccaaaaaggtggcatgtatttgtttgttttgaattgctacatctgtttttaatgctgttcaactgttatggtaaatcattaccactaatttcatcttcatccctatacatatcgcttttgtcctttttcacaattacaataacagtcttggcatgctcccatggcaaatttaacgacgcaaagtttgtttttgctacattctataacgagactggctggaaaaatggtggcattgcctttatcgttggtttgattaacccagcttggtcattttcatgtcttgattgtgcaactcatatggcttttgaagtagagaaaccggaaagagtcattcctattgctatcatgggcacagttgcaatcggttttgttacttcattgtgctatgttatcgctatgtttttctctatcaaagatctggatgctgtcttgtcatccacgacaggggcgccaattctggacatctacaatcaagctttgaataataaatcaggtgcgattttccttggttgcttggttttgtttacatcttttggttgtgtcattgcctgtcacacctggcaagcaagattgtgttggtcattttctagggacaatggtctcccattatcccgcttgtggtcacaagtcaatccacatactggtgtgcctttgaatgctcatctgatgtcatgtgcttggatatccttgattggtctgctttacttggcctctagtacagctttccagtccttaataacaggttgtattgcatttttgttattatcctacgttattcccgtaatatgtttacttgccaagaaacgtgacatcgcacatggaccattctggctcggcaaatttggcttcttttcaaacattgttctattgggttggactgttttttctgtagtatttttttccttcccaccagttttacctgtaacaaaggataacatgaactatgtttgtgtggtcattgtcggttatagtgcgtattcagttctttattggaggtacaagggtaagaacgaatttcatgcc

SEQ ID NO: 173358 - DNA, 258 bp, Saccharomyces pastorianus
atgattacggattctaaaccagctattgaaggcttaaaccggagctatctgcaacccaaacagaagttcacatggataaaaaccgaaataattaaagagaaactaaaagagaagactataaaactaataaaaatcaatggtaaagacaatatagcagatttactcacaaaaccagtatcaatttctgattttgatagatttattaaagtattaaataaccagataacaccacaggatattttggcctcaacggactat

SEQ ID NO: 173359 - DNA, 168 bp, Saccharomyces pastorianus
ttccttatcagatttatccaaaccgtaggcaatggcggctgcggttggttcattaacaattctcaaaacgttcaaaccagcgatggtaccagcatccttggtggcttgtctttgcgcgtcattgaaataagcaggaacagtaacaacagcatgggtaaccttagtgcc

SEQ ID NO: 173360 - DNA, 99 bp, Saccharomyces pastorianus
ttactcacaataccagtatcgatttctgactttgatagatttatcaaagtattgcaacacaagataacaccacaggatattttggcctcaacggactag

SEQ ID NO: 173361 - DNA, 177 bp, Saccharomyces pastorianus
catgctcttcatggtagcgcctatgcttcggttacttctaaggaagtcccatcaaatcaagatccgttagccgtttcagcttccaatttaccggaatttgatagagattccactaaggttaattctcaccaagagacaaccctgggacatcagctgttccagagaccatcatcatgt

SEQ ID NO: 173362 - DNA, 375 bp, Saccharomyces pastorianus
atgcgccaaactttagcaccatatgccattttatcacagttctacgaagagagcgacagtggacgttgggaccaagcactatatctattgcttttattgattgaattcccatttttaccaaaacactatttgattttacttgtggcgaagtttctgtatccaatctttctcttagatgataaaaggccaatagatgaagagtcagcggcgaaaataattgaagtcatagaagccaaatgggacgaaactgatgagaggactttgaacttgtatgaaactattattgaaacagaaaagagtctacccaatagtaccttggagcttttgaagagtgtaagaaaaaaactgaattttaagttatgtcaaacgttcatg

SEQ ID NO: 173363 - DNA, 219 bp, Saccharomyces pastorianus
atggacttgagttcgacagactcgcattattcagaaagaaattgcaagtactgtaaatcggaattacacagctcagtaaactgtagaaagaaattaaacagagaacttaggcctaccacgcctaactactcaaaaggtaattattcgcaaggttcaacccaaaaagaatacacaaaaactggcacacaacaagtcagagcttttgacaaagcgaaagaa

SEQ ID NO: 173364 - DNA, 1476 bp, Saccharomyces pastorianus
tttactaatcagaagaaagtatcacatctacagtcattaatgaacactaaaaggagtgaacagcccacggaatttgccaaaaaacataggtttaaagatacgcttgcattgttcctggtttttttgagttttaaccacttcacttccctatgtttattggtttcctttattgttgctaccaaatgcaaagattttctggcaaattgttttattatacttttcctatcgaaaaaaccttcccgccatatcagtgaagtggcgcacatagatataagtacttccaaagtgaccaatggtagttcaaaccgaaaatctaattcacgattttttggcaattcaaaaaatagcttcgtcattccgatccccgtattaatttgtgaaattttatttgcaatgttactaaagatttacggtggcaattattttgttaagccaataaaaaatcaggcaatttctattattgcctcatttttgatcaatgatccaagcgattgcttaagctatgcaacttcatgctcagtattgtatgctgtgtcaactaacacttttcaaagagtgtcacacttctttgacactatacagttatttgatatgcctttacgaggaaccagccaatcaattaaattattcactgtttttcgcaagtattcacagtttttcaaaaagcttttctctctatttttgccaatgcctttcaagatgcttggcaaacattcagacagtatgatttattatctatcctttcacatcctttttttctcatttgcttcaagtttattacaccctcatagacaaacagcggaaaacaagccattgaaaaaaagtttcaattcaactaaaccagatgtagcccgtgttcaaggtctgcaaaagatgagaatttcttcttcttcttccatttctgccgattcgaacactttagaggaccaaagtcctatgataccgaacgatccaggtggacttagcagcagcaatcaaactatccatccatcccaacaaaataactcgccagttcccctatcatcacacagtaatattttgaaccctgccgcctcttatcctactgatgctacttctagttttccctatttcacttctatggtcaaggaatataagtcatatcagccatcggtaatctctgctgaaggaagcaattctcaagccgttactactactaccagtacaacaacctctcctacaacgttcaacttttctggtgataacactagtttgtcaaatgaaatctctctatctgattcctcgaatggaaattcgaaaaaggattctgatttcttttccccttccaatgacaagtatactaaccaactgtttgaactgaatgttgattttgggaacatgttttcttctagcaaattatcttcagacatatctgttacatcaaacttggaaaattttatccgtcttctattcagaagaaagaatcaacacttgattgcacctcttggtctatggtag

SEQ ID NO: 173365 - DNA, 135 bp, Saccharomyces pastorianus
agacttagagatgaagtatcaggtaataatttatacgtatactacatcgagaccaagaagaacattgctgatgtgatgacaaaacctcttccgataaaaacatttaaactattaactaacaaatggattcattag

SEQ ID NO: 173366 - DNA, 510 bp, Saccharomyces pastorianus
caagtccatgactcctacagattatccgtttcaacagcctattcagattgtgaagatacagtcgtcagtacagttgcggtggacggctacttttacatgttcaatccaaaagacattgctacaacaaagaccacggtgtccagattcaggggaagtaatttggttccagttgtttattgtcctcaaatctactcgtatatctgctcagatggtgcaagttccttaagggctgtgccgcctagggctgctttcgcagttcatcctttagtgtcgcgagagacgactataacggccattggggtgtcaagattacatccaatggtccttgctggatcagcagatggaagtcttatcataaccaacgcagctaggcgccttttgcatggcattaaaaacagttcagcaactcaaaagtcattaaggctttggaaatgggattatagcataaaagatgacaaatatagaattgatagttcttatgaagtgtatccgctgacggtcaacgatgtt

SEQ ID NO: 173367 - DNA, 135 bp, Saccharomyces pastorianus; identical to SEQ ID NO: 173151

SEQ ID NO: 173368 - DNA, 243 bp, Saccharomyces pastorianus
atgaaaaattggcaaattataagtgggctccatgcaaaggatctatctctaatggaaagatggtgtctgggtaagctgaattatgagctggccattccatatgacgagtttttgctatgggaaacgaacactttaatgaaagcgaaattgcgcgtcggaactcccgccaacgctccggtgaagagacccagagaatcagacaatgattatgatgcaaattcttggaaacatattaaatcttgt

SEQ ID NO: 173369 - DNA, 75 bp, Saccharomyces pastorianus
aacattgctgatgtgatgaccaaacctcttccgataaaaacatttgaactattaactaacaaatggattcattag

SEQ ID NO: 173370 - DNA, 285 bp, Saccharomyces pastorianus
atggccaatcgtggtaaaaacaccaacggatcccaatttttcatcaccaccgtcccatgcccatggttggacggtaagcacgttgtctttggagaagtcttggatggtatggacgtagttcactacattgaaaacgttaagaccgacagtagaaatatgcctgtaaaggaagttattattgtggaaagtggtgaactggaaactgttcctttggacaataaagacgccgccaagctacaggaagagatcaaagcggaagctagcgaagcagcccacgatgaactc

SEQ ID NO: 173371 - DNA, 258 bp, Saccharomyces pastorianus
cgagttctcatcggaacgaaattagtgactgaaggaattgacattaagcaattgatgatggtgatcatgcttgataatagacttaatattattgagctcattcaaggcgtagggagactaagagatgggggcctctgttatctattatctagaaaaaacagttgggcggcaaggaatcgtaagggtgaattaccaccgattaaggaaggctgtataaccgaacaggtacgcgagttctatggacttgaatcaaagtaa

SEQ ID NO: 173372 - DNA, 534 bp, Saccharomyces pastorianus
  modified_base (503)..(503): a, c, g, t, unknown, or other
  modified_base (510)..(510): a, c, g, t, unknown, or other
  modified_base (517)..(517): a, c, g, t, unknown, or other
  modified_base (528)..(528): a, c, g, t, unknown, or other
atggatttgatctataacaaaaaacttggtacggttgatttaacattaaaatcattcatagaaaaaatgggtgagaagtataaaaaggaattggataaggttagaaaaagttcaattccacatacatcaatatacagggttgatcccaaaaagggagaactaaaaatgaccgaaaaagaatataaagacggtgtgttgaaattacaacaactactaggagaacttaactatgttaggtacaagtgtagatacgatgttgaatttgcggttaagaaagtagctaggctagtaaactttcctcatgaacaggtattttacatgatttataaaatcatacaatatttagtacaacatacgaatatcggaatacactatgacagagacctcaacaaagataagaaaatcactactataaccgatgcatcagttggaacagaataccaatgcacaatcaagaattggagttataatttggtatggaaagaatatttcaatgtatactncaataanagcaccnacagtgcgtantcctca

SEQ ID NO: 173373 - DNA, 171 bp, Saccharomyces pastorianus
atgctgggttacgttgttgttttatattccttctctagtattgcggtcagcagaggccaaatcctatatgcattatatgtggttagcattgactccttaatagaacggccagttatcaatcaaattgcctataagcatggatcactagcggctagtattgtattgcatttg

SEQ ID NO: 173374 - DNA, 240 bp, Saccharomyces pastorianus
  modified_base (41)..(41): a, c, g, t, unknown, or other
ccagctattgaaggcttaaaccggagctatctgcaacccanacagaagttcacatggataaaaaccgaaataattaaagagaaactaaaagagaagactataaaactaataaaaatcaatggtaaagaaaatatagcagatttactcacaaaaccagtatcgatttctgactttgatagatttatcaaagtattgaaaaacaagataacaccacaggatattttggcctcaacggactat

SEQ ID NO: 173375 - DNA, 357 bp, Saccharomyces pastorianus
tccagtagtgtgatcgacgaatccttgtcctccaatttattttcttcttcttcttcttcctttcgttcttctccgtcttttccttcctcttcgtcctcctcttcatcttcctcttcatcttcctctatcgcttcatatccgcttaccgcataccaagtaatgtcatcgagtaatcccttgtctccttcactgctctcattttctttgtcatcgctccggtcaatcttcaataccaacactggagaatcctgttcttctaatcggagaagcttaccggaaacactgaaaaacagcttcttaatatggttcagatctatggcaagttcctgtggtgtgtcttctttgtcatcatcctca

SEQ ID NO: 173376 - DNA, 177 bp, Saccharomyces pastorianus
cattctcttcatggtagcgcctatgcttcggttacttctaaggaagtcccatcaaatcaagatccgttagccgtttcagcttccaatttaccggaatttgatagagattccactaaggttaattctcaacaagagacacacctgggacatcagctgttccagagagggatcctctag

SEQ ID NO: 173377 - DNA, 216 bp, Saccharomyces pastorianus
gagtattcgttggagaggaaaatcctggaaaagagttatactaagcctacttcaacagagaatcgcaacggcgatgaaaatcaacttgatggagatagtcattctgaaccatcgctgtcatcatcgccagtaaggacgaagaaaagtgtaaagttcgcaaatgatattaaagacgtcaaggacctgcaggcatgcaagcttgcactgccgtcgttt

SEQ ID NO: 173378 - DNA, 492 bp, Saccharomyces pastorianus
atgtacagcaacgaggggcaaaactttgtcgaatttgaccctagggtccgttactctcggtggaagaagttgctctacaatgcagctatcaacacatccacggcacttgtggggctagacgttccgcgttgcctggagtttggggttaacaagaagagcacagaaattgaagtgttccaccctgccatgagggagatcatcgccattgcggcgagtgaaggcatcattatcgaagaggagttcataacgatgtttacagagattaccaggaaaaaggtgttcaagccatccatgtgcgtggactgcgagaagggccaattgatggagctagaagtcatcctaggcaaccccataagaatcgcgaaaagaaacggcgtcgctacacccactctttctatcttatacaacctacttgtgctagtgcaggccaaactaaaggagcggaaaggcctattgaagttcgacgaaaaaactgccactcttgtggacgag

SEQ ID NO: 173379 - DNA, 342 bp, Saccharomyces pastorianus
caattacatcaaaatccacattctctacatggtagcgcctatgcttcggttacttctaaggaagtcccatcaaatcaagatccgttagccgtttcagcttccaatttaccggaatttgatagagattccactaaggttaattctcaacaagagacaacacctgggacatcagctgttccagagaaccatcatcatgtctctcctcaacctgcttcagtaccacctccacagaatggacagtaccaacagcacggcatgatgaccccaaacaaagctatggcctctaactgggcacattaccaacaaccatctaacctgcaggcatgcagctgcatgccgtcg

SEQ ID NO: 173380 - DNA, 225 bp, Saccharomyces pastorianus
tatggtttaaacgaagttgatgattttgcttctaaaagggaaaaggttttacttggacaatccacctttggcgacagtaataaagatgatgaccattctttgttagaagacgaagatgaggaagaagtcttagccatggatgaagatgatgagtcaatagatgaaagagaagatgaggaagaagaagaggaagaggaactagatggtgctgcagcctatagaaaa

SEQ ID NO: 173381 - DNA, 171 bp, Saccharomyces pastorianus
cttgatgaggccgataaaattaaaaacacggaaatcgcgaaggagctaagtcttcctccagtaaaactgcattgttccatgcttgcagaagacgctatcaaggcggcaatcaaggactacaaaacaaagaggaacccctccgtttgcattgaaagagaggtgatacgataa

SEQ ID NO: 173382 - DNA, 120 bp, Saccharomyces pastorianus
atgggtatgaaacatgttcaagaatttataatggaacccaaaggttcagtctttgtagttcgagcgacattgcgcgtttccttagaaaacgctggaaagatattctttaacgagacggag

SEQ ID NO: 173383 - DNA, 135 bp, Saccharomyces pastorianus
atgagacttagagatgaagtatcaggtaataatttatacgtatactacatcgagaccaagaagaacattgctgatgtgatgacaaaacctcttccgataaaaccatttaaactattaactaacaaatggattcat

SEQ ID NO: 173384 - DNA, 348 bp, Saccharomyces pastorianus
atgacgcatctagaaactaaattaaatgatacagaaatagaattgaagcacttcaagcagaaggcatctcatctagaatccaagtgtgaaaaactacatgatacattgttccgtggtaacaacaaaaataagggctcgagcgatgaagcactcgtagaagaactagcaaatttccgtacacttgtttattgttccctgtgttctaaaaattggaaaaacatggctattaaaacctgtggccatgtcttttgtgagaattgctgtaaggaacgattggcagcgagaatgagaaaatgccctacatgcaacaaagcattcagttccaatgatttattgacagtgcacttg

SEQ ID NO: 173385 - DNA, 84 bp, Saccharomyces pastorianus
tacgtacgaaagggagccaaaagcaatctgaccaatttgtatatatatatatacatccatccgaaatggaagacatcaattagt

SEQ ID NO: 173386 - DNA, 486 bp, Saccharomyces pastorianus
atggatttgttagcggccagcgtagaaagtacgttgaaaaatctgcaagataagagaaactttctttcggaacaaagagagcactatatagatatcagaagccgactggttagatttatcaatgacaatgatgatggcgaagaagaacgcgaaggccaagggatggtgtttggtgatatcataatttctacgagtaagatatatctaagtctaggctatgagtattacgttgaaaagaccaaagaggaggccatcacgtttgttgatgataaattaaaactaatggaggacgccattgagcaatttaacctgaagatcgaagaggctaaaaagaccttagacaacttgaatcacatggaggacggaaatggaattgaagaagacgaagcgaacaacgacgaagattttctgccctctatggagattagagaagaactagatgacgagggcaatgtcataagtagttccgtaacccctacaacaaag

SEQ ID NO: 173387 - DNA, 849 bp, Saccharomyces pastorianus
atgttcgatttaaggtatgttcctgatggtatgacttttgatgatgatgtaagagatgaatgcagtatattgcctaagaactataggccacaccagtttagcacagatgctctacaacattcaagcgtcaaattgacctgggatgaaacgccagctgatagggtcgaagttgctaagagggcctttacccaaaaggaaattgatgatatggactttaaggcttacttggcgtcagatagtgatgaatcggatgggcaggtcgatgaagaggcgaaaaataaactaaagtcgttggttggtgactttgggtttaattccaagaaagaaacccctaacgatgaagatgaagaagttgatatggaaattacatttactccagccttggaaggaggaaacgagaaatcgtcggaagacaaagaagaaacgactatagagaaaataagaagaaaagagaaggaacgtcgtaaagcaagaaagcagaaagtaaaggaattgaaacagcagtcggagaaggataagaaaagcaagttgaaatctgttaataaaaagcatactaacgatgaagaggagatcgaaaagaatgccaaatcaaaggctgaattggagcttttaatggatgatgatgatgataccgaaactcagggcacaataaataacaaagcacatttcaacatgaacgaaatcttaagatcagaaaaagaaaaacacaagaaaggccggtatcaaaagaaagagagaattgttgaagacacctttacacctgatttagaagatcctagatttaaagaagtcttcgaagatcacgattttgctatcgacccgacccagcctgaattcaaaggtacacag

SEQ ID NO: 173388 - DNA, 147 bp, Saccharomyces pastorianus
acggatgctacagtatataccactctcaaacttaccctactctcacattccactccatcacccatctctcaccatcagtaccaaatgcactcgcatcattatgcacggcacttgcctcagcggtctataccctgtgccatttacgca

SEQ ID NO: 173389 - DNA, 435 bp, Saccharomyces pastorianus
attcttgtcggaccgggtgtcggtctagcaccattattatcagtggttaaagcggagatatctaaagatatcaaactcctcttcggttgtagatataaagataaagattatatttataaagatatgctggaagattggttccgtaagggcaaaattgccttacattcatccttttccagagatgaggaaaattcaccaggtgttaaatatgtccaagactacttatggagattaggtgaggaaataactaatttggtagttaataaagacgccgtttttttcttatgtggctcatcaggtaaaatgcctatccaagtcagattaacattcattgaaatgttaaaaaaatggggcaattttagtgatgaagaaactgccaaaaaatacctgaaagaaatggaaaaatctgatagatatatccaggaaacttggtag

SEQ ID NO: 173390 - DNA, 249 bp, Saccharomyces pastorianus
agagaatttctagattctggatctgcttgtttcacaccagatggtgaattcgtccttggaacggattatgacggtaggattgccatttggaatcattctgattcaataagtaacaaagtattaaggccgcaagggttcattccctgtgtttctcatgagacctgtcccaggtcaattgcattcaaccctaaatattcgatgtttgttaccgcagacgaaacagtagatttttacgtgtacgatgaatga

SEQ ID NO: 173391 - DNA, 1143 bp, Saccharomyces pastorianus
ttagaagatttcggagagaacgaaaatacgattatcactttggtgcctcaaactaaggatgatcttttcacaatatatcaaataattgacaaagaagacgaagttatctttaagaaattgttcacgacaaaaaaggatgaagtaaatagaaaaacaagtactgatttagtaaatctgaggctgaaaatcctctcttatgaatttgatataaaagaggaatacctgcgttataagggtgtcactgtcgctgatgatacgaataccgcgaatttggatgtcccagttggtaaatttcttagttttagcgtaacgtatgaacaccagtttactattttcaagcaccatttcaataagtatgccaagagacttttaaaggaagctctcgagttagaaaccaaatcagataccgcggcagtggtactgcaagaaggaatttctcatgtttgcttattaacagcttcttcaactatcttaaagcaaaagactgaaatttcaatgcccaaaaaaaaggatgcgactgatattaacaaattcaatgaaaagactgaaaagttctatagagcaacttataatgcaatgatgaagaatttcaactttgatgaattaaggatgattatactgtgctccccaggattctatgcaaaggctttaatggaaaaaatcttgaagtacgcagagaaagaacaaaacaattcaattttagagaaccaagagatgtttattatcgcccattgttccactggttatttacagggaattaccgaagttttaagagatcctgaatattctaccgtactgcaaaataccaaactcattaaagaaattcaaataatggatgatttctttgaacatttaaataaagacgataacaaagcgtggtacggtaaagaggaaatcaagagagccgcaaaattagaagcagtagaaacattacttattaccgataccgtactgaaaagtgacgacattgatgagcgtgagacattcttggacttgacatacaatattgaacagagcggcggaagagtatttgtattcagtactctacaaagtcatggtgaagaacttgggaggttaaaagggttggcttgtattttaaaatatccaattccagacctagacgagattcttgaaaataaataa

SEQ ID NO: 173392 - DNA, 222 bp, Saccharomyces pastorianus
tctatcatctgcataataccaaaaacggaaccgcggggcgcggagcattctttgatgttccccatagatgctctaaagactcgagtacaagctgcaggtttgaataagaccgtctcttctgggatgatatctcagatatccaagatatctaccatggaaggatcgatggccctatggaaaggtgttcaatcggtcatgctgggggcaggaccggcaaacagg

SEQ ID NO: 173393 - DNA, 357 bp, Saccharomyces pastorianus
atggatagagtgagggcagggcccgttgcaggatcttactattataaaatttgtaaacagcaaggtttacaatacgaggacgagccattatcagaaactgctaaatacttttacgaggatttgaagctaccacgtactttttcacaatggtttcaaatcactgtattgcacgagtggatactttttgtacgtatgagagccatgcctttcaaatacggcagaaactatcagcagaaattggtagatagaacattttctgacattgagctgagattattcgaggaaatgaaagttaattctggtagaatcgcagatcaatatttgacagatttcaatacgcaattaagaggagcgata

SEQ ID NO: 173394 - DNA, 372 bp, Saccharomyces pastorianus
atggatgttaagtcgagtatatgtcaatattccatagaatatagattatcaccagagatcacaaatcccaggaatctatatgatgtagtgacaaatattacaagattggttgaagagaaaggattgacaaaccttaatttggtgggacactctgtcggagcaacatttatatggcagattttgtctgttctcaaagatgctcgggaagagatgaacgaagttcaattacaaatgctgaaacttttgcaggtggttaaaagagtatttttgttggatggcagatactcaataaaggaactgttggaagagtaccctcagtataacagtttcacgaagttagcctcgcctgaaggcatacatttgtatgagaag

SEQ ID NO: 173395 - DNA, 537 bp, Saccharomyces pastorianus
  modified_base (139)..(167): a, c, g, t, unknown, or other
aacgggccaccaacgaaaatgagagactcggctaatagcgctcagaattatttagattccccaaaagtacagaagtcattgggatcttttttctttgcaatcgatagggatattgaaaaagttgacacattttataatnnnnnnnnnnnnnnnnnnnnnnnnnnnnntgaaaggttacttttgtctaaccaatttaatgaaataaaactgacttcagaggacaatgtcaatgccgaagatggggtagcacaaaccttactcgcaaaggatacatgtgagattgatcaacttttaaaaggagccggccaagctaatcgcacaccttaccacaaagatgatttgatagagattcagtctattctcgctgacttgacgaagcaattcaggaatttgaaatggtatgcagaactgaataaaagggcttttatcaagattgtaaagaaattagacaagaaagttggcaccaatcaacaaagtcatctttggaaactagatcttaccattacaattgtgatgatgcctataataaagatcgac

SEQ ID NO: 173396 - DNA, 111 bp, Saccharomyces pastorianus
ttcatgaaaaatagaatcaaagatggtagagaaataatggcagtaggtgaagccgcccacggatgtgataatgcgttatacaccagtgaatttagatacgaaatcagcgag

SEQ ID NO: 173397 - DNA, 486 bp, Saccharomyces pastorianus
gaaatgacagattttaacccaaccatagcttacgtatggtttcattactatatcgtgctaatttcctataataaacctttcatatacgaaatcaaacaaagccgggaattggttgaaggttatgttgatgaactgtattatcttttaaaagtttggaaaaataaatttaagacgtttgagaaggccacaatttacatgatttattctgcgattttagccatccaatgcatgaagtccaacttgattaaaaaggatagaaaacaagacttcttaaattttttaagtgcgcctaccctgaattacgaacttgctagaaaattcatagaaaactctgaagatgctttgcataattcagaaactatggatttattagggactctatctcacggtaacgattttgccttagagtacaattttgactttactttattgaatgagattgatatgctgattggtggaaacaccaatgatggtttgtcgaagtaa

SEQ ID NO: 173398 - DNA, 162 bp, Saccharomyces pastorianus
atgtctgctacactacaagctgaaaaattcagtgagtttttcaataatgcaccaattttgtttgtggaaggtagaaaatttgatgtttcacaatactacttgaaggcaccaacggacgatatagtagatgctggttgttgcatacaaataaaccagggtgac

SEQ ID NO: 173399 - DNA, 1938 bp, Saccharomyces pastorianus
gaacgcgaaggtgaaagaaactaccttatgcaagtcgtctgtgaagccactcaagctgaagatatagaagtccaagcagctgcctttggttgtttgtgtaaaatcatgtcactatactatacatttatgaaaccttacatggagcaagccctatatgcattgaccatagctacaatgaaatctccaaatgataaagtagcttccatgactgtggaattctggtccactatttgtgaagaagaaatcgatattgcctatgagctcgctcaatttcctcaatctcctttacagagttataatttcgctctcgcttctattaaagatgttgtccccaatttgttgaaccttctaacgagacaaaatgaagatccagaagatgacgattggaatgtttccatgtccgcaggtgcatgcttgcagttgtttgcccaaaactgtggcaatcatatcttagaacctgtattggaatttgttgaacaaaatattaccgctgacaactggaggaatcgtgaagctgctgtaatggcctttggttccattatggatggccctgataaggtccaaagaacctattacgttcaccaagccttaccatctattttgaatttaatgaacgatcaatccctacaagttaaggaaaccactgcttggtgtattggtagaattgctgattctgttgctgaatctatcgacccacaacagcatcttccaggtgtcgttcaagcttgtttaattgggttgcaagatcacccaaaagtggccacaaactgttcttggaccattatcaacttagtcgaacaattagcagaagccacaccatctccaatctataacttctatcccgctcttgtagatggtttgatcggtgctgcaaatagaattgataatgagttcaatgcccgtgcatccgccttttcagccttgacaacaatggttgaatacgccacggacacggtagctgaaacttccgcctccatttctacgtttgttatggacaaattagggcagacaatgagtgttgatgaaaatcaattaacgttagaagatgcgcaaagtttgcaagaattgcagtcaaatatattgactgttctagcagccgttattagaaaaagtccaagtagtgtagaaccggttgcagatatgcttatgggactgttcttcaggttgttggaaaaaaaggactctgcgtttattgaagacgatgtgttttatgctatttcagctctagctgcttctttgggtaaaggatttgagaaatacctggaaacattttctccctatttattaaaggctttaaatcaagtagattcgccagtttcaatcaccgcagtgggcttcatcgctgatatttcaaattcgttagaagaagatttcagaagatattccgatgctatgatgaatgtcttggctcaaatgatctctaatccaaatgcaaggagagagttgaaaccagccgtcttgagcgtgttcggtgatattgcttccaatataggtgctgattttattccctacttgaatgacatcatggcgttgtgtgttgctgcccaaaacacgaagccggaaaacggcacattagaagcccttgattatcaaataaaagtactagaagcagtactagatgcttatgtgggtatagtagcgggtcttcatgataaacctgaagctctgttcccttatgttggtactatattccagttcattgcacaagttgcagaagatcctcagctgtacagtgaggatgctacctcaagagcagcagtcggattgattggtgatatagcagcgatgtttccagacggctcaatcaaacaattttatggacaagactgggttattgattacattaaaagaactaggagtggccaattgttcagtcaagccacaaaagatacagcaagatgggctagagagcaacagaagcgtcaattatccttataa

SEQ ID NO: 173400 - DNA, 114 bp, Saccharomyces pastorianus
atggcagcgacaccagcagcgattgaagttaatttgaccattgtatttgttttgtttgttagtgctgatgtaatcttaacaagaaatagtgaaatgaaagcgcatacctcaaag

SEQ ID NO: 173401 - DNA, 1932 bp, Saccharomyces pastorianus
agtaatgttgatgctggcgacgcgaatgaattcaggaaaacgataaagtccgttacgacaaattccaatccaaacctgatgaggcaagacaaagatcagtatacgattttcttggagaaaaaactaaaaagtttggagactttgctcgatttatcgccgggatgcaaccagtacaactacgaattatcccagtacaagaaggtttctcatttgttcagtaacaacacttctgattactctagaccgaacagcagcaatatggtcatacttccgctgccatctccttccaacaaacccctggagaacacaaacaataacggcagcaacgttaatgcggccactaacgatacatcggccagtacgaacaacataaacaacaataatgctatctgccaatccgcgaaccttttgaatgaccctttagagacgctggacttcactaagtgtattttggccaaatacaatttgaaaaaagagtttttgatgtatgaccctatttttgaactgaatgagaagctgtcacattccttcttggacacttttttcacaagattacaattcaagtaccctatcttagacgaacaagaaatctatactttttatgaccactacctccacaacaagattcttatcccgccatcttctcccgccacgtcttccgcagcaccaccgtcgaattcacattcgtactctgaaatagaatttcattttctatccggcagaatgtggcttgtcttcagcatcagcgcctacttactgatgaccacaggtaagtacaaggggtttccacctcaccgatatttctccaccgctatccgtcacatcactaagtgtggtttacatttgaattatgttcagcaaatagaactgttgacattgcttgtcctttacattattaggactgatagagattctctgatactatatgacataatcaaggatgtcatgggcatatccaagaagaaacttcatctaaatcaatggtatcctaatgatccatttgcaaataagaaactgcgactattttggtgtgtttacctcttggaaagaatgatttgtgttgctgtggggaaaccttatacaatcaaggagtcggaaataaatttacctcttttcaataacgactctttttatacaaaaggtgtgcatgcggcggctccatcaaccaatgaccatggtgtgcaattcatcaatcagtctctaaagctgcgaagaattgaatctcaatttgtagagactttgcagctattgaaaaacgattctaggtcagtgaagcaatccattgatcaattgcccctagtacgaaagttttttgaagatttggaagtttggagaaaaagttattccactcttgacgtgaaaaatttcgaaaacgagacactaaaactttattactatagatcagtgcgattgcttatacagccatatttggaatttttcgccccggaggatagactatttagagaatgtcaagctgctgcgggtcaaatttgtcagttatacaagatattccatcaaaaaacgcttaatggtcattctacaccagcagtacatacggtttttgtagctggcgtaactttaatctactgtatgtggttagccaggaattttgacgatcaaaggaggaagaaattaggcgatgcttcgaagcatactagacctttaatcagtgcaagtctcttttcgacgatggatgatttgagagcttgctccgtttgtttatatgttatgacagaaaggtctaattttgcaagaacctttagagatactttcgatcagttaatgaatgccacggtaggtaatttgattgaaagatgtggtccagactcttcagagttaattttcatggctagtagtgtcgccaagcgtactgaacccaagaacatcaatgatgaggccataaggcatttcatctgggggtactcttcatga

SEQ ID NO: 173402 - DNA, 177 bp, Saccharomyces pastorianus
atcatcatccttgataactccccagcttcttacatcttccaccctcaacatgcaataccaatatcgtcctggttttcagatacccatgataacgaactattagatattattcctcttttagaagacctttcagtgaaaacttcattagacgtaggcaaaattctggatgtaacaata
